United States Patent Application Publication US 2020/0377945 A1 - sequence listing, part 35

SEQ ID NO: 6393 - DNA, 68492 bp, Unknown
  gut microbiota DNA sequence
caaaccaaccacgatccttatcgagtgacaaccagacaacaattggcttacctacaacatggtcttccggcacgaaaccccacgaacgggcatcggctgagttgtggcggttatcgcccatcatccagtaataatccattttgaaggtatattcgtccgtcttcttgccattaatatagatgccgtcttcttttacttccagtgtattaccttcataagctctgatagggcgttcgtagatcggcagattgtcctcagtcagcttgatggtggcaccttttttcggtatccagatcgggccgtagttgttgcggtcccatttggtgtaaaggttcaacggatacatttggccggagaatatttccggttccataacgatgctgctgacgagtttcttattggcagacagggtttcatacattttcttcgtcagtggtaagtcataggccggagccaggcgaccttgtgcgtcacggtgagtcaagcccatttccattaataaaccttcgttgctgattaatgtttggtcgtccttgctgatacccagttcgcggaacatatcttcagtaatgtatggtcctgtagtctgtacgaagtagttgagctgcatttcttcagggttttcgagcggtttgccatcgatatatacctgtgcatctttgatttccagtgtgtctccgggtaagccaacgcagcgctttacgtaattttcccggcggtctacggggcggacaacgatatcaccgtacatcttgggattggaacgtatcagatttcttccggcattataatacagatcgtagacagtgcgttgttgcttgcgcgtcaaactgtccatatttaccggattcggatagaggcgttgtccttcgttgtaggcaagggtgtagaaatccgtttgctggaagttagtggctacggtgtctccggcagggaagttgaatactacgatatcattccgcttcactttacccagacccggaacacgtttatagtcccattggggccactcgatgtatgattttgtattcactagcggcaaggtgtgttgtgctaatggcatagacagtggtgtgtttggcacacgcggaccataactcaacttgctgacataaagataatcgcctaccagcaaagatttctccagagaagaagaaggtatctgatagttctgaaatacatagatgttgacgaaataaacagctaccagtgcaaacacgatagcatctacccaactcataacactgcgtacagccggattctctgatttcttccagaagccccagggaattttcttgctgatgtagatgtcgaagatgaaaggtaggacaatcagccccaaccagctttttacccatatcaggaaagcgaggtaaagcacggtgacgattgcgaatttaacccattgggcgcgagtagcttttctcattattatattatttttgttgttcaccacagattttgttgttcaccacagataacacagattcacacagatttcttttaatactaaaatttaattctgttctctttcatctgtgcgaatctgtgttatctgtggtgaagcgtgtttattattttaagaacgggaacaagtcactcattcccagataaccttgcttgtcagcagtatattcggcagcaagaactgcacccagtgcaaaaccttttcgattcttggcatcgtgtgtcaggatgatgctgtctgcttccgattcgtaacggatcacatgaatgcccggtacttcaccttcgcggatggagctgacaggaatttcatctgctgcacattcggcagaaccggaaacacttccgtccggtgcctgcaaagttcccttcacccaatgatctttacggtcgatattttccagaatttcttcggcaagcgtgatggccgtaccgcttggtgcatccagtttatgaatatggtgtgtctcgctcatcgtcacgtcgtaggcaggaaactggttcataatctttgccagatacttattcacggcagagaagatggtcacacccaagctgaaattggatgcccagaacagcgttttacctccttgggtacaaagtttcttgatttcctcaccgtgtttgtccatccatccggtactgccagaaaccaacttcactccggcttcgaaggtttttatataattggagtaggctaccatcggatttgtgaattctatggcaacgtctgcgctcttgaaagcgtccgagttaaaatcctcctggttgtttacgtcgatgatgctgacaatctcgtgtccgcgactgagggcaatcttttcgatttccttacccattttaccgtaaccgattaatgctattttcattctttcttctgattaaattcactttatcaacgttctataggtcgcaaagataatctttttcttacatttgttgcgtacattaacttcttgttaacaatggaactactattgcattatgtctggaagcataaaatctttccgttaaaggtgctccagaccaccaccggcgaaccggttgaagtgatagatgccggactaccgaacacaaacgcaggccccgacttcttcaatgccaaactaaaaattggtggtaccctttgggtgggaaacatcgaagtgcatacgttggcatccgattggatgaggcatggtcacgataaagatgcagcttatgacaatgtcattctgcacgtagcggaaactgtagattgcgaagtgtttcgtgcaaacggagcaccggtgccacaactgcaactatcctgtcctgaatctgttcgtcagcgttatgatgaactgagtcatgcggaaatctatcctccttgttattccatattgtcttttcttccgaaactaacagtccattcctggctttccgctttgcaggtagaacgtttcgagcagaaagcccatgtgattgccgtccggttggagcgatgcaataatcattgggaagatgtattctttatcaccttggcccgcaactttggtttcgggctgaatggggatgcctttgaagcatgggccagtcgtctgccttttcgtgcgatagataagcaccgggataatctctttcaagtagaagccttctttttggggcaagccgggttgttggatgaagaactgccggatgcagacgggtattatctgaagttgcagaaggaatttcgctacttgcagcataagtttgaactgcctgttccgatggctgctactcaatggcgctttcttcgcttacgtccaggtaatttccctcatgtccgcttggcgcagttggcaaatctttattataaagagcagtccttattctcccgtattatggaagcggatacgctggaagctgtccggaaactactgactgtcgctacctctccgtattgggaagagcatttcaatttccggaaagtctcttcctcctgtgaaaagcaagtgggaaagaatgctcagaacctgattgttattaatactgtcatcccttttttatatgcatatggcctgcataaggcgaatgaagagctttgcgaacgggctacgggctttctagaaagtctgaaagcggaggataatcatatcatccgccactggagtggggcaggactacctgtatctactgctgctgattcgcaggctttgttgcagcttcagaaagagtattgcgataagaaagactgcttacgctgtcgttttgggtttgagtatctaaggcagaaatgaaacatatgatgaagggttacatgataagggtgcaggatctatatatcggatatgttgcatctatatatcggacgcgttgcatctatatatcggtcatgctgcatctatagatgggacatgttgcatctatagatccaacatcaccgtataatattctttttcctttttatctcaaatctgcggatttgcattatctttgcgcctgattaataaaccctttgacattgtaactaaatgaaggcaattcactttgtattttgtcttttcgtggtacttatgctgacgactacgaatggtcatgctgccgcaactaatgaggacttccagacattcctcaagaaatttacttccagtgcttctttccagtattcccgtatcaagtttccgttgaaaactcccatagccttgttagaggaagatggtgagacggagaagacttttccgtttacacgtgataagtgggcgttgctgggtgaagatgcgtttaaagaagaacgtatcacagacgaagagggcggagtttatgtctcccggtttaccgtgaacaaccccaagcataaagagtttgaggctggctatgatgagtcggaagcttcccttcgcgtagtgttcgaactgattgacgggaagtggtacgttaccgattgctatactgactggtataatttcgatcttcctatcagtgaactgccggaaaccatcactacgatagaagaggagaataaagcgtttgaggagatgcatccttaaattactaaaatataccttttctgtacgatttatgtgtcattttctctaaaaagtaccgtttctttgcaatgtggaaatattgtaaacgaaactaataccggaaatgacacattcatctttcatacaaattctgtggaaatgtctttttcttttcctgtcctgtaccgtattggcacaggatcggctctcattgggccattggatagccgaagaccagtcgggaataatggacttcaccattcgtgaagatactcttgaattgattgtccccgaaggacttactttatggtataaagatcgcctgaccggcgattacgagatcagttaccatatctgtatggtaatgaatggcggtaaacacgaccgtctgagtgatatgaactgcttctgggctgcaaacgacccgaaacatcccggcaaactcttggcccgttccacttggcgaaacggtgtcttccgcaactataatacattgaaccttttttatgtaggctatggtggtaatgataataccactacccgttttcgtcgttactacggtcagttttatgatgtagacgaggcccgtatcaaacctctgattaaagaatataccgacccggctcatctgttgaaacctaatcaatggtattatattcagatccgcgttcaggacaattgcacaacttttcttgtagatggtgaggaacttttccgtctgcctctcgaagccggtgcaggcgatggacattttggcttacgccttcttcaaaatcatgtctgcttcacgaatttccgtatcgaacacttgaattaactctattaatattctcataccatgatgacgaaacttaatctgatgaatcctattcttgccgctgtatgcactgcactgttttctttcagcctgtcggcacaggttgtaaagaatgaccggttactctcttttgaacaacctgaacttcctgccgggctgagcgctacgaaggccacgcttggcattagcgaccaacattataaagacggtacgcatagtttgcgctggacgtttgaatccggttctgtactaacccttcagcgtgatctgaagtttgagaagaaagaccctaccggaaaagacacttatctttccgcttttatagtttgggtgtacaatgcaaaggctcagaatactactattgagtttgaattcctgaaagatggaaagaagtgtacttcctttcctttcggtattaacttcaccggctggcgtgctgcgtgggtctgctacgagcgcgatatgcaaggcactcctgaacccgggatgaatgaactgcgtatcgttgcacctgatgtaaagggagagttgttcatagaccatttgataactgccagtaaagtggatgcccgtcagcaaacagctgatgtgcaggtgcccttcgttaataaaggaaccaccaaccattggctggtgatttatgaacactccctgtggaaaccggaaatagcccttactccggttagcgagaaagacagacaagatatgcagttgatggagaaacgtttccgcgatatgctttatactccttctaaactgacagaaaaagaaatgaaaagtatccgtaagaaatatgatttctatgggattacttataaggacggtgttgtaagcgggctgcccatttttatggtacgccaggctgaagcttacgaacgtatgtatcccaactgggacaaaggcatgttcaccaagttagggatggagatgagtgagtatttcaatctgatgcgccggatagcctatgcctataacaacgcttcggatgctgtggcaaaggatgagctgaaacagaagttcctggcgatgtacgaccacatcactgatcagggagtagcttatggcagttgttggggaaatatccatcattacggatacagtatgcgcggtttgtatgtggcctatttcctgatgaaagatgtattgagagaagccggaaagctgaacgaagcggaacgtactttgcgctggtatgccatcaccaatgaagtatatcctaaacccacggttaatggcattgatatagatactttcaatacgcagacgcaggggcgcatggcaagtatcctgattatggaagatactcctgagaaacttcaatatcttcgttctttctcccgttggatagattatggttgccgcccggcagttggattggccggttctttcaaaaaagacggtgcttgtttccatcatcgtaataactacccggcttatgcggtcggcggtctggatggtgccacgaatatgatttatctgttgagtggaacaggattcaaagtatctgaaatagcgcacgaaacagtaaagaatgtattgctcactatgcgtttctattgtaataccaagcaatgggctctttccatgtcagggcgtcatcccaatggaaagggacagttgatacctatacaatatgctactttggcattggctggcactcccgatggaaaacaaaaatacgatcctgaactggctgctgcttatctgcgtctggtttcttatacggaaactcctgataagaattctcctgattatctaccgaaagcatctactgcccatgaacagaaattgaaacaactatttgaagcacagggattccgccccgaacccgatccgcaaggtaatttggcgttagggtacggctgcgtttcagtacagcgccgggataattgggctgctgtggtacgtgggcattcccgttacctttgggcagccgaacattatctggatgctaatttcttcggtcgctacctggctcacggaggcatgcagatattgaccggaaaacccgatgagatggttacttttacaaccagtggttggcaggaagcaggcttcgactggaaccgttttcccggtacgacgactattcatttgccattcgatcagcttcgtgccaaagtgatgaatgtagatactttctcaggtatggaagaaatgctttattccgacgaggcttttgcaggcggtttgtctcaggcaaaattaaatggtaacttcggcatgaagcttcacgagcatgacaagtacaacggttcacaccgtgcccgtaaatcttatcacttcttcaatggaacgatcgtatgtctgggaacggatattgagaatacaaatgaagagttcccgacagaaactaccgttttccagttggcagccactactcccgaaatgcatgattactgggcagcttataaaagtgacggacagacctatatcgatcctaacggagtaggttattatctgtcgaaaaatacgatgaaagcggcgaaatatgaaaggaatttcccacaagttaccgtaggggaacgtaatccgaaacctacttccggtgattgggtttcattggtattagagcatggaaaagctccgaaaggtgctttctatgaatatgctgtcctgccccgtacggatgcagcttccttgaaagctttcgcaaagaaaccgtcttacaaggtattgcaacaagaccgcaatgctcatatcgttcgttctctgactgataacctgacttcatatgtgctttttgaaacaccacaggcattgcccggggagggattgctacagaaagctgatacttcctgcctcgtcatgatacgtgaagacagagataagctcttattgaccgtttcccaaccggatctggcactatatcgaggtccgagcgatgaggcttttgacaaggatggcaaacgtatggaacgcagtatctattcgcgtccctggattgataatgatagtggtgaaatacctgtaaccgttactttaaagggtgaatggaatgttgcagaaactccttattgcaaagtgatttccaaagataagcagcagactgttttgcaatttacgtgcagagatgccgccagcttcgatgtggaactgaaaaaataatgaagttaatccttaaaatagaactgtgatgaaagtaaagaatataatgttgtgtgcaacggctgtcgttccttctttggcttgggcgaaagagttgcctaatatcatctacattgttaccgatcagcagacagcctctgcgatgagttgcatgggaaacgatgacttgcatactccgaatatggataaactggcacaggcgggtgttctgttccgtaatgcctattgttctacgcccctgagtggacctgccagggcagctatgtttacaggctatacttcgcacgaagtaggacttgcccgaaatggtacgccgataccggattcattgcgtacccggactttgggaacactgatgcaaaatgccggttatgattgtatctatgccggtaaatggcatgtacatactgcctccatgccggataaagagtttggttttactactatccatcctcatagtgataatgggctggcggaagcctgtgtcggctttctggaacaaaaacataccaaacccttcttcttggtggcaggattcgataacccgcataatatttgtgagtacgcacgtagccagaatttgccttgggggaatatagaagacctgccgcagaatgagtggccgggactacctcttaattttgctaagaatccctatgacgctgatgttatcagttatgagcagagcctgaattattcggcttatcctacccgtaactatactccggatgattggcgccgttaccggaacctctattaccgtctggttgaaaaggtggatgcggaaatcggtaagattctgaatgctatagacaaacaggatttatggaagaatacagtcgtgatatttactagtgatcatggcgacggagtgggagcacaccactggaaccagaaatcggctttatatgaagaggtggtaaatatccctctgattgtaaccttaccgggaaagaagaatgccggcaaggagatgccgcaactcgtgaataatggtgtcgatttttttgcagcagtttgcgactgggcaggtatccggcttcctgaagggctgcatggtgtctctttcagatcgttggtagagaaagctgatccgtcattgaggcatcaggactatatcgtaaccgaaactactttcgataaaggtggaaatacacgtggctgggctttgcgtacctctcgctataaatatgtgttatatgacaaaggccgttaccgtgagcaactttttgatatggaaaaagaccgtggcgaaatgcggaacctcgccatcgaggagaaatacaaagagatcctgttgcaacaccgtgagtacctgcacgactggatgaagttgcatcatgtagcgcagatacgtaaagatgtacatacgattccgggcgtaaatccggaataagatgaatgattaccccaacaagctgcggactgccgcctggtaagtttccagcttgttggacttatgaatcgctttttttgcctttcggtctccgtccggcatcagatattcccagaagtttttcattttcgtcagcagttgtttgtctcccccttccagaagattgccatactgggcaaatacgtcagcatggaacaatctgagtctctcctgcatatccttttcagaaagcggatgtccctgttgatactctaaagctaaggcgggattagcaagcagtccacgacctatcatgatacctgccagtcgtggaaagcgttcgctgatagtctgtatatcttctactgtaagtaaatcaccgttataaataagcggatgacgacattcgttgtagaaggcttcaaaaccttttaaatccacttcccctttatattgttgttttcccaatcggggatgcatgatgatatgtgtcagtggcagttcattcagcaagggtagcaaagccagactttcttccgggttctcccaacccaacctcatcttgacagagaactgaaggtcggggtgattctttatggcagcagtcagcaactcccgtacctcttcgggataaggaagcattcccgaaccattgtgccgtttagccaaaagagggaaaggacatcccagatttatgtccacattcttatatcctttttcgatgaatagggcaattatcagctccattttgtccacatcgggagcaattagttgcggaataagctgtacgccacggttgttttccagagtaatttcgcgcatgtctttttttcggatttctccgtgctctacacgtacaaaaggagtataatagctctctacaccaccgaatatacgggcatgcgcttgtcggtaaatagcctcggtgtaaccttgcagcggggcaaaatgaatggggagggtactctgcatatcaattagttattcaatatttctgcaaaggtaactattttagcggaataaccatgttccataaaaccatacctgaactatacttgctccgtaccaacctcgtactttcgtcgtgtagaggtacctctgagtggagaatgtacggagcaagtacggttcagacaacttccagacatgtagtagagtaattgctacaaatattcttccgggatttttaattttgctggagactgaattctacaggttgcccatgttggcaatgaacagtgagaatggtattctctccgtctgcagtcaggattactttttcattaggtatactgattttccattttccttttaattcaagtctctttttaagaacgcggctggggttcttggtggtatatgccttttcctcaatatttaggtttggatcgcaaacgctcataatgatattcgctttgtccctcctatacataaccattgtttctgccggaataagactaagcaggctatcccgttgcgagcgataggtttcgaagacagcataggcagtgatattggttaatcggtcgtgaacgatatgtgcactatcatttcgttgtaatacttcgtatgtttgcaaagcctcatgttcttttaattccagatcggttggctgtatccatacgaggtattcatacgttccgtttttaggggcttttccatgttcaatccatgctgaagcgaaagtgccctgtgttacagcacgtgttttttcatgacgagattcttgttccttgatctgtatttgtacattaccgtctttcacgaaataatggttattgtaaccgtccctgatagaaagtaacttttcagtagtaccggaaagtttctttttgaaaccaatctctttttcttcttctccgttaatgaggatggtgctctttcccttttggaatgtactttggaagagagttgtttcggttggatattcgttattgctgttatgaatacctgttcctaaacagatcatccggttttcaaagcagaagacggatttgcgggctacgaaatccggggtgaagtttttcagttcacgttccatcagtttcgtaacaaacattccgtttttcccttccagtgaactactgcctgagaaattctctttggaatgtgccatggtagttcccggtagcgggctatccagtaattcgaatggtaagtggatggtcgtagttcccggtaggcgattccaatcccaaccgttctcatcgtaaccgctggcaaggcgtgaggggtatcccataatctggacggaaccataactctgataacgtccgtagcggttatctttccggtaaatttcagatccccagacgtcagtggtatatccttttaaggttaccatccaatcgcttcttcggaaaatacctgctgctccatagttatatacaaagaatccttgtggggcagaggcgggagtaatgccttgcgttttgaagtaacgtgcttccggcgtatccttttcacaaagccgtagatagtctgctgccaaatgatgatcaaaggtattaccttctcctgataagtctcctgacagggctagataagcaaaagctgctacatcatccgctttcatcgagccgccgaaaggatgtcgtccgctgatgccaactccccattcatatttgttggagtagttgcgcatggcaataaaggcggatttcagtacttgacgggcttcttcggtaggtttatagattgtcttattggttaaggagatgaattgccctatcatggcaaggacacctgtggtataggccggatagaaaccgccatggtggaaagtggttccgtctactttgatacctccgatagtgcccggagtgtattgaagagaagaggatatccaacgggaaagacctttcagtgcgcgtactcgttctcgctcgtcagtgaacagtagtgctgaaactgttttagccattaagagggtgtgccaactgtccagtagttcatctctgccgtattggtaaggctgacgggtttcttgcaaggcagaccagaatatgagggtggataagatattatcacggttgggagctttccagatgacgtcgcgcattaaccaggctgtagtataaattttccgtacctgatatccgtaatgatgattggttcccattccgctaccgaaggagaagccctgattgatggcgaagtcccagacggtgaagtaattctgacgggaagtttcggaatgattgtaataagcatcgtaagcgaatccggagagcattgtttccaggtcattccaggatatttctcctttggaacggtccagttcatcgggagtcaggataggggcacctgtgaatccagttccggagcgttgaatattggctttctgaaaaacattgtatgctttggaaacagcttccttcggcgctttctgaatatcgagggcattagttaatcgctgttctacggtacgcagttcgtctttttctgcttgattgagggtggaaggtaatggaatatcatacctatattgttcccattgccaaacccggcaccaatgccacaggtcacgatacgagagggagttattgtaaggcatctgtaagtcgggggtagtgcggtcgttcatctttttcacagggaaagtcaagcggtccagaaatatgcgaccttttcgttcaggggctatcagccgatagcttgctatttctttgttttgtttatctcctttcatgtgctggaagccgatccagcaagcgcgccaaccagtcgatgccaactggaaactgaaccaataagagacatctccttggggggaaaggaattcaaaacaaatggaatcttgttgagggacttcattataaatccataaggttattccgtatgaattttccattcgctcatcaagggtgagaggctgttcaagagcaacgttgagcttggaaccggaacggaaatcccatttcagactctgtttcccttctttataatactgagtagataaagttatctttcccttatcacttgtttgaaactgcttgggaatcccagtctcaaaacctatcagttgggcaaaggatacttgaccgcatagcagcgcaaggatgaatagcaagtgttttctggtcataaggcatattgtttttaagtttttaaaaagagggagaggaacctcacggtcactctccccatacatatcaaattgattaaggtctatttgatttcattttaaggttagaagttatgcgtaactaaatgattattcccaatatttgttttgttttagcttagtattcacacccagttctttggtggggataggaagaaactggtgcttttccgatgttctttgagcgtaggtagctgcaccgatgaaattagtaccggtagcccaacgagagtcttttgtagcagcacctaaatcatcgtggatcgctttctcgtaaattccccatcgtaccaagtcatatttacgtaaagattcaaaacataattcacgggcacgttcgtcacgtacagcttgctgaaaatcgctataagataaattcttcagaggatcgattccggcacgttcgcgtacttcattaatagcttcgtaggccgatgttgtaggaccttggttggcttcgttttcagcttcagcaagcattaacagtacatctgcataacgtaatagtgggtaattctcaggggtatagtttttgtgctttgttgcagcactttcccattcacgacggaattttccacaggaccgttgtacgatttgctttgcagtccattctaccttttcttctttggcattgatttggtaaggtgcgatagagagatcgcgacgcttgtctttttcgtcaaatagatcccaaagtattagtgtgggggcgtagaaaccgtaggcatatccattacctggatttgcagtacctttctggatattacctattacattgccaatgcgtccagctgtgtagctaccatcatcgcgtgtacctataaattcggcttcccagatagattcattatattctgtatcataagtatctgaagccattgctttccacatggtataaacatcaggattcaagtgatgcttatttgaatttttaacttgggttgcccagtaagctgctttttcgaagtaggcttttccatcactggaaatttttccgtcaaatggataacaagcacgccacaagtaaacgcgggcaagtacgcccataactgaattcttcttaacatatgacggagataaatcatagtttgtattatctaccatatctacgcaatcttccatttcctggataatccaatccaaagcttcaacatgcgaagttgcttctttggatgaattgtttacgtccttgaatgattctggacgaagaggaacttcgtaccatccttgaactaataagaagtggtagtatgcacgaagaaatttggcttcacctttgattcgggtttttatagcatcttccatgtcagcaccatctacattctctattagcatattggcattattaatccctttatatagagtttcccatgccccccagatatattgttcgctagggctatgatcattaccatatacgtagctggctgtttggccttcagggcgttggtagtagctcagatcatctacattggaaatcatacatgagtaatagttaccataagtttgttcgtaaactagtgtgtaataaactccggccaaagccattgtacattccgattcgtttgtatagaacgtttgtggggcaacaaaatcataaggtttcgtatctaaaaagctatcgcaggaactgatggccattgtggcacatagggcgaggctgatatttctcaagcttttatatattgttttcatattctgttttttattaattagaatgttacatttaatcccacagacatattgaatgaacgtggataaggtgaccagtcgaatcctggggtcaaaatagaattacgagttgacacttcagggtcattaccagaatatccagtgattgttgctatattttctgctgacacataaagacgtgcactactgatatgaagcggtcttaatgtcttaggcaggaaattgtatcctaaagagatagttttcagtttcaggaatgaaccatcttctacatatagtgaactgtattctgcagcaccatttgcttttgcacgtggaatattactagttggattatcttcagtccagcggttaacgtatcctgcaaacatattggtgttctttttacctccaggattttcgaatacaaggcggttggcattcagaatgtcgttgccatagctccattgcaggaagatattcagatcccagtttttgtaggtgaagttattgctgaaaccaccaatatgtttaggctgtccattaccgattgtcgttttatctttgtcagtaattgtaccactattatccagatctttgtatttcggatcgcctggttgagtattggctacgtaataaggaataccttctttaagagtataaaccttttttccattttcttcagtaatattgaaatcctcatatttataagttccttcatagatgaaaccatacattttgcctgctgcttcaccctttttgctaatgtatgcaggtgtggtacgatatttattatcccaagtaatgtagctagtaatatcttcctgacctgagttcagagaaataatcttgttcttattgaacgcgatattaaagttggatgtccagttaaaatctttggttttaacgtttgttgtttccaatgtaagttcaaaaccgttattgcgcaatttacctacatttagggtggctgttgcaaagccggaactagctgcaatattagcatcaagtagtaaatcttttgtggttttgatataataatccatcgtaagattaatacgtccgtttaggaaacctaaatcaataccgaagtctaactgttctgttgtctcccattttaatttctcattttccatactacttagtacatatccttgattgaactgtccgttccagggatatttatatacatcatcactggtaacaaggtgagccatatattcataattaccaatacggttgttacctgtttgtccataactgaaacgtaatttaccatttgatagccagtttacatctgacataaaagcttcacgttggaatgcccaggccaatgaaccagaaggaaagtaaccccagcgattattttttgcaaatttggaagaaccgtcagcacgcatagtggcagttacataatagcgagagtcatagttgtagttgatacgtccgaagtaggacatcaatgtattttctccctttgatgatgttacagaaggagtagatgaacctttgtccaaacctgccattccataggaatctttagctatatgttctgctgtaatggaatagatgtagcttgtattcttctggaaagaaagacctgccagtgcattaaagttatgcttgtttttattgaactgataggtaagagtattttcgttcagataacttcttgcttctgatttgtacagataagcattaatacctttactttgtgtatttgaaggatgtgagttacccgtacgagtcattgaactgttgaattcttcattcgtatagtctcttgaagtgtatccggcagcaattttcagtttcaatcctttgatgaattcgtaatccgcactaacattgaattgtaaattgttagtggttttgtgacgatattcattacgtgcagaatgtactgggttaaaacggtagtcttctgtcatattgacaccttcatcatacatctggtttaacatgtctgatccggtaggtgatacgggacgaaatgcccatacactatacatgtaggctgtagacatggctgtcgtagcggttgaggcagtaggaccatcttgtacattactggcatagttacctgtgaaatcaactttcaatctcttatttactttttggctcaggtttacacgtccttgataacgttttaagccagatctgatgatgataccttgctgatcggtataagataatgaagtagaatatttaagatcgccctgtgaacctgtcatagaaacatgatgattatgacttaacgctgtacgataaatatagtcttgccaatcatatgttggagcatatctataatcttcgagagaaccataaaggtcagtaatatagttactttcaaaatctgcatcatcaagaagttcgcgttgcaattgaacaaactcatatgcattcatcatatctgcagtgtttttcacctgacctactgtcatgctaccattataagtgattgtaggtttacctgcgccaccttttttggtggtaataataacaacaccatttgcaccgcgtgcgccatagatagcagttgcagatgcatcttttaaaatatcaatagattcgatatcgttttggttaagtgcactcatggtagatgtttcttgagggaatccgtcaactacataaagaggtgcggtacttcctgttaatgagccggctccacgaataacaatgttgaaattgtcgcctaaaccaccatcagaggatgaaacttgtacacctgcaatacgaccacctaaactttcggcaatgttggtgacaggagctttaactagatcgctcatattagccgatccaatagaacctgtcaagtcgcgtcttctaacgtcaccatacccaacagctacaacaacaacttcatccaatgcttgagcatcttcctgtaatgtaacatcgaattttctttgatttccgacttttacatctaaagttttatatccgataaaagaaaattgtaagacatcagagttttttacgttacctaacttaaactcaccatttacgtcggtagtagttccattagtagttcctttcacaacgacgctgactccgggaagttctcccatggcatcaacaactttacctgtaacttgacttcctgtctgtgcctgtacgcctaatacgcagcaaagaaaagttgccaatagcattaaggttactttctgtttcataaatattaaattaattagtttttaaaaaaggttgttctttctcgttaaacgactcgaatcacaacgcaaatgtatgtgattgaatagaagtcgactttagttaatagttcgcaaaaagtacgaatttgtacattcttgataaagaacccctgttctgtacgattccttactttgtaccctggttcttcccggcctttacctgctccagtagtgttgaaagctcttttaccatctccggatgtgctgctgcaacgttatttttctccgacggatctatggaaatattgtacagttgaggtttgggatcattccctaactccattttagtccaatgttcgacagcgggtttatcacttggctcgatgtacttccatgttccttgaataatcgataaagtattgttcaaattctgctgtactacatagtcgcatccggtattatctttccctaagaaagtggctaattgatcacggctgtcaggcgcaacggttgcgggtgtaagcgggtgattcaacaacgcagccaaagaagcatatacatcaatcatagagaataaagcttgctgtttacaaggctgaataccggcaggccaacgtacaatgaatggaatacgtgttccggcttcataggcactgtactttccaccacggtattgtttcataggagtgtgaccgttcagtagttcaagagcctgatcttgatagccgtcgtcaatgacagggccgttatcgctacagaatacaaagatggtgttatccgcaaggttcagactgtccagagtgttcataatctcgcccacagtccagtccagttgcaggattacatcaccacgggttcccataccgctctttccggcgaaacgggcgtgggggacgcgtggaacatgtacatcttgcgtacccatgtacataaagaaaggttcgtctttatgcttgataataaaatcttttgctttacctgtgatgacatctgcaatgtcctcatccacccaaagagcagatttaccaccggtcatccaaccgatacggggaataccatttacaatcgtattgttatgtccttgactgggtttcagttttacaagttccggattctccaatccggtaggccagtcacccactttgtggttatagttgacggtaatgggatcgttaggatccaaacctactacatgtccgttctcaacgaatacacaaggtacacggtcaactgtggcgggaatgatgtattcgtaatcaaatcctatatcttgagtattaggctttatcagatgattgaagtccgtaccacctttggggccgagtcctagatgccattttcctacggcgccggtagcatagccttctgccttgaacatatcagccatggtgacacaggctgtgtcgataattagctcagagttacccggagcgattcccgtgttttcctgcctccaaggatacatacctgtcaacagaccgaagcgggaaggagtactggtagaggaagtagcataggcattggtaaactgtacaccttgtccggcaagacggtcgatattaggagtacttatcttggtagcgccatagcaactcaaatcgccgatacccaaatcgtcggcaattaagtatatcacattaggtttctgacgggtgttgtcagtggtttcctttttcgatggatttccacatccagctatcagggctgcgcccgggaggagagaccataaaggtgaaaaatgtttcatagctctttgactttagattgttatttctgaggtcaaaggtaatggctttcgggaaattctgtgtatagtagagtacaagtgaaggggaaaaacgtacaaaacacgtatcgagtgtatgtttggtactttgccggcctcttgcctgttaagtggcaagaggcggttcttcttcgttcttttcatcggagtccatattttctcctttacggtatgccagcggactgatctggtatacgtccttgaaacactttgagaagtagcgtgaagaactgaaacctattttgtccgatatctcggtaatgtttagttccgggttgttccgcaacatcaaggcgccttttttcaggcggatggtcaggatgaagtcattcggtgtttgcccggtgatagctttcagtttagtgaacaggttggtacgtgccatagccatttcacgggcgaagatattgacattaaattccgtattatccagattcttttcgatgatgctgatggcgcggtccaggatttccttgtctatcgggttggtggcaagcatctgtgcataagcttgtggttgtttactgaacttttcttggaggagaatgcgtgaatttaccaggttgttacaacgcgaaatcaacagattcgtgttgaatggtttggtgatgtaatcgtccgcaccgatacgcagtccttcaatgttttgttctacggcagtccgtgcggtaagcagtactaccggtatgtggcaagtattaaaatcattttttatctgtttgcagagttcggtaccggacattttgggcataacgacgtcgcttaccacaatattcggcatttccttctgtatcagctccagaccttcttcgccgtctgcggctgtcagcacttgatagaatgggcggaagatgtttgccaacatctcacaaatggaggcattgtcttccacgataaccatcttgacatcgggcatgcgcttaatcggggcattttcttccaattcagctttgagtgaagcatcgatttcagaaatttgcggttgttctatttgctgtacgtcttcgctctttttgctgatttcctcagtattgaaatgggcgttgcccaggtgaaggcggacgatgaaactgctgcccttgcccagttcgctttctaccttgatggtgccgtggtgcagttcgacgatacctttcgtcagagccagaccgatgccggtgcctacaccggtggtgagactgtccatctgctctgtctgatagaaacggtcgaatatcttatctacttctttggcatcgataccgctaccagtatcagtcacgcgaattacggcttcattgccttcggtggtgatgctgagtgtgatggtatcttcggcttgggtatgcttgatggcattggatagcaggttattgactaccttctgcatttgcttctggtcataccatacttcaagactttcacagtctttctcaaaattgaaattgatctgtttgctgcttgcatattccatgaagatgaggtaattctcataaaggaaatgcactatgttgtgcggactgacttttaccttcatgtgcccttgttcctgtttgcggaagtctaggagttcggtgatcagttcgcgcagttggatgctgttctggtaaatgctcagtatcttattataaatggtgggtgtgaagttttgcaattgcatcagagtttccacctgcgatacgatgagtgtaagcggcgtgcggaactcgtgcgagatgttggtgaagaagcgtagtttcgattggttcagcgcttccacgtcttgtatatgcttctgttcgtacttcaacgattcacgcagcttaattctcgatttgtatgtcttcaccagataccacaaaaggataccggtcactatcagataaataagataggcgagcggagtcttataataaggtggcagtacatgaatcgtaagatgcacctgcggacagatggactcttcttttcctttaggtttaatcagcagattgtatgttccggcattcaggttcgtgtaggtgatgataggttggccgcgcgtgctgttccagtcttcggagaagccttccagcttgtaaatgatttcattcttattggctgccacgtagttggaggtggcgaattcgatgctgaacatggtttggttagcattcagggtgatttcctgtgtatggcatagggattgcgtcaaaatgcccgtttcatcgctcacttttacttcggcgccgtttacgatgaggcgggaaaggatgatcttgtaaggcttcggggtgaaattaagttccagttcattgaatgagagcataccttgcgtaccgccaaggaagatttctccgtcgcgtgtcacacaaagggcgttttcattgacagctgtcagtgggaaaccattctccacgctgtagttctgaaacttttccactttctgatcgaagatggagaagccctgattggtaatcagtatcagtttaccgctgacgggagattcttgtgtgtcgtaaatgcaatcactgacaagtccgttcttgcccttgtcgaagttttcgaaatcgttggtagcggaacggtacaggtcgaggccacttcccgaagtagagaaccacaagttacccttactgtcctgcatgatgttattcacattattgttgctgaggctgtgtgcctgcgttccgtcgtgacggtagttggtcaacttgttcgtatcgaagcggtaggagaagataccttcgcctgtggcggcaatccagagcgtaccgttattatctacctctacatctgcaaccatagctattttacgcccttctttgctatctttaaagagctgttgacattttccggtctgaggattgaacaggcatacaccgttttgggtagcgacaatcaattggtcctgatagggggcaatgtcacgaacgatattggacggaagagtttccggatttccttcttccataagataatgcgtgaatgtacctgtgcggatatccagtttgttcagtccgccaaggtgggttcctatccagatgatttcctttgcgggatcataataaagggctttcacgttactgtgggagatgctgttgcgtccttgtccggcaagataccacttgaactcacgtgtccggcggttgtagaagttcagtccgcctccttccgtgccaatccacagatttccgttcttatcttcaatggtgcgtccgactacgggactgcttaatccttctttttcatggatggaagctttgtatcgggtatagatttcatattcagggttgaagtaattaacaccgccgaagtaagtacccagccataaagtaccttgattgtcttttacgatgcaccagatggacgagtgtgtaagtccttcattctgcatctcgttggaggtatggttctggaaaagtcctgtcgttttattgtaccggttcagaccgttgaaggttcctatccagatattgccaagattatcctcgcagcaggatctgacaaaatcggaagatatgctatgcgggttcttcgggtcgtttcgcaggttctcgatatttccgtctgttttcactcggaagagtcccttttcccagcttccgatccacagttcgcctgcattatcctggtaaatactggtgatatttcctttctcgatggggtgagttagcagatgtttgtctattttcagattgaacacaccttcgctggtggttcctatccacatgtgtcctttgtcttcgaacatgcaggatatttcgatgttttctcctgccatctggtagtaaagatcaaagttatcggtttgctcattatagcggtatatttcattctttttcccgatgaaaaggccgtttttataatatatgctattgatgtttccttgcaggagggtggtgaagcgttgggtagtcaggtcgaactgggcaacaccttcggtacagagcaggtagatttttccgttctggtcgcctgccatgcggagcacggtgttacagaaaaggctgtaaggatcgtttttgttcagtttgtaagtctgtatatcgtttccattgtaacggttcaaaccttcgcgcgtagcaatccataaaataccattttcatcaatatacaaactgttgacactaaactgagataggccgtcgtcggtggttaaatgattgaaagtgatattctggctgtgtacgtttgctgtaactatgcttactaaaacaagaaacagcgttctgataaacttttgcacttttcctccggtattttaaggtttcaaacacaaatataaggcgttttgctcaaaagggggatgtttattggctgttttttatggttatgtctgtcgaaatgtatatttttgggcgtttgtcggacgaattttgacttttgctttcattcggaaggtgtatatttgcataccaattttaaatctattataaaatatcatgaataacctccaatccattgtatcccatttcaatacgaagggtacagttaacgaaatccagcctttgggcagcggactgattaatgacacgtacaaagtgactactttggaagccgacgcgcccgactatgtattgcaacgtatcaaccacgctatcttccagaatgtggaaatgttgcagacaaacattgaagccgttacccggcatatccgcaagaaacttacggaacagggagcggatgatatcgaccgcaaggtactttcttttattcctgccgatacgggaaaaacgtattggtatgatggcgaaaactattggcgcatcatgactttcattcccaatgcgaagacttatgaaacggtggatgcggaatattcttattatgccggtgttgcttttggcaatttccaggcgatgcttgcggatattccggatacgctgggagagacgattcctgacttccataatatggagtttcgtctgaagcagcttcgggatgccgtggctgcggatgcggtaggtcgggtgaaagaagtgcaatattatctggatgagattgaaaagcgtgcagacgaaatgtgtaaaggtgaacgtttgtatcgtgagggtaaattgcctaaacgtgtatgccactgcgatacgaaggtgaacaatatgatgttcgatgaagaagggaaggtgctttgcgtaattgatctcgataccgtaatgcccaattttatcttttccgatttcggagacttccttcgttcagcagccaatacgggcgccgaggatgataaagacctgaataatgtgaatttcaatatggcaatctttaaggcgtttgcaaaaggctatctggagtctgcaaaagtctttttgcttccaatagagattgagaacttgccgtttgccgccgcgttgttcccctacatgcagtgtgtgcgttttctggcagattatattaatggtgatacttattataagattaaatatccggaacacaaccttgtacgtacaaaagcgcagttcaaattgcttcagagtgccgaggaatatacaccggagatgaaggagtttataaaggaatcattggtataaggtctgtttataacaggatggaaaggaataagactcaccacagattacacagattcacacagatttattaatctaataatcagtaaaatataatctgtgtcaatctgtgtaatctgtggtgaattaattcataaccgaaaagaaatgaattctttaatgcaatcaaaatatgaacaaaagaacccctgcacacttggtgttgaaatcagcagtcttgtttttatctctgctttgtttttatcccttgtctgcaactaacccccaaaagaaagaaatgaaagagttgaatgtaaagaaagtgagtctggctaatgtggcggtggagaatgttcctgccttgctggacaaagaaaaggtggattttcagtcgatcaatacggtgaactggaaagcgtttccttatcagccggaagtacaatttcgtattgcccatacagatgatgcgattttgattcattataaagtaaaggaagctagtgtgcgtgctatagcaacgggagataacggtgctgtgtgggaagatgcttgcgtagaattcttttctattcctgcgggagatggaatttattataatgtagagtgtaactgtgtggggactttgctgatcggtgcaggtggcggacgtagcaatcgcgaacatgctccacaagaagtaatggataaggtgcagcgttggtcttctctgggacgcgaatcttttgaagaacgggtaggagagtgtagctgggaattggcattagttattccttattctgctttcttcaaacatcaaatcaccagtcttgacggaaagacggttcgtgccaatttctacaaatgcggagataagttgcaaacgcctcatttcctctcatggaatcccattaatctggaaaagcctaatttccactgtcccgaatttttcggtacattgaattttgagtaactatttccagtctttcaaattatagcttgcttctaccgccttttctatatcatcgggaagggcggggaagaagtctatccctgtgatccgctccacttcatccacagtgtttacataagagtccagtggattattcccttcgttgtttttatagataaagccgatagctttcggtttcttgtgcagagaaagtatcactttaaagaaagcatccggtacagctactttatgctcacctatagtctgtggctttcggtcatagaagatagggccggctacaatgtaaagacaactgtcttttttcacccacttgcggcatttctgttccagttcgttccagtcgccccggtttagattgtggtgctggggacagatgttggtcatgtagaaactttctatcatggcttcacggtcccatttgttgtcacctgccggacaaagatgtccgcggtcccaaccactacctttatagtcttgtgtagtgacggctttacttttaggcaggtcagggtcaggacgaaagttattgattcgctcggtattttcctttaaacgttcgggagtcagtttccaagctacccagttggctatgcgggtgttggagttataggatacgaggtatccggtacgttgcagaagaatttcgggagtaccaggggtggtcgtttgcttgatgtatatatcagaattcaggggaagattctgaacgatggtttctgtttgctcagtaccagtaaccttttctttagagtttgttgtttgataagtggtaacgatgccgcatatgatcaggacaatcaggagcgtcagttgtttcttgctattcgtttgttttttcttcttctttctcataactgaatgggtaaggtggtgcaaagataacaaaaaaggcggacgagtaaacccgaccgccttccgaataaggagtattcttttattttacaatgcctttagactcgcgtacgaagttaaggatattgtgtatttcgtcactcatcggcacttggtcttcaatcttttgcaaagcatcctgtatgctgaagttaccttggtaaatcagacggtaagcatttacaatatggcgcagaatgcggtctgttacctggtgcttgtgctgtagtacaaccgcattaatgccatgataaccggccggattaccattcatgatcacataaggaggaacgtctttcgcaatgcggcatcctgactggatcaatacccagcttccgatgtggcattgttgttgcaaaatgacgttactgctcagaatggtaaagtcactgatacgacaatcgccggctacaatagtcttaagtcctaatacgcagtggttacctatctgcacatcatggcaaaggtgtacaccatccatcaggaagttctcgttgccgatacgtgtggcatctccttcatgtgtagcacggctcacaactacattttcgcgaatgtcgttctggtcgccgatgatcagcagactcttctcacccgtataatggaaatcctgcgggacggtaccgagtacggcgccatgatgcactttgttcctttgccccaagcgtgtaccgtcgaggatacgcgcaccggacatgataatacaatcatctccaatctctacatcgccttcgatatatgcaaaaggctgaaccgttacattcttgccgagctttgcggcaggatctacaaatgctaatggacttatcatagtaattagtttttagttattactttctgcctcctccgagcgcttggtacaggctgataacagcttgcatgcggtcgaaagtgtcggatacctcggaggtttgtgcactgaggtaagattgctcagcagacagaacttccagatacgttgacgtgcctaagttaaacaattcttttgtatcttccgcagctttacgggctgaatttacctgaatctcgcgagaaatggctttttcggaggtcatttggtattgatacaaggcgttgctcacttcatttccagctttcagcaaagtggtctgaaactggattttggattgctcttcctgtgctttggcctgtttcagacgggcgatattagcaccgcgatagaatagcggttgtgtcaacgatcctatggcggaagccagtaacttgcccggatttacaattgcagaacctgcactgttagtccatcctgccgaaccactcaatgtaatttgtggatagaaagctgcacgtgcgctgttagtatcgtaataacttgcagcaagagacatctcggcagcttttacatcgggacggttagataacagttgcaaaggaataccggcagagaattctgttggtaattgctggttttccaataccccacgttctatttcctgtgccggttgattcagcatcaggcaaagagcattttctgtttcacgaatactttggcgcataccgggcagagaagccagcacctgtgcgtaggcggcacgggtttgttctactccggcagaagtcgtattgtatatgcctgcgtccttcattgcttctacggtttccacattctttttaagaatatcggcagtggattctgtaatctgcaactgtcggtcgagcatcaacaatgtgtagtacatattggccacattggcaattacctgagtttgcacggcttgttcatagaactgtgtctgtttcagagatacctgtgcaccacgtttcgggttcagtatctgaccgaagaggtctatttgccagcttgctgtgacaggaagcgaataagtttgcgtagcctttcccttatcccaactgcttacagttccctgcggagacagtgcaagcgtgggagcataagccaggcgtgcagacatcagtgcagcttccgctttcttcacgttcagagcggcactgcgcaaatctggattattggcaagtgcttgttcgatgagcgcttgcaactgagggtcggtaaatacttccctccaaggcaggttaccgaagtttgcagtatccgctgccagtgtatcgttcacagctgtcgtgtcgcgatacagtccggcagccgtaatatcttcgggtctgtcgtatgatttgtagatatggcaactgcttaaaagagcagttgcacacatcagagttataatttgtttcttcataatgataaaagtatttatacctaatacttatttagtgtattgctcaatttcaggttctgcatcagaattatccacatcggcccattccatcggtttaatcttctcttgcagatattggaatgcaacgaacagagccggtacaataaagatctgaagaatcataccgattaacataccaccgatggcagaagtacccagcgtacggttaccattagcacctgcaccggatgccagcattaacggaatcaaaccgacaatcatggctagtgatgtcatcaagataggacgcagacgggctgcggcacccagtacggctgcccacgttatactcatacccatcttacgacggtcgagggcaaactcaataatcaagatggcattcttcgccaacagacccatcaacatgattaatgcgatctgcatataaatgtcgttggacatggaccccattatcatctttagcatagggatattaccgatagcgctcataccattgacaaacaagaagctgcctaacagaccgaacggaatagacaacaatacggcaagcggcaaaatgtagctttcgtactgtgcactcaacagcaaataaacaaatacgaaacagagcacaaagatcaaccctgtggtgctaccactggtttcggcctcttcacgtgccataccgcccaattcataagagaaacctgtcggcaggttttctttagctacctcagagatcgcggctagtgcctgaccggaagtgtagcctgtggcaggggctaccattactttcatggaagtataaaggttgaaacggctgatgatgtctggtccatatattttcttgatagatacaaactgagtaataggggccatttcattgccattgcgcaccttgatgcttgccagagactcaaggttcttggtcgcgtctggttctgcctgaatcattacgcggtacattttaccgaagctattgaagttggaggcatacagaccgccgaagtatccctgcatggtactgaggatatcgctcgggctgatacctgccttcttacaagcagcagcatcaatatccaacatatactgtgggaagttcgggttgaagctagtttttgcagagttgatttctggacgtgcttccaaagcagcggtatagttatttaccacctcgaagaaatggttcaagtcaccacctgttttatcctgcatattcaattcgatatcactggatgctgaatagcctggaatcataggtggagcaaagaataatacctgagcttccttgatgattttctgtgcacgcatgaaaagcgtagcatagacaattgtcgaattctgcatagtggatcgttcctcccagttctttagtttgatgatgagtgaaccgtaagaaggaccctgaccaccgatgaagctgaaacctgagattactgtgcgtgattctactgccggatcagctgctacaagactatccacacgattcagtacttccatagcgcgttcttgtgaagtgcctggaggcagtgttactactcccataatagtaccagtatcttcgttgggtaccataccggtaggtgtgatattcatgaagactataagtagaacgacagaggctgttacgataccagcagacaaccacttcttctggatgaagaaaagtacatgctttttgtatttctttacaatgttgtcgtagtgcgtattgaaagctgtgtggaagcggttgacaaatgtcgatttcttctcgccatgttcttcgtgcggttttaggaagatagcgcacaatgccgggctcagtgttaaggcgttcaatgcagagaagccgatggcaatggccatagtcagaccgaattgccggtagaatgtaccagcagtaccgcccataaagctaaccgggataaatacagacatcataaccagtgtgatggacacaatggcaccgccgagttcgtgcatggcgtcgatggaagctgaccgtgcggatttatatccctggtcaagcttggcatggacaccctcaacaacgacaatggcatcatccaccacaattgcaatggcaagcaccattgcggagagagttagcaagttgatactaaagccaatcagtttcagtacgaagaaagtagcaatcaatgctaccggaatggcgatagcaggaatcaaggtagaacgcatatcctgcaagaaaatatacaccacaatgaacacaaggataaatgcctcaatcaatgtcttgacaacttcatgaatagaggcaaacaagaaatcattggcactctgtgcaatattaatcttcaagccggaaggtaatgtttcagatgctttgttaagcacttcttccagatcgctgatggtctgtgtcgcattggtacctgccatctggtagacgatacaggaaacagccttatgcccgtttacagtattgttgaagttataagacagacgtcccaattcgatttctgcaatgtctttcaggcggagtacttcaccattttcaagtgcttttacaacgatgttctcgaactcttcgggctgttgcaaacgtcctttgtagcggatggtgtattggaaactttggtcaccacgttcaccaaactgaccgggagctgcttctatgttctgctcagccaagacaccggctacgtcgttgggtactaatttgtattgcgccatgatgtcaggtttcagccagatacgcatggagtagtcctggcccaacacgttagcgtcacctacaccgcttacacgcttcacctcaggaatgaggttgatgttggcatagttttcaaggaactcaatattatactggtcagtttcatcgtagatagagaacaccatcaacatggaagtctgacgcttctgggtggttacacccactttggtaacttcagcaggcagcagaccttgtgccatagatacgcggttttgtacgttgacggctgccatatccgggtcagtgccctgcttgaagtaaatggagatatcagcagagccactgttggaggcattagaagtcatgtacatcatattttccacaccattgatctggtcttccaggggtgcgatgacggaattcaataccgtttgggcattggcaccttgataagtggcgcgcaccgaaacggtaggaggcgcaatgtccggatattgggtgataggcagtgtagccaaaccaataagtcccaggataactatcaggatggagattaccgttgatagtaccggacggttaataaatctatctaatttcatgttaattatttagtgattagggaattagtgattagcggctacgctatgttataccgcagatgcttatcgctaaccgttaaacgttaattaaatgccgtttggatattaccttctctctggtcttttagagccttctgatattctgcttctttttcggcaggagtgatgggggtgatgctttgtccatctcttagattttgtacaccttcggtaacgattttgtcacctgccttcagaccatctgttacataataatatttaccatcgttcaagttgaatactttgatttcaatatttttcagagtgttgtctggttgcagcacaaatacgaatttcttgtcctgaatttccgttgtggccgattgaggaatcatgattatattatgcaacggattggggaatactacattaccggtacttccgctacgcagcacattgtgcttgttggggaagagggcgcgcatagttaccgaaccggtagtctgatcgataacgccgctgatggtttctacgcggccactgtcggcatacatggtcccgtcgatgagttgtaattgtacatcgggcattctttccagaatttccttgatgctaccaccctcgcggatctgagacagcagttgtctttcggtcatggagaagtaagcatacatttcagaaatatcggctacagtagtcagcgggttggcaacggaagggctaaccaaactacctacacggtaggggatattacctactacaccatcgctggggctggttacactggtatacgacagattgttcttggcgtttactaattgtgcttcagcttgtgctaattgtgcttttgtttgtgccagttgattctctgccatctgcaagtcataattgctgatgatgttctttttgtttaattcacgcttgttgtttacggtaagttcctgcgtgttcacggcagctttggctgtttcaacagcagctttggctgagttcacagcagcttgatactgtacggggtcaatgctgaacaacacttgtcccttgcgtactactgaaccttcgtctacatgcagtttggtgatgaagccgcttaccatggggcggatttctacatcttgtttacctctgatcgtagccggatagctgttcgttaagttggcagtggttgtttctactgtaatcactgcaaattcgggtgctttacccgtagttttgtcactttgtccgcaactgaacagtgacaggcaacatgccaataaaatcaatctactcttcatacttgtaattattctctgtcttttggtttattttttcatcttggtaaaaaaggctttttatgttttgtcatagttggataatacggaggacaaaggggaaaactaaaagcactcttcgggttttccggctgcaaaattatctatttttgaacagattagttctatttgcgtctatttttaactatgtttcatacatatcttatatataagtctccaatatgccattctaaccagcttttacctctccggtttctatattacagaaaggaataatattctcattacgagtgaagctatttcccattacgactgaagctagctcccactacgactgaaggtacttcccactacgactgaactcgtgtttcattgcgactgattattgtggaacacccagtgggttgtcacacaggtagttgcccgctttctcagggtcttgctgaagtatcttctctttcatcctcccgattgaacctttcctttgttttatctgtttttactgtcttcttgctcttttttgattaaaatactgtaaagcattctgtttattaagggataacctttatttttgcagcatattacgtaataaatatttagatatgaagtctcttttcaatcgtctggcaggtgttgccgttgttggtgtcgtgctttattcttgcgccagcatcggtcgtccggaaggtggtgctattgatgaaacccctccacgcttcgtaggtagtacgcctgcgccgggcgccctcaataataaccggaagaaaattacgattgaattcgatgaattcatcaagcttgagaaacccggggagaagatcgtgatttctccacctcaggtgcaacaaccggagataaaggcgaatgggaagaaggtggtaattaccttaaaggatactctcaaactgaatactacttattcgatagacttctcggatgctattcaggacaataatgaaggtaatccgttgcccgatttcgggtttactttctccacgggttccgttatcgactcgatggtggtttccggtaccgtgctgaatgcagccaatctggaaccggtgaaaggtatgctggtaggtatgcattccaatttagctgattcggcctttactacgataccctttgaacgtgtagggcgtaccgacagtcgtggacgtttcacaattcggggtgttgctccgggcgaataccgcatctacggattgcaagatgctgaccaaaacttctattatagtcagcccactgaaatgattgctttcgaagactccctgattattcctgccatggatgaacggacacgtcttgatacactttggaaagattctctgacgatagatacgatcatggagagagcttatactcatttttctccggatgacgttatattgcgctgttttaaagaacgggttttgtcgcaacgtctcatcaggagcgaacgtcccgaatcccggaaattctctttctatttctctactcaggctgacagcctgccgttgttgaagggactgaatttcgatgaaaccaacgctttcatcgtggagaagcctaccggacgcattgatacgcttcattattggataagagactctttgatctataagatggatactttgaagatgagtctcacttacctctatacggatacgctcaaccagttggtaccgcgtacagatactttgagacttgtatcgaaaattcggcctaagtccgagaaagaacttgaaaaggaacgtgagaagaaagaaaaggaactggaaaaagccaaaaagaaagcggagaaagagggtaaggagtatgtagaaccgacggtattcttacctgtagatgtatatgcaccgggtacgatggatatctatgactacatctctcttacgtttactgaaccgttggcaactgctgctgatggtgccattcatctgaaacagaaagtagacagtttgtggaatgatgtcccttacgactttgttccggactctctgaatctgatgcgctataatgtttatgcagattgggtgcccggtgaaagctatgcttttgaagtcgactcgacggctttccatggaatatatggccttttcaccgataagataaagaaagaatttaaggtgaagaaacctgaagagtatgggcaaatattctataatgtgacgggagcggattcgattgcttttgtagaattgctggacgcacaggataaagtggtacgtacagtgccggttgtcgatggtaaggcagatttctacttcctgaatcccggcaaatatagtgcgcgccttataaatgatacgaatggaaacggtgtgtgggacaccggaaaatacgaagacaaacggcaaccggagaaagtgtattactatcctcaggtgatagaactgaaagctaatttcgacttgacccaggattggaacatacatgaaaagccactggataaacagaaaccggatgaactcaaaaaacaaaaaccagatgaagacaagaaaaagagaaaccagaataaccgcagctccggcaataaccggtaagcgcggatgggtgttctgcctgttgggagcactgttacttacgatgatgtccacgcctgccaaggcacaatgtacggctcaaaataccgcatttcagtccggcgagcacgtgatgtacgatttatattttaactggaagtttatctggaagaaggtggggctggcaagtctgaccaccttctccactacttatcagtcacaacctgcctaccgcttcaacctgctttcagtaggaagtaaaaagaccgatttcttctttaagatgcgtgatacgctaacttgctacgtcagtgaaaaactggagccgctctacttccgtaaagcggccgaagagggtgaccgctatacggtggatgaagcttggttttcatataaggatggcgtatccaacgtgaaacagaggcgtatctggcacaatccggtccgcgatccgcaagagatggaatacagtgacagccgttgcatcttcgatatgttgagtatcctggcgcaggcgcgttcttacgatccggcagattataaaataggcgaccggattcttttccctatggccaccggacgtaaggtagaagaacagacgctgatttaccggggcaaagaagatgtaaaagccaataatgatacgatttatcgttgcctcgtattctcttttgtagaatataagaaaggaaaagaaaaagaagtgattactttctttatctcagatgataagaatcatctcccgattcgtctggatatgtatcttaacttcgggtcggcaaaggctttcctgaagagcgtacaaggaaatcgttatccgatgacgtcggtagtaaagaagaaatgagatagttataagctgaacggcagcggatccccttttctgaatacgctggactcgaatgtagcaatcaattttccgtcctggttcgtgatatctatctggtaatatccggtagtacgtccgatgtaccgttcgcgtgcttcggcatacagcgtgtcgcccggtccgctggcgcgcaaaaaggtgatattggaagacagggagaaagccaatgtaccatgtgaattagcagcggcggccagtgccaggtctgcaagagtgaagatggctccgccttgggtgcgatgtcctgcgttaaggtgattctccgtgataacgaggcgtgccttactatatccttcgcgtacttccagtagttctacaccggtttgttctgcaaagagatctttcttgaaaaattcttgtggagtcatgttttcaatatgattaaaaagttcaatctgtatgatttatgtgcaaatgtaacaattttgctcttttcctgtataatttaggagggtcttttctgtaaacctgcgctacttttgctgacgaaagaatacgaaactttaataaacaaatcattattatgaaaacaatcctcacgacattgggaatatccctcctagttttggcgggttgcacaagtcagaagcagaccgagagcaactttatccaagagaatattgataatgcggtggcgcaggagaccattcagaccgacattatcgaaaagtcagggaaaattctgaatccaagaactatcaacaaagacggtagcattgtttatgtacccattgatgactggtgttccggttttttccccggtaatatctggcatatgtatgagttgaccggtgataagaaatggttgctactggctgagaagtatacagaagcgctggattccgtgcaatacctgacctggcatcatgatgtgggctttatgattggttgcagctatctgaacggatatcgttttgccggtaaagaagaatacaagcctgtgattattcagacggctaagtctctttctacccgtttccgtccggcggcaggcgtacttcagtcttgggatgccgataaaggttggcaggcagaacgcggttggaaatgcccggttattatagataatatgatgaacctggaactattgttcgaagcttccaagctttcaggcgattccacttattataatgttgccgtgaagcatgccgataccaccatgaagaaccatttccgtgccaataacagctgttatcacgtagtggattatgatcccgtaaccggtgaggtacgtaagaaacaaaccgcacaggggtatgctgacgaatccgcctgggcacgcggacaggcatgggctatttacggatacaccatgtgttaccgttatacccacgatcagaagtatcttgatatggctgaaaagatctataactttatcttcaataatccgaacttgccggaagaccttgtaccgtattgggactttgatgctcccaatattccgaacgaaccccgtgacgtttcggctgctgcatgtacggcatctgctttgtatgagttgagtacatacattcccggcaaaaactataaggaaacagcagataagattatggaaaatctcggttctccggcttatcgtgcagaagtgggcacaaacggtaatttcattctgatgcactctgtaggcagtatccctcatggtgctgagattgatgttccgttgaattatgcggactattacttcttggaaggaattatgcgcaaaagagacttggaatcaaacaagaaactgttttaattcacatgctgaaactataaatgccccggcaaagtttccattcggtgtgatagcaacagtatctcaccgataaattcccatttataatttcaacgtaatttaataagaataaaatgataaatcggtttagtttgtttttgggaggcttgggcctgtttgccctgcaaggctgcaaaactcagcagggagagcaggcacaacttccgaatgtaatttatgtcttccccgaccagtaccgtaatcaggctatggagttctggggacaggatgggtttcgcgacaaggtgaacttccgcaatgatccggtgcatactcctaacttgaatagctttgcccgtgaagcgttggtgttaagttctgcccaaagtaactgtccgttgagtagtcctcatcggggtatgctgttgacggggatgtatcccaataaaagcggaatacctttgaactgtaattcaaaccggcctatcagttccctgcgtgccgacgtggattgcataggtgacgtatttaataaatccggatatgactgcgcttattttggtaagttacacgctgactttcctacaccgaacgatccgcaacgtcccggtcactatgtagaagatcgaatacctgcctgggatgcctatacgccgaaagaacgccgtcacggctttaattactggtactcctacggtacttttgatgaacataagaatccccgttactgggatacggatggaaatcgtcacgatccgaaagaatggtcaccgttgcatgagtccaagatggtggtttcttatctgaagaacgaagggaatgtacgtgatccgaagaagcctttctttataatggtgggtatgaatccgccccacagcccgtaccgttcattggatgattgtatggaagaagatttcaatctgtacaaagatcaacctctggacagccttcttatccgtcccaatgcagataagaagcgtgaaaaagcagagagcgttcgctactactttgcctctgttaccggtgtagaccgtgctttcggacagatccttgaaacactgaaagagcagggtttggataagaatacgattgtgatctttgcttccgaccatggtgaaacaatgtgtagccagttcacggatgatccgaagaattctccttattccgaatctatgaatataccgttcctggtacgttatcccggtcatatccagccgcgtgtagacaatcttctgatgtccgcgccggatattatgccgactgtcctggggctgtgtggtttgggcgattccattccgtctaatgtgcagggacgcaactgggcacctcttttcttcgatgaaaaggcggaaattgaacgtcccggtggtgctttgtatatccagaatctggacggagaaaaggatgcggatggtaaagtgcagacttatttcccttcttcaagaggatataagacggcacgctatactttggctttctatattgataagaaagaccataagctgaagaaaagcctgttgtttgatgatgaaaaggacccttatcagatgaataatcttccgttggaagaaaataaagaaatcgttgcagaactttgccgtgagatgggcaaggagttgaaggcgatagatgatccctggtataaggaacgtattctttccgacatgataccttactaaaactctcttttctaaatgaaactgcctcccccgattcgcttggatcagagggaggcagcttttttatagggtagtggagcttatttattcagcttccactcgcaaccgtctttaccgtcttttatctcaaaaccgagtgctgtaagttcattgcgaatcttatcactggtagcccagtctttattggctttggccttcatgcgctcttccagtaacatatctactactttaccgaaagcaatttcacgttcttcattggaattgttttcttctttcagtcccaaaatgtcgaagcagaagagatggaaagtttctttcagctctttcagatcatcggcagtgatggtatcgttgcctgcaatgatgttgttaatcattctggctccgtcgaaaagatgagcaatgactatcggggtattcaagtcatcattcatggcttcatagcacttctcacgcactgcttttacatctacgctggaagtggcggacggagtgatcttttccagtccgttcacggcatccatcattcgggttaatcccttttccgctgcttgcaaggcttcgttgctgaagtctaccgtactgcgatagtgagcttgcaggatgaagaagcggatggtcatcggactgtatgcttgtgtcagcaacttatgtgtgccgttgaagaactcgtccagattgatgaagttaccgtaagacttacccatcttctgtccgttgatggtaatcatattgttgtgcatccagtaatgtaccatgtcattgccctgtgatgcaaccgattgagcaatctcacattcgtggtgagggaagataaggtccatgccaccaccgtgaatatcgaaatgttcgccgaggtatttcttacccatggccgtacattcggcatgccatcccgggaaaccgtcgctccatggagagggccaacgcatgatatgctccggttgggcacatttccataaggcaaagtcggcggggttatgcttttcagcttgtccgtccagttcgcgggtggtgttcagcacgtcatccagattgcggccggagagttttccgtaatggtaatccttattgtatttctctacgtcaaagtagacagagccttcactgacataagcatagccattcttcaggatctctttcaccagctctatctgctcgatgatgtgtcccgaagcgtgcggttcgatactgggtgaaagtacgttcagcgcttccattgccttgtggtaacggttgatgtagtattgcgctacttccatcggctccaattgttccagtcgtgctttcttggctattttgtcttctccgtcgtcagcgtcatgttccagatggcctacatcggtgatgttgcggacataacgtaccttatatcccaaatgggtaaggtagcggaaaagcaagtcgaaagtaatggcaggacgtgcatgtcccaagtgcgcgtcaccgtaaacggtaggaccgcagacatacatacctacatgtggagcgtgcagtggcacgaatagctcctttttcctatctaaggtgttgtaaattgtcagttgatgttccataacgtttgagttttagttttttaaagagcacaaagttacaacaaataatttattaaacggttctgttgtcggatttaatggcttttagtacagtaatgaagaggttcttttcttatttctttccaagccggatactgagtccgaacttcaggttcagatagtttcccggcctctcttttacttcatattgctctatgatttcttgggtatacatattgcttcgctgatagtggcctgtgaacgtgcgtggatatatgacttgctccgtatcaaagccgtactttcttcggtcagaggtacctctgcatggagaacgtacggagcaggtacggcccagatacgtctcggatatggatcggataaaaaagtatctgtaaaaaggttaactttaataataatatgtatctttgccattgattatggtgtcacccgtcgctttcgtggcgggtggtgaaaagggaatcaggtgtaaatcctgaacagacccgctgctgtaagcttcaaacaaagtctgaagacgatactcacgccactgttttctgcatgaacgggaagggagtcatcagatgaagcaagtcagaagacctgccatgatctggaatcaggagttctctgggattagaaatccggtcgtacttattttttatagggttatcattgattactcttggcagaggtttgatactctctttaatacatgaaatcgaatgtatcatcgcattttattggcagtggtaatgccattagtatgctgttgcgtggatttgtatgctcaaacggtagactctacaaagacttatcatatagaagaagtctctgtatcagcgcaacgcatccgtaaagaagtgattccggtacaaatgcttgccggagaagaacttcagaaattgagtgtccattctgtggctgatgcaatccgctatttttccggaatccagataaaggattatggaggaatcggtggtttgaaaaccgtcaacatacgtggacttggcactcaacatgtgggcgtattctatgacggcgttcagttgggaaatgctcagaacggacaaatcgatctgggacgtttctcgttggataacatggaggccgtttcactctacaatggccagaagagcgctatctttcaatcggcaaaggattttgcttcagccggttccatctacatgacagctcgtcatccttcttttggcgaaggacagaactatcgcctgaaaggaactttcaaaaccggttctttcggtttggtcaatccttccgtcctgctggagcataggctgagcaagcaggtgagcggttcactgagtgctgagtatatgtacaccagcgggaaatataaattccgttaccggcagaaaaacggatatgatataacagaaacccgtaagaacggtgatgtggaggccattcgtgcagagtatggcttattcggagatatgcaagggggagaatggaaagccaaagcttatttatataattccgaacggggattgcccggtgccgctgtgcgtgagacgggtgactttgtgcatgaagaccgccaatgggatacgaacttctttttgcagggctcttttcggaaacattggggaaactacagtttacagacgaatggtaagtatgcttacgattatcttcattatctgtccgatccgcgcttggatgttactacaatgtatgtgaacaatcattaccgccagcatgaactctatttttcggcagcgaatatgctgaatattcttcctttttggagtgcggacgtttcggtggattttcagtggaataaattaaatgccgacctggtgaacttcgtctatccctgccgttacacggcacttgtggcggcagctacggcactgcattttgagcgattcaaactacaagccagtctgctggggacatttgtacacgagactacgaaggttcccaacgccgcagcgggtgataaacacaaatatacgcctaccgtcgtggcatcttggcaacctttcaagaacgaagatctgaatctgcgtgctttttacaaaaagatattccgcatgccgacgctgaatgacctttactataccttcataggaaacattgacctgaatccggaatataccacacaatatgatataggtgtaacttattcccgcaaattccgtggaggttatcctgcccggttggagtttcaggcagatgcttactataacgaggtcaccgacaagattgtagccatgcctacttctaaccagttccgttggacaatggtaaatctgggctatgtggagatgcgcggggtggatgtggctctgcaaaccgaatggcatttattgaaagacctgaaggccaacctgcgggtgaactatacgtatgagaaagcgcaggatttcaccgatgcaaaaagtgactattacggtggacagataccttatattccctggcacagcggttcggctgtccttaatttgagttatagggattgggacatgaattacagttttatctataccggcgagcgttatgaatcgagtgccaacattccggagaattatgccaaggaatggtatacgaacgacctttccctttcccgccgcttgcattggaaaaagatgttgtggaaactgaccgccgaagtcaataatgtcttcaatcagcagtacgaggtggtacaatggtatcccatgccgggaataaatttccgctttgtgataaatgtagaactttaaaaccaaatacacggcttatgaaaagaagtaaattattactgatgtggcttgcgggcatgctgatactgttggtatcctcgtgccgtagcgacgacgaagaactggtactttccagtgtgacgaatgtgacaccgggcgtacaggtgacaggtccggtcaagggatttttcctgttgaatgaggggaatatgggaagtaacaaggcttctctggactatttcgattacgcttcgggtaattactgtaagaacatttatccggaattgaatcctaccgtacaaaaagcgctgggtgatgtgggaaatgatattcagataaatggtgataaactgtttgctgtcattaatgtatcccacctggtggaggtgatggatgtcaatacagcaaggcacttggctgccatccctattcctaactgtcgctatatcgttttcaacggtcgctatgcttacgtcagttcttatgcgggtaaagtggtgattgatcccaatgccagactggggtatgtggctaaagtggatctgaattccttgcaggtggtggacacttgtgatgtcggctatcagccggaagagatggtagtggtagggaataaactctatgtagccaattccggaggttatcgtgtacccaattacgataataccgtatctgtgatagacctgaacacctttaccgaaatcaaaaaaataacggtaggcatcaaccttcatcggatggcaattgatgcgcgtggaaatatttatgtttcatcacgtggtgattattacgacatacactccaaggtatatgtcataaactctcataatgatatggtgactgatgtgctgaactttccggccagtgagttttgtctgagtggggactcgctcttctattacagtacggagtatagtaagtacaccgggcagaataccattagttatggcatttatgacacgcggaagaaacgtgtagtgactacgaacttcattacggacggtacggaaaagagtatcgaggtaccttatggattggctgtgaatcccgataccaaagagatcttcgtgaccgatgccaaaaattatgttacccccggaacactctattgcttcacgcccgagggaaaaaagaagtggagcgttacgacaggggacatccctgcgcactttgtatttacaacgaaacgattgcaagtaacattttctaatcaataaatagtatgtttaaaaatctgtatttaaaactatcgtttgtcggactgtgcctgtttgcattgggtgcctgttcggatgatgatgacgaagcggggctggttggagctcccgagtgttcgctaaactccgataccggagagtataaagtaaagataggacatgaggtgacattgcaggtgactgcggagaatgccatcaatcctgtgtatgcttggaaacgtgcaggtaagattgtgtctgagcaggaaacctatcagtttaaaggtgatcagttaggagaattctttgtgaacttccgcctggatgctgataacggaagtgtggaaaagcaagccaaaataacagtcgtagaccgtctgccgcctgaaattacggtgagtagttcggctgtgggctattgcgatgtagctctgaaggtggctgccgaaaccaaatacacggacgagagtaccacttttgagtggagctatggcggacgtgtggtaagccacgactccatctatcaatttaaagagaaggagatagatgtttatacgcttgctctgaaagtaaccaatgccgatggtgtggatgtgaagaacattaatatctcggtgataccggaagaagagccggtgttgttctttgataacggccgctatgtggaaccttccaccatacatgatgtgcgaactatgacttgtcctattggcagaagccttgtgttggcacctgtaagattctcaatcagcgatgatgcggtgtacgaatggagcgtggacgggagtgtacagagcgaaacttccattcatttcaagtttacgccttctgctgaaggccagatttatgaaataaaagtgaaggctatcgacggtggtaaaacagctgaggctacggttaaggtggagtgtactcccaaggaaggtacctatttcagagcaccgaccgcaaagagttattggatatccaatcattgctttgagttcacgcctgctccggggcagttcgttaatttctctcaggacaagactgccgaagatgcacgaatgacgatacagaatacactgaataatggtggtggaaccggttggatcgcttctcttggcgcatggggcggttattttattttgggctttgaccacagtgtagaggatgacggtaagggtgaagcagactttgatattgttggtaatccgcttggtaaatattggtgtgagtgtggtgtcgtatgggtaagccaggatgaaaacggaaacggtattgctgatgatacttggtatgaacttaaaggcagtgaaacaggaaagcccggaatcactcaacgttatgctctgaagtattatcgtcctacgcaggataagcaggatgtactttcgattgacaatgatggtaacctgactttcctgagacgaaatgcttaccatccgaatagcggttatttcccttggttcatgaaagaggaatactatatcctgacaggaacttgcttgggcgatcagtttaaaacggaaggtattgaaactaattggggctttgactggggatatgtggacaatataaatgatccgaccggattccgtattgagaacgccattcagcaggacggcagcccggctaatctgaaatacatcgactttgtgaaagttcatacggcacaaatgggacaaggagcagctgtaggtgagatttctaccgaatcttctgctgctatggacttgcgattgaaaccttgatttagtaatttaaaacaaatagaatcatgaataaatatatccttgggagcattttgttcgtattggcctgtctcacgggttgcgatgacagcaatgatccttttgagggaactgataactttatcacttcctttaccctgaaacagggagaccaatctcttgtagcctctttccggggggacaccattgtgatgaacattccggaagaagtgatactcagtgatgttaaggctcaagtggtgtgcagcgagaacgctacaatcaagccggaccctgctacagtgtataactgggaggaggaaatgttctttaccgtgacttccctttcaggccagtcacgcaaatacctctatacgcctcgcagaagcagtgtacccgaaaccggtatcatcttgctgaatacgcaggaagaattggatgctttcggtgcaaaaggtatttcgtatctggatggtagtttgattatcggacagcagttgggtacagattccattaagtctctggcagcattgtcaaccctgaagcaggtgtccggtagtatcaccattaatacccgttaccgtgggcatgaatttgccgggctggagaatctggaagagataggtggttctttccagattatttcggctgacagtttgtggaccgtggatttgaataagctgactcatatagggggtgatctggacataaagagcgcggctgtgggtgatatttcctgttcttcactgaagagtgtgggcggtaacctctcgatggaagctccttttgtctctacggaattttccgcattgcaacaggtgagcggtaacctttcgctgaaaggtaaatcatcggtagagaaaatgtctttccagtctttgaagcatgtaggaggaagtattgaagtgagtatgtcagccattcgtctggacttcagcgaactgttgtcctgcaaagacttgaatgtgaccggaaaaactcttctgttgctctattgcccgaagttacaggatatttcggggaaactcagcattgcagataacccgctgtatgaagtttctttcccggcgctgactcatttaggtgaattatcgcttagttgcccgaaagtgaatcagatgaatatgcctctgttgaaggcgatagacggtaatgccagtatttccattgccggattcaatcccgagcagttggcttcgctggaaagtattggcggaactctgagtctgacagctaccggtagcgtgaagatgccggctaaattgaagaaggtgggaaagatctctttaggttcaggtatgagtgagattgatttgcgcggtgtagaaatggaagaattactgttgcagggttcggacatgagtacaactgtcgtgaagggtgatgatgtgtttgccggaagcatagtcatgtccggtctctctccccaattccagggttttaaggaaatcggttctctaaagctcaactatcttagcaataatggtggaacaacgaatatagctggtatcaacaaaatcactggtgacttttcttattggaataattcgaatattcaggagatcattatgcccgacttgcaagaagtgggtggcatattcgacctttactctaatatcaaagagttccatttccccgaactgaaaacaattggtggagatactcggatatgtgtcaataccactgatgaacgttcgttccccaagctggaaaaggtaggtggaaatctgcttattcagacaggttatgagcaatatggcaatgtttatgaaccggttctttactatccgctactgaaaatggtgggcgggacgttgtatcttcgcccttatggttataatgaaacccagaatatgcagaacactaaactgacggacttgaacttccttgtatctctggagagtatcggtggcttcaaaatagtgaaccacaaggctctggcctcttatgagggattgaagaaagccatcaagagttgtcctgaaacgaactggattgttgaggataacctgtataatccaacgtacaagcagctggcagaggatggactatggaccctgcctgccgaagaagaataatcaagtataaaataaagaaaatatgaaactaaaaagtttagcatacatattgatgataggcttcatttcgctgctggccggttgcgatgacgaagactctgctttctccggaagcgaaaactatatcacttcattcagcctgaaattacaggatggaaagacctatgcggccactattactgaagatgaactgactctgtctgtgcccgaaggtgtttcggtgcagggagccaaagctgaggttttgtgtagtgagcttgccacgattaccccggatccgtcgaatataacagattgggaaggaaatcagacgttgactgtaacctcttataatggtaaggaacgtacgtatcattactctctgagccgcacattgattgtcggtgaaggggatgtactgctggaaacagctgaagacgtagaagcttttgcagcacgtggtatcagccgcatagaaggaaatctgattatcggtaaggaaacgggaagcgtaaaggaagattcgttactttctttcgctgcgctgagtggtgtgaaagaagtatccggaacagtgcttatcaatcctacttacaaaggtacttcagttgcaggactggagaatctggaaagggcaggagcactgaagattgcaggccgtatcggtacgaacggagcgtttggtaacaaggaactggaacacatcgaactgtctcaactgaagatggtaggtggcgatctgtatctttcggctgatacgcttcgcacactgaatttgccaaaactggaaagtgtgggcggtacgttgaccttacaggcaatccacttcaaacagttggaattcccggctttggagattataggaaaggatatcacctttaccggacgacagaacggaacgcttgaactgacggaagaagttagtttcccggctctgaaaacgctgggtaatcagttgactctgaaaagctacaagaaggtgaagaaaataaacttccctgccttggtttccgcggctactatctcgcttgagtcgctttcggatttggaggacgtgttctttagttcgttggaagaaatatcatacagcttctcattgcaatatccaatgaacaatctgaatgaagtgagtctccctaaactgacgaaagccaacagtatgcgcatttataataatggtgtcaaaaaactggatttaggttcgcttgcttatgtaggtaaaaacggactgaccatagaacactgccaaagccttggagaacttaatctttcttcattgactactgtagacggtgccgctactatatcttatcttgccattcctgatatggagccgttgaaaaagttgaagagtgtaggaggagatctgaaattgaccacattatcgaatgtgaaacaactggacaatgcctgtcccgaattggagaccgtaggtggcggattctctttggggggctatagtgaagaggctactgttttatctggattcaatgcactgaagactatcggagggacattctctttgtcatccatgccaggggttactgatataacaggtttgggctcattgacttctgtcagtcgggtttcaatggaacagttgcctaagctggagaaaatatctttcctgaagaatctgaaaggagcgcatttctcttatttatctttgggaaatgtgactgctctgaaagaaatggatgttacaggcttgaccattgacgaactgaaattgagctctgttcctgaaggtctgctattgaaaggtgatgacactttcacgggaaaagtgtcagtgtcaggtagtaaaggaatgcgtttcgaaggacttgagaatgcagagatctcattggaatttgcaattgtgaaagaggaggcgaactttaccttcccaggtctgaagaaggctaaaaaactgacggttactcaaggttataatgccaaccttgccataatcagttttgaagatctggaagaggtaacgggggctatgagtcttcaggaaggttcttatgtgaacaatgtagtgcaacctgttcagtttccgaagctggccaaagtaggtagctttacttatgggggagtacttaaaactctgagtttgcctgttttgcaggaagtaacaggcgtgtgcagcatcggtacttgttttacaaatggagttcctgctatgctggaaagtattaatctgcctgctttgaagcgtgtgggtactctgaaactaacaataggtggtgctaccggaagcaatcctaatacagtgattaccaatctggattgctttgaaaacctggaatctgccgagtcggtgtatattgaaaaacagatgggactgatttcttataagggattggcaaaagttattgcggggctgaacgatgttgaagcgtgggaagtaattggcaatgctttcaatcctacttttgaagaagtgaaagccggaaaactggaaaaagaagaataagatagagattctcttcatcataagcgggagatgtactggaaggttgaaagactggaaagaacattctctcgcttctttattgtataataagtgcgacagcggctgaacttatttcatattactgatgggtgtaagttcaccacagattcatatatatgtttattctttgccagagaaataattcttatttttgtactcatgaagtctgctaagcgtgtattattaggtatgagtggaggtacggatagttctgttgccgccatgctgttgcaagaggccggttatgaagtaaccggtgtgacgtttcgtttctatgattcggaaggctttgaagaatctttggatgatgcccgtaatctcgcttcccgtctgaatatcccgcacatcatctatgatgcccgcgaattattccgtgaacgcattatccgctatttcgtagatgaatatctttccgcccgtacccctgttccctgtactctctgcaacaatgaactgaaatggccgttgctggcaaagattgccgatgaaatgggcatttattggatttctaccggacactacgtacgtaaagttttccgggatggctattactttatagccccggctgccgaccgtgataaggatcagactttcttcctctggggactgcaacagaacattttagaacgtatgctccttccaatgggtgactggactaaaaatgaagtgcgtgcctatgctgctaagcggggctttgaacggacagcaaccaaaaaggatagtcttggtgtatgcttctgcccgatggattaccgctctttcttgcagtgtgaagttccgcaggatgctttgccgggaaaaggacaatttttcgatgaaagcgggacttttttaggttggcacgaaggatatcccttctatacgattggtcagcgcagaggattgggtattcatctgaaccgtcctgttttcgtaaaagagatacataaagagaggaacgaagtgatacttgcgcctctggcttctctttacaaagaggaaatgctgttgaaagactggaatattgtggatacttcccgtttactgaattccgaggatgtcattgtcaggattcgctatcggaagcaagctaatcactgcactgtcagtataacggatgagaatctcttgcatgtgctattgcgcgaaccactggaatccattgcttccggacaggctgcggcattttacgatgaggcaggtctgttgctgggaggaggtatcatcctgtaatttccgtacaatcattcttttatttgtttctgaacaaaaaaatagtttactctgtttgaaatacaaagacgtctttgttttgcggaacaattaaaacgaataacagtatgaaacgtatatatttaatgatactatttgccactttggcaacaatcgtctctgcccaaacggacgataagggatataaagaaggagcttgggtactgaagggtgtgacaggtataaatatgtcgcaaactgcaatgacaaactggtcggccggtggtgagaattctattgccggaaatgcttacctgaatgggtcactgacacataagagcggaaactggctatgggtgacgaacctggtgctggattatggtctttcgaaaaccaaatcgcaagggatgaggaagagttccgataaaataggattatctacccagttgggctatgcagccactaaagtttggtattatacgcttatggctgatttgaatactcagtttgccaaaggatataattatccggacaagagtcactatatatctaacttctttgctcccgcctattctaatgtggcattgggtatggaatatcgtccgaagagtaattattctatattcctttcacctgtctccacaaagatgacctttgtgagcgatgattatctttctgatttaggttcttttggtgttgatccgggggatcactttaagatcgaagccggagctttcctgaaagcccgtgcagagctacctgtcatggaaaatgtgaatctgattactacagccgatttcttcactccttataataaagactttggtaatgtggatgtcaactgggatgtgctcatcagtatgaagatcaataaagtgctatcagcaaccctgaatatgacactgaagtatgataatgatgtgaaaacctttaatgatgagggcgttgaaaaagggccgaaagtacagttcaaggagatattgggcatcggattggcttataatttctgatagcctgggatgactgttagtttctcggtgtgaaactactggtttctcggcgtgaaactcgcagtttcaaggcatgaaactgttggtttcaagtaatgaaactgtgagtttcaaggcatggaacaaaaatggaaaaggccgcatcggttttgtctgatgcggcctttcttatttattatcgtattgtgtcctatgctattgcaggaattagttgttcagttccagcatttcctcgatatattcccttgtattgctgagacgcggaactttgtgttgtccacccaactttcctttttgtgccagccagtcatggaataggtctttgcgggcaacaatcacctccagaggttgcagggcaatgttcttctgtcgttttgcttcataatcggaattcacttctttcagtgtatcatccagtattttggcaaaattctctatactgtccggtgcctgtacaaactcaatcaaccattgatgacggcatttagcattggcatccataaatacaggagcagccgaataatcggaaatcaatgctccggtagcctcgcaagcccttgccaaacctttttccgcgttatccacaatcaattcttcaccgaaagcattgatgaaatgcttggtacgtccggtgatgacgaatttatatggatccttttgcgtgaacttcacggtgtctccaatcatatagcgccacaaacccgcagaagtagagataaccaatgcataattcttgtccacttccacttcttccaggcagtagatgcggggattctctttacctacatcttccaatgggatgaactcatagaatataccgtagtcgatcatcaacagcatggacggatcattcggatcgttttgcgtaccgaaatacccttcggaggcattgtatgtttctacataatgcattttgggtgatcggatcacttctttatattgttcacgataaggggtgaaagcaacaccaccatggaagaagacttccagattgggccatatttcttccagcgattgtttaccggtcttttcaaggatacgcttaatgagtactaacatccatgaaggaacgcccgaaaggctcgttacatcttttgatacggcactgttggcgattgcttctatcttcttttcaaagtcgctcataagagcaattttcttgctcggaacacggacgcagttcactaacggatgtatattttgtatcaggatagcagaaagatcgcctacaagcccgtgcctggagttgaggttggggctgtggcttccacctaaaatcaaaccttgtccggagaaaaagcggctgtcaggattctgacccagatagagggcgactgcatctttaccgccttgataatgtgtgtcattcaatgcttctttgctgacgggcaggaatttacttttatcgttcgttgtgcccgaggacttggcaaaccagcgtatctccgaaggccaaagcaggttttgttctcctgcacgcaggcgttccacatacggctttacctcttcgtaagtctgtatgggtagtctgtttctaaagtcttcataagtatgaatgcttttataatcatatttctttccccattctgtattttctgccatgcgcactaagcggtcaagaactcggtgttgaagttctcctgcgcggttagcatagaagtcgatttttttcaggcgaggggcaaaatacaccttatccagcaatgttgtgatattcatctctcttagttaaaactattttgttgcgcaaaaataatcttatttatcggcttctctatcttttttctcttttttttctatctttacggacctaaagaacaataattcaaacaaaagtgtcatgagaatcggtattttgacttcggggggcgattgtcccggcatcaatgccaccattcgtggagtgtgcaaaactgcaatcaatcattacgggatggaagttgtgggcattcatagtggctttcaggggttgcttaccaaggatgtagagtcgtttactgataaatctttgtccggtttgttgaatcagggcggcacaatgctcggcacttcccgcgagaaacctttcaagaagaacggtgtgatatccgatgtcaataaaccggcattgatagaacagaatatcaaggaattaggattggattgtgtggtttgtatcggtggtaacggtacgcagaagactgctgccaaactggctgccatgggattgaacatcgtgtctgtgcctaagactattgacaatgatatctggggaacggatttctccttcggatttgattcggctgtaagtattgctacggatgccattgaccgcctgcactctactgccagttcgcacaaacgggtgatggtgatcgaggtaatggggcataaggccggctggattgcactgtattcaggtatggcaggtggcggtgatgttatcttgatacccgagattccttataatatccataacatcggtgagactattctgaaccgactgaagaaaggaaaaccttattccatcgtggtggttgccgaaggcatacagacggatggccggaaacgtgccgctgaatacattgcccaggagatagagtatgaaactggcattgaaacccgcgagactgtgcttggctatatccagcggggaggttcgcccacgcctttcgaccggaatctgtctacgcgcatgggtgggcatgctacggaactgattgcaacagaacagtttggccggatgattacgttgaaaggggatgagatttcttctgcaccactggaggaaatagccggaaagttgaaactggtgacagaagataatgatctggttgttcaagggcgccggatgggaatttgtttcggctgataatgatgtgggcgaaggctattcgcccttacattcgtccgtctcaagattttctacaggcagaatcgtttcaagattttcttcaatcagagtctcctctgtgagttcatctgtttcttctgtattctcaggcaaatgattctgcgcttttgtggcttctatttgttctttgaaagaagcatcattctttattttcttcagggcagcttgtgcggcattctgctgagactcctttttagagtatccggttcctttcccggccgaaataccttctatgcggatttcggtatgaaacatggggttataatcttcatcaaggaattgctcgataagttcaaatgaaacctcaactttgcttttttggctccattcaatcagctttgatttgaagttgacctctttgcgcgacatcttgtcgaggtcaatgtaattcttgaatatcttttcttccatgaaccgcttgcagcgctcgtagccctgatccaaatagatggcaccgataaatgcttcgaaagcatttccgtacatataactattgtgcgaggaagaacgggtggaatattttaccagcttgtccaggcctatttctactgccaacttattcagagtttcccgttgcacgattttggaacgtgtatttgtgagaaaaccttcgcgacggccttcgaaatgcttatagacaatatctcccacgatggcgtcaagaatggcgtcacccaggaactccagtcgttcattattcaaagggcgtcccttttcagagcggatggaggtggatttgtgcaacaaagcctgctggtagagctgaatgttgcggggatagaaccccagaatcttataaaaacaaaaataagactctttgtccttacggaataagagccttattttgtctatttgattacgtaacacgactgattattctgcgtatttcttgaaaataacacatgcattatgaccgccaaatccaaatgtattggacagagctacgttcacttcgcgtttttgagctttgttgaacgtaaggttaaggtcatagtcgatgttttcgtcgttatcaccctcttcgtggttgatagtcggaggtacgatgccattcttgatcgcaagaatacttgcgatggcctctaccgcaccggcggcgcccagcaagtgaccagtcatggattttgttgaactgatgttcaattcaaatgcatgttgaccaaatacttctttaatagctttagcttccgatatatcacctacaggagtagaagtaccgtgtacattgatataatctacttcctcggggctcatctcggcatcttccaacgcatttctcatcactaacttggctccaagtccttccggatgagaagcggtcagatggtgagcgtcggcagacattcctacaccggcaacttctgcataaatcttagcaccacgtgctttggcgtgttccagctcttcaagaaccagacaaccgccaccttcacccatcacgaaaccgtcacggcttgcgctgaacggacgagatgcagttgtaggagattcattgcgtgttgataatgcgtgcatagcattgaaaccgcctacaccgccaacggtgattgcagcttccgaaccaccactcacaatgacgttagccttacccagacgaatcaggttgaaggcgtcagcaatagcgttcgtggaagtagcgcatgcagaacaagttgcatagttgggaccgtgaaaaccatacataatagaaatctgtccggctgcaatatccgaaatcatcttggggatgaagaacggattgaacttaggaccgttttctttgccggtcaaggcatagttacctacctcttcctcgaatgtacggataccaccgataccggcgccaaagatgacaccaattctgtttaaatcctcattttcgatgtcaagaccggaatcggtgaccgcttcttttgcgacggcgatggcatattgtgtatacaagtccatcttacgggcttctttgcggtcgatatatttggtagcttcgaagtttttcacttcgcaggcaaattgggtcttgaaaagggatgcatcgaaatgagtaataggtcctgctccactaaccccattcacaaggttttcccaaaaatcggaaacattgttgccaataggggtaatggcgccgagacctgttactacaactctttttaattccatattaaattgatggataggattacttagcgtgttcttcgatgtaagaaacggcgtcgcctacagtaccaatcttttcagcttggtcatccggaatagagataccgaattccttttcgaattccatgataagttctacagtgtcaagagaatcagctcctaaatcgttagtgaagctagcttcgttagtaacttctgattcttcaacgcctaatttgtcgacgataatcgctttcactcttgatgcaatttcagacataactttaagtttttaattaataattagttttatttctttaaatttgcggggcaaaggaataaatatttatcgtcactcgcaaatatttagggaattaaatgcaatgttttgcacatttttcacggttttgtgcactaaaaggaagaaatatgaggaaaaatatcgcagtattagcatcgggaagcggcacaaatgccgaaaatatcatctgttatttccgggaaaaaagttcggcttgtgtggctttggttttaactaaccgtcagaatgcgtttgttttagagcgttcacgcgggctggaagtgccttgtttctattttccgaagagtgactgggagaatggagaggcgattttatcggtgttgcgggagcatgatattgattttgtagtgctggccggttttctggcgcgcgtgccggatcttattttgcatgcttatcctaataaaatgataaatatacatccttcgttgttgccgaagttcggcggaaagggcatgtatggcgatcgcgtgcacgaagctgtgattgctgccggcgaggaggaaagtggcattactattcattatacgaatgaacattatgatgagggtgccattatttgccaggtgaaatgcccggtgttgccggaagatactcctgatgatctggcgcatcgtattcatgcgctggaatatgacacttatcccaaagtgatagaaaagttgcttgaatccgaaggctaagctacggggttattacggagaatgctgtcttttctctccgtagcggataatcttctcttaacttttcaaatagttcgggatgagctctcaacgcttcgcagtctttccgcggatcatacatttttaaataggcttctgtaggggtagatgctatgatgatcggattttccggttcgggtggagcaatgtgatagtcagcttgtatgccgaagtgtcggcacagggagtccagagacattcgcgtagcatttgcttttccgtctgccgagtatccggcgatatgcggcgttccgatgaataccttatataataaggtgagattaatgtcgggttcgttttcccatacgtcaatgacggcatcggaaatcaggccgttttcgagagctttcaataaagctgctgtttctattacttctccgcgggaagtattgatgatgatgggagaacgtttgagggaacggaagaatgcttcatcggccagatggaaagttttatatttcccttccttatataaaggtacgtggaaagtgataacatcacattcttcggcaagaaactgtaaagagcagaagttagtacttccttctttctcttctcgtggcaagtcgttcagcaatacccgcatacctaattcgcgagccactttagccactttgatgcctacgttgcctactccgacaatgccaatggtcatttctgataagttttttcctttcaggagatttattaataagagtgtggattgcaagtactgtgctacggaagcggagttgcatcccggtgcattagtccaggttatgcccgcttcgtggcaatactccgtatctatatgatcgaagccgattgtggctgtagcaatgaattgtacccggcttccttgtagtaattcgcggttgcattgagtgcgtgtgcggattattagtgcatctgcatccttcactaaagcaggggtgaagtcttttccggggacatatattacttcgtcggctattttcccgatagcttcctttataaaaggtattttattgtcaacaataactttcatggaattctgttttttttgaatacaggcaaatttagaaattaattatatgtatggggtcatgttatagtaataaagtatagctggtttctattttcttatgaaagttgctttgatttgttaacgtattcttcatacgaaccctttgatcttatcttattgaaggtgttatggggtagtaaaaatatgaaataaataaggaagaggatattttgcttttggagcaagatgggaataaaaagtggggaacggttgcttgtgtgggaaatattgcataactttgtattattgtataactgtaaagttcgttaagattatggcatttagtaacctttgcaacagcatttttgagaagtcagtcgcggattatcatgtaacggatagcgtggatgcgccaatgaacaatccttacgagttgaagacgattgagtattatctatatttgaagaattggattgatgccgtacaatggcattttgaagatattatacgtgatccgcagattgaaccgaatgcggcattaactttgaaacgaagaatagacaagtctaatcaggatagaacagatctggtggaactgatcgatagctatttcctggataaatataaagatgtgaaaccgatggcggaggctaccattaatacggaaagtcccgcatgggcgatagaccgtctttctattcttgcattaaagatctatcacatgcaaaaggaggtggaacgtacggatactactcccgaacatcatgctcaatgcaaggctaaactggatatccttctggaacaaaagaaagatctttcgtcggccattgaccaattgctggctgatattgaatccggaaaaaaatatatgaaagtatataaacagatgaagatgtataatgacccggccttgaatccggtgctttatgcaaaaagataacgaatggcacgtatcctcattatccgtttctctgcgcttggcgatgtagccatgacggttccggtagtgcattcgctggcagccgaatatcctcagcatgaaatcatagtgctgagtcgtactgcattgcaacctctttttctgaagttgccggagaatgtaagcttttacggtgccgatttgtcggggaaacataaaggattacgaggattaaacagtctgtatgcagaactaaaagggctacattttgattatgtggccgattttcatgatatacttcgcgcgaaatacttacgatggcgttttcggttggatggcgtgcctgtagctgcaatatgcaaggggcgggcaggtaagaagaaactggttcgtcgtcatcataaggtttttgaaaagcaggaaagttctttccggcgctatgctgatgtactggaaaagctggggcttccggttcaattgaagttcacttccatctacggagaggggaaaggtgacttctcgcaaatagaaccggtggtaggatcgaaagggaataataaatggataggtattgctccttttgctaaacacaaaggtaagatttatccgatagaacagcaggaacgggttgttgcctattttgctgcaatgccggatgtgaaagttttccttttgggtggagggaagagtgaaaaggaggtattcgaccgctggaccgctaagtatccttccgtcctatcgttgattggtaagctgaaaatggatacggaattgaatctgatgagtcatttggatgtgattctttccatggactccgctaatatgcatttggcatctctggtcaatgtgcctgttgtttctgtatggggtgctacgcatccttatgccggattcatgggctggaaacagttgccggccaatacggtgcaacttgacttatcctgccgtccatgttcggtttacgggcagaagccttgctggcgtggcgattatgcctgcttgagagagataaaacctgaagaaattattgcgaagattgaagagaatataaggtaaatgatggataaatattttagaatgacgggaccgtctaaaaaggtgaaggcagagtaaaatatgaaaataatagtaaatcctgcatacgagcatttgcggaaatttgtagaaagcattcctgatatctttgaaagtgaggggagggtgatctactctggaagaaacctcatcaaagtgatgacggtggatgatggattggagatcaatataaaacgttatggagttccggctttggtaaatcggattgcttattctttttttcgtgccccgaaaggaaggcgcgccttttcatatcccaacatactgcttcagagaggctttgaaaccccggttcctatcgcttatatcgaagaatgtaagtggggcttgatcaagtactcttattttatcagtcttcaatcttcctatcgaagaaatttttatgaattcggcaatgccgatgttaacgattgccgggatgttgttatagcctttgcccgttatacggctcgtctgcatgaatctgatattatgcaccgggattattctcccggaaatattctgtttgataagatagatggtgagtatcattttatgttagtggatattaaccgcatgagcttcggtaagatcagtatcgatatgggttgtgccaattttgcccgtttatggggacagaaagccttttttgaattacttgccagagaatatgcacgtgcacgcaatactgatgaacaatactgcgttgataaagtgcttgcacaccggaagaagttctggatttattttgcaaagaaacatcaagtgaagtataaactggagctatagagagaagtatgcgtattgtcttattctgtgaaaataagtatgctgttgatatattattgcctatatatcaggaagcggtaaagtcggaggcgaatcatatcttgtggtatgtgcatcttccgaagatcccggttttcccactggacggaaaggtcgtttacacctattcgatgcaggaggtttatgatttttctccggaagctatatttgtgccgggcaatattgttccctattatttgccgggtgtgaagatacaggtttttcatggctatgcggcagaaaagaaagatcattgggtcattcgtcgctattttgatacctatttcacccaaggtcctttttttacgaaaaagtttaaggaattagctgccgaatataaagattttgaggtcgtggagaccggctggcccaaacaagattggataaaaaatcattggcatgattttgaccgggaacgtgaagaactgttgaaactgcatggaaaaagtcaaattgtattatatgcacctactttttcaccaagtttaacatctcttcctgcattaaaagaggctttgctgcatttaataaagatgagggatgtcgttctgttgttgaagttgcatccgttgactaaaaaagagtgggtggatgaatataaacaactggcagaacaagaagaacacattatatgggaagacggctttaatgttacgaagtatcagttaatgtccgatgtcatgataagtgacacttcctcaacagtatatgaattcttgcttctgggacgtccggtaattacttatcgcaccatagcgaaggacatttactggactgacataacggatacgtcccaattgacagacgcctttgaaagtgtgcagcatgatgaaaacgctattgcgaaaagacgatgggtggttgataactacgatccgtatctggatggaaatgtagccaggcgaatgctggaagcggctgaagattatattcgccgtcatggtgttccgagagaacggaagttgaacctttggagaaaatatacgagtataaagacgttcggaaggataaagaagtgatgaaaagtaatgtagaactattaaaaagcaggaatatgaaatcttatgtttttccgggaaatatagaagagcggattcttcgaatcgcaggagaaccttttccgtatatgcgcactgctttgttttctgaaattgtgaaagattcagagcgtatgttgctggagctgatacattgtccaggcgggcgtgttatcttctatactgcttcaggaaccggtgcgatggatgctgtggttaccaattatgtttccctgaaaaagaaagcttttattatagccggcggttcattcggctaccgttggaagagtctctgcgagtactatcaggttcagaatgaggtttttgaagttccttttgctcgtgatattgattatgcccagctggaaaatgctgtggctgcttcgcgtccggatgtgtttttatgtcaacatcatgaaacctctaccggtcaactgtttgatttaaagaaaatttctgctatttgcaggaaacataatgtttcgctggttgttgatgctattagttctttcttgtccgatgatttggatatggaagagttgaatatcgatatctgtattaccagcagtcagaaggggctgaatatagccccgggtttgtcgtttctgtttctttcgcctagaatcctgcagactgattttttgcataaatcttattattttgattttgctgagaatctgaagaatctggaacgcggtcagacaccttacagtccggccaccagtttgtttatgcaattgcatgcccgtttaaaggagaatgtagtccttggggttgacaaaatcattgcttccgtgcgtgctaaagcgctgtattttcgtgagctgtgcaggcagaatggttgggaaattccggcggaagtgccatccaattgcattacggggttctttgttcgccagaatggagatattctctttaatgaattgttgaagcaagacatattcattatgccgggtggtactccttgttatttcagggtttcccatttgggagttcaaagtgaagaggatctggatgatctggcaatgagaattaaagaaatagaataccgataaatctatatagcatggaaagaaagaaaatcagagtattcacatccggtagttttgacctgtttcatatcggtcatctgaacatattggaacgttcggcggcattgggcgatgaacttatagtcggcgtaagcacagatgagttgatacagcattacaagggaatgccgcctattattccctttgaacaacgtttccggattatttcgtctttgaagtgtgtgactaaagctgtgaagcaagtgaagcttactgaggtggcacaattacagagagaggatattgatatagtaaccataggggatgattggataaataagtatctggaggggcttgagtggatgaagcaacagcccggtaaggaagtggtgtattttccttatactcccgatgtaagcactacaagcattaagaagaaaataatagagagtacaagtgagattatcagggcagcgctacaacgtgaggctgaattagattataattggccggaagatcagaaaaaatgaagttgaattaaagaattgatacatgttagtctcattaatgatatctacatataattggaaggaggccttgtccctatgtctgtacagcgcttttgctcagaccgtgaagccttgtgagattctgattgcagatgatggctcacgtgacgacaccaagcagctgattgataagatgcggacaaagaccgatattcctattgtgcatgtatggcacgaggacaaaggtttccgtctttctgccatccgtaatcgctctattgaaagggcgaagggggattatattatccagattgatggtgatatcctcttggataagcattttattgcggaccatctggaattggcggaaaaaggttactttgtgtgtgggagtcgtgtacttttaggaagaatggctactgcccggttacttagaggagtggaaactcatcctgcactttttaaacaagaccttagctttttgttgaacgcttttcgttcacacactttacgtttgtatttggcaaatcgttatgccaagaatagcatgctgcgaatacggggctgtaatatggctttctggaaagaagacttattgcgcgtcaatggttataatgagtctttggagatgtgggggcaggaagatgtggaaatttcctatcgccttatccatgcaggtattcaaaagaagcaattgaagatgggtggagtgcaattccatctttatcataaatttgcttcacgggagaatttggaatatcacgaacaggtgttgaggcaggttattgcagagaggatagtttggtgtgaaaatggaatcgtgaaagaaggacgaaaggttcagctattatgaaagataaagttgcttttgttgtca

SEQ ID NO: 6394 - DNA, 17278 bp, Unknown
  gut microbiota DNA sequence
atgaattaattcaccacagattacacagattgacacagattctattttactgattattagattaataattctgtgtcaatctgtgtaatctgtggtgagtcttattcattcctttttcggaaagaatcaatcccaccatccccctttacatctaaaatatctgcaaatattttcagataataccgattttctaaaaaaaatatcgtctctttgcaactttctagctggcatgatacgtctaatacacaaagaaacaataaaagataaaacaaaatatgattatgaaacggataattttagcactcatcgccgccatgacattatgttcactggtacaggcaaaaaacagaacggttacagaaaacgacagtctggggaacaaaaagcgcgtgatcgaactgcgcgatactaccatcgacggaaagacagtaaccgatacgctcagcatcatgacctacgaaggcagtagttcagacagcaaaagtgataaaggatggaaacaccacaacggcagtggttgggactgggacttcgatttagatggcaaaacctctgaaaccatcatttcagttactgccatcgtcttcatcttcggtctgccgctactcatcgtctttacggtattcttcttcaattacaaaaatcgaaaagccaaataccgccttgcagaacaagcactttcgagtgggcaacaactgcctgaagacttcttcaagaatgcggagaaaacagaagatatccgtaccaaaggtatcaaaaacatcttcatcggcatcggattattcatcttcctctgggccattaccgagaactttggagtaggttgtgtcgggctgctgatcatgttcaccggattcggacaattagttatttattatacgcaagactctaataaaaagaacaaccgggagagatgagccaactcaatgacatatcgttagtcgcacaggtcgtggtgtttcgcaacaccagggccttcgaccagttggtgaaaaagtaccagtcgcccgtgcgacggttcttcctcaacctgacttgcggcgacaacgagttgagtgacgacctggcgcaggacacgtttatcaaagcctacaccaacctggcttcattcaaaaacctgtccaatttctccacctggctctaccgcattgcatataatgtattttatgattatcttcgcagtcggaaagagacagccgacctcgacacccgggaagtggatacccgctggaacaccagccaagatgacgtaggacaacagatggacgtttaccgggcgctagcgacactaaaagaaatggaacgaacctgtatcaccttgttctacatggaagatcagagcatcgaaaagattgcaggtatcacgggatgcccggcgggaacagtcaaaagccacctctcgcgggcgaaagaaaaaatggctacctacttaaaacaaaatggttatgacggaaacaactgatgataaacttttgcagcagttcttctctgacaatcggaaagagatagaagataacggcttcagccgccgcgtgatgcaccacctacccaaccggtattaccggatttcgcagttgtggagcttgttctgttttacgcttgccgtagtgttgttctttgttctcgacggcttgcagcttgtgctgggggccttacgcgaaactttcaccagcgccatacaaagcggtgcagcggaactcgatcccaaatcactgattatagtggcagtagtattggtctacttaggatatcgcaagatttgttctttagcataaagctcatttattcttgcaataaatccgtttgcccttacaataatttagttagcccttgcctgcattttgcaggtcaagggctaattttttttaactgagcaaacatttctcatcaataaattgtatctttgtcgactcaattagaaaaactaactaagcgtaagaagttttgagaagaatattattcatcatattatcatctgcattattctttataggaaatattcacgcgcaagtcgccaccagtgactcgctcgtgatgcattatctacaacaacaaggcattccggttaccgccaacaatgaagtaaagcttctgatgagcggacgggagaagtttctggatctcttcgaagaaatacgccacgccaaacatcacattcatctggaatacttcaatttccgcaatgactccatagccaatgccctattcgacttactggctgaaaaagtacaggaaggtgtggaagtccgtgctctcttcgacgctttcggtaactggtctaataacaaaccattaaagaaacatcacctgaaagcaatccgtgaccggggcattgaaatagtgaaatttgacccgatcaccttcccatggatcaatcatgccatgcatcgagatcataggaaaatcgtagtgattgacggcaaaataggatataccggtggtatgaatatagccgactattacattacgggactgcccaaaatcggtcaatggcacgacatgcacatgcgtatcgaaggagatgccgtgcgctatctgcaaggtattttcctcacgatgtggaaccaagagactaaacagcacgtcggtggccccgtttactttcctgatataccgcaactccccgacagtatagccgaagaaatagccatagtagaccgtacaccgagggaaactccccgctccatcagtcacgcttatgcagcatccattggagctgcgcaacacaacatacagattgtgaacccctactttgtaccgaccaaatccatccggaaggccattaaatatgcattaaaaaaaggtactgaagtggaaatcatgatacctgccgtttctgatattcctttcaccccggaagcatccttctatatcgtacacaagctgatgaagaaaggggcaaaagtttatctctttaacggaggcttccaccattccaagattatgatggtagaccggaatttctgtactgtgggtacagccaatctgaatagccgcagtctgcgatatgactttgaaacgaatgcgtttattttcgatcctacaatcactcaccagttgaatgatatgtttgaacgggataaaaagaatagtacgctattgactcccgaagtttggaaaaagcgttcaggatggaagaagtttgtaggttgggtgggtaacttaatgacaccgttcctttaattataccaccgttcctctaatttttaattgaaaattattctatgctatctgccgaagtttagttacctttggcgaggcaaaaaaaagattgccccttttgttgtttttaattcgtaatctgcaatcatgaaacaatatttagacttgctcaatcgggtattaaccgagggcgtacacaaggaagaccgtaccggaaccggtacaatcagcgtattcggacatcaaatgcgcttcaatatggaggatggctttccctgcctcaccaccaaaaaactgcatctgaaatcgattatatatgaattgctatggttcctgaatggagataccaatgccaagtatctgcaagatcatggtgttcgcatttggaacgaatgggcggatgagaacggtgatctgggacatatttacggttatcaatggcgttcctggcctgattacaaaggtggttccatcgatcagatcagtgaggctgtagaaacaattcttcataatccggattcccgccgcatcattgtcagcgcttggaatgtgggagatattaacaatatgaatcttcctccctgtcatgctttctttcaattctatgtggcaaacggacggttgagtctccaactctatcaacgaagtgcggatatttttctcggtgtacctttcaacatcgcatcttatgccctactgttgcagatgatggcacaagtgaccgggctgaaagcaggggatttcattcatacactcggtgatgcgcacatttatctgaatcatctggagcaggtcaaactgcaactttcccgcgaaccacgtccgttgccgcaaatgaagataaacccggatgtgaagagcatcttcgacttccaatatgaagatttcgaattggtaaattacgatccacatccgcatatagcaggtaaagtttctgtttaacaaatcatatatccaatcatgattagtatcatcgccgccatagaccgcaacttaggaatcggtttccaaaataaattattattctggcttcccaatgacttaaaacgtttcaaggcattgaccacaggaaacaccatcatcatgggaagaaaaacattcgagtccctgcctaaaggcgcactgcccaaccgaagaaatgtggtactttcatctaatcctgcgactcaatgtcccggtgcagaagtattccctacccttgaagcagctttgcaaagctgtcagcctgaggaacaagtatatattatgggcggagcaagtgtatataaacaggcaatgccattggcagacatgctttgcctgacggaaatcgatgccgaagcacctcaggtagatgcttacttccctgccgtagagtccgcaatatggcatgaaaaaagcagggaatctcatcttgttgacgagaaacatccctgcccttatgcatttgtggattatatccgtaagtaattcctaatcttcatccatctccaccatgattggcatctgccgttttatggcttcatggaaggatattagtgtttctgtgcgcgctaaccccaacggctgtaatttatcgtggataatgctcagcaaatggtggttattgcgtgcgtaaagtttaataaacatatcatatttacccgtcgtaaagtgacattccacaacttcgggaatagcttcaagtgcctttgtcactgcgtcaaaagattccggatctttcagataaatgccaatataggcacaagtctcataacctattttttccggatcgatgacgtactccgaacctttcaagatacctaaattcgtcaatttttgtatgcgttgatgtatggctgcaccggaaacattgcaagctctcgccacttccaggaaaggaatacgggcattatctgcaatcaatttcagtatttgctcgtctaaagtatccaattgatgatgtcccatttctaattttatgattaataaataacgattgcttcaccgtattctcatacgataatgtgcaaagttagcgaaatttttcccaataaaaatacgatttattacttttcttgctaaaaaatgaataaacccacagttacgataaacagggtgaaaagaagataagctacatctcggcataactttttcatgcgagcatgaaagatctgcgctcaatttgcattatctttgcctataactacaaaattagattgttatgaaaaaatatcttgtacttgcattgtgcttactgatggttacaataggccatgcgcaaaactacactgagtattttgccgataaaacattgcgtattgattatatctttacaggaaatgccgcccgccagaatgtatgtctggatgaactgtccgtacttccatcatgggccggaaggcgtcatcatttagctgaattacctttgcaaggtaatggacaaatcatcatgaaggacttggaaagtggaaagacaatctatactacttctttctcttctctctttcaagagtggctggaaacggacgaagccaaggctgtcaccaaaggatttgaaaataccttcttactgccctacccgctccgtcctgtggaaatagagatcaccctgttaagcccgagaaaagaagtgcgtacacatctgacgcacactgtacgccccgatgatatacttattcatcagaaaggaactgcacacatcactccacataaatatctgctaaagaatggtgaaactgacaagtgcatcgacgtggccattcttgccgaaggatatactcctgcagaaatgaacgtattctatcaggatgcggaaatcgcctgtgaaagcctattttcacacgaaccgttcaagagtatgaaagatcgcttcaatattgtagctgttgccagcccatctgatgacacaggggtaagtgttccccgtttgggagaatggaaacatacagcctttagttcccatttcagtacattctattctgaccgttatctgactacccgtcgtgtcaaatccatacacgatgctttggccggaataccatatgaacacattattattcttgccaatactgaagagtatggaggtggtggcatctataatgcttataccctgactacagctcatcacccaatgttccgtccggtagttgtacacgaattcggacacagtttcggagggttggccgatgaatatttctacgacgatgatgtcatgacagatacctacccattggatatagaaccttgggaacaaaatataagtacccgtatcgatttcgcttctaaatgggaagatatgctcattaaaggtactcctattcctacccctgtcaacgaacaggcaaagtatccggtaggagtatatgaaggaggtggatattcagccaaaggcatattccgtcccgctgataactgccgcatgcgcaccaatgaatatccaacattctgcccggtatgccaacgatcactgcaaagactcattgatttttataccaaataataagagaaactaaactttaaagaccaacattatgatcagacttcaacgtatcagcaccgctgatggatttttgtatgagtacatggaacagttaataaccgccgccttcccgcctgaagaataccgaccgttagaagaactgcgcctgtacactgataacaaacctcatttctataacaatattattttccaccatgatactcctgtaggattcattacctattgggatttcggcaaattctattacgtagaacactttgctgttgatccgacccagcgtaatggcggacatggaaagaacgttttaaatcatttatgcgagttgcttcaacatcctattgttctggaagtggaaatgccggaagaagaaatggctcaaaggcgtattaatttctacaagcgccaaggatttgttctttgggagaaaccatatcttcagcctccatacagacccggggatgattatttacccatgctacttatggcacacggaaatttagagcgtgaaagggattttgaaacagtaaaaaactctatatatcgggaagtatataacgtacaagaataaaaaaataaagggtgcctattcgaaataagcaccctttatttatatagtttgatttaacttcttactgacgcggctgcgcagaatagttaagtttcaatgcataagctttacgaagagcttctttgatatctgttacgatacccattttcgtatcttggtccacttttaaagaaacagtcatctgcggttgatcttcttccttcatactggcacgttcaccaataatataatcttggatttcagcaacttcagcatagctgtcgttcaattggatacggctttcattacccagtttcttacggaactcagctgtaggctttcctacatagataaacgtaaccaaagatttcttttccagtttttccaactcagtagcttgcggaaccttaaactcaacctttaatgttacctcacgcattgttgttacaatcataaagaagaacaacaaagtaaagataaggtcaggcagagaagaagtattcaacgcaggcatttcgcgtttaccagtcttattaaattttcccattacttcttttctccgtactttttaggttctgcctcagagatcttctgaggataaatatcacgaattgctttttgttggtcttcgtccaaagcagcatagtcctttccccacttctcctgagccaattcatctctcaactcattgtaagcagctaccagctcattttgaacagctaagtatgctttataggaagaaccacggtcacaacgcaaagaaaccacatgcttttccgtaatctgcatagtcccgaagaaaggaatgtctttcgcatgcttttccggtttagactcatcattatacggattggcaatgaattcttttgccttatctctcaactgatctacactaacatattctccgctacacatcaactggtcgttcatgttcaggaagactgtcattacgttacgctccttaaccttatccgaatcatctttcttttggtcttgttcgggtggtggcggcaaacgtcttgccaaaccacggtccgtatccatagaagtcgtaatcaagaagaagattaacaacaggaaagcgatatccgctgtagaacttgagtttatatcaggaacttttctttttccttttgccattgtaattactccattagattgagtttcctcaatcgattatgataatttctttttaacactactgaaaagcatcgcaagaacagttgcccccagtaagaaataaatagtatacaggaacatgtcagttaacttcagccaaaacggaacattttcagttccactataacccggaataaccatcggttcaccattacccatagaccaagcaatgatcattacaataactagtaaaataacaccaaccaatgatttcaaagctttcacagggttatctttcaatgcgctaccaaattgtaggataaacgcagctaccatcgcaacaacagccaaagcaaacaaaccatacattaagtacaacagactttctgtctgggcaggctgccacatttcgggatcaacacccggcagtactgcatcgccctgagcatctccaccgaagtagaatatgcccaatactactaaaatagcagcgaacaaaacatacagtacgtaatatgatactctatatgataatttagccatttctcttattttttgtatttcaagttatatttgataaccatatccaacagagtgatagaagaatcttccatttcgctggtcaaagcttcgatcttagacaggatatagttgtagaatacctgcagaatcaaagcaacgatcaaaccgaagatagttgtaatcaaggcaactttcataccacctgctacaaccgtcggagagatatcacctacttgttggatcttatcaaatgcctgcaccataccgattacagtacccaagaatcccaaagacggagccattgcgatgaacagcgtaatccaagagcaacctttttccaagtaaccagcttgtacaccaccgtaagatactacagacttctcaactacgtcaagaccttgatcgattctcaataagccttggtaataaatagaagcgataggacctcttgtactacgtgcgatgtctttagcagcttctacgtcgcctttttctaaagcagcttcaatagcagccaagaacttctttgtgttgatttcagctaagctcaaataaatgatacgttcaatacagaatgcaagaccgataaccaaagcaatagcaaccaaactcatgaaagatgcagtaccttcaataaacttagttttaatttccttgtgaataccaccttcttctgcttctacagtagcatcaccggcaggagccgcctgagctgcaggagcagcttgttctgtttgttccgctgcaggagcatcttgagcctgagcaagttgagttgagccaaatgttaagactcccatcacagcaacaattgcaaataactttttcattgtgtgtctaatttttaagattaattaattaatttgtttattatattcatttattgtttttgttttttctttcatcctgcggagagacggggattcgaaccccggataccctttagaggtatacacgctttccaggcgtgcctcttcaaccactcgagcatctctccaatagaggcctctttcaaaaacggctgcaaattacaaaaaaaatgcgaaccacaagcgttttcagctacaaatgtattctttttttcgttcttgcccttcattctccccgttttatctttaataaaatctcaaaattaataaactttaaaatctttccgatgttatttgagcattccaaacacttttaaagcgttttccgaagtaacgtctccaacagcctcaggagacatcccgtaaatttcagagaccttcatcaaagtatccttcacataggcgctttcattcctcttaccacgattcgggactggagtcagataaggagaatctgtttcaagaacaattttttctaatggtattcctgccaaaatttccggaaggtgggacttcttaaaagtaaccacaccattaattccaatgaagaaatcggaaaactccaatacacgggtagcttcctctgccgttcctgtaaagctatggaatattcctcttaaaggagtctttttgtaaggttccagcaccttatatatataatcaaaggcatcccggcaatggattactataggaagatcatattccaaagcccagttgacttgtttatccagtactatttgctgctctttcaggtaagttttatcccaataaagatccatgccgatctcccctatagcaacatattccttagaaaacttcaattcgcgagcaactatttccaattctttttcataattgtcattgacagaagtaggatgcaaaccaatcataggaaaacagtatcctttataaacgctacaggctgacagcattgcttcaatagtcgtactgtcaatattgggcataaatatatgagttactccggcagcacgtgcacgctcaataacctgtgggaaatcctctgaaaactcctccaaaaaaagatgggaatgtgtatctatcaatctcattcgtttactttttctattcgtttctcaccagtacgataataataaatcagcccgtaatcacgacataattccaatcgtttttcattgggagaaacatcttcaaactttttttccacttgattccatatatccaagatcaattcatcggcagtagttcgcatagtagaaagagaatctaaactacgggcagttaaagcctgcaaatttttctgtcggtcataactatctgtaaaaatatcataatgaactctaaccttcgcaatagtaggattataaataggaatccctccttgagaagttcgtttggtttctccatctataatttttcgcccccactccaccaaggctgcctccgtcgataaatccggtacatttgaactatcagtcggcaaaccataataagatttatgggctgcacgcacttccgaacgaataacagccaagttcaatacctgaatgaaatgagaaatatacagacgagccatctttacattggcctgatgcttacgccctgcttgcgactggcgttcaaagcattggacataatacgattgggcggcttcaaatctcatcaagaaattccgggcttcagtcaacgtctttaaagaaactgccaaatcatagaggttatgggtatcagcttttgcaaccactgctttcagtgcccgtattctcgcctggtctgtatttggtaatcttctataaggcatagttacaaaaaagcacagttaaacttctctgtgtatcaaattttctattatctttttcagttcttcttttttttcttctgcaatactgacagctgcaaggctttccattgcccggttgctatattccaatatcttattttcgcaaactgcttttacaccaatccggtcatacagttccgtcacagctgcaattttctctgccggctggaaagtctctgcgtttatccagctattcaactggttatgctgatccgcattcgcatgctccaatgctttaatcagcatatatgtttttttattacagagaatatccccacctatattttttccaaacactttagcattgccatatacatccagcaaatcatctttcaactggaaggcaacacctatatgcataccaaaatcatataaacgatcagcgtcttctaccgaagcgccccccaaacgagctccaatcttcagactcgccgccaacaacacggcagttttcagacgaatcatctccagatattcttctgcagttacatcattcctctgctcaaactccatatccatttgctgaccttcacaaatttcaagtgccgtcaaactgaaaagatccataacctctttcagaaaagtcgaaggacattctgccataaactgataggcaagcaccaacatcgcatctcccgaaaggatagcagtattatcattccaaactttgtggacagtttcttttcctctacggcgatccgcacgatccatcaaatcatcatgcaaaagagtataattatgataaacttcgatacctgtggccggagcatagatacgggtcacgtcttccttgtacaaattataagccagtaacattaacaccgggcgaattctttttccacccatagataatacatattctaccggagcatacaatcctttcggagtacgcgtaaattgtaagccagcaatatgagaattaaaattttcgagaagctcggaagctgtaaacataatgatagtaaatttaggagaatagtaggaataaaaagaggctgcccaaaagcagcctcctttttatatagataacgtattactgcaatctaaacattacaggcaccgtatatttaacgcgtaccggtttaccgcgctgcataccaggtttccatttcggcatggtaccaatcacacgaagtgcttctttatccagatacggatcaacacctcttatgactttggcatctacaatactaccgtccttgtttacaacgaactgtactgttacacgaccttgcgtaccattttcctgggcgatagtcggatatttgatgttcttgctcaagaattgcatcaaaccagccataccaccattcgggaattcaggcatttgttctacaacctcaaaaatggtttgttcttccggttcttcttctacaacagttacaggcacatattttacttctactgccttacctgtttcttctgaagaggcgataactgtttcttccacatcagcatcatccgctacgatttccaacgtttcgttaatcggagctacttcaggaggaggaggagctactttttcttcctgttcagtgataggaaccatttcttcttcaaaatagagatcagtaagcgcctggcttgtatcaatcttgatatcgcgcttcgtccattcaaatgctataaacataaaggcaagcacaataacataaccaataagcatccaagtcgatttcttgttctccaaatctgctttaggtgttttcttaatttccataattataatattattttaacgtgtttctcattttgggcaaatatagtactttttccgcaaaacgttcagccgtactatcttttttaagacaatatgcacccatttttgttttttttatccttcagaaagcacacctgtgcttttgtgccacaaatgtaacgagatattttaaaaataccgtatctttggcaataattttaaatgaaatgttgaaaaagtcatttataacggcgctactactcctgattttctccgttttacgtgcacaagacggaaccagcgcctttcaatttctaaaactccctttttctgcccatgcatcagcattgggtggagaaaacatttctattatagaagatgatttaactatggctgtccagaatccggctcttctttcctgcgtagcggataagactctcaacttgaattacatgctttacatggatggtgtcaacgttggtggagccgcatttgcacgtactgccggtgagcgttccacctgggcaataaccgcacaatatgtagactatggggagcttaaagaaacgactgaagaaaatattgaaaccggaactttctccgccaaagatatctctatatcgggtatttatacctatgatttaagtgattattggagtggaggtgtacgcaccaatttcatttactcccactatgataaatattcttcatttgctatcggtgtcgatctgggattaaactactataatcaggagtccgatttttccgcctcgctcgttgcacgcaacctgggaggacagcttaaagctttcgaggaacggcatgagaaattaccagttgatgtacaactgggattcagcaaacgattgtcacatgctccgttccggctttcccttaccctacatgacctcacacactggagtgcctcaaccacagcggcaaacaatttcggaaagaaattgttaaatcatattgcccttggtattgacttcctaccaaccaacaacttttatctggcagccggatataatttccgccgcggagaagatatgaaaataaacggttccagtcattgggcaggtttcacctgtggtacaggtattcaattaaaacggttgaaactgggaatggcatacgccaaatatcatgtgagttcatcctcacttatttttaatttatcatataccttataatatataatagcataactcaaatatgaaaaagataactattgcaatcgacggcttttcctcttgcggaaaaagtactatggcaaaagaccttgcccgtgaaataggctacatttacatcgatagtggtgccatgtaccgtgcagtcactttatacagtatagaaaacggcatctttcagggaaatgatatcgatacggaaagacttcgaaaagaaatagatgatatccatatttcctttcaattaaaccctgagaccgggtgtccggatacttatctgaacggagtaaatgtagaaaataaaatccgcagcatggaagtttcttcccatgttagtcccattgcaactttagggtttgtacgcgaagcaatggtagcacagcaacaagcaatgggcaattctaaaggtattgtcatggatggacgtgatatcggaactacggtttttccagatgctgaactaaaaatattcgtaactgccacgcccgaaatccgtgcacaacgtcgctatgatgaattaaaggccaaaggacaagaagccagttttgatgaaatacttgagaatgtaaagcaacgggattatatcgatcagaatagagaagtaagcccgcttcgcaaagcagatgacgcattgctgttggacaatactgacatgactattcctcaacaaaaggaatggttgcaagagcaattcaataagatcgttaaaagataaaggaaaaagggtgtatcccttccgaaggtctatttacaatctctatatcaacatattatattatggtaaaagtagaaatagatgaaggttccggcttctgcttcggtgtagtcactgcaataaataaagctgaagaagagctagccaatggaggcactttatattgcctgggagacatcgtgcacaatagccgtgaagtggagcgcctgaaagagatgggcctcatcactatcaatcatgatgactttaatcatttgcacgatgccaaagttttgctgcgtgcccatggagaaccacccgaaacctatgaaattgcccgtcgcaataatattgaaatcattgatgccacttgcccggtagtactccgcctacaaaagaaaatcaagcaagaatatactcaaaaagataccgaggacaaacaaatcgttatctatggaaaaaccggtcatgccgaagtccttggtttagtaggacaaactaccggagaagcaattgtcatagaaaagttggaagaagctaaaaaactggatttcaccagaagcatccgtttatattcgcagacaacaaaatcattggacgaattccagaaaatcgtagaatatatcaaagaacatatctcgcctgatgtcacattcgaatattatgataccatctgccgacaagtagccaatcgcattccaaacatacggaaatttgccgcttcgcacgacctggtattctttgtgagtggcaagaaaagttccaacggaaaaatgttgttcagcgaatgcaaaaaagtcaacccaaattcccacttgatagacagcgctgaagagatagacagttctctgcttaccggagcttcctctatcggagtatgtggagcaacctccactcccaaatggctgatggaagaaatttctaaggccattcaatcacgacttacaggacaataagtcatcgttttgaaacaacaaattaacgttaaatatgaatcacaccctcagctttttgctatctttgccgagcgaaaataggctgcgtttcggcaaaatcaaaaaaaacattttgcttttgctctcaacttgcactatttttgcggcaattatttaaaccaaactaaaagattgttatgggaacagttaagtgcataggtattttgacatccggtggcgatgcaccgggaatgaacgctgctattcgtgcggtaacacgtgctgctatttacaacggattacaagtaaaaggtatatatagaggttacagaggtctggtaaccggtgaaatcaaagaattcaaaagccagaacgtaagtaatattatacaattaggtggtaccatcctgaaaacagctcgttgtcaggagttcactactcccgaaggacgccagattgcatatgataatatgaaaaaggaaggtattgacgccttggttatcattggtggtgacggttcattgacgggtgcacgtattttcgcacaagagtttgatgtaccttgtatcggattacccggtactatcgacaatgacctgtacggaacagatacgactatcggttatgatacagctttgaataccattctggacgctgtggataaaattcgcgatacggcaacttctcacgaacgcttgttctttgttgaagtaatgggacgtgatgccggcttcctagctttgaacggtgctattgcctcaggtgcagaggccgctatcattccagagttcagtacggaagtcgatcaactggaagaattcatcaaaaatggtttccgcaaatccaagaacagtagtattgtaattgttgcggaaagcgaactgacaggtggagccatgcactttgcagagcgtgtaaagaatgaatatcctcaatacgatgtacgtgttactatccttggacacttgcagcgcggtggaagtcctactgctcacgatcgtatccttgccagccgactcggtgcggcagctattgatgccatcatggatggacaacgcaatgtaatggtcggtatcgaacatgacgaagtagtatacgttcctttcacaaaagctatcaagaatgataagccaatcaagaaagacttggtaaatgtattgagagaactctctatttaattagaatatagtgaaatatgaggttgtgtcaaaatgctggcacaacctttttttatgcgcaaagcccagactttcccaagcccg

SEQ ID NO: 6395 - DNA, 13773 bp, Unknown
  gut microbiota DNA sequence
attcatataaaaattatatatattgtatctttaccgaagctctatctcaaagaaaagccttatttttgtaacaaataacagctttatggatgtagcacctatattatacaatgagtttccgcttttcctgaaacgttattttccgtataaggtacagaaaatatcactgaatgccggtttcacctgtccgaatcgggatggcgtgaaagggtatggtggttgtacctattgcaataatcagactttcaatcccgaatactgccgtacggaaaaatccgtaactcagcagttggaagagggtaaagtctttttcgcccataagtatcccgaaatgaaataccttgcctattttcaggcatacaccaatacttacggtgaattggaagcattgaagcggaaatatgaggaagcactgtctgtttccgatgtggtcggtctggtcattggtactcggccggattgcatgccggatactttgctgcattatctggaagaagtgaataaaaacactttcctgttggttgaatatggtattgaaagcactcacgatgccacactccgccgaatcaatcgcggacacacttttcaggatacggtagatgctgtggaaaggactgttgcctgcggtattcttaccggtgggcatgttatattgggacttcccggtgaaacgcatgaggatttggttgcacaggccgctacgctgtcgcgtcttccgattacaactctcaaaatgcatcaattgcagttgatacgcggtacccgtatggcacatgaatatgaacaacatcccgaagacttccaccttttcggggtagaagaatatattgatttggtaatagactacatagagcatctgcgccctgatttagttttagaacgctttgtctcacagtctcctaaagaattgttaatagcacccgactggggactgaaaaattatgaatttaatcatcgaatacaaaaaaaaatgcgtcagctcggagcttatcagggaaagaaatatgatatgtgagaaaaaaaacttatttttgcggctgtttgaatgtagaatcaatctaaataaagaagttttatgaaccagaagactatgataaaaggaaaaatacactatgtaggagtcaatgatcgtaacaagcacctgtttgaaggcttgtggccattaccttatggagtgtcttataactcttacctgatagacgacgaaacagtggctttgattgatacggtagatgcttgttatttcgaagtatatcttcgtaaaataaaaagtattattggcgaacgtcctatccagtatctcatcattaaccacatggagcccgaccattccggttcgatccgcctcattaaacaacattatcccgatattgtcattgtcggtaataagcaaaccttcggtatgatcgaaggttactatggtgtgacaggcgaacaatacgttgtgaaagatgacgatttcctggcattgggacatcacaaactgcgtttctacctgacaccgatggttcactggcccgaaactatgatgacttttgacgaaacagaaggcgtactattctccggcgatggtttcggatgtttcggtacgttggatggtggtttccttgatacccgtatcaatacggatcgttattgggatgaaatggtgcgctattactccaatatcgttggtaaatacggttctccggtacagaaggctttgcagaaattgggaggattgcacattacgaccatctgctctacccatggacctgtttggacagagtatataagtaaagtaataggcatttacgataaactaagtcgctatgctgccgatgaaggagtggtgatagcttacggttccatgtatggtcatacagagcaaatggcggaagccatcgcagcggaactatctgcacagggcatcaagaatatcgtgatgcacaacgtcagcaaaagcaatccttcctatatcattgcagatatcttcaaataccgtggtctgattattggtagtcccacttatagcaatcagatttatccggatatcgagtccctgctttccaaaatactgatacgcgaagttaaaggccgctatctgggttacttcggatcgttcacttgggcaggcgctgcggtaaagcgtatggctgagtttgccgagaagagcaaatttgaaattatagccgaccctgtagagatgaagcaagcgatgaaggacatcacttacgaacaatgcgaacacctggcacgttctatggctgaacgcctgaagaaggacagggaatagtaatttttgataagatacccctaatttattaacctgataaaaaacaatcacaatgagattaatcattcaaccggattatcaatccgtatctaagtgggctgctcattacgtagccgctaaaattaaggccgctaatccgacgcctgaaaaaccgtttgtactgggttgccctaccggttcgtcaccgctcggcatgtacaaggagttaatagacctgaataagaaaggaattatttccttccagaacgtggttacttttaatatggatgagtatgtggggctgcccaaagaacatccggaaagctactactctttcatgtggaacaacttcttcagccatatcgacatcaaaccggagaataccaatatcctgaacgggaatgctgccgacctggatgctgaatgtgcccgttacgaagaaaaaatcaagtcttacggtggtatcgacctgtttatgggtggtattggtcctgacggacacattgccttcaatgaaccgggttcttctctgtcttcccgcacacgtcagaagactttgacgactgatacaatcatcgccaattcccgtttcttcgacaatgatgtaaacaaagtgcccaaaacggcattgactgttggtgtaggtacagtgctttccgccaaagaagtgatgattattgtgaacggacataataaagctcgcgcgctctatcatgcagtagaaggttctatcaatcagatgtggaccatcagtgctttgcagatgcatgagaagggtatcatagtagctgatgatgcagccacttttgaactgaaagtaggcacatatcgctattttaaagatatagaagctgaccacttggatccggcctctttgctgaagtaaacatacaactgatataaaggtaatttgcgcagttcgtttccgctaataggtgcgaagcggattgcgcgattttcttttattttgtccaccctctcttgtttgatattatctttatcgttcttacctttatgaccttgaatgaataaaatcgtttgtttatgaatgatatagattgctcttacgacgatttgctatgccgctctctttcattgttccgtcagtttcggttgtatgacgatcgtatagaagaggataatgcttttgtttttttaagggaggcggaaaaagtagtcagtgataccagaaatggagtttgtgtggctaaattgggatgtgtaatagaatgtcttgcccacagattttatataaacgatgatacggatgtaatactggaagaggtagatgcctttctgattaaattttggaaaggtttgaagcagccttctccggaaacatttattgcttccttatggattggagaatactttctgttgcgtttaaagaaccccaaatcccgtctgcatggtcgtagtaaaaaaatggtttccaaaattctgtcatttatggctgatatgcttcggaaaccggaaaaacaaaaagtactcagtctctcttctgttgctgttcttgaggaaactgtagattgggttaaagaagtttgcgatgtacatatctgtgaaaaacaggtcgtaatcctgctagaaaggctttattatcttcaggaaaaaggaatgttgggagaagaagcagatggaaagaacgctttgcggcggcaaatatgggatttttattattgaatgttatctttacaattaactttatactatgaacgtgcttggtggagttcgcatccggggatggatataaatcatactgcgcagcttgttctgtcgaagagcacggatgatggtaaaacctggaaaatgcataattatgcccgtacgaatacaacggaggcgcaggttgtcgaggtagaaccgggggtgctgatgttgaatatgcgtgataaccggggcggtagccgtgccatagcaattacgaaagatttaggtaagtcatggactgaacatgaatcttcacgtaaagcattacaagaaccggtttgtatggcgagtctgataagtgtaaaagcaaaagataatgtattgaatcgggacttactcctgttctccaatcccaatacgacgaaggggcggcatgatattactattaaaatgagtctggacggaggtataacctggcttccggaacatcaactttttattgcgaatacgtattcagcgaaattttagtctaatttctttccatccagatattccctcttgaacatatctacaaacaggaagaatagtgacagtaacagtggtccgaagatcactcccatgaatccgaatagtgacaggccgataacgactccgaatatagtgatcagaggatgtatatcggccattttcttttgcaggataaagcggatcagattatcgagctgagagatgatcagtgttccgaatatagccagtccgataccattgaaaaggtcgccggataatgccatataaacggcaatcgggaaccataccaatgctgtacctaccatggggatgaccgtcgcaaggcaggtaaggaatcctgtaagcagaatgtccggtacatcaaagaaccagtaaccgatcatggctactccaccttgtatgattgccagcaaaggaataccgacggcattggagtgtacaatcatcttgatgtcgtgcactacatgctctgtattggcttcgctgaaaggaagtatttcgctgatgtatttctccatctgctgtccgcctatcagcataaagtaaagtacgaataccaaaacgaaaaggttgactgcaaagctactgatgctgcccatgacgaattgccctatggcaggaagtgcggaaataataaaagaagtggtatccttacccagtacgtcgtaaccggttttttccttgatgatatttgctgcactttcaatcggggcaataatactttgcgggtcgaggttgatatcctgcaatttgctgaccaatagccagactgccagtgccaaaggaaccagaaagaagaggatagcttcggtagtaataagagttgcagccacacttcgtttcattttccgtttgtcggtcagatgtatcatttgccttctgaccaggatatagatggtcagtgcacccaataaaccgcccagaaagggagtaatctgtaggaacaggattatacccagcccgatgattatagtgattagtgaatatttccagtattgttcttttgtactcatattcttttttgctgttttcttaagaaacaaacaaagtgagcatttggttggttatccttcattcaaccagccctttccctggcgaataacttcaatttctccgcttgtgcagtctacaatggtagaaaattctgtaccgccgataccaccgtcaatgaccagatcgacaagatcaccgaatttttcatcgatcaattccggatcagtgcagtattctatatcttcgtgcgcttcgtgcgggagagtggtagtcatgatgggagcgtccagaatacgggctatttcctggatgatagcattgtcgggcatacggatacctacttcttttcgattacggaaaatctttggcaggcgggtagtgccgttcaggatgaaagtgaaagcaccgggcaggttgcgtttcatcagtttgaacgtattgttatctacctttgcatattcgctgatgctacttaaatcatagcaaataatggaaaggttattcttgcgcggatctatctctttgatacggcagatacgttcgatggcacgttctttcagcccatggcaaccgatggcatacatggtatcggtgggatagatgatgaggccaccgtcattcaaaatatccactacctgttgcaggtcttgtggattattgttcttttcgtaaagtttcagaagcatagggctgataattagtctatatataataacacaaaagtagggaataagtttcttattctcaaataagtgtggcttatttcttggatgatttttttcgaagttcttctgccagtcgccattgcaatgctgcctctacttcttttcctgcctgcatcaaggcgtccccgaagagctcatgcgctccggcatgttctggtttcagggtggtagctttgtccagatcggctatggcgccttcggtttcttgctgtttcagacgtaattttccccgattgtaaacagctttaaattcagccggacgtagtttgacggcacgtgtcaggcattcttccgcttcaagatatctgccgtcattgaagagggtgatgcctttacgtatccatgcatccgtatattccggataaagttccagcgctttgtcgtagttggcgatggcggcacgagagtcatgggcaagagtaatggactcattgcccatcagataatactcacgtgcgtaggcttgcaaccgtttctgttgctctgccatttgggattttagttgatcgttgttgtctcgtagcttgttgataacccctaacttgcgacggatgaggcgttgaataacaggcttttctatgtcgtatcgggagtgtatagctttaaagaaatggttgaggaagacttcgaaatctcctttatcgaatgctttggttgcagcagcatattctacgtcggcttgcgcctgtttcagggcgcggtctatggcttgccggttattgaagcgttcggcaaaattcactatttccgggcgtacaaagatatcagcccgattcactggtttctttagttgaataccttccagtgaggtgcagcggctgagagcgacgtacgcttgtccaccggcaaatacaccgccggtgaaatcgatgactacacgactaaaggtcagtccctgacttttatggacggtgatagcccatgccaatcgtacgggaaactgggagaaggtgcccaacacttcttcttcaatttcttttttcttttcgttgtatttatagcgaatgtttttccagtgctccggcttgacgtcacattctttcccatcatcagtgatgacatagagcgtttcttctatctcatcgaaaccactgactacaccgatagtgccgtttacccagcggcggtcgaaatcattcttgataaatatgacctgtgcacccggtttcagcacaagctcacgcgaagtgggcagactgctttcgggaaagtcgccggtgacttctccccggaaggtaacagcgtctccgggcagttctgccagtttccggtcattgatataatctacgttatcgcggcgcgtagcgagggtgatatacatatcttcctcattctcttcgatgtcggttccgtagcgggtgttgagtagttgcaggtcagcggcaccggcagtattgctgcgaatatggtccagaacgctgacaaagactttgtctgtttggcgatagaccttttcaagttcaatggaaacaaggtctatctggttgaaaacccttgcagagaaaaagtaaggagtaggatagaagcggttcaggatttcccgttcatcacctttcactacaggttcgagctggaaaacatcgcctactaacaagagttgtttcccaccgaaaggttcgcgcaggttgtgtgagtagacacgcaggatacggtctacggcgtcaatgatatctgcccgtaccatggaaatctcatcgataataatgagttccagttcttccaatagttttcgttggggtttggtgtatctgaagaattcgtgaatgcgtccgcgttgcaaactcagattcggatcatcgggaagcaaaggatgaaacggtaatttgaagaaactatgcagggtgctgccaccggcattgatggcggcgataccggtaggcgccaataccacatgtttcttttttatattctcgcaaatatatctcagaaaggtagatttacccgtacccgcctttccggtcagaaacacggactggcgggtatattgtatgagactcagagcatcctggaactctttgttgctggtatctacggtttgggacaagatttagtaattaataattggtaattagtaattaaaaagaggattatataatggagaaatgtttaagtgcattggctactccatcttcatcaaccgaagttgtaatgtaattggcatgttccttcacttcgtccacagcatttcccattgctactccgatggcggcatggcgcagcatacttacatcgtttcctccgtcgccaaatgccattgtttcttccaggcgaataccgaagtgattgatgatttcgtcgatacccttttgtttggtatttcctttggcggtgatatcggcaaaggcaggaaaccaacgcccggattcgcagtccggcaattggggaagaatctctttttcttgctccagtgtaatgaacggtgtcatctggaagatttcccggcgaatcgcttcttcaggtgtctttacgggaagcacatctactttcagataatcgttgaatatctttttcaccatatcgtccggctggcagacgcagatatcatgttcgcctacaaagatacaggggaaattctgttcggaggagatgcgtgccaatgtctgtacgtcagcagcaggaatcgcgctcttgtaaatcacttcttcacctacgaaacaatatccgccgttcatggttatataaccgtctattaatccacggtcctgcaaggcagaaaggttgttgatgataactgcggggcgtcccgtagcgataaaaatccgaatgcctttggctttggcagcggcgatggcttcgatggtggttgggggaatagcatgggtattaaaactcactaaagtgccgtcgatgtcaaaaaacagggctttaatcatataatttctattttacttggttgcaaaagtactcaaaagtgaggatattttgtacttttgtctcctaaagaaatcgtaaatagtcattatacattaataaaataataaaagctgttttagaacgcagttaaatcgcaaatgaagaagcattccttaaaagattggctgatagctgtacgcccttggtcgtttccggcatcagcaatgccggtgattgtcacgctggcatatttgtattgggcatacggggtaatagaatgggcgaacggactgttagcgttggccggtattgttattttccacgcttcgggaaatgcgtggagtgattattttgactttgaacggggagtggacagggtggatacatttggtgtgaagaccctgacaagcggacaattcatgccattggagatacgcaacctggccataggcctgatggtgccggcggtgatggtcggtctttggctggtagtccgtacggggcttcctttgttgtggataggtgtttgtggagctttgtgttcgttgctctatccgtggctgaaatatcgggctttcggagatttcgttatttttgtagcttatgccatacttcctactttgggtatatcctatattactatggggaaattcctgcctgatgtatggttgataatcgttccggtgggattgattacagtagccatcctgcacgctaataatacgcgtgatataggtacggatgtaagagcccggattagtactcttgccatgaggcttggggtgaagacggatattttcctatatatgttcgaggtgcttttcccgtttctgtggatcgcggcttgtgtagcgttggggtattttccgtggtggtctttactgacgatagtaggaattctgcctgcaatagccaatgcacggactatgttgcggttgccgaaagaaggaattggtgtcatatccaatctggatgaaaagacggcgaaactgcaactcttgttcagtttattgtttactgttacattcctgatatagtatgaaacgaattattattcctttattgatagctgctttcttgtggttctttatgttttctccctggacaagcggaatattcaacttctggacggccatgagtttttcggctattgtgttgatgaatatggcttttgcgcttcgtccacagtggtggatagaagatgtgaagttcgattggaagaatattgccggaggggtgggattggctgttgttttgtggggagtattctggctgggagataaggcttctgcctggcttttcgactttgcccgtccgcaggtggaactgatttacggaatgaaaaccggtgaaaatccttggttactctccatattactactcatattgataggtcctgccgaagaaatcttctggcggggatatgtgcagaatgctctttcgaagcgctggagcccgaatgtcggttttattgtgacaacattagtttatgcattggtacatatctggtcgttcaactttatgctggtgatggcggcgttggtggttggtgctatctggggattggcttacagattgtatcctcagaaattgggagcattgattgtgtcgcatgcagtgtgggatgtggcggtatttgttgtgtttccgatttaatgactcaccacggattacacggatttacacagatgaaaaaatatatttttgattttcctgctttatatctgtgtaaatccgtgtaatctgtggtaaaacaaaataaagctattatgaaatacaattttgatgaaatcattgaacgtcgtggtactaactctgtgaagtgggatggcgtaaagaatatctgggggcgtgatgatttgcttcctatgtgggtggccgatatggacttccgtactccgcctttcgtgatggatgctttaagaaaacgcttggaacatgaggtgttgggatatacttttgcttgtgaagagtggtataattctatttgtacatggctgcacgaccgtcatcagtgggatatatcccgagagatgctgacattcgttccgggaatcgttcgcgggcaggcttttgccctgcaatgtttcactaatccgggggataaggtaatggtgatgactcctgtttaccatcctttcttcttggtgactgaacgtatggggcgtgaagtggtatattcacccttggaattacaggatggacaatatcatatcaattttgagcgtttccgtaaagatttgcaaggttgtaaagttctgattctctgtaatcctcataatccgggcggacgtgtatggacagcagaagagttgaaagaaatagcggctatctgttacaataatggcacatttgtgatttctgatgagattcatgccgatctgactttgcctccttataagcactatccgtttgccacggtttccgaagcagcagcatcgaactcacttgtcttcatggctcccagtaaagcattcaatatgcccggattgggaagttcgtatgcgattactgttgataaggatattcgtgaacgttttcagacctttatggaggcgggtgagttttctgaaggacatttgcttgcctatatcggtgcggcagctgcttacatgcatggtgcagaatggttggagcaaatgcttgattatataaaagagaatatagattttacagaagaatatctgaaagaacatattccgggcattggtatgatacgtccgcaagcttcttatctcgtttttctggattgtcgagctttggggctgacacagaaagaattaacccgactttttgcagagaaagcacatctggctctgaatgacggaactatgtttggtcaaccgggagagggctttatgcggttgaatatcggttgtccccgttcagtgctgaagcaggctttgcagcaattacgtgaggctgttgtgcagtaatatcaaaaagaagaatctatttttgttggccgtacaggtctatattatatgaagaaactcttatatctttttattgtaagtggtattctgctgtgtgcttgcaggcataccgatagtactgctttgctccgccaggcggatgcggtggtttatggcaatgcggatagtgcaatgaagctcctgtcgttaatcaagaatccggagcggttgccgttcgaggaaaaaatgttgtatggctggctgcgtacatttgcgcataatgtacggggagcctccatggcggaagattctttgattttaccggcatttcattattttgtcgccggtccggacacggtaaagatgctgaattcattcgtgctgaaatccaaatatttatattggcagaaaaagcataaagaggctatggctgtactggatagcggtattgcggcggctacggcatgtagagatacttatctgatggtcaatatgctttctgagaaagcaaacaggtatgtgtacgttgagaaggattataaaaaggctatagaagcacatctcagagcgattgccattcgtgaagatgaaggcttgtgctattctttgggtattgccatgggattacagggaaatgattcggcttcttactatatggaccgaagcattgaactggtggagaaaaagaaagatacgacgcgcttggtgcattatctgcgaaactacgcgcagctattgtcttatataagcagtgattataaaaaggcggcggaagtgtcgaaacgtctgcggagtttagcacccgatggggggcaggttgccatgaccgacttggtgctgacagaatgttttctgaaaatgggagagttggattccgcccaatactatcttgatcagggcagagcattacttgcccgccgggagaagcttctgagtacagaaaatatgatgacttattatcagggattgatagattatacacgtcatcgtacatttgatttcttgaaggtgatgcgttataatgattctgttcacaatgctctttatgccttacaaagtaccattcagcggaaggatgaaagtaaggaatcactttcgaatgctaatttgcagctgacggtagagcggcaggaagcacaactgacgctgttagcttgtctgctgttactggttgttacgggtggtggcgcctttttctatatccgggctcgtcgtcatcgtctgattgaagcggaagagcgaatcgaaacactgaaccgtttgctggcagatgctacgaagggggacagtgaaccagggactaccggaaatgttaatcaggaagtggaagacggacagtttttccgaaaaatacttttgcaacagttgggcattattcgtttggtcgctacgcagcctacatcacaaaatcaagatttacttcgccgcatatccggcattacgaaccgggagttgcccgtagaaagtcttttggtatgggaggatttgtatcccgtgatcgatcgtatatacgatggcttttatactcaaatgaacagacgttttgggtctgtactaatagataaagaacagcagctctgttgtctgctttgcgcagagttctctacaaaagagatcagtgtagtgacgcagcaaagcattccgactatttatcagcggaagacgaatatccggaagaaattgggaatgggggagaaagaggacatcgtcagttttattctggagaaataatacctgcttttcacatattcgtatgtgtattcgtgttttttcgattatgaattaattcaccacagattacacagattcacacagatttattaatctaataatcagtaaaatagaatctgtgtca

SEQ ID NO: 6396 - DNA, 1458 bp, Unknown
  gut microbiota DNA sequence
agatagggaacgtaagcaaaatcacgcataatggagtgtgtgcggctgcccatgtcacgtgcaagcacttggaaaaagagtgtgttgagatcatcatagtcatgaatcttagttattgaaagaaatttatagattgcatctccattgtggtatttcaacatctgagcctccaacagtttcaagaaaaggatacgattcatccaagtaatacacaattccattgcaacattgaataaccgttcctcataatcattcccatacaaacgaccatttatgtgacgcaaacaatcttctgcatccagttggttaatagtattctctagtaatgaagcctcgtcacgccgttccacagctttgcgtacaatcacggttttattattctctttgcgttcctcaataccaataatgtgtagcagctcagtgtagaatccacggttgagcgaattgctgtcattttggaacgatagcttcaaaagatgtgtatcgctgaatatcttataaagttcgataagtttgcgtgaagcgctactgtctgttctatcaagcaggtgttgatagtcttgtaagttgaagtaagtgtattcaaggctatctttcacctcctcaatataggttgttgcaatttcagtatagaagaaatcggttttgttactggttttgcgtccatccacaaagtcttgaaactcacgacgtaattgtttgttctgatagaatttgcgttcaaactcatgggcatcaaaaataaagaattcatgaatattagtagcgatgagatatttaatatcattgttcttcttattgacacgttctttaagatagtatagcaataattcctgcaaagccttacgattaagattgtcattagaaatcatctcacctttgttggtggtactctttacttcaatcaataaccctatattggacttgatagttttatccaatcggatagccaaatcaatatcttcttcgggagccatgtagtatggcttgtagaacgtttcactcagaaaattacgtaaatgttctttttgcgtgtgttctctttgcccatccacaatattgtctctcaatgtgcgaagggcatttttgaataagtcaaaatctgttgtttcaatcgcaacctgtctatatgctttgttcaaaacttgattcggtttgagtagtcccataatgtttggtaaatgagttaataaaatacaaaggtagtctaaaaacttgataataaagaatgaacgtattggtttaacgaaagtttgttctactgccagccattatcaacaaacaatagcagcagtagatttgacatgattctacttattatattgtaatagccagccaaagtaatcttttcacatccggatctatcacaggttggataagttgttaacctgaaggtaaccgacctgatggtataggaacaggaagaagtctgtaatcatggcatttacccggatagag

SEQ ID NO: 6397 - DNA, 542 bp, Unknown
  gut microbiota DNA sequence
cgcgcaaggaaaggtgcaacgcttcattcagatgataagaaaagaaagagtaattcttaatgttccgccccaatgaagtgctgcaaagcaagtcgggatgaaaagccaacaaccagccctttcggggaaatgcctttccttcgttgatattgatggattgtcccggagtcaggaaaatcattgttgcgttggaatagtcgtaatacttacgcccgtagatgaaatcctcacattcgcattccaacagtaagatggtgtagaaatcgaacttgatagtacgctgcatcacattggctttagataagtcaatggcgctcaccaacggatgtaaggtcttatttcccaaacagcaattgcactggtgtacggtctctatgttcaatatatcctttttcaaaactgtacattttgcagtctatattcattgggcgtacagccgacacgttttttgaacaggcggctgaggtgttgcgggtattgaaatcccaaggtataagcaatctcactgattgtctcgtccgtttcaacgatatgttctttag

SEQ ID NO: 6398 - DNA, 137 bp, Unknown
  gut microbiota DNA sequence
ttgctgggctggtcatagacaggcgtgaactccgagccgtggttccacagcacgaggacataccgcttggcgggcatccgctctgccgcgtcgctgatgaacgaggccaggtggtcgggattgtccagacggtagtc

SEQ ID NO: 6399 - DNA, 33223 bp, Unknown
  gut microbiota DNA sequence
atttttttagcaaaattctcgactttatctatatgagcttgataatctccttttatcgcttgtttcatagccagcagcaaatccctgtcattctgcgataccatatccggataaaaataagaaatataatcatagtattcctcatcaatatacccccggcgtagaaagacattcatcaacggctctaattggatttgagtaaaatcttcacactgggtaaaatcatatgcagaaaataactgtgctaactttaacgatttgatacgcctttcctcatatacgatatttttttgttctttaataatttcttttgggaaatcttcaataatctttttccgttcccaataagatttacatatagattccgatatattcaaatcacgcctattattttgagaataataattttcaaatatatagttgattttttttaacgacaatatattctcaaaagtaacttcattttctataattgattgaatattaatctgattattgtttatcattattgatttaggatatgcatacatttcatttataatctgatatgctataatactccttaagtctcttttagaaatatgggtattttcagcatgcagcttaattttttcttctaatgcttttctccgattttctagtgtctttaaagcgtatgctacaaacttactttttgatgaaatacattgatacacttgcccttcacgattatgcaacagtgcaaagtctcttggaaaatagtttttatagacaatcatcgccaaaagttttgtcggattcaacgatatttgtccggcaatacaaagtcgtttacgatactgctgatattcattagcaatattgcgcaacagacgcatatcgttaataaaaaaagcaatctcctccaaatcatcatccggtatgtctccatatcctcgtatacggagctcctctttgagtttatcttttgaattcgatggatttatgacagggataacagtggatatataatcaaagaacttggctctctgtgaatccttgaacacgtcatctttaactgcatatataaaagtgatatgtcgtccgatttctttggaatcattaataagttgattcagctccctaagtttaagatatatgtctgacgtattgaaacgatcgagatcttcaataattaatacatcgtaattcgtgacctgaaaaaaataaatgatttcatccagatgtttgttaaatatggatgtttcctcatgccactctacctctccatctttcagattgagtttgctaagtttatatccgcaataggtcaagagcgcctttcgtacgcagataaataaacaggcaatcatatatacgcaactgagtatatcaaatattgtattggcagtcgtaccccagtcgaacaccttatacatcgaatcgacccgtaaccaggtaggttcaaatgcaataaggtaagcaataaagaatccgacaatacccaaggtccatttgcataacttctttttatcaaagtgaaaaattcttctgaatcgggaatttggtaggttttcatacttctcacgatatatcaattgttgaagtatgctgtactcgatcaagcggttgagcttttcgacttcttctttctgattcttgtccccgtcaggaatatcatatgactccaatgttgccaaagagatctgcagataatgaaaattcgaatagtgtttctgtaaagtaaatagcactgaactttttccagaaccataaggcccggtcaaagctatatttcgtaaattactatcagacttaagtttatctcctatttcctcgacgggaagatattgcggttctttttcatctatgatcgtgggcatcattgtctgttgttggacattaatgtcagtagagtcttgttgcataattctatttgtcttattcttaaaaatactaggtatattcatgctgtctaactgctttatatatgcaaaattacaatatatttccggagcaaaaaaacgtctgcatatattaaattttttcattgatttcagtttcgctttccaatattatgtgggaagcttgttgcagtgattggcactttgagttttggaatacgtttccactaaagttttatgtatgttgtgtttttcaattcacgtattgtaattgaactgtttattttggcaataccgtttatgcgtgtcagcttttcgaatctgaatttgtcataggcatccaagtcttcaagaacgattttgattaaaagttcgtattcacccccgatggaataacattcgacaacttcttccaattgaacgatttcatttacgaaacgggcgtagttctcatgctcatgaaccaatagcgcaagacggcaaaacacaactaacggtttaccgattttgtctttatttacgatagcggcatagtgagagatatatccatcgctttccaaacgctttaccctgtcatataaagggcttttggataggtttaattcatctgccaatactttcatgttctgtttggcatctttttgcagtgcatttaatatgattttatccgttttgtccattttgtaccgtattttttcctgtttatcttttttatttagttagttatgcaggattatttcctgttttatacgcaaaaatacaacatcttcctcatttaccggcatgatatccagcatatatattgaatttcttatctttgcacaggaaataattctagaagttaaaaagataagaatattcaaactgtacttgatgaataataagaaccaagctttttataatgcgcgtaaactggcactgacaaaagcatttccggtaatgctcggtatagccttcctcggtgtcggatatggggtatatatgcgttcctgcggtatggcctgtctgcatggcagctactatatttgccggttcgatggagtttgttactgttagcttattgcttagtacgttcaatcccggttatgccctgcttctaacgttgatagtgaacggaaggcatttgttctatggaatatccatgttggaaaagtatagcgacatgggaaaaaagaaaatatgggctgtttccggactgatagatgaagcgttctcactgaactatatgacagatgtccctcctggaacagaccggaattggttcatgctctttgtttcggtctatctttatgtgtcatggataggaggaactgttattggtgcgatttctgccagcgaagccattgcaagcactaagggtgttggttttgtcatgacagccctgtttatcgtgatattcatcagccaatggcaaaaagaacaaacgcacggcagttctatattaggactattggttgcaggggcgtgccttatgattttcggcaaggcatatttcatgcttccaacgatcttgattatcactgtaatttttatggttcgttggctgactacaaaagataaggagaaactgacatgacggttacggaacaaattatcaccatacttattgtggcactcaccacacagttaacccgttggattccattctggatattcaggtctggtgcacacactccccggtatgtaaattacttgggcaggatattacctcctgccatattcggtatgttggtggtctattgctacaaggatacggattttctatcaccttcatacggcatcccggaaatagtatcgggaatctgtgtggtagttattcaaatgctttttaaaaacatggcttgttctattttgttagggacagggttatatattcttcttgtgaactgaaatatagctataacgaaatctgaaaactccgcattgcaggaatacatggaaaaattcagggatttgcctcctgctggcacaaggcagcagatattgaaaatgacatctctagaaggtttattctcaattatctatccccggttttcccaacctttcagattttctctttatttttgcccacgaatagcaaccttaaattcatcaaaatgaataaattcgttttccagtgttcgctttcaactgaccaggtgaacttgttgaaagaattttccaacaaaatacatattaacggcgatgcagtcgtacagttcgaagaacgtggacaattttatttcctttgttctaaagatagcaatcttcagcagcactatactaacgataacggctggttaattacttatagttatccatttaacgatgaattaattatcggccaggggttacatgaaagcaccacctatgccggctacctgcatacctttgaagacaaggataaagtaaaaatgtggaatgatattttagacttcgccttccgcagtgattttcatcgggtgttctttcctatggagaattatttcaagggctgtctgaagttggataacagcctttgtttttatctgtacgattatgttcctgtctcacgtaatctcaaagccagtacggatctaaagaaaacgaccaatcttctcttccgtatgaaagagggtcatgtcgtttccctcacagcgaaactcttttcgttagcaatgagccgcatctatactatcaccggcaagaaggacaattctattttaattccaattccggcatctacccttgacaggcacatgcaacgattttcatatttctgccatctgctgtccgaaaggacgggcatcaggaacggttacaatgccatccagatagaatccgatcgggctgagctcaaaggtgtccgtaacgtagataaaattttcaacctgaaattcaatccatcactattctgcgacaagcaggttatactcatcgacgatgtacttaattccggaaccggctttatccagatcaaaagaaagcttatcgacttaggcgcaaagtcggtcattggggttttcctggtaaaaacaactgaggaagaataagcccttcccctaggaaaactatcacagatataagattatgggggcgaggttatttcttgaaccctttaattatatcctttttcattttagcgaaacatcggttattatcggatataaatttctcaccgaagagatcctcttttattttttcttccgtatagcgggtactaggatcactttcggcaaaaacattgtgcaacatctttatttgtgccggagaataatcttgtaaaagatcaaataaacgcaacgcttctcctttgtgatagttgtagcgttcccgaaggtgaaacatatcgacagatttttgatataagggattattataatgaaacgtgattttaaaatcatccggacgcgcctgactattaagtatcgcgaatgtgtctttgggggttatagagatttcaacggaattgtcaaaattataagtggaactagtcgggctaagcgaactcatttccgttgcatcattacccaatacatcagtaccctttagtcgctcattacatatcggacagcttggcacaaagttaaataacgaaagccctacaatcggacattcgcttttcggcagcacatgatccagatcgtaatgatttcttttatagttatctacttgttggctcttcttaatagccggagagcgccaaattgataatgcatcaaattttcctatattaccggaataaggacgatttttaatcactgttcttgcacttttcaaggaaataggctgtccgtttgctttgggtataaaataagtcaaatcttcaagagaggctttatctaataattcttccacattttgaaataacattttatatccgtaggcatttatataagaaatctcacaataatgacaggtatgaattttcaatttatccgcacgtctcataaaaaaagcggaaatatctggttgaaacattctgatcttgctcgttatctcttcttcaccggcttcttcttcaccgctctttttcttggtagttttggaatagtgaaaaatcatttctaaatctttgcagtcctctgatgatatttgttttgtctctacaagttgcttgaaatcgcaatacaattttgccaaaaaatcaaagtcagcgatcagaatatcatctatattgtctttatacaaatcaggcttagagcttttttttcgcaatttatctcgcaatggctcccatagcttttgcatctcacttctttccttgtcaaatatttgaagatattcctttttcaaagtggctatatcttctggtctatattcaattcttctcatctttttctaactcagctatctggttgtcgatattcttcaatttagatttagtttcctcacgttcacgatgcaacttctgtaatggagtttcatcaagtgaatataattcattgagcattctgtgaatagttgatttcagatagggatctgctatgatacttttcacataatagtagtaatctttattgtcagacaaatcctttaggacacgttccctatcttcatcttttttgccataaagtgtgataatacgatcaagcgcttcacgagcaatttcccccattgggtatttcatgaagaaatggctttggaggatttcatgaatatttgcgctgaatgtctgctgcatctttttaacatgacgcccatcttccaaatagaggatgttctcaagcggaacatcactcaagacaaagggggaatgtgtcacaattataatgttgatagaacgtattttacggcgatctatatggcaccaagaaatcatttttagtaactctgagacgaagctacgttgaaattctggatggaagtaaagctctgcttcatcgaatatcaagtttatatgacgataaggcattctatattcatcctttttgacactttgtatattctttatgtgataaatcacatagcttagattaaacagcatttgtttttccccactactgagccgggataatctaatctcttcttttattttcttctttgtttcacttacttgaactctgcggtgtaatgtcatgtcacaaaagaaaaaaggaggaggcaataatttgaaaacctgatcgtaagtgtcatatttcgtcttttttttatcctcgctcgataaaaactgattatcaaaatcaaggttatgcttaataaattcctttgcattaactgttattggattttctacagccaaatagccccgctttaaaaaggtaagacactgattgatttttagtgtaatatgattatcctcttcaagagagcggatcttttcaattatcgtattaacttgttctttactaataaaagatgcatccgagaatgattcaatgtttattattcgaccaaaactctcataggtcatacatattttcagagttttgtacccaaggtaaaataatattgtttcttcaacaatggggttattattatgtgcacatttaaattccttatttataatctctttccaacgtttggaaaatgcattaataagagaatccacattagaagaactcaattttttccttactttgtccttataaatttttagggtatcatttttataattctgattgaaacaatattccagttctaatggtctgtagccattgataaatgccttattttgggattcaaaaagtaaaaagagtgtcataaggcgttgacgtgccaattctttttcattagtgacatcaataattccaccttcttgtctatacggagtcattgttattggtgcgagatatccatcgttcttgtgaaaaagcccataaagccatttgccctcattacttgattttttaccggtttgaatatctaaagaatcatagtcatcatcatttagtgagtaaatactataattcgtactgatggtatagaagaagttatctagtattttatagtttctacgtaatggacctctaatctcgttaggttgcctgtctttattgattccataaaaatagcgaacatagtcatttttattaagtatggaacccactgttccgtccgtttcgaagtacagttgcgcatcaagaccttcagcaaacgacaatttacgtcctttatagtcctcattattaggtaataattcattggcgaagttattaatgatacggaatagcatttcaagtagtgtcgatttacctgaaccgttcgcaccgactacacaacttacacttatagttcttggcaatggatcacaggtctgatataagttttcggccattgatcctggcttacgccattcataattattttcccaaacaggttcaacaaagtcaccgaacggataccaacctggttgaaggtttttgatcacattctcttttccaccatctaaacgtattcctataatatgcataaattttaagttattaatcttcgtaatcaataattgataaagctagaaatattctcttttaacaaaattagtatttttaatcttgatatggaattatttttaggatttccatatctattatttttcaatccattggtttacgatatcatttccggctttcctaattggatgaagcgtattcctttacgttcatttgttttacacttcttttcccgcttgatcaactttccactttaggatcaatgtcattaccactttcatctaattcttattcaccaaatataccttttttaattgattggaaaaattcctttactgcctggtaaaacatcgtcgaaggtatatccgtggcggttactgttcaataattatttaaaaatctccagacctccctccgggcgctagtatttataaaataattcttgccctgtaacagcaacagaccttcttattgccgatgttcttcccagtcagttaagggaaattttaatggttcagggaagagcgataaacggtaataacaatataaaaacaaaatgtttatgtgcaattcaaattacgagaccatcaaagtcactttcacccatcctattcaaacgatagataagatgttttgcgatccgggtgctaattggggtatagaatctctgaaagagtggatcgaagcctatgaatcaacccgccttacccccctatcggataggacggtcattatcacttctgaatataatatgtcatttgtcaagaagtggctggaaatcaatgtagaaccggaaagaatagaaacattataaagataacaactattaaaagtaaacatcatggaaaccaagaaagataagatattagagaaattacgcaagttgatgaaccttaaagagtctgcgacagcgttgggaaacgaaggagaagcaaatgcagcggcagccggaatcacccgtttgttaatgcaatacaacctctctgaaaacgatataccggaacaggagaagttagataatccgatcgtagccgaaagaataccgtttaaatcggaagtatgcagcggagtttggtttactcaccttatctctgtcgtctccgaatataatctgtgtcgtgcccttattgtgagagctgcccataatggtaaaatgagacagagtgaatttgagattgtaggtcgcaaaaagaacgttgaagtagtattgtttttaatatcatttctatccaaccagtttgtttggatcgggaaacagggctatatgcagtataagagagattgtatcaaggtatacgatattcttcccaaaagtccggcaacctatctaaaatcattcctgtatggttgtgtattaggacttatcaagaagtttgaggaagctaaacatcagcttgagaatgaagccaattttaccacccttatggttacaaccaaaagcgaaattgatgtttatctttcaaatgaaaaaataaaatcagcccgaaagagccaatcatcaatagatcctctatcggcaagtagagggttcaaagtcggaaagaacattgaaatccataaaggcatccatgccgacaggatcagcgaagaaagaggattacgataacttttaaattgaaaaagccattggttacagttctgttcgtaaccaatggctttaattacctttgccacataaaaaatagttttagtctttcacctggctccaggttatattgagtggagacgtatcttcacctttgtaagtacggctcttttcgtccaccagtttaccgttaaaatataccttcacgtttgttgtcatgctcttgctgagatctttgcaggtagcaagctggacaaatatcatcataaccccgtcagttgcggtctgataggtatagttagcttgtttgttttcactatcggtaagtttgtaagtcatgccaagatcagatccggattcatcaaatattccattattcaggccattgccgccggtcagggtcgtactgatagtaaaatcatcaatatcaccggtctgggttatgaccattttgtatgtgcctttttttgcattaccggattcgtctgaatccttactgcatgaaaaactcatgaatgccgataatgtcagcatgataaaaaataaaatcttcttcattttgaattttccggcacttgttctaaagtgccttagttaaattagttaatactagtagcgtgttgaccttctattcaaccattcctttgataaaatatttttccggcgaagggatgatcagatccctatttttattcatcaaggatttataaatatcaatcacagaattaacatgggcgttccacataataatcttgttattcatttcagccaaagtgcggttctctgcatctgtacgggattccatacttcttaaactattatatgcctctatcgcatcctgcattcccagaagtccgtaatcagagcttaattgctccattttctcagcgtaatgtttcaataattcgtccataagtagataaatattttattgttagtactatagtttcacttcaatcttacttcttcgttttgctatgcgtcatccgatagcacttgtcaccggcagcattcagcataaacttctctgtcatttcctggcgggcaccattattgtacataggtggaataatagaaaaccggcattcgatctctttggccagtactttgctttccggaacgttcacataagcctccggtaaaacgactgttgtctttgagatcgagtccaggatcgtttggtttttatctatctgtttctgataaaactctttcatggaggcgaaacgttctttatccaggcttgtggtattacgctcgatactgctttttaagttggaaatatacttttccttatccgtttcaaacttgtcggtcagtatcttaatgctgtctccgacggtgatatcagtcggctcacccatttcgatcactttgaacttcaggtcagtccatgtaccgctccggtctgtttgtacaaagtcggcaattgctttttcataattattgttactgacacagcccgtcaggaagagggccatcactgcagctttcattatttgtactttcatctttgttttatatatttgttcataattagtccgtatgcgttgtaacttggtatgtgtatatttttgcaaatatgggaaagattatcggttttgactttccatttttcctcaaaatattgtcaaatttccctgcgcgacataaattaacatggctctgactttaaacaaggagggtaattctcttagattgcatctctaaacatcttccccaaaatacagttcagtacctctatcgggggaaccaaaattaaaattcatgaatgggattgtttttatactccaatctatccgaaaatattattcttttgtttcgaagactccggtatgctttttatgtcctcatacaggctgattaacagcatctgtaaagtattggctttaaaactatacggaacaaaataggactgtacgacaactcccatgtacaggcagtgaaatttcgtagctgttaccggcacatcgatgcttggttttacctctccagcttcaatggctttactcaatacgttttgccaacactttaactcttcctcaaacaaagatttaatttttatttcaaagttcggataagaagcggatgcatgaaggaaaaagtttataacggtagatgcactgtcacccgttagttccacaatggattggtcaaacctctgccagttatctacatagtcaaatataaaattccgcaaggtcgttttctcttcattatagaaaaagctgaaataatccacaaccttctgaaaatagtgttcaacggttaaccgggtaatctcctccatgtccttataataatagaaaatcttaccacgggtcacacctatacttttttcaagatcggcaactgtcatgttgccttcccgcttttgtagaaagagtttaaaacacccatctaaaataatctcctttttactttttcctcctaattcagacttacccattttatttacccgccttattatttagatacaaatatacctaaaatactgatatttcttacatcttatctgttttttctacaagacaagagtatatagtatagtaagttattggaatttattttacacttaaaaactcatggatgaaaggtacttaatacataatgacatagtgacttacaaatatcatccgacaataatcgctctatggtcagatctttcttgtcacaattgagactcactacttccgcttcattttaatatttctttcctttaattatttagcatatttccgaactattgcgctataattacggtcttccttcataggtacaaccatatgaactagcttttcattataatctatagtctttttgatgattttgcacaaagtactcagatttgttttttgtcgttcgttgagtcgtgtgtcaagagcatgaatatttccgtcgaactcatcaagaaacttatagaatcgacaaatcaatccgacaatacaatctgaaatttgtatcattggttcgtctttagaatctttgaattcataggattttaagggtaaatcacctattttgaacgtaacatccttgaaatgattctcttctatttccttctcatggtcaaaaatatgttttgaactataaaaaccataaatcggataataataaaactgggataaatctttcaagaaaatccaatcttcctcatcttgaataaaagggaggctggttatatcttcatctttcatttgagccaacaacattgaaataaaaggtgttgtaaccattctgttcttatccatataatccctgatcgcttttaagaaagcctcaatattttcattactaatatttggataattatatttatataagatatcattaaaatcggtatgatttttcttggcaacttggtaaagatcatttttaaactcaaaaacaagaggatagaaccttggtttaataaccgaatctacgatatctaccaaagcataataatacaaattgatcactgaataatgcacatagaactgactatcaagaatccattctaagaaaatatgtatatgtttattatccaagatttttaaaagatccccattatataaattcttgcttttcaattcttcaagatctttagatatgttcaacttcgctttcaaggcctctacatcaggtgcagcacatccctcttccagatatacaccacctaatacaaaatgcctgtctatttgttcattcacacctgtttctttcagatagtattttctaacattatctgtttcgtcataataaaatgtacccttaatatcaaatagttctttagaaggtgacatttcaatacattttctcatttcatttatatcatattccatagtagtatatttaataagctcactaaattgaaaacaaagatattgattaaatacaaaaatgttctatttaataacagtaagattttttttgatcagatctttataaatacatcttcatcaatcttcttacctgtaatatgatcatacaccctcacgttgtttaatatatatcctgaatatccggaagcttttaaaagtaaaatggctatcaatttttgcaactgaaggcttatatgaaatagctctttgaattcctcttcagagttagatccaagtggcatgtaatcagaaccatgtataaacgtattacgttttttgtatatcaagtctccttcttcaggagtcaggtgataaccgaaatgcaagaaaggttcagtcaattttttattatttgtaccttcatttaacttattcaactttcctttaagcctatcgtaatcactggaataagcttttttatcttcttgggaagcatgctggggaaaatacttttgcttcaccgaattaatttcctttgctgccttttttataatgttctttatctcaacttccgcattagcgtcatctataatcttaggtatggaagtagaatttccattcaatacccttgttatattttccagtgcgacaaacagtgtcgggacttttatttccacaggagatttgtgattacttataaataacacaactgttctctgtataccattcttatttaggatcagttcgcataaattagagaaacagccttctggaaaactttccatatattgatttaaactttccgttccgactcttttggaaaatccgttttttccttttctatactttgtcagtcccttatagtccatcagccaatgaggtttagttgaatgaacaggaaagcctccatatatcgactctccaagacaacaatacatcatactgaccggcgtttttaaattatttgctttgtaagtgaaaatatacgcataagaaccaaaataatttccttttaaaaaggcatatgaaagcaagattgaattaacttccttcaaaaactcttcaagatgaattttatttaaagagtcaataaccaaaaaggattctgcattcttatttgtacatgaataaaaatgaaaatcattcttatttattttcaccttaatcaagtgatcagattttaggtttccgtcaatagcatatccccaccctgagatatctcccaataacctaacagcatcattagtcggaatcaatatccgatattgttttggggatttgtaatagcgttctctgtgtgttgatagtgaagtaaattctccttcaatagatttttctaaaatagaactatcaaagtcattgaatcctatcttatttattaaaacatttcgacccttcacaaataaatctttcataccattagtaagacgcatttctgtgtctttacttatgattaactctttattattttggactcctggccttacaagcgtagtagttgaaaaaacaaatttctccttgtcttttcctgtctggaattttcgaccattaaaggaatgactcttcgctcttgctatattggcgtcatataattgagataaaacgatatcttgaatatatttgaatgtttcatctaaatacttatctattctttgtactatcataactattagatttttagtatattatttcctctaaatgcccattagatcttaacgaataatcattcagagaatcttttcaaatataagcacctttctacgaatatccaacttataaccccatgtttttaggtatttgagcgaatatttgcaatggtagacttgaatctatgttagagtatgccagatgcactgcgtatcattttcacttcctctgtactgtcactgaaagttcataccacattggttggagtttttctctttggacgtttccctgaaggggtaaactttgctgggagattgtaataatatcaccaattatagccccttataatccctaatgttggatttgattgtaataaattcaaagaacgaattgtgtcgaactacatcgaaatcttgatgagcagtaggtttgagagttgaacacagtacattgtctcactgtcctactttacatctccaatacataattgaaagagtcaacttatattagggaaagacaaattagtcaatattatttcgggagagacataaaatacaataaagtttcatttgtctcttatcctttcaattatatcttcatatttctttatagttgtttcatgtaaaccagaaacctttaacgcatcatgaaagactttaattatgtctgatttataatcattggggatatgacctatattcctatttatataacgataaaaggtatttatagacttttttcttggcgctatattgggtattgataatacatagctccatttgtgcttataattttcaaattgaggcagagatattataaaaattgaaacataaaaattcacctttttattacttatacaagatactataaaatcaaatatagcattcgttatttctagtttatatctttctctcatattgtgaaaagaagatataatttcgattaatattttagagttatttttatatttatatccaatctccaatagagccttaaccaaattatcatctgtaagaatatgcattcttaatttagaggtttcatctctacagatattaccaaatttttgtaaaatggtttccagttcctcttcagtaagttcattccatctacaacatataggatgaattacatttcttacttcattatctatcttatcttgatatatatttcccataatcattgtattaatgtgtatctaatttcacttttccatcttctatttttccagtttcagcatttctcatttttgcatcaatttcctcttgagtataataagttctgccatcagctaggttatcaggatcataagaatgataatattgaccatcttttcttgttttgttctgtaagccagaaccatcagcattgtgcaatgctgacccttctaaatttctagaagctattctatcgtcaacttcaacgtatctaaactcggaaaagtctttattcggatctctcatatgatctccaattctatcctttattggatttttagtgattccattataaacaacctcattattattaattaattgataaaaataatctaagccaaatgggtcaatatatctatttatatttctaacataagaataaaagttaaactctttagattctaatctaattggatcttgactgatgtatccaccaatttcaggtgaataataccgcatccgattgtagtacagctcagtctcctcatcctcatattgcccctgatacctgaatggacaatcattcaaagaactcccttcaaatgtacggactttaccgtatatatccagcgtacaatcccatgttttttctgccttttggttgtacatctgcactggcgtacctaaataatcagttacgattgtgtattgttcattcttcgtgattttagctgtagggatgaatgtcccgttctcgaatacccaggtaatcagattttcatcatccgcctgaataggtgtctttaattcggttaggttgttgtaggtggccgtacattcatgcagcggcgtatttccgttccatacccaacgggtaatttttccatcatagatctttaccgttcgccttcccaatgcgtcatagtcaaattctacgcttttgccatcaggacggacaactcttttcaacattccgttcgaataccaatcgtaacgccagcccgtcccgctacccatatactggatcttcagttctttcgcctgttgtttcttgtctataaggataaagccttcatctgcgacgtgggggttcctgtattccttgaagataagattaccctcaccatcgtaatggtaatagtactctgtatcttccaggagcttaccgcccggggcgtattcacgatcacggcaggtccatgtcttgtatagtgcaccgatgcggtcaggggtacggtaaatcgtttcaacgttttgtccttcccggtaatcagcttttatgaggtcgtcaaactcgttatattcgaacgtagtgacaagatccgccagatcattcgacttttgtagcagacggtttcccatgccccactgataactatagctaccgctcgtgaagttgttctttggggatatttgcttcttgatttcacgacccaggttatcccgccaagtctggatttcaagaccactgcccatcgtgcgcttagtttccagtcccacttcgtcacgttcccagtttgcctgccagttttcaccgactttcatttcctttaaataaccgtctttatcgaatccgctccagatatccgctcccaggctacttatggtatgtatgcagttcccgtcttcatcgagttggtagtttactacgtaattatcctgtttatcttcgatgatatgacccgctttgtcacgcttgaactcgactttgcaactatcattatgcgcctttagtaagtcgctatccttgtcataactgtagagactgacctttccatcgtattgctcttccttaatgacattgcttgtgccgtcatattcgtatgccgtccagcgatcgtccggtcggtctacacgtcttacacgacccactccgtcacggtcgtaacctctctgcaaccggtcaaatccccattccctgacaacttgacccagaccgtccagctcaaattcatacaactcgtatttttcattacgaatgcctgtcaactgtagttccgtattatatacgaacttcagcgcacggctaccctgaatcctgccggtcaatgtacccagtggaccgtacgtaaaatctacttcacgcatcttatcctctgcatggataagattacccgaccggtcataaccgagacgatgtacatttccatcaggttcccttatctcggtgatacggtttaatatgtcgtacccgaaacttgtccggttgcctttaacatcagtcgcttccactacccgaccgcttcggtcgtagttccagcttcggtagactccgttgggatatatcagacgtaagagttcgtttctggcattgaactcaaaactgaaacgtcgtttctttttatcggtgatgtatttcagccggttaccctcataggtgtagctcaacctcgctttggacggaaactcacgaaggacaacacggtcatattcgtcatattcccattttagtatcttaccgcccggcgtgaccacccggatcaggttctgccgttcgtcataatcgagcaagagcgaatcaccgttttcgttcgtctgtaggatcaagttgccccgatcatcgtatttgctcgtccggctgaatccttccggatcaaccgtaagtaccagttcctgatattcgttatactcctgccgcatgataccaccattggcatctatcgttttatagatcagatggtcctgtgtgtagaagtattccgtaacggctccctcgccatttcttgtacgggtaaatcccttcccgtactctatgaaatattcctgaatgccaccgtctccccatgtatggatgcaacgggcatcatttccacttccttcgtactcccaatggaagctcatgccgctttgattggtcagtttgaccagtaggtgacctgaatattcaaaagtcttgctgatactcatggcatccagcgtctccgtcatattaccgttatcgtcataacggtaacggaccagatgaatctcttcatcgtcgtaacaagtggagatatccgtgatacggccctccgcgtcattcgttacaaagatgcgttgtcctgtggaatctataatttcgtcaaggtcgcctttatagccataagcaaatactatgcggtgaccgtccgctgtactgatcttcgcgacgggacagtaaccgaaccggttctcttccatattgaagcgataatacagctttcccgcatcaccaagaagatatcccctctcatcacggctccaggagagctgttccttgcggtcaaaataactctctcccgtttccaggaccggcaatcccgactcacgtccgtcggaatgcctgaggacaaatacctcgtcattcaggttacggataccgatattatagctatggtgccagttgtaacccaatgggccgtttacctccgcatcgctgtaataggtacgggaccacatgagaggaatgggacccggtagttcgaaatcggtattcgtctggtaagttcgaccggtagccgcatcgaccggctcaccgaaggttttgcatttgatcgcttgcaatatctgggtcagcttggttttattaccgccgtttttcgctacgagtttatcgatgagttcctggaacttgtcaccggtctttttccacattttgcccaatcctttcatacccagcttcagggcaagttggaacaggtcgatcgtcggaggaccgcctaccaataccggtttacccgtactggttattatacttaaaagagcggtcggagccatcaggcagcttttcggtttgtaggtttttcctttacggggaagtggcggcataccgaccaggttacacgacagtgcaggatggaacttcgtggagcagggtccgccatcggccaggacgatggaactccccatccacatctccgcctctgccttaccagccacggtgggcaacagatgaagaaacagtcccggcagatgtacgatacatatacccgcttgggcgatccattgcccatgtaccttgaccgaaggagccattcctttggcaaagttacatgctacggcgccgatcccaccttccggactgggtagtgccggagcgacaaaggacatcactgccgctgtcaagtcgaatatcattcccacatgtggcaccggacaaatcggaagaggccacgggaatacgatcggatgaaaatctatccccaggcttatatcaaagaatttgccgacaggaaggcccggcatagccggaagcaaacttgccatactcttctggatattgcccagtgcgtcgtgcgctttaccgaacagttcgccaaaaccacgtgtaacggtggtcagtccgccgatgatactcataggatataaatattaatgtttttagtggaaaaaggatgatttacgccggacttttgacttctccgcttgatcgttgaagacgatcgtacgccattcctcacccagccatatttccaattgctcttcgattgttttgacctcttctggggaacggacatccctgcccaacaggagagccatataagcggaatataaaaaagtagattcgcggcggactctttcatccagataactgccaccggccaacgatagaagaaaatgctcgaaagcatcctcttttttacccagttcatacatcaggtagccgcacatacggtaactctccatgacatagaacgcatcctgttgcagggtagcttctttggcaacctcacgatatgtttcgattcctttctcccatttcttctgaaaaacaagtacggacgctttctgatacatggccactttccagatagggtaaccgtttacgtctccttctgccatcagtttggcagccggacggattgtttcatccgcatagcgcatgcttttatcgaattcaccgctgatataatacgcttgtgaaacgatcattggagtagcaagccggacggtttgttccgtcgtttcagccgatatcgagagcaaggttcgtacctctttatcaagaacagcctcttttttctgaaggctggtatccatcaccttgcggatttgctttcgatagcggctgtcaaagcttggactgtcataagtcccggattctttatccatttcattgttgatggcctctttcaggttgaactcaggtttaatgcagatgacctgctcgcctggatctagttttatctttcgcttttcgacatagtcaatcgtgactagccggatgcctttgggaactccctctttcagtatggaacggaaacaatttgtcatgctgggaccgtccggcagtgtcggggggaaatagatacagaaatctgtcttttccatgtcctttatacagaacttcaatcgcagaaactcttcccaaagcgaccgaaaactatctggttcacggctctctggaagtacatacttcctgttcattgccccgtctttttccaacgctttcagtatatcgtaatcttccggcaattcctcggtaaaccaggaacaatattcatcccacagtcctttgaggaacaattccgtatttccggcatatacggtctcaaaacggaaaaatatctcttggcagcttcccgccggcgaacgttctatctcaaagaatttatcaatgataactacattctcgaacgaagatatccaaagagctagccgccagtcctctttgacggaggcggcttgccattcttcctgtatctgataatagattcctgctatagatgaagatattcccatatatatttcgtttggagttctttttaagcgttacggttctctatgagttaattttcacgattccgccttctatcacattatttaccgagccgttggaattgatattcttactggtcatctccaacgaattcgttggagatagcgacatagcatcctttgcggagaatatgacattctttccttgcccgctgattcctttttcaccttcgccgcttgaagcgacggaaagtacttcttctttacttgccaggataatctcatcatcacccaggatgccgattttcttggcattgatggtgattgtctcgtcctcaaggattatgctggatttcgtattggtcaggataatggatttcgtagctgttaccgttatcgtgtctttaccgtcgatatgaataaggttatttccggtttggtctacgatcgtgatttctccggtatcatcatccagtttcaccgcgttgccactacgggttgtcaggctcttgctcttgtttcccgcaccgccacctaccccgacattctccgggaacatgctacccattacgtacgggcggttcgggtcaccgtaagtaaatccgaccatcacctcgtcaccggtttccgggataaagaccgaccctctaggccctttatcactgttaccggcatccggtgtctgcacacgcagccagttagtattcttgccaatgagtttttgccattggaattgcacctttattcggcctttactgtcttcgttatcaacgacagtggccacctgcggtcccgtaagggggtgatgcaccgcttccatcgggatacactccgcgtcagagacaaaaccatcgaaacgattgtagtaattccccttttcatcaatgacatgtacgaccttccttataagaaaccggtctatatccttgactgccacgtccatcgtacgaggcagtttcaccttgataatctttcctattcccattccacagaaatttgattttccggaaatgtcgaacatagtacctaccgagcgggatttctccatcttcacgagggattcgagatcgttcttggaagagatcggcgcgtgcacgggaaccatgccggcggaagaatacagagacgaggaacgggacaatgcgattttggcataaccggtgacatccacatcgtcgtccgtcgacgaatgcgatatctcgttggtatcatgcaccagataatcatacatcccgtaccggggaggccgaacttgggcggacaggttcatttccttgatatctacgtcataggtcagttcggttgtctccggcgaacccggcttaccgaacaacgttttctgcccgtcgtaatagaaccattctccataaatccagctcagccggttcaggaactcaaagcaagattcctcatattggcagatataatcgatcggactggcaaaaaggggattggccgttacctctagtccgcttccggaattaccggcggcttcctccacgatatccttcagtgacttatccgtaaaggagtccattgtcttgttcccgtcaagcttgacggtcgggctgccaccactgataagtatgcggttctcgccgccgttgtggcctacatacgataccttctgtacgattcccttgaacatattctgggttccgctttctttatgcaggaacgagatgacaacatctgtcccgataagggggaataccttcccgggagagtccatccataacttctctattcctttataataaagaagcacacggaatgtatggtgatggttgaactcttgccttaatatcaggtgggagaaaataactttctccccaccgataatgaccgtcgcaagaacactgttcaagttgttgggcataatatatcgcttttttagtttgatttattcttgttcggatacgacattccagtccactccttcatcgcctttggttccctccatcttaatgataaagctcttggctgggaaaaaaggaagcaggcgcagatcaaggaatacatggtccggatttttcttgtcttgctcaaaacggagaatctggaacttatcgatcaatgcgtcaggaccctttaccgaatcgaggaaattgacgatctgtcccctgaggttcttctcggttttaatattccagttttcgaatgcacggcggttcaggaagtcacaaagtaccttgaatacataatcgaacactctgactacggaataggtctgcagtccgaggtcatcgccattgaacagtgtcttgcccgagaatgccattaccttgccatattcccttacgaaaggaatcagccccatagattcgagtttggatatctcgcttttcttcagaccgaagactacaccgtcaacctcgttcatcccaccatgagctttacctgctgccacttgcgacatcaaggtattgtatattttcccggctagtgaagatgaaggcgggacatgaaggttttctgtctcccccagttcattatatgccccacgaccgatcagccagttgcagcacatcatcgcattggaacggtggatttctccccctgtaaggttggatgtgaagaacatgtcgactacatcatctggcttttccaggtcggcaaaatcggtaatcaacattaccttgttggaatatgcgatctttgcccacttctccacaactttattggaaccgagataaccgggtaaaactagcagggaataattcatccgcaaatccagccgatcgtaattttgttttaactcttcggcaatatggtcgataaatcttgaattgtcgagatccgttatttgttctatcgaagcgttcatgatagtgatgtttctcactttgtcttgctcggtatttttataaaaaagcatgattgaacggtaggcgctttcaaggtcactgaccgcgtttactgcctttagctggtttttagacagtaactcaccaatggtttttgacttcgcctggcacttttcgagcatctcaccggcatccttgcatgaacggaggatctctatccatagctttatttttttcaagagggcgatacggtcctgctttttatcagcttccgtgaggaaaatcttctttcgtggacggcggttagggttcatattggcaatcccttcgatagtggactctaaaaatgtaaatccaccgaattcgttcagtccctcaagggcttcctccatagtgctgaaagaattttgttccttcaggtaagcttcctgcccggcaaccgttgccggtttatttaattcttctttcatctgaattattgattttcgtcattgattgatgcctccaactccgcttccaatagttgcagaacctgaaggatattttcttttttgtcaggacgaccgacggcacgtgccaatactttgtttgaccggaactgacgggtagtacctgcgtagaaatccttattaatatccagatcgcttaaataagggcttctctccgtcattttctttaccgagaaatcgcctacattttcaaatccgaattcttccttcaccggctgaccttcctcattctcaaaggagatgtctaccttcggatcaaaatgtgcgaacacatcttccaccgtttccagtcccatgaccaattccggattggggggcgtgtcttttgttagttgttgcacgatcaaggttcggttctgtggaatatcggcaatcccttccgaaccttctttttcaacttcattgccgccgatctcataatttttaaatgccatatataattcaattaaatgaaaccttttaatcaattggataaaaggaagaacccgtaggtccttccctttataaccgtaggccggatcattccaaaaacttttttgtccattggatatgtcctaatgtgaggatactatttttccggccattcttcttcgtgggaggcaccgttacagtccaccttttgtgcggaaatcacaaaatcgattgtcatcggagtctcatttttcctttcgaaattttccgtaaattcgatcacataagcattctcaaacttgaattctttcatttttgcatcctccgtgcctttcttgtaggtgatattacctgaaaaaggcgagtgctcagtgaacatcgtctcaatgatgtttgtatcctctgtagattctactgtaccccagattctcacaccatacacatgcgatgacggacatcctttggaatccacgtcgcgtttcatgctgtaaccagctttcaaggcatcatactttgtgcccttaattgtaattttagcgtcaaatgccatactgataatttatttaagtttataataaatatcataccatttagtatgattaaacaaattaaaaacaattatttgctgggcgtaaatgtagcaacattatttaatttcacaaaaataatacctgtttttttgaacaaaatgacggtttattgcaaataatagcaaattaatgccaattgtaagcaacaatatcatatatttgcaaacataatatttggtatgaaatttaaaattaaaccttaatatcatactgtatgtactaattctaattacatatatttatggaaatacaagatttgaatgactcggttttaattgccatccgcattgcccgttcgttggcgacggaatataagaatgcagccttctcttccggacatttactgaaggcgctcctcaatagccaggtaggtatcagaagttttgttaaaagcttgaatgtcgacctggatgacctggatgaatgggcaacggtcaggatagaggactatcctaaagggaaaaattcagagatcaacggagatgaaaaaatacaggacgtatttgaccaggcagacaggataaaggccaagcttggctatctcagcatagatccgatctgtcttctttgtgcattatccgtaccagaggtcggattcaccgcagagcagttaaagacatttcccatccgggaaagtgatattcttggctccattcttcaggaaagtgatataaaaaagagtataggttgcttggcggcggattctgatcaatcgtcactcaatagcatgttgcttaaatattgtattgacaagacccttttggcaaaagaaaaaaagatatttcctattgtccgcagggaaaaagaactccgtaccatgattgagatattgggaagacacagtcgtcccaatgtgattataactggcgaggccggtgtcggcaagacagcccttgtcgacggcttggcatgtgacattatttccggtaataccccctcttaccttgccgatgcgatcattttggaattggatatgggtgcattgtttgcaggggcgacttataaaggagaggtcgaagatcgactgaagaatctaatcaaggaacttcgggccttggacagggcaatactgtttattgacgacatacatctgctgcttgactcacgatccggcaactcgggtggcggaaacatcctcaagcaggagttggccggggacctgactgtcatcggagcgaccactattgacgaataccgcaaatctatcgaaaaggatcaggctttcagccgtcgttttgaggaaatcagtgttgcggaacccgatatggactcagccataataataatggacgagatacattcccgctacgccgcacatcatcatatcatggcgacaaaagaggctttggcctgttgtgtccgcctgtcaaagcggtatatcaaggaccggaaactgcccgatgccgccattgatttgcttgacaggacaatgtcctctgtcaagatgattaacgagactgctgggaagacagtttgtgaactgaaatcacaactggaaaggataaaggaaataacaacagaccaaaccgaacaacaattacaagaattgaactctttatatttcaccattcacaatcgtttaagtcccatattactgggaatactcaccggaggtgacgaacagattgacaagaaccattcggataagttctccgcacatatagagcaggaattgtctcagatagccgaattcgtccggaaaaaaattccaagcatcaccgagcaggaagtcgccgccgtcattgcggcaaagaccggcattcccgttggtaagatccaggctggtgaaaaggagaaattaatgaatatggaagatttgctccgccatcgtgtcgtcgggcaagactatgccctgagatacatttctcagaaaaagcttccaacatacgtcccgctaccaattcatatatagcacattcatcgttggaaagttcacccggtagaatttctgtaacgattagtgcatgatgatcggtcacttttgcgtcattaacgggacggtgattcaaagatgaagtgtccattgcacctgcataggcagcgaatcggggatatcgcgccagtaacgctatacgttccggcatctcttcgaatacatcttccgaaatataacggctcccggtccttggatagctcagtacttttttctcatacaggctttgcgcgagagtaagcgtcttatcggcagagaagttcaattttgtatttgcctccttttgcagcgcagtcagatcgtagagtaaaggaggttcttgattcacggtctttcgttccaattcggttacgctcactttacccgactgcatcaccctttgaccggcgagatccgctttggccttatcgcagaatctttctaccgactgagcagaaaatgatatttcacctttatgcgttgcgagtctcagttgccaatatttctcaggtacgaaattcttgttctccagcatccggcagcagatcatagccagcgtgggagtctgtacccttcccagtgagaacactccgctcccggcggatatggtcagagcctgtgaagcattgattccgatcagccagtcagcctccgaacgggcacgtgcggagagatacaggttatcatacttatctcccggttgcaacttctggaaaccttccttgatagcccgttcggtaagcgaacttatccacagcctctcacagggcttgtcacaaccgataaaagaatacagataaccgaaaatcaactgtccttcccttccggcatcagtggcgacgatgatcctgttacacttttcgaatagccctttaatgattttaatctgtttgagtactcccggatcggatttatactccttacccgatttaatctgccttggtatcaatttgaaccgttccggcagtatcggtaaattctctttgcggaaccccgcaataccatattcctccggaaaagccagtcctaccaaatgaccgaatgcccacgtgacagcataaccgttaccatgaagataaccgtcttctttattacttgctcccagtaccatcgctatctcacgggcgacactgggtttttcagcaatcacgactttatcaaaattttctgttttcattcttttcttattaaataattaatcaaaatcaaccgcatgtgaccgctctgttcgaccggtgtctctcatcttgcagagccagcatcttcaggtagaagccatagcttctatgttcatccagatcagcttgcagtatccggttgacgatatagcgtttctttatacggcgatggctttccgttctttctatcccgttagtgctgcataccgcatccaatgaatatactccgaactcaatggcaaaatgcaatccccgaaagtccaggtctttcacaggtcgtaattccccctccattatccagggtaagaagatcttgttcgtgaactcatccgaaggatcttccggtaagagcggcagttgtgatacatcaggaaaatcatacctaagaattctataaggaggaatatacaaatctgaacgtgtatgtttcagatggtaacgcacatactgttcaaatgcataatccacctcattactttttcgggtcaaaccacccagtacccaacaataatcaagaactttattctcatccgtcattacgaggaaaaaagataaagattccgggaaataaaagaaatctacgattttgcgcagcaactttttcacgttcatatcaattacattttagggcctcttttctttttaggagccggtttgttttcattattagtatcgttcgattgcttattcttctttttcttctcctgctccgcctgtgattccgtaggggaaacctgaccggttttaagaggtttgttcacatgtttggtagcttcattcgtcttgccttctgaatttacggcaacctgtgtttggaaatccgaagccggtttgacttttccctgatccagcgctgttctatattcgctctcgaacatatgcacaaatcctgcttccggcttccatgtaatatatcccacataaggctgtccttttttatccgttttaccggaaattttaattgtaccaccggcagctaactcattttgagcaccttccgacaacttatgattgagatagtttcccggcatcttattcttatccgcactttcatccgcctgtttttgtgcttgtttcttctgatgtggagtggcaatttgttcaacttcccccagtgccaatttcttatggtattcggaagggaacataaagtccggtttgttttccttaaaattccagacctgatatccctgataaggtttgttggtattcttactaaccagatccggcaaataaatcgttcccccttcaaataacgtctttttctcctctggagtataaatatgccccttatacttatcaggtaattcttccgcagatgtcacgaccttttcatgtgcaacaggtgccggggtaataggctccccgtcataggcaagtatctttcccgccttcagagcttcatcgtacttattggccattacaaaattaggctttcccttctccatatcccaggcaaggtagccatcgtaagaaataccgcttttcgccacgattcccgacaggtagactgtcccaccctgttcaagcttactatgttgctccccggttatttctttgcctcggaacacatgtggtatatcatttttatgtaattccttatgcgcctcgatagccagttttccacgatcttcgaataaatattccacataacgtttttctgcgttaaactgtaccggacaatcaaaaggttctcctttcttggatatcatcccctctaaatagacagccctgcccagacttagttctgtcttctcctctttagtcaagaccttattacctatttcatccggtattcttatcttgttggcaggacaagtaacaaaaccgcgtgtcaaatgatccacactgattacggaaggtacaatttcgcctgaaatcggatgaacaagatcgacaatacgccccatattctttgtctgtgacaggtttttcgcatcctcgtcagtgaatttatgtcccataaatgggaaattaaattccggttcccgtttcaccccctcgatcgacatatagagcgaaccgtccttacgttcacgaaggcttagtctagcatcggtattcagcacagtaccccccaaatgaatcgatacgtagtgtagtcccggagatttatatccttgtaacaacgtatcgagcacattggcattaaccaacttctcttttgtcaagccaaaagctttggccgagtcccagtcgattttatccgggtcaaaacgatattgtttcgcttccggctgtaattgcccattggtttcttgtgccgtagtttgcggatttacttgcggatttacggcctgctccgtagagccattatttgcagggctctgttcggcctgcttcgttgctgaagtgacaggagcttcaacctgttcattcttcacctcagggtttttcttttcctgttccattttctctaatatttctttgatttgttctggagttatttcatgctttttcatcactttagtaatggcatgttcaagatcgtctttatgtctctggaagagtttactgataaggccggatatcttgtccggcactttgaagaacttgactcgtgtaggatctttggcctggctcatgaaattcgacagaaaattggaaagcacatctccgccccgatccagtttaagaaaatcattattatgttcctcggtagcaggaacagtttcaagattaccgttctcatcaatgccctttacggctcttacctcatttctttcctgatcgagaacaagaagaatatcagacatttcatcgcttctgtcgtccaagtcggtttggtcgaacaatccatcgagttcttcttccgtataagagcgctcttcgggttgctcccgattttcttcccctggcgggagttcttccggcgatagttgctccgtgtccaatttcccagtaccaggacgcaggtttacagtttgggtgctttccagcacattagtttcttctaatttttcatcatccataacatttgtatttttattcgttggtaataatttcaggcgaaaatacaattgttatgatagttatatactgattatcaaaacgcttggtgtgctatgcgtttgattgcatctgtttgcgtcatagggattatacgcgcacgaccggaaggctgtaaaaagagagctgacaataggaaatgcatgaatagttccggtaacgaaaaaaggtgaaacacgcctgttccacctaacactatcgaacacatactatctcacgacaggtatggaagtgtccaacacacaaacaaaacaaacaaaacaaacaatatttattaactggttagattcaaacaattcataattccatacaaacaaataaaagccacccgtccaaaggcttccgcctaccttgttacgacaaagcgcatcagaccttttaaggacaggggcaaatatctcgttaaggttatagtgacaaatatagtgacattgttaggttcggttaaatatgtttttattgtctatgaatttggttttctattttctacaaagaaagcctattcatatgtaattgctttgtcagatttcctcaaatactttccttttatccctattttattttattaactattactttatggaccattctttccgcatcaaacatacagctgcttcttgaaatttaccttattctcatgaacttactattattatgtcatgaggttgtgtcaaaacgttggcacaacctttttctataatttatagtcctgttatcttttcttttg

SEQ ID NO: 6400 - DNA, 31660 bp, Unknown
  gut microbiota DNA sequence
atggacgaagaatacattgacaatgtcaaaaacctcatagaacaaaaggacgctgagaacgtcaaagcactccttatagacctgcaccctgcggatattgccgaactatgcaatgacctgagtcctgaggaagcacgtttcgtataccgcctactggataacgaaacggcggcagacgtgttgatggaaatggatgaggatgtccgtaaagaattcctggaaatactcccgtcggaaaccattgccaaacgctttgtggactacatggatacggatgatgccgtagacctgatgcgtgagctggatgaagagaaacaggaagaaattctttctcacattgaagacatcgaacaagcaggagacatcgtagacctgttgaagtacgacgaagacaccgccggtggtttgatgggtactgaaatggtagtcgtaaacgagaactggagtatgccggagtgcctgaaagagatgcgccagcaagctgagcagttggatgagatctattatgtctatgtcatcgacgacgaaaaccgcctgcaaggcgtgtttccactgaaaaagatgattacctccccttctgtatccaaggttaaacacgtgatgaggaaagaccccatttctgtacgcgtagacacatctgtggacgatgtggtacagaccattgagaaatatgacttggtagccgttcctgttatcgacagtatcggacggcttgtggggcaaatcaccgtagacgacgtcatggatgaagttcgtgagcaatcggaacgtgattaccagttggcatccggtctttcccaggatgtggaaacggatgataatgtaatgcgccagaccagcgcccgcttgccatggcttattatcggtatgctgggtggtatcggcaattccatgattttaggtaatttcgatgctactttcgcagcccatcccgagatggcactctacatcccgctgatcggtggtacaggcggaaacgtgggaacacaatcttcggccatcatcgtacagggccttgccaacaactcgctggatgcaaaagatactttcaagcaaattaccaaggaatccgtagtggcccttatcaacgctactattatttccttattagtatatatatataattttgtccggttcggcgcaactgccaccgtcacctattccgtttctatcagcctgtttgcagtagtgatgttcgcatctatcttcggcacactggtacctatgacactggaaaagttgaaggtagacccagccatcgctaccggtccgtttattgcgattaccaatgatattataggcatgatgttatatatgggaattaccgtacttctatcctaaaacaagaaaaatgaaaaaaaactaaggaaaaaagtatgaagtaattgttttatttcattaatttgtgacctaatgtaacccgaacgggtaaaaccgttttttaaaatgtatgtacaatgatggacactcatgacactaatctccccgaaaaggcggtggaattagaagaagaaaagaaagcagctgaggtttcagaaccggctctgacggaaactccggctgaagaagcaaagcaggaagagcagccggtagaagccgcacaaaagctaagcaaggaagaaatcctggctaaattgaaagagatttccgcagatgtggaaaacgccggcaaacaggagatagatagtctgaaacaggctttctataagcttcataatgccgaacaagaagcgacaaagaagctgtttatcgaaaacgggggagtagcagagaatttcattccgacaacggatgctgttgaagaggaattcaaaaatatcatgtccgtcattaaagaaaagagaggtgcattgtcagctgaacaggaacaacaaaaagagctgaacctgcaaatcaaactttccattatcgaggaactgaaagaactggtagagtcacccgacgatgccaacaaatcctactcagaattcaagaagttacagcaacagtggaatgaagtgaaacttattccgcaagccaaagtcaacgaactgtggaagagttatcaactctatgtggagaagttctacgatctgttgaagctgaataatgaattccgcgaatatgacttcaagaaaaacctggaaataaagacacatctatgtgaagctgccgaaaagctggctgatgaagcagatgtagtgtcagctttccaccagttacaaaagctacatcaggaattccgtgacacgggtccggttgcaaaagaactgcgtgacgaagtatggaatcgatttaaagctgcttccacagccgtaaatcgccgtcatcaacaacacttcgaatcattgaaggaagtagagcagcataatcttgaccagaaaacagtgatttgtgaaatcattgaagcaatagactacaacgaattgaccaattttgctgcgtgggacaataaaacacaggagatcattgccctgcaaaacaagtggaagaccatcggttttgcaccgcaaaagatgaatgtgaagatattcgaacgtttccgtaaagcgtgtgatgaattcttccgcaagaaaggtgaattctttaaagccctgaaagagggcatgaatgcaaacttggataagaaacgtgctctttgtgagaaagctgaagctctgaaagatagcaccgactggaaagcaaccgctgacgaactaaccaaactgcaaaaagaatggaagactatcggtccggtagcaaagaaatattctgatgcaatatggaaacggtttatttccgcttgtgactacttcttcgaacaaaagaataaggctacttcctcccaacgttccgttgagatagacaacctgaataagaagaaggaaatcatcgaaaagttgggtgccattgatgagaatatggatacggatgaagctactcagttggtacgcgaattaatgaaggaatggaacaacatcggccatgtacctttcaaggaaaaagaccgtttgtataagcaataccacggacaagtggacaaattgttcgaccacttcaacatcagcgctgccaataagaagttgagtaacttcaaatccaacatcagcagtattcaggaaggcagcccgcagtcactctatcgcgaacgcgagaaactggtacgtgcagcagatgccatgaagaacgaattgcagacttatgaaaataatcttggcttcctgacagcttcttcaaagaaaggcaacagcctgctgacagaactaaaccgcaaagtagaaaaactgaaggcagatattgaattggtaaaacaaaagattaaggttatcgacgattccattcgtagcgccgaataattttaagcctatatatacaaagagggtgtttcaacattttgaaacaccctctttgttatttatatcttatcttaatgatggaacagacgaatacctgtaaatgccatagcgataccgtatttatcgcaggtttcaataacatgatcatcacgtactgaacctcctgcctgggcaatgtattccacaccagtcttgtgagcacgctctatattatctccaaacgggaagaaagcatctgaaccaagagctactcctttcagagtattcagccattcgcgcttttcctcacgcgtcagcacttccggtttttctgtaaagaactgctgccaaataccgtcagccaacacatcatcataatcatcgctaatgtaaatatcaatcgtattatcacggtcggcacggcggattttctctacccagggcaagttcaatacttttggatgctggcgaagataccagatatcagctttatttccagctaaacgggtacagtggatacggctttgctgtcctgccccgataccaatcgcttgtccgtctttcacataacatacagaattggactgcgtatatttcaaagtaataagcgctatcattaaatcacgctttgcagcatccggaaaagtcttattccgcgtaggaatattagcgaacagttcgctgccattcagctgaatctcattacgtccctgttcaaaagttatcccgaacacatccttacgctcaatcggtgcaggtttatacgaaggatcaatcttaatcacattataagtacccttacgcttgttcttcagaatttcgagtgcctcatccgtatatcccggagcaataacaccatcggatacttcccggttaataaaacgggcagtcgcctcatcacagacatcactcaaagctataaaatctccgtaagatgacatacggtccgcaccacgggcacgcacatatgcactagccagaggagaaagcggcaagttgtcaacaaaataaatctgtttcattgtctcatccaaatccagaccaatagccgcacctgcagggctaacatgtttgaatgaagtcgcagccggcattccggtagccgctttcaattctttcaccaactgccaaccgttcagtgcatccataaaattgatgtatcccgggcgtccgttcaggacttcgataggtaactccccctcctgcataaaaatgcgggccggcttctgattagggttacagccgtacttgagttctaactcttttgccatagttttaattattttgaatagaattgctacattattacttaaaacataaagtatgatcaatcattataaatccataacaatacaggcttggtttcagcctttaacaacacatcaatttgcctcatcgtttcattacaaatcaccggacatccctgactcatgcctaatggaagatgtgaaggataaacctctgtcgcaggcaaaggaatataagaatgtaatacgacaatacgtttgaaagcattatcattagtgggttccagaccatgcaatttataatgaacattgattccccatttgctgtaagcccgaatacctactttgtattttcccagagaagagcaaagacttcccggcgtattgctaaaaacaggtttggaaggtgtactatctttcccataaccatgggcacaaagacttgcatacttaatggaatctcctttaaaatcccaaacaaagaaacgttttttaccagaatgtatgctgaaatctactaagaaacaataattcgtactgaatcccttactaacgcaatatgcctttgcttcatgcgctttcgatttcagacgttgatgatcgacagcattcaccgtaatgcttttaccacattcggcacatgctctaccctctaatcctaaaataaagaaaaatagcagcagaaacagaatgaatctcttcataagcttcattatcgtattagacgttaatagacttagggacaaaaaagcaaaaaagctacgaacttattacattcgcagcttttttagttgggctacctggattcgaaccaggaatgacaggaccagaatctgtagtgttaccattacaccatagcccaataacaggtcgttcctgttttgcggttgcaaagatacaaagaatttgataatccaaaacaatttctcgtgtttttttctctaaaatctgctaagatgccgtatgccaaagaaatatatacctaaaaaaaatcaaaaattgaaagactttttcccttttaggtgtttgatacaagaattcagcgtatatttgtcaactgtttaattttaataataagtaatgaacgaatcaaagaaactcattcaacaaataaccgaaggtatacaagataaaaaaggaaaaaatattgtaatagcagatctttctaaaattggcgatactatctgcaactatctcgtcatttgtcagggaaactccccaagccaagtgaccgccattgtagagtccgtaaaggaattcacccgcaaaggcgctaacagcaaaccttttgcaatagacggattgcgcaatgccgaatgggtagcaatggattactccgacatattggtccatgtgtttctacccgaaacgagagacttctacaatctggaaaatctctgggccgacgccaaattaacccaaatacctgacattgattaataagccctatggacaacaataataataacgctaacaaaaagcccaataaggtaaatatgcccaagttcaacctgaactggctgtatatgatcatagccatgatgcttctgggcttgtacatcaccaatgaaaacagtactggaatcaaaagtgtctcttatgacgaattccagcaatacgtacgtgacggctatatgagcaaaatcatcggttatgatgataactctgtagaagcatatatcaagccacaatacgttaaaaacgtatttcaggcagactctagtaaagtgggtaaaaatcccatgattacaactgaagcaccgtctcgtgaaagtttgggaaacttcctgcaaaaggaaaaagatgaactgcactttgacggttctatcaactacgaaaagaaacgcaattatttcggggtcgtactgtggcagattctgcctattgccttccttataggtttctggatattcatgtcacgccgtctgagcggtggtggcggtgcaggcggtggcggcattttcaatgtcggtaaatcgcgtgcccaactgtttgagaaggggactcccgtaaaagttacattcaaagatgtagccggacttgccgaggccaaacaggaagtagaggaaattgtggaattcctgaaagaaccgcaaaaatatacagacctgggaggtaagatacccaagggtgcattgctggtaggccctccgggaaccggtaagaccctgcttgccaaagctgtggcaggcgaggccaacgtaccgttcttctcactggctggttccgactttgtggaaatgtttgtcggtgtaggtgcatcacgtgtacgtgacttgttccgccaagccaaagaaaaagccccctgtatcgtgttcattgatgaaattgacgccgtaggtcgtgcccgcgccaaagctgccgcaatgggtggaaatgatgaacgcgaaaacacattgaaccagttattgacagaaatggacggtttcggttccaacagtggtgtaatcatcctggctgctaccaaccgtgtagacgttttggacaaagccttgctgcgtgccggacgttttgaccgccagattcatgtagaccttcccgacctcaacgaacgtaaggaagtattcggcgtacacttacgccccatcaaaatagataatacagtagacgtagacctgttggcacgccaaaccccgggcttctccggtgccgatatcgccaatgtctgcaatgaggctgcactgatcgctgcccgccacggcaaaaagttcgtaggcaaacaagatttcctcgatgccgtagaccgtattgttggtggtctggaaaagaagacgaaaatcaccacggaagcggaacgtcgttccatcgctatccacgaggcaggacatgcttccatctcctggttgctggaatatgccaatccgttgattaaagtaacgattgttccacgcggacgtgcactgggcgctgcctggtatttgcccgaagaacgccagattaccaccaaagaacaaatgcttgatgagatgtgcgccacattgggtggacgtgctgctgaggatttgttcctgggacgtatttcgaccggtgccatgaatgacctggaacgtgttacgaaacaggctttcggcatgattgcctacctcggaatgagtgaaaagttgcccaatctctgttattatagcaacgatgaatattctttcaatcgtccgtacagcgaaaaaactgctgaactgattgacgaagaagtgaagaatatggtgaacgaacagtacgaacgtgcaaagaaaatactttccgaacatagggatgggcacgccaaactgtcacagttgctgatagataaagaagttatctttgcagaagatgtggaagaaatcttcggaaaacgtccttgggcttctcgttctgaagaaatcagtgcaaacaagatttcggaagaacttaagaaagctgaagacgcagccgccaaagaagctgtggagagcgaaaaagaagtaaaagcggaagaagaaaacaatgttgaaggcggaacagaaaccggcaaaacaaaggtttcagcagaaggtaccaaagtttctgtagaacgacccgcaaaagaataaagaactaaaaaacggaattaccgtgaaaagcaatttcttaaaacgcgccatcacaggtgtgttattcgtagtagtattggtgggctgtatcctatacagccccctttcattcggtatcctgttcaccattatcggtgcactgagcgtacatgaatttacccacctgataaaccaaaacggtgaagtacaaatcaataaaacaattaccgctttgggaggcgcttatctcttcttggccgtaatgggcttttgtcaatctactatcggagcccaggtatttctgccttatctggcattactgctttacctgataattacagaactgtatctgaaaaagaagaatcccattggcaactgggccttttccatgttaagccagctgtatgtagcattaccgtttgcattgctcaacgtattggctttccaatataacccggcagaaagcagcgtgacctacaatcccatcctaccactttccatctttgtatttatatggctgagtgacactggagcatattgtgtaggctcgttaatcggcaagcatcgtttgttcgaacgtatttcccccaagaagtcatgggaaggaagcatcggtggtggtgtgttctctattgcttcttcattcgtattcgcccactacttctcattcctgtctgtttgggaatgggccggactggcactggttgttgtcatcttcggtacttggggggatctaacggaatcgctaatgaagcgccagttaggcatcaaagattcgggtcacatcctacccggccacggtggaatgctcgaccgtttcgacagtgctttactggcaatccccgcagcagtggtttacctctacgttttaatgttgatgaaataaaaaaggccggaggaattcacattcacccggcctcacacacaaaacactttactttacttcaattgcatctttgagaaatctaagttagaaacttttgcggaattatccgattgtttttcaaaggtaatttcgacttcatcgtttacttctgaattcagctttaacttgatacctttcgtttcagaagttatattcaattctttcagattgaacgacaccaatccaggagcacgaactccactcaggtcatcataatcattatatcgaagctccagatggatatatccgtcatcattaccttcttctgctaaaggaacctcggcatcttctgcacgttgtaccagactgatacgatgtttcgtacccgaattcttcggcagattctgcataaagataatgttcatatatcccccactgatagtgatatcccctttataaataaataccggatcattaccatattcttcgtcattctccgatgtcagcggttccacacttttcgtcagggcatgccagatcttctcaatcttcacggcatgatcatatccttcataattatcatagatgggattaaagattgttattatacgctgcccgtctacaggctgataccaacccatattagtattaataggccaaagcgttccccaagtgtcactttccagatagaaagtattccccttcacgcgtacggtgctccaattcggataagagaaatcaccgatagagtatccgtcatctaaatcatcgcatgattgcaacgcaggtagtactgccaagcacatcataaaaaatagccaatgtaatctcttcataatcaaagtccttttgcttgttttcgtaaaaattgttagttcataatctttcgtgtattctgactataaaatacgaaagccgggcatttactgcaccggctttatctcttttaactattttatagccttttgaagcaaaaagactttcattatgtaactcctctactcctttagctcccactacaataatgcaggtgtaacaggcgtatcatttcttgtgcagcatgcttcggcgcaccggcatctcccagacgcgatgccatgtactcatagccttcgagcattcgttgccgatactccttattatataagatacgttccagttcggcacgggcctgctctactgtcatcgtatcagccacgagctctttcaccacttcacggtttgcaataagattcaccaatgaaatatactttaccgtcagtatatgacggcgcaggaacgaaatgacttttcctatcggcgtatgatagcaaacagcctgcggcacccggaacaaggccgtttccagcgtagcagttcccgaagttaccaatgcagcttcagcctgttgcagcaaacgataggtttgtccgaaaaggatctttactttcgcacctcctatatattcatgataatagtcaggagaaataccgggtgcaccggccaaaaccaattggtattcaggaaaagcagaagctgcacgaagcatatcgggcaggttatcttttatctcctgcttccggctacccgccagtaaagcgattatcggcttaggatccaatccggtctcacgaataaaatcatcgtacgtttcaggatgttccgcacggaaagcggtcacttcatctaccgtaggattgcctacataatgtatcggataatgatgcttgtcttcgaaaaactccacctcgaacggcagaatggaaaacaattcatccacatcccgcttgatattcttgatacggtattctttccacgcccatatcttcggagagatataataataaaccgggatttgcgtcttggctcgcaggaacttggcaatattcaggttaaaaccgggataatctaccagtatcactacatccggctgccatgccacgatatcctccttgcagcgtttcatgttggcaaagattgtgcgcaaatgcagtaacaccgggataaagcccatataagccagctccttatagtgcttcaccatcgttccacccactgctgccatcaggtcgcctccgaagaaacggaattccgcctgcggatcttcaaccttcaaagcagccatcaggtgagatgcgtgtaaatcaccggaagcttcaccgacaatcaagtaatacttcataaaattaaaaattttatgaagttgagagttggggaagttgagagttgagagttactatgcagcgtcatagcgcagccaactctcaactttcaactctcaattctcaacttcttcaaaaccagctttgcagttcatctataagttcgtaagccgtaacatccaccttggtcggagtaatagctacatagccgttatcgagtgcccaatgatcattcttttcattatcggaatcggtattctggaactcaccggtcagccagtagtaatgggtatcaccgcgatgcgcaaaattctcccattcattggtccactgtcctttggactgttcgcagactttaactcccttgagttcccgtacattggggaaatttacattgaggcaagtcaacggaggcagccccttttccaaaacctgacgggctatctcacggatataaggaccggaaggctcaaaatcaggattcggatcatgacagcaaagagagaaaccaatggaaggcacacctttcaggcaaccttcaattaccactcccatcgtaccggaataatgcacattcacggcggagttatcaccgtgattgataccaccgactatcagatcgggtttgcggtcgagcaccgtatgcaaggcaagttttatgcagtctaccggagtaccggaacatttataaactgtcagccctacatctttacgaaccaactggtaatgaatgggttccgttacagtcagcgcacttgcactacccgaacgcggtgcatccggcgccatcacaactatttctcccagcggacgaagaaacttaaccaactcactaatgccttttgcaatgacaccatcgtcattggaaaccaatattaaaggtctctgattttccatattcatctttattttctatgcaaaagtaggtaaaaataaagaaagcacctaatacaatactttgcttttgttgtaccagagtttgcgtttcattcgatatatcgaataaaaccagcgtaaaccgttattcttcgtgatgtccgtcatctcctcccgtcgcactcaacacgatattgcgtgcgacatgcgcctcgtttccggcagcatccgtacagtaaaccatcaggtggtaatctcccggagtggcattagccggtatcacgatatcatgatgatggatatgagccgttctttgttccgaaacatcgtaagacttattaaaggtgaaatcaacagtcgtctcagcagtgcgggtatcatgcgaatgatggtcgaagttattgtgaatctctatcttgtacgatttcaacatgacatcatccgataagtccatctcaaaatgtactccgtgttcactgcctattgccagcactccgccttcggcaggcgatttaagatcaatcaccggttttgtagtatcactaagcggattgtcactgtctccgcaagcagtaagtaatgaaacacttatcactaaaagggaaataatcatcgggaaataaaatcttgttttcatttgaataattttttaaatggtactttaattaataattgaaagtttcgccccggttcgggaatctccactttccgataaaaactgagatgattgtaataccgcgtattgaataaattacggacagtcagagtaatctccacttccgttccggcaacgggtaaatcaagagagccagctatatgaaagaggtttgcacccggcgtgcggtcttcattacgatccacacgattttgcttggttatgctctgccattcggcataaagcatataccgcttcctttgccaggtgagcgtgttgcgcagcgtggcaggcggagaaaaactcaaaggaatacgttcatcacaattgtaggtatagacatactcaccggatatacggtagttgagagtgggcaaaacagttagttccacactcgcctccgctccggcaaacaaggcttccgtctgcgtataacggtaaatctgtcccgtatggggtaagacagaccattcccccgtaggccgcagaaagatataattactaaaccaattgacgaaaggagaaacatatacggaccatctcccgtacttcaactgataagaagcatccatctgccaaccctgttcggacgaaagtgtggcatctccctgttcatgacggaatgtaccgtgatgcacaccattcgaagccagttcattaactcccggaagacgaaaactccgtccgacatttaccttcagctgatgccgtatcgagggcgtccataccacacccaatgataaagaatagtcgccaaagctcctgtttacccggcggctgttccaccggtagaactccacctgctcttcatcatatccctgttcctgcaaataagtagccaggtaaggatcatcatgggcaaagacacgcatacgaccatagtcataccgtacacctccactgacggataacgtattatccggacgatacgtcgtaagccaggatataccggtagtaaaacgatcatattccggcaacaagaaagaataaccggaaatcgtatttcgctggaattgagagtcccaccccatccggtgttcccaggaagaagaaccgacccaccgtccttttgccgaaaaactgaaagtattcagattaaaggccagttctttgtcaggatcagtttccggcagaggttgtgttccgtaatgggtatgaaacgcactccattcctcgcggtgattgttctgataaccgatatcacccgacagaataaacttctcccaagcatactgctgatgagtggtcactttcaggtgatttaccttactataaggaagatcgatgttccggctgtcaccgtcgtcttccagacgtgacaagtcgggaactccatgtgctccggggaagaaccccgtcttctgaaaaacattggacacagcaaggttcgacttatatcctttcttctgatattgggtaaagaaattgacattacgttcccatcccgccgtatttttcagccgacgaccgtagaccggcatcttctgagtcagataaacaatcgtgtctgccgggatacggtaatctccaaaacgctgttccgaataacgcaaccgcgtataccatgcatttcttttgatacccagcatcagtgaagcgcctatggtttcgttcacagacttacccaacagcgtcacgtcaccaaacaacatattctctgccggcacctgcaccggagcaatgtcaatcactccgcccatggcgtcactgccataaagcagcgaagcaggacctttcattacattcactgcatccacattgaaagcatccagctccagaccgtggtctgcaccccactgctgcccttcctgtttgataccattctccaatacagccacccgattaaagcccatgccgcgaatcatcggcttggagaatcccgaaccgatatccatagcctgcacgccggggatattttccatagcctgcatgaagttacccgtgaaatgtttccgcaagaaatccctgtcagccacttcgagcgtaagtgcagtctttttgttctgaagctgttgataggtttccgctatcacgacttcaggcaaagctacattacggactgaatcgggtttctgcgcatggacggaaagggttgtacacaacatccccagcacgcccggaataattcctatacgcattgattacaatcttgattagaataaaacaatgagaggcaagctataaaagcccgtctccacatggatgtaaattatgtaatcaagctatgggaggtgcacgtagataatgtgaataagaaagtgtatagacaatcttatcctgatgaacaacctgctcaaatgtgatgggcgttaagatgcaacggaagtcaacagactgcgcttccgtgaaaagagaaagagaaaagtggcagatagcacaatcatcggacgaatggcgcggatgatctgcatgggaacaggaagcagcatgctcgtcctcgtgatggtgaaaagccttcaccacgaagaacggcagaagtgccatcatcagcacccacgctataactactctcttctttctgctgttattcactttcttaatcgacaagtatttgaataagctgcgaagatatgtatctcatattaaaaacgcaaactctggtacttaatatgtgttaccgctccggcttttaccaatatataggtatatgccaatctcaatttatacttctcttggtcacgttttgtgcatttctgtagggttatgaattaattcaccacagattacacagattgacacagattctattttactgattattagattaataaatctgtgtgaatctgtgtaatctgtggtgagtcttattcattcctataccgttacgaatgcacaaaagatgaccaagagaagtatagtagtaggcgaaaaaaacaactaagtaacacttaaaaaataacttggtaatgtttctggagaaaatctccctaacggaagaagcctcccaccacataaagaggcacgttcaccatccagctttaagtggcaaaaggaggagaagtttcgcttatttaacgtccgcaccacgaagcatccccttatccatcacagacacattccttacctttcccccgcaaaaagcttgcatatctactgaagcatgactacctttgccgttcaagatggcatcttgtgcagtataagataccatcttaaacaacacaagatgccatcttacgcagcaaagcaaagggagctacagttcatagggaaatgagtttcaggcattaaggtactatgctactgacattgaaaagcatagatatcaacaacaacatcaatcaacaggaacaaggatatgggaatgatttatttagtaagaaagaaactcttccgctccaaggaaggaatgaagcaactgtactacgctgtgcaacgtaccctgcaaccacgtggcggagtaactaccgaaaagttggcgcaacgcatggcccgtcgcaaaggcatgggtgagggcgacgtgcaaagcgtactggtggacctacccaaatacatcgaagaagcactcagcgagggagagtccgtcactatcagaggacttggctccttcaacctcgccataacaagcgagggattcgaacatcccgacgacgtgatgccgggcaaggtgcgggtttcacgcatctacttcaaaccagatcgcatgttaacaggaaggctacgccagaacatggatttcttccgttacccactaagcaaatacttcccccacgaaatgctacgtcccgaaacgctggagcgcgaacgggtacagaccccaaataagccggaagacgaaataaaggatattgatacggtaacaggctgaaagcactgaaagccgtccccgaccggagatttcagtctaaacgccttacacacaacggcctaaagccgctgaaagagatgaaagtgcagaacgcatgattattcgcacaaaccacgtcccaaatgcggacaggcacttaaaacaaatcttaatcttctgcaagcgagacaaaaaagatatttcatttcaagataattacgtatatttgcaagctgaacaagagaacgaaaagtgccggaacaggtcgaaatgaaataaaacggctttgagttattaacaaaaaaggcgacttatcaacagattttgcaatctttctcttttttagtaggtgcaatacggaattatcacttatttcgctgccaataaacactaagattatgggaaaaattattgctttggcaaatcaaaaaggtggtgtaggaaaaacaacgactacgattaacctcgcagcctcactcgccaccctggaaaagaaagtgctcgttgtggacgcagacccgcaggcaaacgcctcttccggtttgggtgtcgacatcaagcagtcggaatgcactatttacgaatgcattatcgaccgggctgatgtccgcgaagcgattcatgacaccgagattgatacactgaaagtgatatcctcacacataaacttggtgggcgccgagatagagatgctcaatctgaaaaacagggaaaagatattgaaagaagtacttgccccgctgaaggaagagtttgattatatcttgatagactgctcgccctcactgggactgattaccatcaacgcactgaccgcagccgactctgtgattatccccgtacaagcggaatactttgcattggaaggcatcagtaaattgctgaatacaatcaaaatcatcaagtcgaaactgaacccggcactcgaaatcgaaggtttcctgctgaccatgtacgactcacgcctgcgccaggccaaccagatttacgatgaagtgaaacgccacttccaggaactggtgttcgaaaccgtggtgcaacgcaacgtcaaactgagcgaggcccccagttatggtctgcctaccatcttgtatgacgcagactccacaggagccaaaaaccacatggcacttgccaaagaactgattagtcgcaacaattaacttaaaaacgaagaaccatggcacaaaaaagaaatgcattaggacgcgggctcgacgctctgctttcaatggacgaagtgcagaccgaaggctcttcttccatcaacgaaatagagttgtcgaagattgtcgtcaacccgaatcagccacgtcatgaatttgacgaaacggcgcttcaggaacttgccgactcaatctctgaaataggtatcattcagcccatcaccttgcgtaaactctcggacgatgaatatcagatcattgccggagaacgccgcttccgcgcctcgcaacttgccggactgacaagcatccccgcctatatccgcaccgccgacgacgaaaacgtcatggaaatggcgcttatcgagaacatacagcgcgaagacctgaattctgtggaaatcgctcttgcctaccagcacctgttggaacaatacggcctgacacaggaacgtctcagcgaacgtgtaggtaaaaagcgcactaccatcgcgaactacctacgcctgttgaagctgcctgcacctattcagatggccatacaaaacaagcagattgacatggggcatgcccgtgcactcgtcactctggctgatccgaagctgcaagtgaagatattcgaagaaatcatcgagcacggatactccgtacgcaaggtggaagaattagtaaaatctctgagcgaaggcgaaaccgtgaaaagcggcggacgcaaaatagctcccaaacgagccaagttgcccgaagaatttaatatgctgaaacaacagctatccggtttcttcagtaccaaagtgcagctgacctgttcggagaaaggaaaaggtaaaatcagtatcccgttcaataacgaagaggatttagaacgtattatcggcatactcgatactctaaaaaaataaatgacgaaaggaactaaaacatatcaatggtgtatcgccctgctgctttgcctcgtgcagacggcagggattgctatgtatgggcaggaccgtccgcgtgccgctgccaaacgacagcaaaaagagcttgcggacacattgcggaagataccgcaaattgtaccggatagcctggatgcactaagcgatcctattctgcaacgggtttcaaccgctgatagcctcgcagtagccgacagtattgctgccgaaaacaaaaagcgtttgttggagatgacctccgcccccaccccgcaagtgcccgatacgcctgcggacagtctgaataaggaactcaataaaaaagtttttattcccaatccgaccaaagcgacatggctcgccctggtaattccgggtggtggacaaatatacaaccggaaatactggaaactacctattatatatggtggctttgccggatgtgcatatgcactgacttggaacgggaaaatgtacaaagactacatgcaagcgtacaaggacgcctccaaaggcaactgggatgccagcagtatcactgatctgctccccccgggatacatcgacagggtttcccagacacaaatagtagaaacgctccgaaaacgaaaggatacataccgccgatatcgcgacctgagtatcttcgcttttatcggtgtttatctgatatcagtcatcgatgcgtatgtagatgcggaattatctaatttcgatataacgcccgaccttagtatgagaatagaaccggctgttatcaacaacccatatagcagcggtacctccaataaatccgtcggactgcaatgcagtttccgtttttaaatgagaataaagccataccaaagaataatcacacatgaagaataaatctgtaaatatgaagaagcttatcgccactccgttcctgttttgtctgtcactcttcaccttccaggtgcaagcgcaagaaagcgtggatgtactcatccgcgacaacggaacggaaagaaaggaaagcatcgaacttcctccaagtatgacctatccgctggacagcctgctcaacgactggaaagcaaagaattatattgatttaggcaaagattgcagtacttccactgagaatccgtttttcagtgattccgtctacatcgaccgtctcagccgtattcctgccgtgatggaaatgccatacaatgaaattgtacgtaaattcatagatatgtacacaggacgcttacgcaataacgtatcgttcatgctgagcgcctgcaatttctacatgcctatctttgaggaagcgctcgacacctacggactgccgctcgaactcagatacttgcccattatcgaatccgctctcaacccttccgcccgttcacgcgcaggcgcttgcggactgtggcagttcatgctggctaccggaaaaatgtatggtctggaaagcaacagcctcgttgacgaacgctgcgatccaatcaaggccacctgggctgccgcccgctatctgaaggatctgtatgccatttaccaagactggaatctggtgattgccgcttacaattgcggcccgggcaccatcaacaaggccatccgccgtgccggagggaaaacggattattgggaaatctataacttcctgccgaaagaaacccgtggatatgtacccgcgtttatcgccgccaactatgtgatgacctactattgcaagcacaacatctgccccatggaaaccaacattcccgacgcaacagatacagtacaggtaacaaaaaacttacatttcgaacagcttgccgatatctgtagcgtgagtatggaagagatcaaaagtcttaatccccaatataaaaagaatataattcccggtgaaagcaaggcgcaaaccctccgcctgccaatgaattacatcagtacatttatcgacagccaggacaccatctacgcccaccgttctaatgaattattcaaaaaccgccgtactgtagccatccccgaaacccgctctacagcaagacgcgctacaaccggcaacgggaagctgacttaccacaagatacggagtggcgaaacactgggtggtattgcaggtcgttatggcgtcaccgtcaaacaacttcagagttggaatggattgcgcaataccaacatttctgccggaaagcaattgaagatatataaataaaggcacaaatacttgtgtgatgttgaaaattgcttatttttgcagcaactgaagaaaggagaacaggatatggaagagaatgtgggccagaaagataaagaaaaagtcgaagaagaaatgattgaacaggctttccagcaactgttaaacgactacttggcaaccaaacaccgcaagcgtattgagatcataacaaaggcattcaactttgccaatcaggcgcataagggcatcaaacgccgttcgggcgaaccttacattatgcaccccctcgctgtggcacaaattgtatgcaacgaaataggtcttggttctacatccatttgtgccgccttgctgcacgatgtggtagaagatacggattataccgtagaagacatagaaaacatattcggcccgaagatcgcccagattgtagacgggctgaccaaaatatccggtggtattttcggtgaccgcgcttcggcacaggcagagaacttcaagaagttgctgctgacgatgtccgatgatatacgcgtaattctgatcaagatagccgaccggctgcacaatatgcgcacgttaggctcgatgcttcccaacaagcaattcaaaattgcaggcgagacattgtatatctatgctcccctcgccaatcgcctgggactgtacaagataaagacagaactggagaatctgagtttcaagtacgaacatcctgaagagtatcaggaaatcgaagaaaaactggcagccacagcaaccgaacgtgataaagtattcaatgatttcactactccgatacgtgcccagttggacaaaatggggctgaaattccgtattctcgcgcgtgttaaatccatctattccatctggaacaagatgcagaccaaacatgtaccgttcgaagaaatctatgacttgcttgccgtacgtattatctttgaaccacgaaatgcggacgaagaactgaacgattgttttgatatctatgtctccatctctaaaatatacaaaccccaccccgaccgtctgcgcgactgggtgagtcatcccaaagccaatggttaccaagccttgcacgtcacccttatgggaaacaacgggcaatggattgaagtacaaatccgcagtgaacggatgaatgacgtagccgaacaaggtttcgccgcccactggaaatataaagatggcggaggcagcgaagatgaaggtgaattggataaatggctgcgcaccatcaaagaaatacttgatgatccccaaccggatgccattgacttcctcgataccatcaagctgaacttgtttgcatcggaaatatttgtgtttacccccaaaggcgaaattaagactatgccgcagaactctacggcactggattttgcattctccctgcacactgacatcggtagccactgtatcggcgcaaaagtaaaccataagcttgtccctctgagccacaagcttcaaagtggtgaccaggtggaagttctgacttccaaatcacaacgcgtacagccggaatgggaagtatttgccactactgcccgtgcccgtgccaagatagccgccatcctgcgcaaagagcaaaggaacagccagaaagaaggcgaaacccttctgaacgaattcttcaaaaaagaagaactgcgattggacgacttgttgatagacaagttggtgaaagcccataatatgaaaaaccgggacgagtttctgatagccatcggcaataaaaagatcgtattgggcgacctggataaaaatgccctgaaagagaaacaaggaaccaactggaagaagtttctcaccttctcgttcggcggtaacaaggacaacaaagaaccgattgaagaaaaaccactgcaagaaaaggagaaaatcaatacgaagcaaatcctgaaactgacggaagagaatatccagaagaattatatcatggcagaatgttgccaccccattccgggtgacgatgtactgggatatatggacgaaaacgaccgtatcattatccacaaacgccagtgtcccgtcgccgcacgtttgaagagcagttacggaaaccgtattctagctacagagtgggatacccataaggaactctccttcctggtgaatatatatataaaaggtatagatgccatgggattgctgaacgaagtaacgcaggttatttcacgtcagctgaatgtaaatatccgtaagttgtccatcgaaacaacagacggtatttttgaaggaaatatccaattgtacgtgcatgatgtggatgatgtaaaaaccatctgtaataatctgaaacagatacagaacattaagcaagtaactcgtgtagaaggataaaaaactataaaagcacactcattatgtttaactcaaaaaaaggaatagatgacaaggtaagcaataaattaaccacgctttccagtcaaagtttaattaaaggtgattgttccatcgatggagatatgcgtatcgacggaactgtagaaggaaatatccggtgtaccggaaaaatagtcatcggtccggaaggaaaaatacacggcaacctgtcttgtacacacgcttgccttcacggaactatcatcggtgatgcatacgtgaaggaagaactcaccttgaaagccaactgtgtgatgcagggcaatatctataccaccaaattggaaatagaatcacaggctaaattcaatggaagctgtaatacgaatgataccagtcatgagataaaattgttggaagctgttactgaataacattatttacaatatattcaggtccgtcaaaaaccaccttgcagaaaaaagttttattttgcatagacatctattattgatataaaatagctatttttgcagtctatatcaatgaagtatactatgatagtcggcaaatatataaatttgggaacgctccagaagctactgtttgatgatgaaaaagtaattatttccgatgaatgtattcaagaagtagataagagttttcgtttcttgaaggaattctccagtgataaaattatttacggaattaacacagggttcggtcctatggctcaatataggattgaagataaatcattaacggaattacaatacaacatcatcaggagccactctaccggagcgggaaaaccattgcctcctctttatgtaaaagcagcaatgattgccagattattcacctttcttcaagggaaatcaggtatacatacagagctggtcgaactactcgtcaagttcattaacctggatatttttccgtatataccggagcatggcagtgtaggtgccagtggcgatttagtgcaattggcgcatatagcattgacgctgatcggtgaaggagaagtgttctatcaagggcagctacaacccactgcccaagtacttgagaagaatcatctcaaacctttctccatacatatccgtgaagggctttcagtaacaaacggcacttctgttatgacaggcattggcattgttaacttgatttatgcccgccaattgctcaactggtccgtatgcgcctcggtaatgatgaatgaaattgccgcatcgtatgatgattttgtttctcagccgctaaatgatgccaaacttcataaagggcagcaaaagatagctgaaatgatgagagtctggatgtccgacagtaaatgtactctcaagagagagaatgaactgtacggacagaaacatgaagaaaagatttttgaacataaagtacagccttattactcgttaagatgtactccacaaatattgggaccggtttatgacacccttataaatacagaagaagtattgataaacgaaatcaactcagcttgcgacaatccgattgttgatccggaaacccaaaatgtatatcatggcggaaactttcatggtgattacgtctcttttgagatggataaactgaaaatagccataacgaaactgacaatgctaagtgaacgccaattgaactatctgttccatgatcgcatcaacggaatacttcctccatttgtcaatctgggagtattaggattgaattatgggttacaagcctcacaatttacagctacttccacaacagccgagtgtcagacattatctaatcccatgtatatacacagtatcccaaacaacaatgataatcaggatattgtaagcatgggaactaattctgcgttaatagccaaaacagtcatagagaattctttccaggttatgagcatcctgtttatgggtatcgtacaggctgtagattacttaaagatacaggaaaagctcagtacggaatcgcgttgtgtatacaatgagatccgggcatttttccctgtatttacccaggatactcccaagtacaaggaaatagaggctatgagtgaatacttgaaaaataagaaattcaatttataaatgaaatacgcattaataacaggcggaagccggggcataggacgttctgtcagtatcaagttggcagcaatgggatataccgtgctgataaattatcaaagcaacgataaggaagcggcaaacacactgcaattagttcgtgaaaaaggaggcgacggagaactcttgaagttcgatgttactgatccaaaggcagtatccgaagctttaaataactggagcgaacaacatccggatgaatatatcgaggtgctgataaataatgcaggcatccgcaaagataatctgatgctttggatgaccgaagcagaatggagcggggtactgaacaccagtctgaacggcttcttttatgtcacccaggcattgcttaagaatatgcttgtcaaacgcttcggacgtattgtcaacatcgtctcattatcggggatcaaaggcatgcccgggcagaccaattattctgccgccaaaggaggtgtcattgctgctaccaaggcattagctcaggaagtggcaaagaagcacgtgaccgtcaatgcggtagcgcccggattcatccgcacggaaatgaccgaagatatcaacgagaacgaatggaaaaaacagatccctgccgggcgcttcggcgaaccggaagaagtggctgatctcgtaagttttttagtctctcccaatgcctcttatattacaggtgaggttatttcaatcaatggaggactgcatacatgagaagagttgtcattacaggaatggggatttactcatgcatcggcaagaatctgagcgaagtaacagactcattatataacggtaaatcaggcatcggcattgatcctcaacggaaagagatgggatatctgtccgcactgaccggcttattggagcgtcctgatctcaaaaagatgctggacagacgaaaacgtctctgcctgcctgaacaaggagaatatgcctatctggcaagtgtggaagccttcaaaaatgcaggtatcgatgaagcattcctggaagcgaacgaagtaggggtgctctatggaaatgatagtagcactgcaccgattattaatgctgtggatattatccgggaaaagaagaataccgttctggtaggttccggttctatcttccagtcgatgaattcaactgtgtcgatgaacctgtcagtcatctttaaactcagaggagtaaacttcacaatctccggtgcttgtgcaagcggttcccacgccattggcatgggatatctgcttatcaaatcgggattgcaggactgcattctttgtggtggcgcacaggaagtaaatccattctcagtcggtagtttcgacgggttaagtgcattttccaatcgggaaactgaaccccagaaagcatccagaccttttgataaaagcagggacgggcttgtacccagcggaggtggcgccagcctggtactggaaagttatgaatcggctgttaagcgaggagcccccatactggcagaaattatcggctacggtttttcatccaacggagatcacatatctgttcctaatatagacgggccaaagcgttcattggaaatggccatccggaatgccggaatcgcattggatgaaattaaatacatcaatgcgcacgccacttctacaccaataggtgatttgaatgaagcaaaagccatagcagaggtatttgaaggacatcgcccatacgtgacgtccaccaagtctatgaccggtcacgaaatgtggatggcaggtgccagtgaagtaatctattctactctaatgatgcaaaataacttcattgctcccaatctgaatttcgaagagccggatgaagcatctgcccaacttaatatccctgcccaacgagtaaatatggaatttgatacattcctctcaaactcattcggattcggaggaaccaattctacattaattattaaaaaagtaaagtaatataagtatgacccacgaagaaatcattgaaaagataagagaaaccttatccgaggaatttgaagtagatatcgatcttatccagcctgatgctccgctcatgcaaacccttgagttagacagtctggacttggtagatatggtagtgttgattgaaaagaacttcggttttaatgtaaccggacaagattttgtcggaatcaaaacgttccaggacttctataatctcgtcatcacacatatggccgaaaacaaaaacgaataaacaagatgtggaaaggtaaaacccgtggcggtgtatccggatacctgttttttatttacctgatcaggtattgtggtgtaaaagccgcttatggttttctgtctctgattgttctttattttattccgttcgctccgaaagcaacaaagagtatctggcaatatgcccgtcgtattttaaaacggaaccgcatacagtcggtgggactattgctgaacaactattatcgtttgggacagatacttatagacaaagtagccattggaaatggaatgatcgacaagtatcatttcaagttcaaccactatcaggagtttctaaatgtattggatggagatcagggagtaatcatgatcggtgcacatgttggcaattgggaaatcggaactccttttttcaatgactacagcaaaaaaatgaatgtggtgatgtacgatgccgaacatcaaaagattaaagaaatactgaaaaagaacgggcagcagcaaccttacaagattataccggtcaacgaagataatctggcacatatatttaaaattacagaggcactggatcataaggaatatgtttgttttcaaggagaccgctatctgaatgcagataaactgctgacttgcaagttcatgggacacgaagcacattttccaatcggtcctttcctattggcatcgcggatgaaagttccggtagtcttttattttgccatgcgggaggctaaacaaacctatcatttccattttatacttgctgagcaagtgtccggttcgaaagagaaaagagcagaacaattattattggaacaatatgtgaatgctctggaaaaaataatcggccaatatcccgaacaatggtttaactattattctttctggaagccgtctgaataaacaaaaatcaacagaatgaaactattcccttcattacaaaagagatatgccaaagagcgattcaccgctgtgcaagcacagcgattggcccaggaaatcgcttttggccccgtcgtatttcaggtctcacgcttgatgctgaaattcggtattttccgcctgctatccgataatcgggaaggtctgtcactggaacagatcagccagaaaaccgaattatccagatatgcagcacaagttctactggaagcctccctcaccataggtactgtattagtaaaagacgatcaatatatactggcaaaggccggatggttcctgttgaacgatgagatggcacaagtgaacatgaattttaatcaggacgtcaattacaaaggtctgtttcacctggaagaagctttgctaaatggccgccccgaaggtttgaaagaactgggaaactggcctactatttacgaaggattatccgacttacccgggcaggcacagaaaagctggttcggcttcgaccatttttattcggacaattctttcgaccaggcactcgaaatcgtattcagccactctccccggactctgctcgatgtaggaggcaatacaggtagatgggctaccaaatgtgtgcaatacaacgagaaagtagaagttaccattatggatttaccccaacaactggaaatgatgaagcaaaagacggaaaaaatggccggccacgagcgtattcatggacatggtgtgaatcttctcgatgaaaaagtacctttcccgaaaggttttgatgcgatctggatgagtcagtttctggattgtttttccgagaaagaagttatcagtatactctcacgggctgctcagtccatgtctacagaagggcgactctacattatggaaacattctgggaccgacagaagttcgaaaccgctgcctactgcctgacacagatcagtatatactttactgctatggcaaatggtaacagcaaaatgtatcactccgacgatatggcacggtgcattcaagaatcagggttggaaatagaggaaatatatgacaacctgggattgggacacagtattgtaaaatgtaagttgaaatgaaaagaactcctatcatatccggtgaaggaatcctgaacctgataccacaacgactgccaatcgttatggtagattcattctgtggcattgaagataattgctcctattcaggtctcacagtcactgacgataatatcttctgccaggaaggcaaattgcaggaagcaggtattattgaacacatagcccaatcggcagcggcacggatcggatatatctatttacagaaaaatgagccggtgcccttaggctttatcggttcggtagataaattaacccttcaccgtttgccggagacaggacagaaattatccactgaaattacggttattcaggaagtattcgacattactttggtatctgcttgtgtaagcactacggaaggagtgattgcagaatgccggatgaaaatatttttagataagaaatgaggcaaaaaacgaatctgcatacacctgcactcattgaccgcaccacaataaaggtacgtttcagtgaaatagactccatgcaaatcgtatggcatggtgaatatgtacgctattttgaagatggaagggagtctttcgggaagcattatggtttaggatatatggatatctacagtgaaggatatatggtacccatcgttgaattaaactgccaatttaagcaatccttatccttcggtgaagaagttatcattgaaacccgatacatttcttgtgaagctgccaagattaaattcgaatatgtactataccgggccacagacaacaatatcgttgccaccggaagtacaactcaggtttttctaaatactaacagggagctggagttagcaactccggctttttatcaggagtggaaaaagaaatggaacatcctataactgtatatatcacagctgatactctgatcagttccttaggagcaaatacccgggagaatataaaagcaatccgggaatatcgaagcggaatcaccaggcatgaagcaggaatcatatctgatacctctatattagctgccacgattcaaccggaacaatgggaaagagcaaagaatttgggtacgtacacacgtctggaacaactattcatacttgccattcaggatattctgtcccattccgaaatgaatcttgcggatgaagattgtggcctcatcctatccactactaaaggtaatatcgacctgttgaccaatcatcccgacacccctgatatcagagttcatctatgggaaatgggaagaagaataagcgaatattttcaggctggcaaccgggtagaagttatttctaatgcctgcatatcaggagtatccgctctgattgtagcaaagcggtggatcgaatccggcagatacaaaaaagtcatagtagcgggaggtgatatcctctcccacttcattaccagcggatttctatctttcagatccatcagtaccgaaagatgccgcccttatgatgcccggagagacggactcaatttaggagaggcttgtggtgctatcctgctgagttcggaaggaaacgatacggatatcatcctgtccggaggagccattagcaacgatgccaatcatatttcaggcccgtcacgtacaggagacggactttacttcgccatacggcaggccatggaagaagccgcagtccttgccgaagacgttagtttcatgaatacacatggaacggctactgtctataacgatgaaatggaatcgaaagctattcatttagccggattggaaaccgttccggttcatagtttgaaatcttatttcggtcatactttaggggcatcgggagtgattgaatctattatctgtattcacgaactaaaggaaaacgtactattcggtacattaggctatgaaaagcccggtgtcagcatgcctattctggtgcaagctgaccatcaggaaatacccatgaaacactgcatcaaaacagcatccggtttcggaggttgtaatgctgctatcgtattgacacttcccgcatatcagaaacagccctcaagagtgcaatcatcggtgacagttcatacgaccgcaactgtttccattgagaatagctgtttaagtatgaatggagagaccgttttttcatcatctgccccaaactttgcgcagtttatccgcgaagcatataaaaatacaggtggaagtaacatgaaattctacaaaatggacgacctttgcaaactgggatatactgctgttgaatatctgttgaaggagaaaaactttcaaccggaagaaatagggatattgctggttaatgctgccgcctcactgaatacggatattcgtcatcagatgattatcaatcaggaaggtgaccatgcagccagtccgacggtatttgtatacactctgcctaacgttgtagctggtgagatatgtatccgtcataagatacaaggaga

SEQ ID NO: 6401 - DNA, 982 bp, Unknown
  gut microbiota DNA sequence
atttgcaagcaaaatattaattatttaagattcgaatgaaatatcaattacgaaaaggtgatacggcatttgcgattggacaaacaaattttagtgaaagcaagggaagtcttatagatacaaatggctgtatagcattgtcggttatttctggatatgcgatagctactatcaatttcaaaaaaaatatccttcgcaagggagattttattttgctattttacgacagtagtttttcagtagataaaatatccgcttcttttttagtccaatatttctcattatcatatccattattagaggaagttatttataaacccctttccacacaattctgggaggcactgtattctacaccaatattacatccatctcatgactttgagcatctattgagcggctggtggcaacttatgaaatggacaataacaaatgaaagtccgatgcagaaagagcttgtagcgaatagcgtccgaaacttgtatattgtaatagattctgcattaaaccaaagcggcatgagtgtgtttcacaacaaatgcagccattcaaggatgcttataaatcgcttttttaaactactttctattcattgtcacgaaacccgcgatgtgaaattctatgcagagcaactttccataacgcctacctatctttacaaaattgttcggaaatatatgtctcagtcaccgaaagaattaatagacaaacaagccatttcagaaatcaagagtctgttaataaactcggatatgcctataaagtctatcgcatctacattgcattttgaagacgtttcctatttgtgccgttattttcgtagattgacgggaatacctccgttagagtatcgtgaaaataacaaggaatgatataacctataataatgtttttactgatattgccttattacatagtaaatcctcgccctctatcaatcttccagtcataccgaccttccgcgacatcgccaacctcattg

SEQ ID NO: 6402 - DNA, 613 bp, Unknown
  gut microbiota DNA sequence
aggcaccctgggattttgatgtatctgttaaagatatttattccggactgaagacaggagcaactgtccagattattccgaagcagctattctctttcccgatgaagttgattgactatctgatcgagagggaagtgaccacgctggtgtgggcggtatctgcgctgtgtattatctcaactttgaacggatttgaatataaagttccggataagattaagaagattcttttctcaggagaggctatgcctgtgaaacatctgaatatctggagaaaatatctgccggatgttatgtatgtaaatatttatggaccaactgagatcacatgtaattgtacgtattatattgtagacagggagttccagtctggagatgtacttcctatgggcaaggcatttccaaatgaaaaagtattccttctggatgaagaagacaagctgatcacagagaaaaataaaaatggtgaactctgtgtaacaggaagtgcacttgcactgggatattacaaaaacagagaacagactgcgaaggtctttgttcagaatccactgaatgacagatatctggagccaatgtacagaaccggtgatcttgcttattataatgaacg

SEQ ID NO: 6403 - DNA, 23715 bp, Unknown
  gut microbiota DNA sequence
gataaatatcaacaaaaaaggcggtgattcttatgaagaattaccgcctttcctatttattgtctattattattctgggaatggatcacccagattctctattatcagcccgtattgcttgggagagagccagcgatgattataaggttgatagcccgtttcaactaaagcagtcgccaaatttgtacaccttttaatgcttcgttgtaaagatcttaccgcatttttcggagtggaacaaccggggaaatacataccggccaattcggagaaagaaagaatcagttttgccatttactaaggttttaggtttaatattaaaattcagttttttaaagctctacaaagatactacatcagaaaggcgaagtcaagtatttgggttggtttttccgacttttattttttcttttttttattcttctcattttctgagataacatcttgtatattcgtttttttttataaatttgcccaacttacaacataacaaaaaataatatgcgacactcttgtatttcctttctcagcatctctctttttcttctcacggcttgttccggagaaaaaggttcacatgaacagatttctacagccagtattgataaaggcgtcgaacactttgatgcggactacacttcggcacaatatcaatctcttttcaaaaatccgaaaacgatccggctggaaacgaatgataaatgcctgttgagtgctaatgcgtacctgcttaatgtgactccaaagtacatagttatcggagataagacgagtttttatttctttaatgccgaaaacggttctttcctttcgatgctgaatcggtaacgggcttttcaggtggctacatcgtgcccagattcagagccggaaacgatcaagtgtgtatcgtgattaatgatacgttgtatgccagcagaaaggaaaaactcattcccgctgtagccatcaatcagggcaaactaaagatgccgacagatttgaatggtgatcttgaacgtatgcttacggaagggaaatattgtattaaggcggaaaatgctttattggtgaatgacctgttgttttatgatttcttctggaatgagagcaggcattatacactatggaatacaaatagcggggaattgttgactcattcggaaaaaggatacgccatgccttataatgagaaagcaattgtaaatactcccgtttcccttatccggaacaacaaggcatatacattgctttctgctgataagttggcccaatatggtttagctaatgaggcggatgactcaaatcctacattgctctgtgtagatttaggaaactaaaatatagtgtcctgcaagcccaaccaatgttcccaataatatggcattgaatgctattattggcaaagatttcttatccgaatgtcctacctgaataagcatcgggatagttagtgctaagcctacaacgccgccttccaaccaccagggaatatgagttatgtctacattgagaataatgattgaaacaaagaagtaatggaaaaatgccgaaacggtggagtagcggggaagtttctgcataatcataggaatgatgtctatgactccggcaatcaatccgataattgccgagaaaagtaatttgtccatgtcagatattatttagttagtgatgaaaaatcatctgttttaagcaaattgaaaagatattctttggcttgctgtttagaagaatgtctgagtaagtttgaatacagggctgtcgcggcatcaatgttttccatggcagacttcgatgtggagattctctccggtaccaatgatgatgagtaaggcagggcaggatcgatacggtgttggctgagggcataatttacccggttcatacagttgcatttcttgcctcctgcgtgctcgcaatattctgacaggaaagtactcattacttttctggagcgtgacagccgttgcctgaagttgtcagccgacaatcctgtaatctcacttcccagtctgctgtctacatcaaacatggttcccagaatgaagattaacctgtcgaatggatttaagcattgaagcaaaacgttggtgcatgacagtttcagctcttccgagaaaatctttttctcagccggattcgtttggtcaactgaagaggagacatatctgtctatatcactcccgaagatttcaaaagacaaaggatgatttacgaagtctttattcttctcattgattaaatggtttacggctattttatacacccatgtcgaaaataaactttttcctttataagaagaaaggcttgtgatgacctttatcagaatgtcttgctttgcgtcttcggcatcttcaatccgcccgagcatgcgcaatgacaaattaaacaccgggccttcaatattttcaatgattgcttctaatgcctctttagagccatttatcgcttggtccacatgatagatttctatttccatgatttctgttttatatatttagacatgggccgaagaggattgtgacagtcatttgtgtttttaacattaaaaaaatgcagagactattctttttatcggataatctctgcaataccagatacatgctttacactcagcggaattttatagtatgattataacaaatagaatataccatacatcattacgaaattaaatcccgaatgtgccgcaattgctccccaaagtgaatcacaatacagcttacatctgaaaaacacctggctgactataaacattgaaaacacccaaagcaaggcaggaatcggtaagaagcaccatgtccccagtgtataaacgatcccgaaatgggctacatgcgttaatgcaaaagccagtgaatcaaagtatgaagcctttgtctctccgaacttagggacaaagcacccgtgaataatgcctcgatacaggaattcttcgcctatcggactaaatatcatgcttggaataacagcgattgtgaagtacagcaatttatcatctcctgttataccactgctgggattatttcccccgatatatacaaatgcgttttcgacagattgtccatacagaaaagaaaataaaccaaatatggccaagcaaataaccccgccagacaggaaagaaactcctattctccaccaatgcgcgggacgtttaagccctatgcctttccgaccatactttgtaagaagaatgaacgggataatccacatgcttaaaaatacgaacatgacagtgccgtaacttctgtccacataagattgtagcacgattacaaaacggggtattccgaataacaatatgagaaatacgcctaatttccaattaaattgaaaatgattgccccagaatttctttagatactgattcatagcagtagaatttatagattacacttcttttgaaagaatgctcgtaaaattacaaaataaatcgaaaggacaatctgcttttgcattttacatacttaccttttcttttatccgtaatattggttatatattccgtaatttatatacctgcatactggataatactccgtaattttgtatcattgcaatatgcttcccgaatcgaagcgtttgctacggaaaagtaatctatgtttgaactaaataatatatcgtatgaaaagacttacattctttatggtagcgattatggcgttatgtttgaccgcaatcgcacagaaacaaagttctaagacattggttgcctatttctcggcaacgggaacaacagaaaaagcggccaaggtagttgctgaagtcacaggtggcactctctacgaaatacagcctgcgaagaagtacacttctgccgatctggattggcatgacaagtcctcacgcagcagtgtggagatggcggatgccaaatcacgtcctactttaagctccaaagcggagaacctagcggactatgatactgtttatatcggttttcccatctggtggaatttagctccgagaatcatcaatacttttatagaaagtggtgatttttcaggtaagacagtgattctgtttgccacgtcgggcggaagcagtatctccaattccgaaaaagagttgcagaaaacttattccaatctgaagtggcagaaaggcaaactgctgaacggtgcaaccaaagaagacattaaacaatggactaaaaaataaattagtatgagaaagaattacggagcaaaacccttttcctatccgcagccggtgtttatcatcgctgcttatgatgaaaatggactcccaaacgctatgaatgcggcttggggcggtatcagtgaaatgaaagagatcagtatttgcatcagcgaaggacacaagaccactgcgaatatcctgaaacgcaaagcatttacagtaagtatggcagaagtggggcaagttgttgcctgcgattacgtaggtatcgtttccggcaataaggtaacggacaaattcgcccgtgcaggtttccatgccacccgttcggagttcgtggacgccccgctgattgacgaactgtccgtagcggtggagtgcaaactgaaagattacaatcccgaaacctgcatcttgcgtggagagatcgtaaatgtaagtgtagacgagcgtgtacttgatgaaaatggaaaagtagatgcttccaaagtagctcccatcatcttcgatccgtttaacaacgactatctgaaggtgggcgaaaaggtgggtaaggctttttcggatggtaaggcgttgaaatgattctaaaatcaggtcttcacaaaaaaatattcctcaaagtatagcttaaatactttgaggaatacagatcaatgatacattgtgatagttctgttaaactacttcattatcaatttgtttaatcaccctgcaaggatttcctacggctacacagttgtcaggaatagaatgggttactatactgccggcacctatgacactgtttttcccaattgtcactcccggtaggattatcgcaccaccgccaatccacgctccatcatttattctcacggggagtgcataggttttgcaaataccttctcctgcttcccaatccgccacaactctttcttgcaatttggtagagtgggtggctgtgtatatctgtacattggatgctatcaacacattgtcgcctatctcaatgatattgttgtctacaaacgtacagttcatattgatgataacctgatcaccgatgaaaatgtgcttcccgtattcgcaatggaaatcaatatcgatgtgaacatgttctcccatcttgccgaacaaatcatgaaagattcgctttctctgttccgtgtcggcataatccgtttcatttagccgcttcaataatcttttagcattcagcgtcatatctgccaatactttgtcaccgccgttgaacggttctccggctaagcacttttccaattctgttttcatatattgagatctactaatttttagagcattcaggtcattacgaagatgacttattcaccacattaatgtgataaagataaggataaaaaacggaaatatgaacaactatacttttcaaataccagattaaaaacaaccattaatgattatttatccaaccactctttcaaagcagaagctcgttctctgcttacaataatctctgtatcaggatattttttcatatgtatttttaatctggagttaaagtagttgcttacattccgtatgctgtcaatgtgcaaaagatattgcctgtttgccctgaaaaaaatatcgggattgagctggctttccagttcatccaatgaataagatatgttcatggatgctccatcgttcaggaatataagcgtcgtccgttctttcaaggcgatatggctgatgtttttcacttgtacggagatgtacccatcccggtagggcaacaggaaacgctcgcgataacggtaattattgcggtacatatattccactaaccgacgcatatcttctccatgcgtgtcggacaaagtccggcgacgcaccttattgatggcttcagccaattcttcggaattaatgggtttgagcaggtagtcgaagctgttatatttaaaagcttggattgcatattcatcataggcagtggtgaagatgattggggatggtatggccgtctgacgcaatacgtcaaaacttagtccatcggacaggcgtatgtccgcaagtataagatccggagtcggatgggttcgtagccattccaccgattcctgaatattggccagtggtccttccacatgaaaagtcgtatctatctcctccaattgacgtctcaggcgattgaagtttcgctgttcatcttcaagaattaagatattcatattaagtattatttataataggcagtttgacaatataggtattttctcgttgttcgataaaaggttttttcttgcaaagtaagagataacgcccgatgatatttttattgccgatccccgtcgattcaaaatcggatgctatcgggcgtaagtcgttttctactacaatatcattttcttcacggaaaacacgtatcgagagagggtgtcgagccgatgcacggttgtgcttaatggcgttttccaccaataattgtaggcaaacgggaggtatctgcccgtcgatttgctttaatgtttcatctatatctatgcagacagcgtcctcgtagcgcatttttatcaagtaaatataagaatggaggaaagcgatttcttcttcgatgcttaccgtatctcgtttcagattctggatgacgtaccggtacacctttgacaagttgtccagaaacttttcagccaatgcagtgtcttccactatcaattcagaaagaatgctgaagttgttgaacatgaaatgaaggtctatttgcgatttcaatacttccaattgcatctgtgcggcatgttccttttctttcagaagggttatttccaactcctttttctgtctttcggctaatatggatgattccatatattgggcatcagtatagatataagacacgaatgtcgccattacactgaatatgtacaacccctgatgaaaaaaagcaagtccctcatcaaaacatatatttatcaacagagaaaagcaccaaacggtcaggttgttaaataagagtagcaggaaagcacagataaacagtcgtagatacggcttatccgtaaatgaaacaagacgaaacgaccaactgctataaaagacagatagttccacgaatacgaaacttatcagcaacgacacgccgaaatcgatcatataatctacaaacgacagttcgccgccgaaaaaccacgtagtatattctttgtcgatcaatgctgtcagcagataactgagaagaaatacaatcactaccagtagcacgcgattttttatattgtcgaacttggtttttgccatccgtttttatttgcaaaataagtgactttcacctcttcctccaaacaaagtggagacgaagcttcataaatagttctcgaaatgatataaattgagtgtgaatcgaatacaggaaatgaaaaagagagtatatttcattatccacatgtcgtaatccatttattacgtttccgaaactgttttctacgtttcacgcatttgcttattgcggtacagttccgtaattctttcctttgcgccaaaaaagagaagaaagaatgaaaagaattattggagttatacttttagcatgtacaatgtgcctgtcttcgtgcaagaacagggaagtgaaagaaacactgccattgtgccgggtgatgactgttgccgcaaaggcggtggaaataaacgagtcttattcagcttccatacaagggcggcaggatattgacatctacccacaaatatcgggtacaataacagagcttcgtgtgtatgaagggaaaacggttcggaaaggtgaagtaatgttcgtcatagatcaagtgccttaccgtgcagcatggcgcaaaacaatggctgatgtacatgcagctgaagcgcaggtggagacggctcgtctggaatatcgcagcaagcaacagctttttgcggaaaaagtcgtttcagaatacgatctgtccactgcgaagaatgcccttgccattgccgaagcgacattggaacaggcaagggctttggaagaggatgcacggaacagcctgtcttatacggaggtgaaaagtccgtcgaatggagttgtcggcacactaccttaccgggagggcgcattggtcagcgcttcgatggctattccattaacttccgtttccgacaattcagagatgtatgtctatttttcaataaccgagaagcgggttcattccttactccgacaatacggatcccatgatgaagtaatccgccaaatgcctccggtcagattacaactgaatgacggtagtctgtatgatggacaaggacacgtagagagcattagcggcattatcaaccggaagaccggtacggtatccgtccgcagtatttttgataataccaaccgtacattattaagtgggggaatcggtaatgtcattattccgcatcgtgaagattctgtcattgtcattccgcagacggctaccaccgaattgcagaataagattctggcatataaggtagctgaagacggttgtgttcactcctgtgaactgactgtggaaaaactcaatgatggcaaagattatattgtcagatccggtcttgccgtaggtgacgtaattgtaaccgaaggaacgggacttctgcgggacggtattcagatagatataagaaaagatgaaccctccaaataataaaaaactatgaacctaagattttttatagaccgcccagttttttctggcgtcatatctgtcgtgatcgtactaatgggattcatcgccttatctaatctgcctgtggaacagtatcctgatattgcaccgcctactattcaagtatttgccaactatccgggagccaacgccgaaacggtacagaaatcggttgtagttcctctggaggagtccatcaacggggtggaagatatgacttatatcacctccacggcctctaataacggtgatgccatgataaatgtttatttcaagcagggaagtaatgctgatatggcggcggtaaacgtacagaaccgtgtatccactgccttgagtttgcttcctgccgaagtgacaaaagtcggtgttaccaccatgaagcaacagaatgccgaactgaaaacattctcgctctttgaccctaccgggaaatatgatttgcagttcctgaacaattacatgaagataaacgtggaaccgcgtatcaagcgtatcgggggtgtgggtaatatgatgctgttcggttccaattatagtatgcgtatctggatgaaacccgataagatggcgcaatacggtcttatcccttcggacatcaccgctatgctggaacggcagaacattgaagctgctacgggagcctttggggaaaatcatgataacgtttatcagtacacaatgaaataccgaggccgatattccactccggaagagttcggtgaacttgtcgttcgttccctccctagcggtgaggttctccgactcaatgaagtggcagatgtagagttgggcgatgaagcctacaactattcgactgagatgaatggtcatccggctgctatggcaatgatttaccaaaaggccggctccaatgcttcggaaactatcaatgaaatagatgccgtactggacgagctcggcaaggatttacctaaaggactggaattcgtaactctgaacgacacgaacatttttctgaaagcatccatcaaggttgtattgaaaacattgttggaagctatcttactggtagtgctggtggtatatgtgtttttgcatgacattcgttccacccttattccgacgataggcattgtggtatccattgttggcacatttgcttttatggcagtggttggattttctgtcaatttaatcacgctctttgcactggttcttgctatcggtacggtagtggatgatgccattatcgtggtcgaagcggtacaagcacgtttcgatataggttatcgttcttcctatatggccaccaacgatgctatgcggagtgtcgcatcggctatcctgacctctacgctgatattcatggccgtgtttattcccgtttccatgatgggaggtacatccggagaattttacaagcaattcggcatcacgatggccgtagctgtggggatttcagcgatcaatgcatttaccctttcacctgccttgtgcgctttgctgcttcatccttacaaggatgagcaagggaatacgaagaacaattttgccgctcgtttccgtacagcgttcaatgcggctttcgatgcgataacttcccgatatatgcgctctgttctgttccttgtcaagcgtaaatggctgatgtggggaacgctggcggtgtcgatgatattgcttgtctttttggtgcgtaccaccaaaaccggacttgttcccgatgaggacacaggttcggtaatgattagtatgaatgccaagcccggaacttcgatggctgaaaaccggcgtatcatgcaagaagtaaaccggaacataaaccggatatccggcattgactataacgccaacatcgtgggatattccttcagtggcgcaggttcatctatgggaatgtcatttctttctcttaaacactgggacgagagaaagggaaaaggacaatcggcaagggaaatcatagacagtatctatgctttcgctcccggtgtaccggatatacaactttttgccgtgactcctccaatgataccgggctacgggatgggaagcggtttcgaactttatctgcaagacaaggtttcaggcgatctgaacaagttcaaggaagtggcggacaacttcgtagcagctctcaatgaacgtccggagatagagatggcatattcttcttttgaaacgaactacccgcaatattgggttgatatagatgctgccaaatgcgaacaagcaggtatttccactattgagattctggaaactctttccggttattacggaggaggttatgtgtcgaactttaatcgtttctccaaattgtaccgtgtgcagatacaagcagatccgacataccgggttactcctgaatccttgaaccatatttacgttcgaacgggtgagggaatggcgcctctcgcacaattcgtacagcttactaaaacctatggaccacaggacgtgtcacgattcaacctttataattccatttctatcaatggaacgcctgcatccggatacagttcgggagacgcattgaaagcggtacaggaaacagcagaaaagctgcttccggctaattatgcgtacgagtttggaggtatttcccgcgaggaaagtcagacgactaataatgtggctattatctttgccatctgtatggtgttgatatatttgatattgtgtgcgctttacgagagtttgctcattcctttctcgattattttgtccgttccgtgcggattcttaggaagcttcttgtttgcccagattttaggtctggaaaacaatatctatatgcagacgggactcatcatgctgataggattgcttgccaaaaccgccattttgcaaacagaatatgcagtacaacgccgaaaggcgggcatgtcgctcatacaagctgcttatgtggcagcaaaagaccgtttacgtccgattttgatgacggtcatggctatgatatttggattgctgcctctgatgatggcacacggtgtaggtgcgaacggttgccgttctcttgcttccggtgtagtgggaggtatgttgataggaacattggcactgctgctatttgttcccgtccttttcattgtctttcagtatttgcaagaaaaaatcagacctgcacagacttcatgtaaagatgcggattgggcgatacaaacggaattggagaaccttaagataaaagaatgaagatgaaatttgcatattatacattcatattgttatgggcagtttgtctgatgacgggatgctccatatataaaccttattcccgtcctgaagttcagaccgaaggattataccgagacttggaggaaacaaaagacactgcttcaatagctactctcggctggcggaatttattctcggacaaaaatttgcaagccttgatcgataaagggttggaacgaaatacggatttgcgtgtagcccatacacgggtgaaagctgcagaagcggtgttaatgaatgcacgactttcttatctgccatcggtagtactggctccggatggcagtatcagtggtacagagggagcgaaagcgataaagacatataatcttgccgcttccgcaagctgggaaatagatttgtttggaaaagtaaccaatgccaaacgagaggcgcttgccgctctcgaaggaagtcgggcttacaggcaggcggtagagacacagcttatagccacaatcgccaatagttattatatgttgctgatgctcgaccgccaactcatcatcagtgaacagacgttgattacttggaaagagacagaacactctatcgaggcattgaaacgggctggaaaatccaacgatgcagcggtacttcaggccaaagcgaaccgtttggcattggaagcgtctgtggtgtccatacggaaaagtatacgtgaaacagagaacgtactttcagcattactggccgatacatcacatgacatcatgcggggagcactgcaaaagcaacagtttcccgacacactttctgccggacttcccgtacagctgcttgccaaccgtcctgatgtgagacaagcggaatggaatctggcacaagcatattatgctaccaatgccgcccgttccgctttttatccgagccttactctttccggctctaccggatggacgaataatgtcggcggtgttgtagtcaatcccggaagttggctgttcagtgcagtaggctcgcttatgcaacctctgttcaacaagggaacgaatatagctaacctgcgtcaggcaaaagctcgccaggaagaagctcttcttctattccagcaatccctgttagatgctggaaaagaagtaaacaatgctttgacacgttggcaatctgcccgcattcggatggattatgtcaatcaacaaatcatgaccttgcaagaagccgtgcgcaaaaccgaattactgatgcaacatacttccactaattatcttgaagtattgactgcacgtcagagactactggaagcggaattaacgcaggctcaagataaatttgaggaaatacaaggagtaattgatttataccatgctgtgggaggaagatagccacataaaaaagtacatgaagttacaacataagatattcttcagctattggaagttgatattggataatgcggataggtgtttcctatccgcattacttataaatcccgattgctgattttgcaaattacaagaaaatgctacttagcatagaggtattttaccttcttttcatcaaaaaacgccttttcagccattcacgtaccggttcgtcatacagtttaaggcaagcatacgcgatagcgatggataaaatgaagatggaaactgcaagcaaaacatgcatgcctaaaggtgcgtccggatgattccgtgcccaggctatctgcatataaatcagcggaaaatgcgtgatataaagagggtaggagatctctcctagaaattggcagatggctacggaacgttttcccgtcacattgctgcctgctcccatcgctactattaaagggaacataataagtacacaaaaagcttcgtaagcaccgttcatccacatggcttccgaaccgccgatgcggggcataactaaaatggcagctatcagcaatgagcaccagtaaaatcctctttttatctttatcagtttgttgacgcgcgagagcagtagccccacgaagaaaggataaagcagtcgggatataccgatgtagagttgatcgggagtaaggctccatccgccgataaaggtatatgcagccgcttctcttgtggctaacagaccaaaagtatctatattgaatgctatgtcgatagtcagcaacgctgccagggcaacaaagattcccaaggcgattttagagaaatggcggataaacaaagcatatagaatgtttgctatatactcccacattagcgaccaggtagggccgttcagggagtttacttcccaccagccccgtatgtcccatgaaactggtgtggggatcatcaggcaaccgagcagaaccatcaggaggactttccaccaaggtgtttccataatcagagggaaagcggaacagtcacccagatagaaaaagacagctcctattaacgtgcccataatcaccataggatgcagacgtaccaagcgtcgcttaaagaaatcttttatggacatcctgtcccagcggtcatcataggcatatcctattacaaaaccggaaagaacaaaaaagaaatccacagccagataaccatgattcaaaatctgatggacagggccggcagaataagtttcaaacaagtggtaagctaccacaatcattgcggcaacgccgcgtagtccgtccagtatttcatagcgcggcttcgatgccaaataagttgttgtattcattattttgatattaaattcattttcacactaaaaaataacctgccatattttcgcaaacctggcaggacctaagttatccagatatctgatattatcagttttatatcgcgtgcaaagttatccctcaattagtttacacatttatcttatcgtttattagaattgtcttatatttgcatatttccctatataaggaagaaaataatagaaaatattaaattatagtataatgccccaatcagaaagacgttcttttactttcgagaatgttcatcttgcgcccgatgaacaaataggtttacatcagcaatctacctgggagctttcgtatgtaatcgtaggttccggcatgaggttgataggcgacatgacggaaccttttcttggcggagaggtagttatgataccgccggaaattccacattgctggtattttgagggcgatgatacggatgcgcagggcaggattgcgaacattaccgtgacgtttgacaatgatttcctcgataggtgttccggtacttttccggaactgtgcggacatatagataagttgaagaagaagtatgatgcggtgaaattcgataaggaaaagtcggaggcaatcattgtccttctggaagagatgtgtaatcaaagtgaagctgaaagagttgcatccatgataaagctcatcctgataatggcagatagcggtagtgagcacgtggtaggtaaatatcagaggattgacaaagaaacgaagcgtatgaatcagatccagacatacgttatctgcaatgcaaagcgggatattacgctcgatgatgtggcacggtatgtaggcatgaaccgggcttctttctgtatattcttcaagaaagctaccggaaagacttttgtcacttatctgaacgagtatcgtataggtttagcctgccagcttttgaagcagaagaggatgacggtttcagaaatctgctataatgttggttttaataatgtgccatattttaaccggacttttaagcgtcataaaggcgtctccccctgtgaatacaaacaaggtggcaaagctgatgctaacgaaaaaaaggaaagtgatatttaatacctattttatatagttttctttttccatataataaagaccttcgccacgatcaccattctccaagtcggtcagttctaatttgaatacacgataagggaggtcattctgcaaatgcttagggagatctaccgtcagcaggtaggcgcttccatattcgtcggcatcgtagtattcttttatttcctgcttcatcagaatgggaacttcttcgccatctatccagacaacaactttcagttgatcgattggtggagcccattgatcaactttggcttctttactttgggcttgctgtttcttattgctaagatcttcattgcgcacaatagaagccggttcggaggtcttcatccattcgtaaaagcgtgtcagactcatggggcggacatatatctgataagcaggcatagcgccggggatgcgaaaagcacgtattccataagcttccatacgatgatatcgtatgtttaacgtagtgtcgcgatcggcaataaaatcccatgcccaaaactctaaacggtgttccgcttcggggagtccatgtttgagggctgtgtgtgcataagtaggatagtagatagcatatacactttgatattttcctttaggtaccctggcagtgtagtagccatctttattagtgataccttctgatacaggattgaatcggggagtgtaccaacatacagaacaactatctatcggttgcccgttgaaatccgtcacccgtccactaatagttactgaatcttgttgttgtgcgtatccgacagtaccaaataaaaaggacaacgaaatgcagaaaaaaagtctgattatctgtgtcatagtagtatatattttggcgaagatatggaattaatttgaaaaaaatgaataagattctatttaatattggttgattatcagaattgttctcttatttcccgtgatttgaagagaatttggagcactgtgaatactagtataatagggaaatctccctaaataatagggaaaaagataatattatatgtttttctccacttatatttgtagcaacataaaaactaaaaacaatatatacaatgaaaacaataaaactgacattagcactactggcatttgcaatctgtatgggtagttgtgccatgattttagggattgacagtaataccctgatgaaaattcagaaagggatgactaaagaggagatcacatccatattgggacagccgatgcaccgtagcttcgatcacgaagtggaaggatggagatatgagaaaagtatttccggagctcccggtataacgatcatcgaccttggatttgtggatggaaaagtgacttatatggattcttacgagaagtataccaatcctcctgtagcagtttatccgtctgtggaaattggtggagaagccccttcccgtccgcatgttagtggtggaagagggatgaacgaaagggatttcctatctctttacaacaaagtgaagagcaaacctttcaaagacgatcaactggatttgctggaagccggaatcggtaacaggggattaagttgcaaacagtgtgtgcggatgatgtcgatataccggtttgatgatgacaaactggaagtcctgaaaattttagctccgaatatctccgaccgggagaattatgacgagataatcaatgcactcgattttatctccagtgaagagaaagcaagaagtattttgggaataaagaagtaaaacgaaaaggcggtaaattcatgcgaggaaataccgccttttactttatatgaagttatctgttatttatccttttcgacagatacagtccgccagatgatcgttgacgaatcccgcagcctgcaaatgggcgtagcagatggtagatccgaagaacttgaatcctcgttttttcatatccttgctcatggcatcggattcgggagatgataccggaatctcactcaaggattgaaaggtattgataagcggctttctgtcgggaaagaacgacagtgtatattcatagaaactaccgaactccttttgtatggcgaggaataaccttgcatttgtgatggtcgatttgattttcagacggttctttacaatgccatcaaagtgcatcaaccgttcgacatcttcatcggtcatttgtgctacctgtccggcatcgaaaccacaaaaggctttgcgatatccctcgcgttttttgaggatcgttatccaacttaatccggcctgggcactctccagcacaagaaactcgaacagcgtcttgtcgtcggtcactaaatttccccactcttgatcatggtatttcacatacagttcgtcagttccgcaccaaccacagcgtccgtttacaaaatcttgcataattacagtacttataatgaatgtacaaatatacttgattcacaacggcgtgccaaatttcagtaagctattttacgatggaaatcattttccacgtttcccgggttttcttatttcagattctcgttgaagaatgccgccaatttatcgaatggaatggcgttttttcctccaccgtcgtaaaggtcggtgtgtgaggcacctggaatgataagaagttccttattgtcacgatagttggtgtaagaggtcatatcgcggtaggcgtcttcactgaaatagcgggaatgtgctttttcaccatgcataatcagtacggcagagcggatttctttgctataagcaagaatgggctgattcaggaatgacattgggccggtaactgtccatccatcattggaattgcccgaacgcttgtgatatccgcgctgtgtcttataataatcgtaataatccttcacaaactgaggtgcatcggctggcaacggatcgaccacgccaccgccttgttcataatagccttgggcatactctttggtacgctgtgcattgaattgcttgcgtttctcgtaacgggcgttttcattgttgtcggcatcaaaatagccatttgcatttacgcggttcatgttgtacattgtagaggcaacagtagccttgatgcgtgtgtcgatagcagctgcattaagtgccagaccgccccatccgcaaatgccgataataccgatacgttccgggtcaacattcggctgggtggagagaaaatcgacagcagcctgaaaatcttccgtattgatatccggtgaagcaaccctgcgaggttcgccaccactctcaccggtaaatgagggatcaaaggcgatagtaaggaaaccttgttcagccattgtttgtgcatataatccgctggactgctcctttacggcaccgaaaggaccgcttactgcaatggctgccaatgtgcctttcgcgtctttcggttcatagagatctgccgccaatgtaattccatagcggttgacaaacgtcactttacggtgattcactttgttggactgtgggaaagtcttgtcccattcctgcgtgagaactaactcctgtgctttaatattactacctttcatttctttttgattttgtgcctgaacactaacagctgtcagcatcagaggcatgattagcattattacttttttcattgttttatgtcttttagttcaacaatgcaaagttaacgcaaaagccccacagcagatttgctgcgaggctcaaagaatctttctcagaagctcattttacgatgtcaactgcgacccacgagagattattgggtgatagcggtaggagagatgccgaattgctttttaaaagccgtggcaaagtgggatggattcttgaatcctacttccagataaacgtcctgtactttccgtcttccgtttctcattttctcataggccgcttcgaggcgtttgtgaatcagccatttttgtggagtaagggtgctgatcttcttgaaatcccgtttgaacgtggccagactgcgtcctgtgaatgtagcccaatcttccatgctgaaatcttccatgtaattttgttccatgaattccaggatgtcaattttccagggttcgttaaaatcaaagagtgtaggataaaaacgttcatcgatatgaagcaatgctaacaatccctcctgcaatttcagattcatgaaatcgtcctgcacccggaatttctggttgaaataaggagtcatcgaagcgaacaaactatcaatttccatgctgataggcaatttaatcacgcttgaacggactttgggcacattgtccagcgctttatccgaaggaagtcgctgaaacatctcgcgcaagaaacgccgtgtaaacatcagaaaaataccgcaatactgctcgccatcgagtggtttcttagtcagcgtaacccggtggtcgcgccggataaacacacactcgcctttctgtacatgggtgattttgttcccgtcatcaatgagcatttcgcctgaataaacatagttcatggcgtgctcacgggattgatgtacacaatgattttcgtcattgaagaaacaactgaaaaatatatccgcatgtctgaatatcatctcatctccatcggtcggggcatttattttataatccataagaatactttttaagcgctttctgcaaaaatagcataaagtggagaattattcttttgaaatctgttttttctttctgattgcgcctcatttcgcaggccttcttcttaaccggtgttgtattctcgctttttatcactatctttgtcactgagcatactctgtatgctgattctgaatattccgcaatatgggtaagttcattcctcagaactatttctcgtttatcaattcaaagtttaacggattacagcaattatggatactcaaaaaatgaaagtacaaaaattagtaccaacggaatacgatggtaaatggggctttatagatgcagcaacaggcgaagaagtcgtgccgtttatctatgactatgcccatgccttttctgtaggattggcattagtcaggcagaatggttggtggggttatgtggataaaacggggaaggaagtgattccatgtatatataatcctgcatggtcttttaccaaaaccgggctggcagcagtatgcatggagggcaaatgcggctttatagatcagacagggaaagaggttattccttttatatatgatgacgcccgctattttaataaagatggtaaagcaaaggtgaagctgaacggcgaaactttctttatagatgtgaaagggaatcgggttgaataaacatgaaaatgacttcaataagcttatgatcgatagggatgaaattgtattaaagcctttgcttgacgaagatataccgttgtttgacaggtggttgagtaaagattatatctataagtggctgtgcccggatgaggaaggacaaagagatgcctggctggatgaggtaaacaacagaaatggtaagtatgacttcataagacattttattgtttactacaaagataagaagattgggtattgtctttttgctgattgttttttcttgaaagacttggaggaagaagggcacgactttgagagtttgtatggagacatccccgaaaagaaccatacttacgagatcggatatttgattggtgaagaagagtatctgaatagaggcatcggtaaaatgattatctggaagttggaagagaagatcattgaattgggaggatgtgaaatagcagcagacccttccgaagaaaacgcagcttcaataaaggtattgctaagtaatgggtttaagaagaaaagtgatggggattacagaaaaattgtgcatacccagtaaatgcgttgctcatcaaatcaggagtgaaaaaaggatgtagaaacgggaacttatttatttatctttttcaggatattccgtatggcagtcttaacgcccgtggaataatattcggtatctgcattctctaatatgagttgtagctctttcaaaagttccggctcagacttgcaaagctggtaagccattctgatagacaacgcctgcacaccaatactttcttgtggcgccaacatatgatccaggcaataatttagcaaatcgacagagacaggatcagatgcaggtacattatataatatagacagcaacaaccgtttggaaccatcatgtttgcagactaataatcgctgaataatatcatccagcaatggaacaaaccaaccgggatgtttctcactcactttctcacatgcccatatagcccgccatgaaacgacaattttatcgtcggaaatcaaccgatatatatctttaaggtattccggatgcaggcatatttcctgcaccagtttatctattgatagtttgcaaagaggcattgcaaggatgtttctgtattcgtcgattttctccatatcatgcatgtttttgcaaagataatgcaagttgaatgtagaactttcatacttacatgaaaaagttttgttgagatgctgtttatcttcctattctgaatacggatagtacgattacaaaataaagggctgtctttttaatcaaagacagcccttacaaatatattgtatttaaggattatgcaataccgtgagcagatacctccggtgcaatcttcttgatcagaccttgcagtacagcacctggtccacattctgtgaagtcggtagcaccatcagcaaccatattcttaacagtctgtgtccagcgtacagaagctgtcagctgagctacgagattcttcttgatctcttccggatcagtgtgaggcaatgcatctacattctgataaaccggacatttgggagcgtgtatttcagtagcgttgatagctgcttccaattcaacttttgcaggattcatcagcggagagtggaaagcgccgcctaccttcaatggcaaagcacgttttgctccagcagctttcatcagttcgcatgccttattgattccttcgatagaaccggaaattacgatctgtcccgggcagttatagttggctgcaacgcaaacttcgccttcagcggttacttgctcgcagatttcttctactttttcatcggagagggcaatgatagccgccattgtagagggctgtgcctcgcaagctttctgcatggccatggcacgggcataaaccagcttcaacccatcttcgaaactcaatgcaccggcagcaaccagagcagagaattcgcccaatgagtgaccggcagtcatctcaggtttaaaatcatcacccatacaaagtgcggagataacggagtggaggaatacagcaggctgagttaccttcgtttgacgcaagtcttcgtctgtaccgttgaacataatatccgtaatgcgatatcccaggatatcattggctttttcaaacaattcttttgctaaagcggagttttcatacaagtcttttcccattcctacgaattgggcaccttgacccggaaatacaaatgctttcatactgttcttgttttagtagttaattaaaaaagtggtgcaaaggtatagctttttctgatattgaccgcacaaacgaaggatttttgtgcaataagctattttaactccctccgttcggagaagggagtttattgggaagcagagggatagatgagaaaaaaatctttttatagcacttcaactaaaatacaataagaggtacttgtctttttaatcttccggtatactaaaatccttaaaaataaagcacttcactcttattgtacttcctacaattacctgattcttccgtttatcaacaatacatattgtactttcaacgataaggccgtgttttgatattgtaaaatgtacgatatctatcatattgaaaaatagtgctttataacataatagaaattaagttttatgcgcttgtatattcaaaaaacctgtttatatttgcagcgcttaaacatggatattatgcaaaacatggaacataaaaccccattagcgaacaatcatatatcagtagactgtgtagtgattggctttgacggagaacaattaaaagttctgttgataaaacgtgtaggtgaggagcaaggtgaaatttt

SEQ ID NO: 6404 - DNA, 10894 bp, Unknown
  gut microbiota DNA sequence
attcaaggcattcggttctaagaataggacgaaggacccgaaagacattcattggctggaacgcgccatgcaatcgaaggtggagcgtatcgttacaattgcttacctgtcattggtgaagatagatcgggcactgagtcggaatctggctgatttcgaagcatattgggtggcactgcaagatattaaggcattggctttcgaccataatctgattattaaagaagcactggtatatatccgccagtacgtggagattaatccgtcagccttgttcgatctgcttccccgtaagtttacggcatcacaactgcgtactttatatgaattgatatatagcaagcctattgacgtgcggaacttccataagaaaatagcgatgatggaatacgttgttccattggaggaaaaacaacagggagttgcccaccgtgccgcacgctattatcgattcgataagaagatatataataaggtaagaagataagtattaataaaataattcataaatcaaaactcataattaataccatgtatttattaggctatgacattggaagctcgtccgtaaaagcgagcctggtaaacgccgaaaccggcaaatgtgtatcttctgctttcttcccgaagacagaggcggcaatcattgcagttaaaccgggctgggcggaacaaaatcccgaaagctggtgggaaaatctaaaacttgccacacaggctgtcatgaatgaatcgggtgcaaacgcaggtgaaatcaaggcaatcggtatctcttatcagatgcatggattggtatgtgtggacaaagaccagaatgtgctgcgtccttccataatctggtgtgactcgcgtgctgtgccttacggacagaaagctttcgaaacactgggagaagagaaatgtctctcacatctgttgaactctccgggtaacttcactgcctctaaactggcatggataaaggaaaacgaaccggccatctacgaacgaatttataagattatgttgccgggtgattacatcgccatgaagttgagcggtgaaatctgtaccactgtttccggactttcggaaggtatgttctgggatttcaagaacaatcgtgtagccgacttcctgatggattattatggtttcgataactctctgattgcggacatcaaacccacattctccgaacaaggccgtgtgaatgctgccgcagcaaaagaattgggattaaaagaaggtacaccgatcacatatcgtgcaggtgatcaaccgaataacgctctttcactgaatgtattcaatccgggagaaatcgcctctacggcaggcacttcaggcgttgtatatggtgtgaacggtgaagtgaactatgatccgaaatcacgcgtaaatacattcgctcacgtaaaccatacggacgaacaaacccgtctgggggtattgctttgcatcaatggtacgggtattcttaattcttgggtgaaacgtacgattgctcccgaaggcatctcttacaatgaaatgaatgtactggcatcacaagctcctatcggcagtgcaggtatcagtatcctgcccttcggtaacggtgcggaacgcatgctcgaaaataaagagatcaactgctccatccgtggcttgaacttcaatctgcatggcaaacaacacattgtgcgtgcagctcaggaaggcattgtattctcattcaagtatggtatagatattatggaaggtatgggcatccccgtacagaaaatccatgcaggccatgcaaatatgttccttagctccatcttccgcgatacgctggcaggtgtgacgggagctgtaatcgaactgtacgatacggatggttcggtaggtgcagccaagggagcaggtatcggtgcaggtatctataaaaataataacgaagcattcgcaacgctggaaaaactggatgttatcgagcctaatcaggctaagcgccaggaatatgcagatgcttatgcacgctggaaacatcgtttggaaaaatcaatggcaaaataatgctaacttaactctcctctgaaaacgaggagaattaaaatagtacagttaacaatcaaaacataattaaccctttaaaattcaattaaaattatggcaacaaaagagtattttcccggaataggaaagattaaattcgaaggtaaagagagtatgaacccgatggcatatcgttactacgatgctgagaaggtaatcatgggtaagaagatgaaagattggttgaagtttgctatggcttggtggcacactctctgcgcagaaggtggtgaccaattcggtggcggaacgaaacaattcccttggaatggtgactctgacgctttgcaagcagctaaaaataaattggatgcaggtttcgaattcatgcagaagatgggtatcgaatactattgcttccacgatgtagacctgatttctgaaggtgcaagcatcgaagaatacgaagctaacttgaaagctatcgtagcttatgcaaaagaaaaacaggctgaaactggtatcaagttgttgtggggtactgctaacgtattcggtcatgcacgttatatgaacggtgctgctaccaatcctgatttcgacgttgtagcacgcgctgctgttcagatcaagaacgctattgacgctactatcgaactgggtggttcaaactatgtgttctggggcggtcgcgaaggttacatgtctttgctgaacactgaccagaaacgtgaaaaagagcaccttgcaaagatgttgactatcgctcgtgactatgcacgtgctcgcggtttcaaaggtactttcctgattgaaccgaaaccgatggaaccgacaaaacatcagtatgacgtagatactgaaacagtgatcggcttcctgaaagctcacggtctggataaggatttcaaagtaaacattgaggttaatcacgcaactttggctggtcatactttcgaacacgaactggctgtagctgttgacaacggcatgttgggttctatcgatgctaaccgtggtgactatcagaacggttgggatactgaccaattccctattgataactacgaattgactcaggctatgatgcagatcatccgcaacggtggtttgggcaatggcggtactaacttcgacgccaagactcgtcgtaactctaccgatctggaagatatcttcatcgctcacattgcaggtatggatgctatggcacgtgctctggaaagtgcagctaaattactggaagaatctccttacaagaagatgttggctgaccgttacgcatcattcgacggtggcaaaggtaaggaattcgaagaaggcaaattgtctttggaagatgttgtagcttatgcgaaagctaacggcgaaccgaaacaaaccagcggtaagcaagaattgtatgaagcaatcgtgaatatgtattgctaatataataaggtggtagggtgatagagtgataagtggtaaagtaatatcactctatcacctttatcactctaccacttatcactttttactcatttatcaacctaatcttttttatcatgaatgatgctaacaatggtagtaaactctacctgtattctattacaaccgttgccattctgggaggcttgctgttcggttacgatacggcggtaatctcgggtgcggagaagggcttggaagctttcttcctgatggctacggatttccaatatgacaaggtgatgcacggtatcacttcttccagtgcacttatcggctgtgtgatcggtggtgctctttccggtttcttcgcttcccgcttgggacgacgcaattcgctgagactggcatccgtgctgttcttcctgtctgcattgggatcttactatcccgaatttttattcttcaactacggtgagccaaacatggaattgctcatcgcattcaatttgtatcgcgtattgggcggtatcggtgtaggtcttgcctctgccgtatgtccgatgtacatcgcagaaattgcaccctctaatattcgtggaacactggtatcttgtaaccagtttgccattatcttcggtatgttggtggtttacttcgtcaacttcctgattatgggcgaccacacaaatcctattatcgacaagagtgctgaaggtatattgtcagtgaatgccgcttcggatatgtggagtgtacaaaccggctggcgttatatgttcggttcggaagcattcccggctgcattattcggcttccttcttttcttcgtaccgaagactccgcgttatctggtgctggtacatcaggacgaaaaggcatactctatcctggagaaggtgaatggtgcaaacaaagcaaaagaaattctggcagaaatcaaggctacttccaaggaaaagacagagaaactgttctcttatggtgtggcagttatcgttatcggtattttgctttccgtattccagcaagccatcggtatcaatgccgtactctactatgctccgcgcatttttgaaaacgcaggtgctgaaggtggtggtatgatgcaaactgttatcatgggtattgtaaacattgtatttacgcttgtagctatctttactgtagaccgtttcggacgcaagccgttgctgattatcggttctatcggtatggcagtaggtgcatttgcagtggcaatgtgcgacagcatgggtatcaagggcatcgttccggtactttccgtaattgtatacgcagcattcttcatgatgtcgtggggaccgatttgctgggtattgattgcagaaatcttcccgaatactatccgtggcaaagccgtggctattgcagtagctttccaatggattttcaactatatcatatcctctacattcccggcactgtacgacttcagtccgatgttcgcatacagtttgtatggcatcatctgtgttgcagctgccttctttgtttggcgttgggtacccgaaacgaagggcaagactctggaagatatgagtaaactctggagaaaaaacaaataaaattctctctcctttaatatcttataaatgcaaaaaggtgcaaccgaaacataccggttgcaccttttctttttttgataaatatacgttctgaagctttaattgaatacgtatcgcagaccgatctgaagcttccaacattcgctgtaattcaggtttcgggtgaagcttccggtaggataattaccgtcactgtctttgtacatagagaaaataggagtgttgctctcatccttacccttataggttagaatccgtccaccattagcaccggacatgtttttcgttacaccccatttgctgttcagcaagttacctatattcaggatatccaggctgagttgcagcgtattcttagttttgccaatcttcacgaagaagtcgcgactccaacggaaatcaaagcggtgtacccagggagcacgtgccgaataagcttcggcatattcgcctttatgcttcttcagataagggtcttgattcacaaacttccagaaagcatctgcatcttcggcactcgtgaacttgatttcatctttagtcttcgggatataaataagatcattggttacaccatcgccattcatatcattagagtacataaaactataaccactggatgaatatccgctataaaagagactgaagtttgaaaatgtcttcttattcaaatgtacgcgccagttgatggaagcaattacacggttgggagtgacatattgcgaacgcatgagtcccgagctgttcggtccgttgatggatggaacatttgtccaggcagagttagcgtccgaaccgggcataccactgatttcctttgactcggtatgagtataggctgccataatgttcacattcttggcgggttctgccattacggtgatgttgcctgtccatccccaacctttggaagtgttggtcaatacatttgcattactgatattcgtgtgttgcaggaagttttcgggataaatgtaacgatcatccggtccgttaaaacgtgaccatgtatctttatccggagcctgtacgttgtagttgtattggcgcaccgcattgatatctttagagaacattccttccagtgtaaccgtcagcgggaaagatacaggcagctggtaatccaaagccaatgaggttttccagacttgcggcatcttgaagtccggatctatacccactacggagcttggtaacacaccttcttccggactgatagaggtaggaagccccaatgtggaaatcatctggtttacgtctgttatcatattacctttcagtaattccaggcggggatcgcgactggttacaacaccatccttatatctggtcgtaatacttaccagattttgaatcatacccgaattggtaggcatattggtaaagaacaccagaggaatacgtccggtgaagaatcctgatccaccacgcacttttaaagtcttatcattgaacacatcccaggtgaaacccacacgcggtgagaattgcagtttgctatcgggccatgcccccgtatcaatatgcatgccgttgaagtccagatcgtagatagcctgattgcgcataatatcattcaggaagctgagattatccatacgtataccggcggtcaatttaaagttatcgcatatgttccattcatcttgcagataaacacccaactggccgaatttcacgtccgcagaaggttttgtattaccattgtacccgtaagccaaggcaaatgactcaggtgcagctccattcttgaaatcctcgaagctggaatagcgataatatccggttccgttacgcatatacgagttcccagctttctgacgttcgtagctgatacctgccgtcagtttatgagctcccagataataggtgaagttatccacaatagtcataaccgtatttttcaccagattgttataggtaaacaactcgtaaccggcagtcatgtaaggctctaatatctgattaccgttttcgtaatatccggccataatatcaatgaaagggaaggggctggagttcgtaccgcgttcatccttcatgtcactgtatgtaaacaacagttgattggaaacgttggaagagaaacggctgttcaattcggcagtagccgagttcacaatgttctgcaacgaataacaagagtttgcataggacatagaatatgccgaaacacggttgtatgccaaacgatacccggtatttcccgaacttccattgggtgcttcccaggttttgttattggtaaagttatagcgtacactcaacttatttccctgattgatattccagtcaatacgtcccagcaacttcaggttggtgacatcggctgggaaatctgtgaacgaaccggtattgtatccgtatttgtctttcagaatctgtgaaaattccgccagatcagcttccgtagttcgtgaaatcgtagagttattcggagtttctccttcttttgccgcacgccatgtaatcacttgctgcggactcttctcatactctacatttgcaaagaagaacagcttgtctttaatgataggaccgccaaatgtagcaccgtaaacagtcttggactcttcggcacgcacaccgaaatcagtatcgccaattttgttaccgcgcatcacttcattgttgaagtacatataagcgctacctctataagcgtttgtacccgatttcgtaatagcattgatacctgcaccgataaagtttgcctgacgcacgtcgtatggggcaatcacaacctgtacttcatcaatggcatccagtgaaattggatttccaccgcctggcaaaccagacgacaggccgaagttgttattcaggttcgcaccgtctaccgtgaacgtattggagcgtccgtcgcggcctccaaaactgtttcctgacgcatatggagagattcgggtaaagtcgctgatactgcggttaatgctgggtaatgtggtgagctgttcagaagaaatattggtagtagctcccgtcttttcagcactgaactttgacctgctggccgtaatggtgatttctcccaataattccgaagcttcgtgcagggttacattcaatgaataagtttcacccagttgcagctggatacctgtatagattgccgtttgataaccgatgtaagataccgtcaccttgtaaggaccaccggagcgcataccttgcagactgaaacgtccgtctacattggtaacagtaccgtaactggttccggaaggttcgtgtacggctacaaccgtagcgccgatgacagattcttcgtcagccatcactttaccactcattccggcagtagttacctgtgccttgagcattcctgtaagggaaagcaaaagcacaaacaggaataacatctttttagccatgattttaaaaaaattaaataagaaataaacagaaagttgtagaaaacgatgcaaaagtataaaaaaagcaaaatactcttattcctaaagtgttaaatcctcatttcttttttattgcaaaatcagtctctcacaaaaatatgcattccgggagacaatgtataagtttaaaccgtacctttgcagcggatttaacttttggtataaaaaagagacattatggactcattgaaaatcaacaaagtacagttgcgtaatttacaaatagaagactacgagcaactggcgcaatcattcacccgtgtatatacggatggcagcgatgtgttttggacacacaaacaaattgaaaaactcatccgaattttccccgaaggacagattgtaaccgtggtagacgaaaagattgtcggctgcgcactttccatcattgtgaattacgatgatgtgaagaacgatcatacttatgcacaggtgacgggtaaagaaaccttcaatacccataatcctaaaggcaatatattatatggtattgaagtctttattcatccccaataccgcggacttcgcctggcacgccgtatgtacgaataccgcaaggagctttgcgaaactctgaacctgaaagctattatgttcggtgggcgtattcccaactattataaatactcggatcaacttcgcccgaaagagtatatagataaggtaaagcagaaagagattttcgaccccgtattgacctttcagctttccaatgatttccacgtacgcaaggtgatgcgcaattacctgcctaatgatgaagagtccaagcattatgcttgtctgttgcaatgggataacatttactatcaggaacctacggaagaatatattgcaccgaaaaccaccgtgcgcgtaggattggtgcagtggcaaatgcgtagttatcaaacgctggatgacctgtttgaacaggtagaattctttgtggatgccgtatccgattataagagtgacttcattcttttccccgaatacttcaatgccccgctgatggcaaaattcaataatgaaggggagtcacaggccattcgcggactggcggcttatactgaggagattagagaacgatttgtaaagttggctatcagttacaatatcaatatcattacgggtagcatgccgcttattaaagaagatggacttttgtataatgtcggtttcctttgtcgtcgcgatggtagttttgagatgtatgagaagttgcacgtaacacccgatgaaataaaaagctggggattaagtggcggaaaggctttgcagacattcgatacggactgtgctaagatcggcgtgctgatttgctatgatgtggaatttccggaactatcccgtattatggcagaccaaggtatgcagattttattcgttcctttcctgacggatacgcaaaatgcttactcacgtgtaaaggtatgcgctcatgcccgtgccatcgaaaatgaatgtttcgttgtcattgccggtagtgtaggtaatcttccgcgcgtgcacaatatggatattcagtatgcacaatcaggtgtatttactccctgcgactttgcatttccgacggatggcaagcgtgcagaagccacaccgaatacagaaatgatactggtatctgatgtggatctggatttattgaatgaattgcatacttatggcagtgtgcgcaatctgaaagacaggagaaatgacttgtatgaggtaaggatgaagaaatagaacaatcggattatttattcattttattaaaacgtagcctgacaatatgtatttccgtattattgtaccaataataaattctacatagagagtgagataggatagacctatactccttgtcttttccacgtttttcaagctggccaacagtgggcattaataaaatcttgtgtatcgcttcatctacattttttgcaaaggtggcagcgaattgtattcccagatttgcagcataccaatatgcagttttttgaaatacggcaagtgcccgctttgtccagattattttaagttcagccataaattgaaagcggcttttacttcttcatcagtagcaataccgctggcttctgacagttttgattctttttcaaattcctcatcagcatattggcaaggtataggtttgcctatcagaaaattctctttttcaagttcttctgcaaattccctgtcaagatgtgtatatgcaaattctttggcacgttgataacgctcttcaaagctttcctcatctttatcaagcatgctgctaattttagataatagcacggcatcgtccatttgttctattctgtcttttatgtgattgcgcaaggcattcagcatcggacggctatagtaagttgcagctggttcttttacttttcccataacgtaacgttttgtacaaagttacactttaatgacacagtaacaaaagaaataaatctttttatttctactttatctcgaacctcaccagcatcgaataattcagttttatcg

SEQ ID NO: 6405 - DNA, 6816 bp, Unknown
  gut microbiota DNA sequence
aactcttccatcagtccttcataattatgtgtatttttgttgagtgcatactccggtggaagaagaagaacctcctcattctttcctgtctccctttggggagatatagagggggagttatttatatcattagtctgattgataggtaaagcgtcgcttgccatgccttccctgattctctgttggttagccagtcctccacgtctgcccgattctctgttcgcttcgcgcttggcttccagtggccccatgcgccgtgtgagtccgggcgatgaaaaggttgtgtcgttcacctcaaatagtcctgaatcgaagatgattctctttaaggttgctactgtcactctcatttttcttgccagtacgggcagtattcttacgtctgccttatatccgttctgcactctaagaaactccagtatcatccagtagataccgtatcctttcattccttctttctgtatcatcatcattattttaaaattactgcttgcattggcgtcatgtaatagatatgattccataatctcctgatttttaaattctccactctcaattaaccaccggtttccactccagaaaattctttatctggaatgttctccatccctgctgttctatatcccagtataccacatggttctggatacgttcaatgtcgtatttttggtggaaacaggcttcataatatacgagtgtggctcttgccatataaaaatctccattctgcttgcgataggctattagtgcacatccgtatgccatatactcagtcagtagtctaattcgtcttgtcatccatgtgatggtttcatctgataaatctgtttcttgtctgataagtttcttccatagattttctactctttcgcttttcgttacatgattcgattggtgccccaacgtttgtttcttcattttaatgaatttagtagtttataaatgattaataatcaatcctctgcgatggctacaccctttgctccggatagctataccctttttaggttagggctacaccatccgggtgaaagggtgtagcccttccacgatcagattgacggggcaaagttatgccctttctttgtagtaaactatcaatgatttattgttacatcataaccatacggatctatgtgttcggtatcttccttttgtattactgcccacatctttcttagttctgtcataaagctgcttatttccattaagttatcttgccctttctcgtgttttatggcgtcgcccgatttgtacaaatgcattcctaaatcgcttatgttattaatattttgacctttaaaatagcctaatttgaagcttcttagagctcctatacacagatgagtttttatacctgcataataccgttcagccaataaatcctcatcaactatactgattttacttactgttctgctactgcttgtactctgattttcaacttgatgagatgttttctttacgttagattcattttgaacctcttttttttaatttttccatattgtataatttttaattattgatttaactgatattcacagttaaaaatgttacaaaaataggaaattaaaattagagggataatagagtagggggaaatacagtaaatataatcttttatgagtagtaaataattgtatactagatatataagttttaatttggaaagtgttcaaaaaacgttcgtttaatgggcgcaaagataaaggtgttttttcgaatgacaaaatgtttgataaaaaatcttctttaaattggataaatgcaaagctaactatttgattataagcaacaaatgaggactgaaaatatctgttaatatttactcattttattctttttctatcttccgctttttaaaaatattgacgcccattaaacgaacgattaaaaaatactttttgactgtaatctgctcgtttatagctttttacctataaagcattggactgctgtagaaaactcgttgacaagaggagcacaaagcttgttgtattttacataaagtgctcgcaagtgattgaatttcaagtgtatgcaagaagttcaaagccccggaggaacgcacttttctgaaataatcatagaatggaagtggagaaagaaaccccaatatggtatgctatgcgtgccacttatcgtagagagcctgatgctatgcgtttgcttgaaaaggaaaaattgggttgtttcgttcccatgcaatacaagatcagtataaagaaaggtaagaaagtgcgtgttctggttcctgtcattcataatttactttttgttcatgcttgtccttccgaggtgaagcgtatcaaatcacaagtaacctatttacaatacataaccgatacccgtagtggtcagaagattattatctcagatagcgagatgcagcgttttattgctgtagccggtacttacaatgatcatctcatgtattttcaacctgatgagctgaatctatctaaaggtacaaaagttcgtatcacgggaggtgacttcgaaggtcaggaaggtattttcctgaaagtaaaaggtgctcgcgatcgtcgtgtagttgttgcgatacaaggtgtcatagccgttgccatggctactatccatcctgatcttatagaggtaattgacagttgataactccaaaatcataattctttatgactctttccgaagaaatagtttctcttcagcgtgcagcgcacgagctgatgtatttaggcatggacgggagtccggtctatagcgatgacttgtcccgccgtaacggtgaagtttaccgcctgaccacggctttgtataattccggtgtcaaaggttctactgtggaagaacaggctaatgtttgtctggctcttctgatgggttacaacgcttcatttgtcgatcatggtgaaaagcaaatacatgttcaggaagttttaaatcgttgctggaatatcctcgattcacttccggcttctttgttgaagctccgtttactaactgcctgctatggtgaggtttttgacgatcccttggctgatgaagctcgtaccatcattgcttcctgggattccgcatcacttactcccgatcaacaggaagctatcgccgagttccagaatgtagtggataatccttatccttgggaatatattgatgaatgagaaaatcatcatgaagaataattatctttatatataaactatgcgtcgattattattatttatcttttgtctttttactttatccggttttgttcatgcccaacgcatgtctgatgaacaggttgttgagtatgtaaagaatgcacaagcagcaggaaaatcccagaagcaaatgactactgaactgcttcgccgtggtgtgacccaggagcaggtattgcggattaagtccaggtatgaggctaccaacagtactgctgaaggtacaggtaataagcccaaccagatgcgtaaacacgccgtggctttggattcatcttatgaagctgcagagttggaagaccagaaggctgttattgatgaaaagcaggatagcaaagctcatctggaaatgtctgccaggcagattttcggtcacaatttattcagaaataccaatttaagctttgaacccagcgctaatcttgccactccgataagttatcgtttgggccccggtgatgaagtgattatagatatctggggtgcttcggaaaatacaatccgccagacgatcagtcctgaaggtgatattcaggttaaggatctggggccggttcatttgaatgggatgacggtgaaggaagccaaccaatatctgcaacgtgaattttctaagatttattcgggtatcggtggcaatgagcctaactctcagattcggttaacgcttggagacacgcgtactattcaggtaaacatcatgggagaggtttccgttccgggtacttattctctttctgctttttctactgtttttcatgcattgtaccgtgcgggtggtgttaataaaatcggtagtttgcgtggcataaaattggtgcgtaacggaaagactatagaaaatcttgatgtctatgagtttatcatgaagggtaagatgaatgacgatatacgcttgcaagaaggcgacgttatcattgtgaatccttatgaatctctggtggagatcgttggaaaggttaagcgtccaatgtattatgaaatgaagcctacggaaactgtcgctaatttgctggaatatgccggtggttttactggagattcctacaagaaagccattcgtcttatccgtaagagcggacgtgagcatcaggttttcaatgtagatgaaatggattattccgtattccgtctggacgacggtgatcttgtaaccgttgatgccgtactcgaccgttttgaaaataaagttgagattagcggtgctgtttaccgttcgggactctatcagttggacggagaggtaaacacggtaaaacagttgataaagaaagctgaagggcttcgtggcgatgcctttttgaatcgtgtattattggatcgtgaacatgaggatctttctcatgaagttatagctattgatttgaacggtttactcaatggtaccgttgcagatattcccttgcaaaaggatgaccatctttatatccccagtgtgaatgatctgaaggaggaagagaccgtatcaatatatggtgaagttctaaatccgggaaccttcctgtattcggacaagatgactatagaagatttggttgttcaggctggcggtttgcgtgaggcagcggctactacgcgagtgagtgtgacgcgccgtattaaaaacccaaagagcactgcttacagtagtaaattggcggaaacgtttgcttttgatataaaagacggcttggtgataggggatgcggatttctatttgcagccgtttgatatggttcagatccgcaggagtccggcctataaggtgcaacgtacagtttcagtatcgggagaagtgttgtttagtggaagttatgcgcttttgaaaaagaacgagcgtttgagtgatttgataaaacgtgcgggtggtataactccggatgcttacataaaaggcggtcgtcttattcgcagaatgaacgatgaagagcgtcgccgtgaaagggatgctctgcgtatggcacgtaatggtgagggtaaagacagtatatctgttgctaagttggctataacagaaacatatacggtcggtatagatatggagaaggctttggctaatccgggtagcgactacgatgttgttttgcgcgaaggtgatgtgatctatattcctgagtttgtcaatactgttaagattagcggttcggttatgtatccgaatacggtggcttgggagaaaggtgcgaaattaaaacattatatcaatatggctggtggttatggtaatatggcaaagaagaagaaagcgtacatcatatatttgaatggtactgtggcgcgtgcaaaacgcggtgatagtcaactgatacagccgggttgtgaaattgtagtacccagtaaggctgagaaacagcacatgaaatttgcagaaatattgggtatcagttctactactgctacgatggcggctatggtagcaactttggtaaatgcttttaaatagaatatgaattatgagtgaggaacttcaaaagaacccttcttctcaagaagaagaaatagatttactggagcttgcattaaaggtctggggggaacgtaagtttatactaaaggcttgtggatatgctgtactgataggcttggtaattgtatttagtattccccgggagtatacaactgaagccatgattgcaccagaattgtctgataataaaggtacaggtggactttcttcattggccgcaatggcgggtcttaatcttaatgccacgtctggtgcggatgcaatatatcctgatttatatcctaatatcgttagttctactccttttattacgggactttttaatgttcgtgttaaggatttggatgaagaggttgatactacactttattgttatttgaatgaatatcagcgtatgccgtggtggtcattgataacttctgccccatttaaggcacttggttgggttgtttcattattaacagatgaagaagatgatggtatttttgatccttttcatttaacgaaagaagaaactgatactgcgaaagagttaagtgagcgtataaatgtttctgttgataagaagacgggtgttacgactttgtctgtgacaatgcaggatgcccgtatttctgcttgtcttactgatactgtagtacgtcggttacaagactatatcacagaatatcgaacaactaaagctcgtcaggactttcagtttcaagagaaactttttgaaagaaaaaagaaagaatatgagaaagctcaggagaactatgccaagtttgcagacgctaacaagaatattattttgttgagttatcgtgctgaacaagaaaggttggaaaatgagatgcgtttggcatatcaagtttatacctctgtagcgcagcaattacaaatggcagaggctaaagtacaggaaattactcctgtatataccattattgaaccatccactattccgataaagccttcaaaacctcgtaaggctctaatgcttatagggattgtgtttttgacgggattaggttgtgtcagttggatattatttggaagggatttctttactgaattgaagaatagaaaagaagataataaagtgaaattgaaagaaaatgaaataggtagataaatatgcatataactaggggtgagagataacgctatttcttaatgtagatctatgcgaagattcct

SEQ ID NO: 6406 - DNA, 2887 bp, Unknown
  gut microbiota DNA sequence
tataagatattaatctttctttatcagccttcaattgccgcctgtgccgctgctaaccgtgctataggcactctgaacggagaacagctcacataattcaaaccaactttatggcagaacttcacagaagaaggctcaccaccatgttcaccacagatgccgcacttcaaatccggacggatagcccgacctttttcagtagccatacgcaccagctgtcccacaccgttctggtcgagaacctggaacgggtctactttcaagattttcttttccagataaaccgggaggaaggaagcaatatcgtcacgtgaataaccgaatgtcatctgtgtcaagtcattcgtaccgaatgagaagaactcagcagaagaagcaatacggtcggcagtcaaggcagcacgaggtatttcaatcattgtacccaccttaaagtcaatactgtcacccacttcagcgaaaagtgcagcagcttcttcacgaatcaccttttcctgttctttaaactcatacaagataccagtcagcggaaccatgatttccggatgtgtttccacgccttccttcttcagttccaaagcagcaccaagaatggcacgcgtctgcatctgagtaatctcaggatatgtattacccaaacgacatccacggtgtcccaacatcgggttatgttcgcaaagcgattctacacgttgctggatatagtgcagactaacacccatagcatccgccatttcctgctgacctttcagatcgtggggaacgaactcatgcaaaggaggatcaagcagacgaactgttaccggacaaccttccatagcctggaagatgcccttaaagtcagcttgctggtagggcaatatcttagccaacgctttgcgacgtccttctgcatcttccgcaagaatcatctcacgcatagccttaatcttttcaccttcaaagaacatgtgttccgtgcggcaaagaccgataccaatagcaccaaagttgcgagccacagcagcatcatgaggagtatccgcattggtacgaacctggagtttcgtatacttatcagctagatccatcagttctgcgaaatctcctgaaagttcagcagccttcgtttctacctgacctttataaaccacacctgtactaccattcaatgaaatataatcgccttctttcagcagaacaccatctatttctaccgtacgagccttatagtcaatattcaaagcaccggcacccgacacacaacacttacccataccgcgggccactactgctgcatgagacgtcataccaccacgggcagtaagaataccctctgcaactgccataccggccaaatcttcgggagaagtttcgatacgtaccattataatacgcttaccggcagcatgccattctgcagcatcatctgcaaagaacacaatttgtccagtagcagcacccggagatgcaggaagaccgcgagtcagaactttagcttgtttcaaagcagtcttatcaaatacaggatgaagcaattcatccaatttattgggctcacagcgcatcaaagctgttttttcatcaatcatgccctgatgcagcaaatccattgcaatctttaccatagctgcaccggtacgtttaccattacgcgtctgaaggaaccaaagcttaccttcctgaacggtaaactccatatcctgcatatccttatagtggttttccagtttagtttgcagcatatccagctccttgtagatttccggcatagcctcttccatggacggatatttggctgcacgctcttcttcgctgacgcctgcaagttctgcccagcgttgcgaaccgacctttgtaatttgttgcggagtacggatacctgccacaacgtcttcaccctgtgcattgatcaggtattcaccattaaacaagtcttcacccgtaccggcatcgcggctgaaacaaacacctgtagctgaagtttcgcccatattgccgaataccattgcctgtacgttgacagctgtaccccactcatcgggtatactttccatcttacgatacagaatagcacgttcgttcatccaggagttaaatactgcgcaaacagcaccccacaactgctcataagcacaagccgggaaatcttttccggtttgctccttcacggcagctttaaacttcttcaccaattctttgaggtcttccacttccaattcgttatccagcttcacacctttcgcatgcttcacttcttcaatgatagcttcgaacggatcgatatcctccttattagtcggtttcatacccaataccacgtcaccatacatctgtacgaaacgacggtaagagtcccatgcaaaacgggcattgccagttttacgtgtcaatccttctaccacttcatcgttcaaacccagattaaggattgtgtccatcatacccggcatggaagcgcgagcaccggaacgtaccgaaaccagtaagggattttctatatcaccgaacttagaagacatcaattcttccactcttgctatggcgctttctacttcgcctttcaacagagcaaccactttttcctgccccatctcattatattcggtacaaacctcagtcgtgattgtaaaaccgggaggaaccggaaccccaataaggttcatctcggcaaggttggcgcctttaccccccaaaagatttttcatgtcagcctttccttctgcctgaccgttaccaaaggtataaactcttttcttgtccataatataaatttaagtttctcaattgtgatttttttctgttcgcaaatctaagtatatttcgcatactagaaaactttttgagaaaaaactttctatcaaaatgcaatttcgacattgcaatctttaatatttcacttcataga

SEQ ID NO: 6407 - DNA, 13330 bp, Unknown
  gut microbiota DNA sequence
aggttccctcgtcctcaacgggggattttttttatctttgcattcgcaaaaacaattatccaatgatagaccaacctaccatagacagaattctggatgccgcacagattgtagacattgtatcggacttcgttacgttgcgcaagcgaggtgtgaattatgtaggcttgtgtccgttccatgatgacaagacgccatctttttatgtatcgccttccaaagggttgtgcaaatgcttttcctgcggtaagggtggcaatgcggtgcacttcattatggagcacgagcagatgagttaccccgaagctctgaaatatctggcaaagaaatacggtatcgaaatcaaggagcgcgaactgtccagcgaagagaagctgatgcagagcgaacgtgaaagtttgttcattgtgaataactttgcacgtgattacttccaaaatatacttaaaaaccatgtggacggacgtagcattggtatggcatacttccgcaatcgtggtttccgggatgacatcatcgaaaagttccagttaggttattgcaccgaaagtcacgatgccatggctcaggaagccatcaagaagggattcaagaaagaatatcttgtcaagacagggctttgttacgaaacggacgatcaccgcttgcgtgaccgcttttggggacgtgttatttttccggtgcacacactttccggtaaggtggtcgctttcggcgggcgcgtgcttagcagtgcgacgaagggagtcaaggttaaatatgtcaattctcccgaatcggaaatctatcataagagtagtgagctgtatggcatttattttgccaaacaagcgattgtgaaacaagaccgttgcttcctggtggaaggatacacggacgttatttccatgcaccagtcaggtgtggagaatgtggtagcttcttcgggtacggcactgactccgggacaaattaagctcattcaccgcttcaccaataacattacggtactctatgacggtgacgtggcaggtatcaaggcttctctccgtggtatcgacatgctgctggaagaaggaatgaatatcaaagtttgcctgcttcccgacggggaagacccggactccttcgcccgcaagcacaacgctacggaattccagaaattcatacaagataatgaaactgactttatacgtttcaaaaccaatcttctactggaagatgcaggaaaagatcctatcaagcgtgctgaattaatcggtaatcttgtacaaagtatatctattattcctgaagcaattgtccgcgatgtatatattaaagaatgtagccaactgcttcgtatagaagacaagctgttggtttcggaagttgccaaacgacgcgaaacgcaggctgagaagcaggcggaacaaagaaaccgggaaacaagaaagaataatgcagcccgcgacgctgcacaagcaccgcttcccgacggaatgcaaccaccctaccctgaagacatgcctccttatcccatggatggagaaatgcctgacggtggtgcaccgcttccaccggaagctgccgaatacgtatcttatatcccacaggaaggaaaagaaggacaggaattctacaaatacgagcgccttatcctgcaaatggtagtacgctacggagagaaagtattgtgcaacgttcccgatgaggaagggaaagaaattcccatcacggtaacggaatacgtagtcaatgacttgaaggaggatgaactggctttccacaatccgctgcacaggcagatgttgacggaagcggcagagcacatacataatgaaggattcaccgcagaacggtatttcctggcacatcccgacccaattatcagtaagctaagtacagagttgattgccgaccgctaccaactgagcaaatatcactccaaagcccaaaggttggtgaccgacgaggaacgcctatttgaattggtgcctacgctcatgattaatttcaagttcgccatcatcagtgaagaaatgaaacacatgatgtatgccttgcaagatcctgccgtagccaatgatgaagaacaatgcacctctatcatgaaacgctactcagaactgcgtgagatcaaaagtattatggccaaacggttgggagaccgggtcgtactcggttaaatcaccttactcttaatgagaacgataatttcctcatgcagaaacgacagtttcccctaatgagaacgacggtttctcctaaagggaacgcgcgtttcctttaatgggaacaacaatttcccttcatggaactgtagtttcctttcatgaaataacgtacgggactgttatgtaaatgaattctggcgaatgaggttcataaactcttcacgagtctttgcctgattgaaagcacctgtaaaatcggaagtggtcgttatggaattttgcttttcaaccccacgcatctgcatacacatgtgcttggcttccacaaccaccattacacccagaggattcagtgtttcctggatacattctttaatctggagcgtcatgcgttcctgcacctgaaggcgatgggaaaagatatccactacacgggcaattttgctcagccctgtaatgtaaccgttggggatataagccacgtgtgcttttccgtagaacggaagcatatggtgttcgcaaagtgagaagaaatcaatgtctttcacaatcaccatctgactgtattcttccttgaacttggcagagcggagcacttcgtgcgggtccatgaaatagccttttgtcaaactcagcatagcctttgctacacgttcgggggttttcagtagtccttcgcgttcggcatcttcgcccaataaagttataatacgctgatagtgttctttcagttcatccagtgcaggagatacgatttcttcttttcctaacatgagtaagtttttataaggggatgtttatctgctctttcacaatagaaacttctttgaatacgcctgtagcacgcaactggcgcatcatggcatccgcttcttcaatactgcggaagtctcctacacggcacagccagcggggagagttgaaagaggtataaacagaaagttccgggaaatattctttgattcgtgagcccacagcgtgagcttcgttcttggctctactggtattgtttccggcatacacctgtacacggaaaccctgacttttaagcactctgttctccgttccgttggggatatattcctgacctatcaaggcctcgatgcgggcatcctgatggatggttaccttaccttgtcccggcacattgcgttccaaactcttcacaatgttattctgcgccgaagcaaaagcggcgaaagcaaagcatgcaattaaaagtaaaccaagcttcttcataatgaataatataataatagacgattgataatatgattatagagactgataaccgacaaccggcacttcaccggttatcaattatcagtcttccattatctattaattaaaagcatcaatgatacctttgaagtccgctaccttcagagctgcaccaccgatcaaaccaccatcaacgtcaggattagcgaacaattccttagcgttagacggtttagcgctaccaccgtaaaggatagaacagttgtcagcaacttccttaccgtacttgtcagcaactaatgaacggatgaaagcgtggatttcctgagcttggtcgggagtagcagttttacctgtaccgatagcccaaaccggttcgtaagccaatacgatcttagagaaatcttcagcagacagagagaatacagaagccaactgagcagcaactacttcattctgcttgttagcttcgcgttcttccagcacttcaccgatacagaagatcggagtcaggccgttagccaaagccaatttaactttttcttccaggatggcaactgtttcgccatagtaagcacgacgttctgagtgacccaggattacatatttagcacctgtagaagcaaccatagcagctgaaacttcaccagtgtaagcacctgattctttatcagcacagttttcagcacctacgccaatcttagcagggtctaccaacggagtaaccgatgccaggtggataaaaggagtacagatgattacatcacagttaggcttttcgttagccagtacttcattcagttcttttgcaagagcaataccctcctgaagggttttgttcattttccagtttcctgcaacaatgttttttctcattttgttttttatttattaaaagggttaatgtatttttaatttataatttgtggtctatggctgaggaagctcttgcttatcactcatcactccatcgctaatcactttatttttcgctctcttcctttccctgcgcttcacaaccagaatatccacaccgataaccatcagcaacggaataataaaccacaaaagaacgtaaccaatcgtgcgcaaatcactttcttgtttctgctgaccgagttccagtttatccagactatccgtcagcacgtattcatccggcaagctgttatcactccacttattcagaatgacaccatcctttatcagcatcagtccgggattggaacgaataatggtcttcaaagtgatgtcgtccatctggcagaaaggatattctgcaccggtcttgtcacgccacaactctatttgttcctccggagaagaagtcagggcataaaagccgtacccatgttccacactataatcatagatctcgttaataaggtctatattgctatcgtcagcattttcaatacgatgagctactaacaggaatgtatatcccttatctgataaaatgctatcggtcagatcctctccggtttccagacttacaatagaaaagtcgtgaatcggaggctcgtatcctttttccttcagcaccgtacgtgtttcaacaaacgtccatgtgctatccgggtaattatccagtgtaaattcctgcttttttccgtctttctccagaatgaacttgctctcaaacacactgggttttgctccttcgggtatttccatgccttctttgatattctttccgatcttgtaaggacggaaatccaggataggcagattgtccagacaatagaacgaaagcacaaatacgaaaaagaacgtatacatagaaaccatccatgccatctttgccgtaataaagcgaatgatttgttttccatctttgaagacagatatggctgcaataaacaatacaacattcttgccaaacgtttcccagtttgtcaacacccatgcatcaccgaaacaaccacaatcggacaccggattcgctaacgccagatacagtgtcagcggtgtcatcacgatcatcagcaacaatgccagagtcgtagcaaaccgccgccgtataccgaagaacaggaatactcccacggagaattccaacgccgacaatacgatggcaaacagtagctgcaaatatgtaggaaaccacgcggccattccgaaagccgtcagataatcctgaatcttataaaaagagcctaacggatcgactgccttcacaaagccggaaaagatgaataccgccgccaataaaaaacggcaaacattcacccaactcttccagattatatgtttctgtttagtctccaaattcaatcttaatcaaaccgaatacggaataattaatcatgtccatataattagcatccactccttccgaaaccaaagtctgtcctgacaggctttcaatctgtttcgtacggtagattttcatcaatatcagatcagtgtatgaactgacacgcatgctgcgccatgcctcatcgtaatcatgattcttagcaagcatcagatccaatgaagttttagcatatttgtcatacaacgccattgcttcttcattcgtgatatcggctgattccgcatatcccagttccaactgtatcaatccgacaataccatagttgactatcgcaatgaactcggaacgtattccttcgtccaccaacgtcactcctttggtttcaatactcctgatacgattggctttaatgaatatctggtcagtcacggaagccggacggagaatacgccatgccggaccgtaatcatgtagtttcttggagaacaaatcacgacagatggcaatgacatgctcaaattgttgtttggtatctttcatttccttacaaattggttgcaaaggtaggaataattaaagaaaaaagaaaagagggcactctaaattatattaaagtgccctcttctttatgggtttattgatatcttacgaacaacgtaatacctgtcccggacgtaagattgttttccgtgtaatgcgattcaactgacagagcttgtcaatagatactccctgacgggatgcaatcttagacaatgtatcaccactcttcactttatagaacaaaccttcaccggaagccatgctgcgagcagttccttttgaagtcttggtcttagtgaaagtataatgatcagcaacaacgtcttgcttttcaaagtcgaacattaaagcggggtcgataggaattcccaggaaacgggtttcaaagtgaagatgcgaaccggtagaacgtcccgtattgccacctaaagcgataggttctccggctttaaccaattgattaatttctacgatctgtttggacaagtgtccgtaaacagtttccagtccattgtcatgacgaataacgatatacttaccatagccacggcgtccctgattctttactacgcgtactttaccatcgaaagcagctcgaatcgtatcacctatgaatactttaacatccaagccatagtgcattctgcgtcttctgggacgataaccgaatacatcggtaatcttcgtatgcgtggtaggcatacagaaacctgtcaggtccactttatagctttcaggaacgatagcatcgccataagcttgtacatactcattgttccaagtcggatatagacttagacctggataagcagattgttcagcacgtatctgtttctgtaaagccaacgagtcaacgctctttagtttcctgtcgatgggggcttgtcgggcaatcaaatcctgagaaaaagaattcaggctgaccattgccgtcgcagctattaggatcgttttaatgcaattgaaattcattccgtttcgtcattcttttaaaaaattctcccaaaggtagtatttcttctctaaatgaaaaggctgttcttaactattttttcggtaagggactaaaaggtacatattaaatcacctcctaactccctgtatatcggcaaaataaggacttatatgttttacaacataaaaatgcaaataaagtgtatgtttaaccgttattcaactaatggaagcccagttaacgttagttttccgaagtgcctttagttggcgccacaggatttcattctccagacgaataccggtaggatcagcatccaccacttcttcagcaacattgcgcacatattgcagcagttgtccatcgcgcgctatatcggcaattttcaggtcgaaggcaataccactttgctgtgtgccttccaaatcaccgggacctcgtagcttcagatcggcttcagctatttcaaagccgtcatttgtccgtaccataatatccaggcgcttgcgggtttcctcgaccaacttgtatccggtcactaaaatacaataagactgttctgctccacgacctacacgaccacgcaactgatggagctgtgacaaaccgaagcgctctgcattctcaataatcatcacggaagcattcggtacatttacgcctacttcaatcacagtagtcgctaccattatctgtgcttcgcccgaaacaaaaagctgcatctgcgcatccttctcagctgctttcatcttgccatgcactttgcagactttacaatccggaaattcctcacaaatatggaggtagccttcttccaggttcttcaagtcgattttctcactttccttaatcaaaggatatacaatatatacctgtctgccctctgcaatctgcctatggacggattggtacaagcttacacggtgcgcatcatatttatgaatggtcacaataggtttacgtcccggcggcagttcatcaatgacggaaacatcgagatcaccgtataatgtcatggccagcgtacgcggaataggggtagctgtcatgactagcacatgggggggctgtgcattcttagtccataaacgtgcgcgttgtgccacaccgaaacggtgctgttcatctatcacgaccagccccagtgaagagaaattcacggtatcctctatcacggcatgcgtaccgatcagtattcgtacatctcctgtcaacagaccggtgagaatggcttcccgcttttttcctttcacagaaccggttagcaattccacacgtatatccattccgtacaacaactcgcggattgtttcaaaatgctgattagccagaatctcggtaggcgccatcatacaagcctggtaaccgttatccaacgctatcagcatactcatcagtgccaccaacgtttttccactacctacatccccttgcaacagacggttcatttgcttaccgctccccacatcccggcgtatttctttcagtacacgcttctgggcgccggtcagttcgaaaggcagattcttggcatagaaagtattgaatatctctcctaccgtttcaaatacatatccacggtatttccgttgcctgtctttggcatagcggagaatattcagctgtacataaaaaagttcttcaaacttcaagcgatattgcgctttacgaagcaattccggatttgccggaaaatgaatattcatcaaagcttccgtcagcggcatcaaatgatgttctgtcaatatagcgggagaaagcgtttcgggcagcggttcgcggagttgctgcactacggcgctcatcatcttctctattgcatgagaattgagggaactccgcttcattttctccgttgtattataataaggttgcaatcccattgtcgagagcttcagttccgaagcattatcgatatccggatgagcaatgttaatccgtccgttgaagacgctgggtttaccaaatacaatatattcctgatgtaccttatacttaccgacgagaaatttaattccctgaaaccagactaaatccacaatccccgtaccatccgagaaatgggcaatcagacggcgctgcctaccttctccaatcgtctcaaagcccaggatttcgcctttcaactggatataaggcatagtaccgtctatctcatggatataatagatacggctacggtctacatatttataggggaaataatacaataagtcgtgaagggaatagatattcaattccttattgagtactgaggcacgttgcggccctacacccgacaggtattttatgtcacgagaagctaaatcaaacatgaatccaacaaagcagcggctattttcaaatcaaagggagtcgtaattttaatgttttcccgattacctgccgcgaggtatacagatactcccatcgcttccactaccgaagcgtcgtccgtaaagaaagaagtataaggttgttcataggcctgtttcagtaaatcggcatcaaacacctggggggtctgtaccaatttatactcatcccggctgacggtcacgctttcttctcctttaagatggcgtacagtctccaccacatctatcacgggaatcaccgcctttttttcggcagccaattcataacaacgggctatgacttcctgggaaacaaacgggcgtaccccatcatggacaccaaccaatcccggagtagtaacataagccaatccattctttaccgaatggaagcgagtttcacctccgtccgccactgtatgcggcaaagaaaaagaatgctccgcacatagctctgtccaataagactgctggctatgcgggagcactaatattatatgtatctccggattgtaggcataaaaggcttccaaagtacgcatcaaaacaggttttccacctataggcagaaactgtttgggaagttcgcctcccatgcgcaaccctttaccaccggcaactatcagagcatactccatcaattaaaaattaaaaatgaaagttagatgacgcacattgcctctttcaattcctgtaccttctcttttccgagcatcatatctacaaccgtcagagcaaattccatcgcagcacccggtccttttccggtaatgatattaccatctctttccaccggagcacctgtacattcagcaccttccaggtattgctcgaagccgggatagcaagttgccttgcggcctttcagcaagccaagcttacccaatatcataggagcggcacaaatggcagcaatcggtttattcttttcagcaaaatccaagaccagcttccgaagttccgggcacttctccaaagtagcagctccgggcattccaccgggtaaaagaactaaatctgcgtcatagaaatcacagttcactacattcttatcgcaaagcaccggtacatcatgtgcacctgttactatctcatcgggagtcaccgttatcatttccacgttcagccctgcacgtctcattacatccacagaggtgaaagcttccacttcttcaaatccgtctgcaaaaaaaacataaactgtacccataattgttctccttattattttagtttaaagtaatatgttatcgttcctgtctggttattcaaaccgcttacagcattgaaacgcgctttcttagcagcatcttcagccgctttccgcaaggcagaatttatggtattggtcttccggtcaatactggtagcaataacatgtcctgccggatttacagtaatagaaaccaccacaatcccttcatcctgcacattatatgccggacgcggcaaaccaccttgtcctatagaacgcccgccgaggtcaaaagttccataacctcccgttccgctcgacgcaccttccggcgcatttccggtgggacttccctggatacctgttccctcagtcgtacctttgcttcccatttgtgctccttttccgaaggcacctgccaccctcttacgggcagcctcttccgcctccctgcgttcccgctcggctttagcttccgccaacttccgggcttcttccgctttctcggcttccgtcttctccggtttttccggcttcttctttacttcttcctttttaggttccgctttgggcttgataacaacggtttcttcatcctcctgggtaagcatctcttgttctaccgtctcctgcactttaggggcaacggtctcaggcatcacatccactttcaccaaagagggatcagcacttccaaatgcattgggcacttcacccagcattaccggcataccgtcttcatcctgctgctccggcaaagcgaagccaaccagtatcaacaggagaatgaacgctacatgtaccagcagcgcacctaccattcctatatatttgcctttcttcttcggatccaccattgccatttactatttaaccatttacaatgtacaatttacccatcgtacatttatttcccttcaggcgggcgtgtagccagcaccatcttgaacttattctcattggcaatattcagcactttcacgatttccctgtaaggcacagcttcatcagcataaagcgccacatacatttccggttctttcgcagcgcacgattgcaggaaaggagtcaattcttccaaagaaatcgcctgctccttatcatttccaaacgccgcataaaaattcagatccttatctataatcactcgcgtcaagggcttagccgacgtctgctgttttccctgcggaagcaacaccttgatagcgttcggcgaaacaaccgtagacgtgatcataaaaaagatcagcaacagaaagatgacgtccgtcatggatgccatactgaaattgggcgatattttagctctacgttgtagcacgctttaatttttaattattagttattaattgattatgcgggttcattcaagaggtccatgaatgccatcgttttagcctccatcttattcaccacgccgtctaccagagtcacgaggtagttataggcaaacatcgcaataatacccacgatcaaaccacctaccgtagtgatcatagcctcgtagataccgcccgaaagcaatgtgatatcaatgttgttacctgcattagccatttcgtagaaagcacgcaccataccggtcaccgtaccaaggaaaccaatcatcggcgcacctccggagatggttgccataatcgtcaatcctttttccagtttcgctacctcaatgtttcccacattctcaatcgcagcctgcacatcattcaccggacgtcccaaacggctgatacctttctcaatcatacgggcagccggagtatttacgctgcggcaataagctatggcggcttttatttctccatccaggatataatcctttatcttatccatgaacatcgggtcctctttgccggctttcctgatcacatagttgcgttcgaacaaaatgtagaaacaaaggatggacagcaatccaagaacgatcataatccaaccacctttgacagccatgctccataagttcatctcttcaggaccagctaccggagttaataccggattggcgcccgcaatagaatcggtcagcgccggagccacttgggctaataacaacattgcattcatcaacgaagacagtttttatattcctgaatggtacgttccaaccccagatacagagcatcgcttatcagcgagtgtccgatagagacttcatccatccatggaatgttttgatataaataattcagattcaccaaactcaggtcatgtccggcattcagacccagacccagactacgtgccactttggctgcctctacaaaaggcgcaacggcagcttccttattctgcggataagcggtcgcatagggttcggtatagagttccacccggtcggcaccagctttggcagcatactctatcatctccgcatccgccgatacaaatacggaagtacggatgcctgcatcattaaatgtttcgagtacttcggtcagaaaatccagattctgcttggtatcccagcctgcattagaagtcagctgagtcggactatccggaaccagagtaacctgatgcggcttcactttcaataccagatcaataaattcgggggcaggatatccttcgatattaaattcagtacgaagcaatgggcgaagatcatacacatctctctggcgtatatgacgttcatcagggcgtggatgtacggtaattccttccgcaccaaagctt

SEQ ID NO: 6408 - DNA, 1691 bp, Unknown
  gut microbiota DNA sequence
ggcttgggaaagtctgggctttgcgcataaaaaaaggttgtgccagcattttgacacaacctctttttattctttttctgacgattagtctgccaatttcttattgatgataatgtatgtaatcaatcccagtaccatcaaaacagctgaagtacctaaaatggtattgttgtttacattaccggtaaaggaacatgcaaccaagattacagctcccaccaagactaatatcaagcccagattttttaataaacctttcatgtgtgtgtattttaatagattattatattcttgtcacaaagaaaagcataattctttaacaagcgaaattatttttgcaaaaaaaccatattttaataaagaatgaagaatgacgaatgaaaaacgaagattattaatcactaaaccctaatcgctgatcactgaatttcagtctttcgtattgaaaaatatttttctcaatacttcctggcttatgctcagttcttctacggtaatgccgcgtaatgcttcttttaaagtttggttagcgattacccgtgcgcgttcttccagttcttttccatctttggtgaggtgaataagattggtgcggcggtcttttttatccgagatacggactaccagatgttggcgttccatgttatcaatcaggcgcgtcatactgggcttgtctttaaaagttgcattgcacaactcttgttgcgtcactccgtctttttcccacaaaaagatgaggacagtccattgttccggagtaatctccaaaccgttctggcggaagttacgggacagttttcggttgattgcggcggaaactttaccattcaggatggcaaaaatcagccggatgtcaaagttaaattgctcgatcatgaaattattgtttaaacaactttgcaaaggtaagtcacttctatgataaatcctaccttcaggcacaaaaaaacattaaatgtttgtagatcaaaataaaattcctacctttgcaccgcaaatttttaaacgaattattaattcattaattaaacaagtatgaatcaatacgaaaccgttttcattttaactcccgttttgtctgatgttcagatgaaggaagcggtagaaaaattcaaaggcatccttactgctgaaggtgctgagatcgtaaatgaggaaaactggggactgaaaaaactggcatatcctatccagaagaagtcaactggtttctatcagctgattgagttcaatgcagaccctactgttattgacaagttagagcttaacttccgtcgtgatgagcgcgttatccgtttcttgactttcaagcaagacaagtacgctgctgaatacgctgcgaagagaagaagtgttaaatcaactaaaaaggaggattaatcatggcacaagttcaatcagaaatcagatatttaactccgccgtcagtggacgttaagaagaaaaaatactgccgtttcaaaaagagtggtattaagtatatcgactataaggatcctgaattcttgaagaaattcttgaatgagcaaggtaaaatccttccgcgtcgcatcaccggtacttctttgaagttccaacgtcgtgtagctcaagctgtaaagagagcccgtcacttggctttgttgccttatgtaactgacatgatgaaataataggaggaggaaagtatggaaattatattgaaagaagac

SEQ ID NO: 6409 - DNA, 11291 bp, Unknown
  gut microbiota DNA sequence
tttatatgtttattcattatgcacatacaatcatacgcctaccgattattcgtcaggtaatgatgatggtgatgatgtgcaacaatatttttcatacaattcttttgtttgatgcgacaaaagtaaactatccgtttgaaacttccaaagatttatcacaaaaagtttcattttcctatcattttcttagtttacgttacaaattacactgatttgcacagatcaatttattatgggaaagtaatgaactaaatgctgagcaatactatctcaattctcctcctccccggaggaggagtacccgaagggggaggtggtaggtgagaaaagaattccttatttatatggttcataggtatttcttactttacctaccaccccgccctctgggcacccctcctccgatagaggaggggaattgagataccctatttatattggagtaaccatttagctcataacccgcccatagtgagcaaacttaaatcagcggcaaaatctcctctttctccacatcgcagtgatgaaagtgcatttcctgttccgccttctccttcgggaaagtgaagtaagtgcataccgcctccgagcacacctctcccgcctcattataaagtttcgcatcgatgatcacaatattccgcttctgctcgcgtatggaagcccgcaacacgacatgcgagtctttagtcgataccggtttacgaaaacgagtttccatcttcgaagtcaccccgcttgtctgcaacttacgcactaccacccatccgcaaatttcatccagcaacaccgactgaatgccaccatgcagcgtattcagccaaccctgatactccggacgcggcttccagatgctcaccacctcgtcgccatcctcgtaaaactccattttcacaccggactcattattgggagcacaaccgaaacaattgtatccttccaaatctttccacgggttaataatcttcttcatacaatttcgtttttatttttaattcaagtttcgcagattctaaaaaaagattgtaaatggtacttttttaggcgcggattacacggattacgcgaattttttagttaattgacacaatagcgcagctttaaatccgcgcaatccgtgtaatccgcgcctaatatccacactaataatatgtatattcacgttcttcgtacaccaccggcacatcgtctatatacttgattctgattttccagtttccctgattatcattatggaatttatagacgtatttcacttcttcggtttgcccttccggacgctctgttccggaaatcagttcccctttggtattgtaccgatacgtatgctggctttgagatgtaccatccggtgaaagatattcctcgaacactacacgtccctgaaaattatagcctctccgaacagagccaaccggatcagatccttcgggttgcaacagcactttccgctctatttgctgcccataggaatcatatatataacggaactcactacattttgttccattcgtcaggtaaccgacttcctgtaccatattaccttctatgtcatagcgaaacacatcccgctgcataatttcacccttatcatccagtattgaacagtgcttgagacgcccttccttatcgtatccataattcttgtttgccgtcagcacacccgccggtgtataatggctttctttcgacaaattcccattctcatcatattcatactgaatcttttcccgacatactcccgcttccgtgaaccgttcctcttttactttccgtccgttttcaccaaactcgtaaacgaagaactgccctttcttctctcccttatccaccgcctgcggacctttggcaatggcaacgtacgacctttgctgtaccttcttcactttaccgcgcacgggtattttctcccagtcatttccaccgcctgcatactctatatctctgcggataatgaaattcggttctccatattcattgcaaccttcaaaacgttctgtccagttacccgcttcatctatcttccgaatcggattcttctgattatcatctttcaccacccgcatcttacctaactgtagtgcaccccttcttttcagcgtcagtgtatccccctttccaatcgggtattctcccacgcgttccatcttttcatccggaccacccatcaggataatcttctccggcgttccatcctcattgtacagcacttgtctgcccgatgacctctttttcacatagtctttggagtagattttcaacatctttcccgcttcatcgtacaaggcagaagtaatctggagtgtatcttcctgtccgttcatataggcaatgcaattcagccgtcctttttcatcatacgtatagccccaacaatcgctgactccttcatccgcagttgcataaatctcgcgcgacacctgtccggcagggttatacacatacaccagtttaccatgcggactgccgtccggcttcagtctgttctctaccatcttacggcctttgctgtcgtacttcacgaatgtaatataatccaccaccttaccggtcacccacgtagtgtccttcaatagcggctcatacaccaccgtacgtatgtttttaatgcccggctgatcctgggcgcgaagtgcagccgaaccggatgccaacagaagaagcaaaccaaatattttacatctctcagagataaatcggtgtctcatatccaatagtgtttttcaatatgttgccacaaatgtaacaatacttcggcacgcacaaaaaaaggcggggagttttttactcccacgcctccgcttttacttcaaaacaaggacactctttcatcctttcccaaggatctacaatgccgttgtagtttttatcagggctcagatcccggtgtcccaccacccacgcctccggataactctgcaacagattggctaccaatcggtgcatcgcctctttctgccgtaaagtccgcgtatcggcaggacgtccattcacattcagaccgccctcataacacactccaagactattcgcattgtatccacgggcatgcgccccaggcacatcttccgacctcatcaactccacctgtcccgacttccggatataatagtgatacccccacgatgaaaagcccctgtaacggtgcgccgtatccacgtcctgcgcactgaaatcactgtccgcccttgtggcggaacagtgaataataatcagatcaatctttctcataaccgacataccatttatatcgtcatagcatgtgcactcaacgcccccaataaggcagaagccatcgcaataacaactttcaaaacagtgtcccaagtaatcttcttcataacgatcagtttttagtgatttaatgtttagtgattctatcctaacggatcctcttcaagccctccgtcagcaggaccttccggctcaacagcctgcatgcttcgcgtcaccacacgtgtgtacgccattgtcttcgtaatgtccgtcaaccccttgccgggacggaagttgatacgtgatttcttaatcatggatatcgtgaaatcttccgccttttctgcgcccttactgctgacgcccatctgcatagatcccagatctcccaacctgacaatgcgccccgctttcagggcacgcttcgcctcatagatgatgcccgccagtgcagcacgtacatcagtttccgtacacgtggtacgtccggttatcgcttcgcacatttcgtcgaagtccaactcgcccgaggcttgcgccagggcataatactttgcgggctcactcttcttagaaggatttttacgagccaccaccgaataattcatggatgttgccatatcaattaaatttttaaaatgaatgtaaatcatcgatttacactgcaaatataccggatgacagatacccctcagtcgccaatgaagctttacgaatattattgaaacaaacacgtcccaaaactttcactgaccgtttatttttagtaaatttacgtcacattaagaatcaataaatacaagaaaatgaaagaagaaaaaagcactttcacagtgcgcagttacacaaaatcggaactggctcatctttacaatccacaactaacccttaaaaacgccacccaagtacttcgtcgctggatactccacaacgccgaacttcacgcagaactgattcatttgggttatcaggaccggaaccacattttcacgccccgccaagtaaaagtaatagtcgactacctgggcgaaccttaaacttaactttacgcgaaaagccaaaagttatttcctgttatcggacacatctgttaatttgcaacaaaatagggaaagaaaggaaggaaacgagttgacaagggaacaaggagctgcgcaatgcttctatgccgcatggaaccttatcacctggtcaacttgttaactcgtcaactttccctcaaaaacatacaaacaatgaagtattcatattatcaaaacaaaaaacaaccgccctgcgccgaagtaaccgacgaagaagtggccaacctcatccgccacgatgaaaaactggcacacatgactcttgacatccgacagcatattactgccaatgacatcgcaaccgctgattccataaaaggagaacttccctccgtcaccttctccgcccgcttcaccggtggacgccgatacgacaaactcagtgagtacaacggagaaatcgtcctcgacctcgacaagaaatcccccgaagaactgacacgcatctcaaaggcagtcaccggaaatccgcatacccacatcagctttaccagtccgaagggtaacggttacaaactgaccacaatcaccagcctgcccgacggcaccttgccgcaatctcccgaagaggtccgcaactaccatgcgcatgcctacgaccaggttgcttcactctacgaagagctttgccaaacggacatcgacgaatcgggcaaagacatgacgcgcatctgctatctgcctcacgatgaggatgtctatctgaaccctaatccgcaggttctcatcgtcgacctcaaccgccctctcagagaaaagaaaaagaaaactcccggacggaaaaagtcttcaggtacaaccacagaaaaacctccgtaccaaaagccttcggacaacatctcttatcctcaaagcgaaagtcgttccctgcttgcactccttctttactatcacgatcacaaaaacaagtacgaagaaggcaaccgcaacaactacctgttccggctaacctgcacatacaatgcttacggcattcccaaagaagaagtcgcccctttcctgcgcctcaacttcaccgacataccgcccgaagagatagactccgtgacggacagtgcttatcagcacacggacgaatttaacacacgtaagttgagaacctcgcaatggaactttctccgcatcggacagtatatcaacagccattacgaaacgcgctacaaccagatgaagcaccgcatggaatgtcgcaaaaagggtgaagaggatttcgtcatgctggatgacatggtaagtaacagcatctggatggagctgaacgaggccggttacccttgcagcgtcaagaatatggaaaacctgatctactccgatttcagtttctcctaccatcccatccgcgagtatatgaatcacctgcctcaatgggacggtatcgaccacatcggccgccttgccgaaagtgtccataccatccctgcccaaagagagttctggctgaaagggttcaggcactttctggtaggtatggtagccgcagccacgcaagaagaggtagtgaaccacctttgcctcctgttatgcagcaagcagaacctgggaaaaacgaccttcatcaacaaaatcctgtcagatgacttacgaaccgattatctcagtaccggcatcatctccgccggcaacaaggacgacctctcccgcatggcggaatttatgctcatcaacttcgatgagttcgagggtatgacggggcacgaactcagtctactgaaggacctcatcactcggaagtttatcagcatccgcctgccttatgcccgtcatactctgaacctaccccactgggcatcctttgccggtacctgcaactacccgcaagtgttgtacgatcctaccggcaaccgccgtttcctctgctatgaaatcgaaaagatagaccgctacgaaatcgactacccacagctctacgctcaaatcaagcatctgctggacaccggctatcgctactggttcgaagccgacgaaaatgatgagatagagcgcaacaacaagcctttcatctttcaaactcccgaagaagaaatgctactgacacactttcgcaaaccggagcgcttcgaaagcttcaagtatatgacggtgagtgaaatagcggaagaaatcagaaacagaaccggctatcaatataaccatgccggaaaaatcctgttagggaaaattctcaccaaatatggctttcagtatgttacaagcaagaatatgaggcgctacgaggtaatacttctggaagtggaaagtgtgaggaataaccagttgtatcagtgacgcaagctaaatcaaaactgtgccaaaacgaacaattttgaaaaataataattatctttgaagctataaaagaaaaaatgtgtgtttatggaatataatgcattgctgcgcaagcttcctatcggaatacaaacttttgcggatatccgccaaggcaattatctatatgtggataagactgcgcttgtttggcgtattgccaatacaggcaagccttatttcctgagtcgtccgcgccgttttggcaagagtctacttctgtccacttttgagacttacttcaaaggccagaaggaactctttgaaggacttgccattgagaagatggaaacggaatggaagaaatttcccgtactacatctggatttgaatgccaaaaaatatgaaactccagctgacctgatagcgatgctcaaccaagcattggaaaaatgggaagcagtatacggaaatgaaaaaaaggatcgtagccccgaagaacgctttgcatatgtcatagaacgcgcctacgaacaggcaggttgtggtgtagtggtcttagtggacgagtacgacaaacctctgttgcaagccctcgataatgatgccctactggaagattatcgcaaaactctaaaagctttttacggcgtactgaaaagtgccgaccgctacctgcgttttgctttccttacgggagttactaaattctcgcaagtcagtgtgttcagcgatctgaatcaactgaatgatatcagccttgattattcttatgccacagtatgtggcatcacccggacagagttggttgaaacctttacgcccgagatagaagaattcggtagggtcaacaagctgtctgcagaagaaaccgtagacaaaatggcacgtcaatatgatggctatcactttcatccaaaaggagacggagtctttaatcctttcagcttgttgaatgctttcagtaaacgggaattaggagattactggtttcagacaggaaccccgacttttctggttgaaatgctgcggaagtcagaatatgaccttcgtatcttacttgatggcatcgaagctccggcttctatgttctctgagtatcgtgtagaagctaataatccgattccgttgatttatcagagtggttatcttactataaaggattatgacaaggaattcggcaactatttgttgttattcccaaacgatgaagttcgttacggtttcatcaattttctggtaccattctatacttcaatgacaaacagcgaccagggtttttatatcggtaaatttgtgcaagagttacgtgcaggcgattacaatgccttcctcacccgcctacaagccttctttgccgatttcccctatcaactgaacgcgaagaccgaacgtcattaccaagtcgtcttctatttggttttcaaactgatgggacagttcacccaagcagaagttgaaagtgccacaggacgtgcagatgccgtagtaaaaacccctaaatacatttacgtctttgaattcaaactgaacggtacagccgaagaagccctgcaacagattgaagacaaaggttatctgattccttatcaggctgacggacgtgaagtgataaaacttggagtagagttcagcgcggaagagcgtaatatcagccgttggctaaatgtgatgtaggttatcaatctaaatattattagcagttaggtcaggttaggttacttttacaacttctcctatacacttaaatttcagaaagtaattactttctatttttattctttctcacgaaagttttaaaagtaacctaactctacctaactgatcttataaaaaaactatcatgttgtattttactttagcattaattccgtaatttcgtgagttcaatcattaatgacacatcaaaaatgcctcaagaaataaacagtaacatccgaatcattcatgctgtaaacggtgctataacggagaccatcaccattcgtcctatcgaagaaaaagacaataaggaaatagctgccctgatacgcaaagtctttgaagagtttgatgcacctaaaacagaaagtgtatatagtgacccgctgacggacagattatttcaaagcttctaccaacatccccgagccgggtattgggttgtagaatacaatagtaacatagtaggaggttgcggcttttatccgacagaaggattagatacggattgtgccgaaatagtaaagttctacctttctcctttactcagaggaaagaaagtaggttctgccctcctcaatatggtcgaagagaaagccaaagaaagtggatataagcaactctatatcgaatcatttcctcaatttcaaaatgcagtctccctatacgaacgtaaaagcttccggcatttggaatcacgattaggaaattccggacataccgccacaacaattcatatgataaaagacatataggaataaaagcaaggaaatatcctccggaaaattgacggaaagatttaaaaaagcggcgaaagatttgaaaaataggacggtgtttttcaaatctctcgccgcttttttcagtatcttctttattaactcattcatttcatttatctttgtagacaatgacaccacagacaaaactcagaaaatacgcttcgcccactccatcccgttggcgagaagaagctgaatacagaatagcaaataaatcatggcttcgctattctcagaaaatagctatgcagatgcttgataaaatggagcaaatgaaaataactcaaaagcaactggctaaaagaatgaattgtagtcagcaatacatttctaaaatactgaaaggtaaagaaaatctttcgttagaaacgctgactaaaatagaaaatgcattagaagggtagaaactcatttctcccctccccttttcccaagcacatgcctccttacccccttatacagcccccttttcctcttcaatatatgaaatacccccaaaacacttacaaaaataccgattctataatgccatagtcccagcgaagagtttgcaccatcaacgaagcacgccagtaatatccccgaaacaacagccaacagaaaaacgatggataatagcaatacagcttttctttttcctttgcaacctaccgttctcagccccttataccaagcccaatgactcttgacatggataatccccaatatcataaacagcagactggcattcgtgtgaaatatcgcccagatatgccaactctcatgatcgacaccttgtcctgcaatatgcaactcgacgcccgtgtagaatgataaaataaatacgggaaccaacattaaatccgtgaagtaaataaacctgtttctattcatcttctttgtttgcaaagttacagtgcattgataaatagaagaatagactatgtaaggttaagattgtattattcgaggtattttttccggtagagagtgggacttatgccaaccgcctttgtaaacaaccgtgtgaaataggcataatcatctatccccaaatgagtggaaatctcccgcacagtcagagaggtatataccaacattcgtttggcatgcaatataagttcgttttgaatgtacctgcttacgctcacgcctgtaacgttcttaatcacctcgttcagatacacgggtgagatgtgcaaagattctgcataatgagatatatttctgtttatttgctcattagcagaaagtaattctttgaaagccaatgtaatttcaatgtgccttctgtttttggattcctgcccgattattttcctagcggcatccgttatgatcccgacaacggtacatgccagattctgtaaaaccgttttcgattcatcattttcccgctcgcctatcctgcggagaatcatggcaaacagttggatcaattcggtgcgttgcgtatcgcttatcttaaatggtatcagcgataaggcatactcagcaagagtctgtttggtgggagcatctataaataccccgtcgatgaataagagaaacgactttgcatcccctttatcaacgatccgatgcacctgatgcggctgggtgcagatgacgctacccgccgacaagtcgcaatctttgaaatcaatgccgatacgacaggttccactctccactataccgaatatatagtaactatcccgatgtgtgtaattaatcagccgattcggggaaaaaggagaaacttcctttgcaaatatcccgaaatcggattgctgaactgctttatgtagaggaatatccgccatgcaatgttttttgcaaagttagcaaaaaggcggattactccgccttttcttccttaatcttccggcaactcccccgcccgtatccactttacatacgataccagcgactccccgctcattatctttcccgtcgattcattcaccacatccaccacagaagtcagcgtacggatgatccgtgagtaattatcctcaccgttgtagcgcaacttcccttgctctatcaacttcacaagcatgcgggtaactgatttcgggttaccgtaatactccacccttgcgggtgtatcatttttctctgtttgcctgatctgcttaatcaaacttttttttatcgacacagaccaacagctcttcaacgagagcatactcgtgagcactggctattttcagtgcatcgcgtaattcttcaagttccataattaataaaatatttaaatttagttccgagccctgaatgggcgaaaataaagaaataaaaa

SEQ ID NO: 6410 - DNA, 19840 bp, Unknown
  gut microbiota DNA sequence
gacacctggttacacccatttcgggcttaaatttatgcgctattcacttcatttttatcctcagataagcacggtcatcaaaagagcaattgcctttttgcactccttttgtactcttatacaaccgcatacacaagggatctttctccagaatatctgcaagataacattccgactcacgcaaggtggaatataaatgagggtaaccgtcggaagacaataccacctcctccgcatcgcccacggaaaagatattcacctgtttcatctgtacgggaaatccatcaaacactggaaaagcgaagtgctgtccttctacaggacaattctgcagaagtgcctgtttttgcagaaaaggatagataaactcccgtcccggatcgtgagattccaaatctttcagcgtagccccatccagcaaagcaacttcattgactaccgcacgtacatttgccatgatagcatcaatctctttctcattagacgaatacagattaccaatgatacactgacaatctcctacctgccatacctcatttcgggcataactataaatcactccattggccgtgaaacgtttgcctggctctgccttcagttcatcaagcaaattatgctccacataaaaatcatgtattttctctgttatgcggctaatggcaccagcagcatcaatatccttcggaaaatcgcgtatagcctccaaagcaagttccatagccaggcgaccggttttctttccgtcgtaagtgaaagtagatttagctgtagccccatcaatcaccgctgcaaagtaaggggtaacaatcatgccatcctcattggtctggggactttgcttgcccttcaggaaacactcctcaaccgtaaaattaggaacggaaggagcctgaaattcattttctgactgtaaatatgtccaatcgcgattgcaatccattactttcgatttatgtttcaaataatcaatcagatatgccggacggtctgtttgcaatatcgttgcacccagattgtctatcagataaccataacctttatcccggtttgccaacgagcagtcatcatcatgtccaccggcatgcgtattccacaaggtattataccaaatatgggatttcccagtcatgatcttcttcacttcgtaaggcaaaaggttggtatcatgggcgaacttaaactcaatagccaccggtttcaaaatccgaagataatcatttaacttctgaatagcatctttgtcatccaaattaacctttggcatgaagattactttatccagatattttccgtaatcacgcttcacatcttctgcaggagcattgcttttcataatcaccagattggtggttcctgtcttttccaacagttcatacacctggtcgaaatagtcaaaagccttgtccaaattgagcattactttccctttggccgtcagcaatgcttcttccaaagtgggaatcttgtagacagtcttaatatggcacccattccgcaaacacattttctttatttcagccaacgtatattcttccggttttccttttccggtggtagttcggtcgagagtattgtcatgcaacagaatcaaatgcccgtctttggtacgggcaaggtccacttccacaatatcaactcccatctgaactgcattttctatggcttccagtgagttctcgcaagcattacgccagtcaccgcgatgggctgccaccaaaacttttcctgaagccggattaaataattcttttcgaatctgatctactttatccgccgccacttgggcatgagccggaaatatccacagcaaaagcaataatacatatgtcactcgcatatatttctatttttaataattatcctttgggttttacattccacactaaagtagccaacaatgctgaaagtagtgccgcaccaatccaaaaccaattgatgtacgtaaagtcataaacatccgctccgttcacaaccgttttctgtccttcaatcagaatcccactcatcacatcctgcaatccggcacctatgtaactggctattcccactactcccaaggcagcccccgaagcattgcgcggagcaatatccacagccatcaagccgcccagaaagcagagaagcaccccgatgctggaaccaaataaaatcatcgccaatatatccaccccgatatgcgtaccgggaacaagaaggaacaggcataaagcagccacattcatcaacccgaaaataagagcgggcgcattgcgccgtccgccaaacagtttatcagaaatcacccctgaaaatactgtgccgactatgccacataccgaattgatggagatgataaagctggcatccaacgtagaatatcccttttgtgcttccagataaaacactccccaactatttaccgcataacggctgatatacataaaggcactggacaaagccagaatccaaatggcaggcatcaataaaacctgtttttgagctttgttataatcggcagtttcggatgcgctcattttttctttctctttgggctgattcacagccggaagccctttgctttgcggcgtatcatgaaaaaagagccatattatcaatgtgccgatgagccctaccataccggcgccgaaaaaaccataccgccaacccagaacgctaactacagaggcaacgatgatgaaagtcaaggcttctcctatattatgactggccgaccaaaagccatagaaagaaccgcgttctttatcactgaaccaacgggaaagccccactacgcaggatgccgcccccatagactgaaaccaaccactgactccccaaagaatggcaaacaggaagaaggaatttgtgaatcccaggcagagattgaccaatgcactcactaacaaccccgtagtcatcagtcgatttatattactgcggtcggctatgaatccgtttgcaaacttgcctacagcgtatgtgaagaaaagtacggcaccgataattcccaattctgtttccgagaatattccttcctctactatcggcttcttaactacattcaggctgagccgacagacataatacataccgtaacccaacgtagcagcaaggaatgtagaccacttcaaaaacttcatgcgtcttttcgtatcggacaaagactccccgctacagaacttcggacttgaaactctgtagaaatttattaactgtttcagcatactgtcttacctgcttattttagttatgaaaccccttctcctttaaatattcaataagaagggcaggacggtcggtttgaatcagtttcgctccctgcccgattatccaaccccaactttcatccggctgttgctgctccacggcacggtcgtcatcatgccctccgcataattccggccaaagtgaattgatgaaaatcttggcaccactggcacgaacttttttaatcagccgttgtatctccggagtatctttactgaaaacaagttcataggccatcggcttcatgtgagccatataaccatcaatgatgtcctcggcaccttctttatccaatgccaccaccggcatgaagatcattttttggagtatatcgccatgctccgctttcactctttcataaggcaaggatgccttcataatacactgccgggttgtaccgctcttttcaagaatggcgtaggcttcattaaagtagtcatatcctttatctacatttaccatgattttgcctttgcacagttgcatcacttcttcaaaagtgggaataatgtgtgctgtccgatgattcgtcccgtttttcaggcggaatttacgtaactcttccaatgtatagtcctccggttttcctttaccggtggtagtgcgatcaatggttttatcgtgcatcaaaatcaaatgcccgtctttggttttcttcagatcgatctctaccatatccactcccatctcaatgcaattcctgattgcctgcagggagttctcgggagcattgcgccagtcggcacgatgcgacactacaagaaccgagttattaccctcctccaggagattattacgtatggcaagtgctttatcttgcgcaaaaagcgaccatactactgataataaaagcgttacaagcaaaaatcttttcattatgattatttcttcaaattatttaattctgttttcaactcttggatttctttttgttgctgtatggtgtagagtgtaagttcctctatcttctgcaacaggattttattcatatcatgttgagaatagccttcttcggccacttgctcggcagaaggtacatcaggcagatgattattctcggaaataaatttttctacttccggaattgtcttcaaagtataatctctattgaatacaaaatccgaccaagtggacttcggaccgataccgtaatcctcagaaagtactcccttggcaacaaacagagtgtacttatttttaagatcctgtcgtatttgagctacaaaagtgtcaatcagccccatataagtatgattgcttgtatccaaatacatgcaactgctattattcgctcctaaataaagtccattttttgaactggtgccaatccaagcgtcatcgtggtctgtatcttttccaaaataggttctaattccgtctgtttctgcagctatagatccaccaacgttcagggcagaagtcgaatttgtcacttgacctatggtcaccccgttgtctttgatcaatacatgtggggaatcttcatcatccatgttcttatttccccaaagtgcgataccgctcgatcctcctattcttagccattttcctgtagtttcacctttaatggtaggggcaccattccgccctattttcatagttatagcattagcaacaaatacgcttccatcagtttttacttccaagttgggcacatcgttcgttcccacttttccatctccccaaaaaccaattccacttttggaacctatacgtaaacgtttaccgacaacactcgaactcattaatggttctttatttctccccagcttaaatgtcaccccatcatccgcatagtaacctttcagagacagatgcatagtattaaatatagtcgtctgattttctgtgataaaaatcttattttttttcatcgggttaagccttattccattagctcctgaaatagtaatttcatcatccgggaaacctatactcccaagataataaagccaagaattataaaaatttaatgctggcttaccgttagaagctccaataatagaagttgttccatttgccgacactctgaaacgctcttcattaggccatcctgttataatagaataactacgcctatctatcggggtagacgaactattacctacatatcggagaaatcctttatcgccacgctgccaatcataatctcctgatcctgaaagtccgggaagttgagcacccggagcatactgagcataaacaccatttcctgccaatgatcctaaaagcaatacaattagtattagatatgattttcttgttttcataattatcaatagattagaagttagctattatttttttatttattttataagaatccgattctactgtaaccaagtatataccggtcgtttgtatcttaatatttttatctaaaagggtcacattcgccaaagcaaactcacaaagcaatgctccttgaaggttagtaagccggattttcacattttcagtttcagagaagtttatatgaacccggataacttgtgcacttttatcaaaatagatttcttcatataaaggaatcattttattactttccgttatattctctctcgtttgattatttgcgtcaacctgccccacacaccatttttgaaaatcagtgttatctgatacttgttgcaatacaccctcacgcgtatcagtcaaattcatccctgttgcacaattactgatagtgaatattcgtccttgcgccgtatcacttacaggagaaaaagaccactgctgataatcggattccgctttggataccttagccaaagcataccccgcttctgcacttagaaaagacaaatctgtctgattctgcatgacataacggaaagtttcatctaagcccacacaatgaaaataccatgtggaggaatagagaggagctccggtccccacattaagtaatgcctcatttcccatactgagttgtgattcagaatgatataatgtcgaaacctgctctttggatagtgctacatcataaactttaaaatcatccattccggcagccggaatgtcatctaccgtaccaatacatatctctgtaatcagattccaatcaggagtaaaggcagaataacattcagtcatcttccctttgggagtgcctaaatagaaacgcgtgccatcatcagaatagataaccgctacaaaataccatccctcaccttctgcaaaattagaatcactccacatccattgctggtccgatgaaatactctgttcaccatttttatgataaatattcagaacagccctcattccctttttcttcattccaagcaatagttcaccatcactgccctttgcccagaatgcctgagcaatagaatctttagttacatacatcccatatgtcaacgtagcctcccggcgcacctgtccgtcagccaaagtcataggaatagtaatgtaactattagctttatcaaaggctatagcctttcccttagcatcaaaacgatctgtcaaagaataaacctttccataaatatcagccattttacccgatattatatcttcggagtttgtaccgtttagcggcaaacaacatttctgtaatggtatttcctgaccatataaatgactggcaaaaaccaatgttactattaatatataattcttcataacccacctcctttaattatcttcacaaaaatgcgtttgcaattcatctttcagttctgcatacttaaactcatacatagcaatttcatcaggcatagtaaatgttgtagatggattcggatcaccaaatattatataagatgacgaagagcgccctaaataattacccatataattcatctgaggcaaattgataccaaagaaaatgggggcatgccacctattatttgtagtctttcgagtatctttggtttctatccacaggaaattggctgtaaaatataaacacacttcccattgcacatctcctccggcaacagtaaacataggatcatacaaattataatcgtagtaatacgctgaattcggagctgtttttctcctgatggttatagtaccttgatgatagtaaatttctaaatgggaattagcttcttcagaagtactgttaaaagataccagtttcaatgggcgagtaaccttactaagatcttgtcgcatgttaaaaacaagtactaatccatctatcccagctgttataggactaacttcactcattcttaaaacagttctattcgcatctctaacctcccgatgaaatatactttttcccaaaggggtagcataactatgcttatcctgagaaaagagattcacgactgtcattagtccgaccaaaaataatacacatcttaaattaaaacttttcataggctattagattaatggggattattactataaatctcactgatttttctccaaatatcaggacgatcagtagtcaataccatgatctttccataaggtatggtcatcaaaaaataatgatcgcctctgacatctgtccgcaaatctttaatcaaccaatccgcccagcgattcacaattcctttaggtcccatcggttcctccggataacatccgggtcttagtccagatcgctcatatacataatgcaaaaaattctgatacgtttttcctgcacgagtaaatgacttcaaatataggtcatcttgacttttgaaatttgtttcataagcaattactctatttccaccttctgtaatccatgaatcggtaaaatccaagtaatcagatctattaggttgaatcacaggcataaattgaactttagacagtatagaatcaggtacatacgccaacatatccgaatatttatgcggtactttaaaggctatatattgtaatgcattttttgattctgcaatttcgatacacttttttaaaattgccatccagctatctttaattttctttccggcctcttcaccatgagtttttggatcataaccacaattatcaacgcaagttcccgttttatcatatctggcacggatatcctttatatcgacagttaatactaattgattctgaattagtaagtccactaaagcaccaaaatctaacaatttaaagtcggtcactttcatatttcttttacgtagatgtaatccagacaactggctccaactcatattaaataaataatccctatttgtcccagaataatcagtcaaacgatgtaaattataatcatggattacaactaattcattgtgtccagtaatcattatatccgattcaagtataggagtatattctttagtcgcagcaagggcggctgttgagttctccggatttccatctccaagcttatctccccatactcctctatgcgccgcaattatcaaatctgaacctttgctcatatcaggttgtttcatctttaaccaggcaatagtcgcccaattattcgcattcttaagatcgtggcaaaagtgtttcggatgaaacaatgggtttcctccagttctgtcaatcaaaccaatgccaggtatcttacatacactcatttgtgcatttgtctcagtaatcactacccttaaactcagattacttctcaaaaaaggataaggtcgtatagtagaggtatcatatttttttctatcgactgaacctaatgctacttttatctctttgctattccatacatttggataataagtagccccacttcccaaagatgatttgttataattcgttgctgttctagagaaagttgatgaagaagatgtaatataagtatggtaaactaaaacatttaaactcttctcatatatcttcacgtctatttttccacccgcatttacagtccctttaataccactttccatatcggtatccggactgaataaattatacaaactaatagttgcactaacttcagctgcacgcaatccagaatgaataagcagtaacaaaaatagtacgtatgcactctgatttacaatctttattcttttcatgtttatcgatttaagatttttcataaaaaacatcatcagcgtttcatatcataaatacctaaaaattcattagttaattgatataaaaactaattatgcagactgttacttttcaaatacactaataatagcgcaggtcgatctgtctgaatcagtttagctccttgtccaataatccatccccaactctcacccggttgcttcaactctacagcgaggtcatcatcatggccgccacaaagttccggccacaaactatttataaaaattttagcgccactatcacgtactttctttatcagtctctgcatctccggtccgtcattatcaaataccaattcaaaagcctgtggtttcatgtgttctaaataaccatcaacaatcgcttcagcaccttccttgtgtaaatcgatcacaggcataaaaatcatcctatccaacacttcaccattttcagctttcacctgatcataaggtaacccggctttcattatacactgatgcacagtacctgttttttcaagaatagcgtatgcctctttaaaataatcataccctttatccacattcaccatgattttgcctttacataacttcatcacttcttcaaaagtaggtatcaagtgacgagttttatgtccggctccatttctcatacggaactgacgcaactcttccaacgtataatcttccggtttacctttacccgtggtagtacggtcaatagttttatcatgcatcaagataagatgcccatctttagtacgcttcaaatcaatttcaaccatatccactcccatatcaatgcaattttgaatagcttgcaatgagttttccggagcattacgccaatctgcacggtgcgaaaccaccagaattgatttttcagcaggttcattaaatgctttatgaatccgttcagcaggattttgcccccataaagcaactgtacacaacaacaagaggcaactcaataaaaatagattccttctcataaattttattgtttatttcatacattcaaatagatccgattcatagataacatggctttcagatacagaaaccgtatcattaaaaacatacacacgatatttgttgcctcccggatacacacgtaccattatatgcccttgatgggatgccattctgtcaaccaaatcaccgataacaattttagtagccggatgcatattcgtggaaaatatctttctctcttccggataaatttctttagagaatagacgatacaacaccgtatgattaggatgcaaagcatcccaagtagacattatgacattctgaggtgataaattccggagaaaattttcattagtcccgtcctcattgccatgatgatttaataccgccacttctactttgcctaccacatcagagactggggtctcaatatcatgccacttaggacgtcccggacggggaaagcctggtatatcccctcctgtatagtaatcaaatgcaccataactcaactttatcacacagctatacatattttctctgggcatttcactttttgaatagttgcccttatctgaaaataatgaggtaactcctgtatctccatcccaaaccttaccattagcatatacattacgcacaccaaatgaatgatatttttccggttcattgcgtaacacaaattgattgcacgatcccacattaaaggtttcacgtttagtgcagtcggagattgattttacgaaattacgatagttcatatagcaagaatctttatcggaaagaggcataaagtcatcccctctgtccacgattaccttagcaggaaaattccgatatacctcggaaaccccagtcagataatacctgcctttatcttctttcttatgcaaccaactaccgatatgatctgaatgataatgcgtcaaaagataatagtcaatgttttctttgtctttaggtataaaatagcgtatataatctgcaatccactcaccagctttcttggtatcatctggttttgcagctacgaccctctctccgactctattattttctccggcatcaatcaacagagtagttccatccggcaaaatacaaaaggtgcaatccccacgtccggtattgatatgatggatatccatatatccctctttccattgaggcaattcttgcgagaaagcacattcagccaccaaggcgaacaacagtccccaaatatatttcatgtttcatagttttagaaggatgcctgagaggcaatactttcaggcatcctcactcaataaatactcagattagttatatcccggattttgagggaatgtttccggattgtcgatcaaatcaacctccgttttcggaatcggatataaataatcattctttgttattgtgaaaccaacctttgacatagcttctatagccgtatctgtacgaatcaaatcaaaccaacgatgcagttcgaacgggaattccaaacggcgttcttccaatacagccttgcggaaagcactctgatctttcaaatctgtcactttatattccactgcatttgcacgcttacgaaccaaattcaagtagctcagtgccttactcgattcagaactttcataggctacttcattgtgagcctcagcacacatcagcaatacatccgcccatctcaataatggtaagtcaaatccaacctttgccgtagtagcgtcgaatgtatcataatacttagctattacattattgttagcatctacctttttatattcgatcatggctttacgatcgtccgcatttccataagaagctaaaagtttgctatcaataaccgacttatccttaaagtaatcgttgtatccatgtccttctccaagaactgattttgaatatcgtacagcaaacagaatttctttattcatctcctggtttacatcaaaaacatcagcaacggtgttctgcaaaccatatttagatgaataatctttgactatgttatccagcaaagtcgctgctgccgaccacttttgttgtgtcagataagcttttgccaataatgcttttgcagctacggaagtggctcttcccagattgtcatcatcataagcagaagtaagcataccggatgcagcctccaaatcctcttctatagctctataaacatccgccactgaactacgtccgtaccccttagcttcaatagccgtcaccggtttcaggatcagaggcgcagctccccaaagacgaacaatattgaaatatgctaaagcacgtaaaaacatagcttctccttcatactgctttttcagcgcggcatctgttaccacatctatacttgcaagtacattgttgcatctgtatatctggttatataattctttccatgcatagcgaacgacattatttccagatgtagcagtaaagttatcaatgaagtagaacataccggctgctccaccgggattaatatcttccacattatcagaccttagctccatgagggaaatgaaatattcgccatattgataggtcccctgcaaggaaccataacaagcggacaatgcagaatttatatcagaagtatttttatagtaatttgctgaagaagcctcagatataggtgtcaagtccagaaaatcactacagctggtaagcaacagagatgcaaaagctacaatataatatttaattttcatatcttgattatttaaaaggttacatttaatccgaatacaaatgatttagacagaggatatgtaccataatcgataccaggagtcagtgaaccgcctttcatattcacttctggattgtatccgctatatttggtaaaagtgaaaggattctgagtagagaaataaactcttgcccggctgattcctacattggtaagcaacgatttaggcagcgtatatccaaaagtgatattcttaattctcatataagaaccatcttcaatatgccaggtagaagtagtaccattcatacccgttgcacttctgtttgcacgaactacatagccgctgcccggattactttccgattgccaacggtccaaagcatcggcctgactgttgtttcctccttccatattatcaatgtagcgacggaatatattagcaatcttattcccttgcacaccttgcagggcaactgaaagatcgaaccatttatatttaaaatccgtagagaaaccatacgtaaacttcggcatgtagtttcctgtaatagtacggtcgttctcgtcaatctccatattaccgtccatatctttgaaacggaaatctcccggtttcgcaccactgacataggcatatttacgttggctcttatccggattcttcgagttatcaatctctgcctgattagcgaatacaccatccgttaccaaagtataatagttaccgataggctctccgactttagtaatgaaagtcacactctcggaagtagttatcatttcatcaacaccaccgaggtcttttacttcattccggttggcagagatattaaaacgattattccacgtaaagtctccccaagtatttgttgtagaaatagcgaattcgacgcccttattatttacttttccaatattcataggcactgtactgaaaccggaaaactcggcaaccggtacattcagtagcatatcagttgtattactgttatacaaatccagttctaaagtcagcatattaaacagtcctatttccagacccagattgaacatagctgtcttctcccaacctaaatcaggatttccagctgttgcaggacgtaaaccgctggccaaagtgccgtcagcttttccaaacacataattgtcttccgataacgtagcataatactcgtaatttccaatattgaaattaccactaataccgtagctcgcacgcaatttcaaggaagtaagccattttatatctttcataaaatcttcttcactgatataccatccggcagaagctgacggaaacataccccagcggttattctttccaaaacgggaagatccatccatacgagcagcagctgatagtaaatatttacctttatatgaatattgcacacgtgccaatgccgataacaacgaccattcgtaagcggttgcactccagtttgtaatagctgatgctgcattcatggtatgtaccaagtcattaggataaccattaccggccagcaatgaagtgttcactgattctttttgtgcagtccatccggctatggcagataaattatgcacatcctttattattgtagtatatgacaaagtgttttcccatacccagttcagcatattcttatcacgcttcgacccttccggcactgaaggcggaagtctgtctaaagaagtaggcaaagtggaaggtctgtaataagaacggctgtagctgttgaaatccacaccgaaacttgtcttgaatttcagattcttatagagttcgtattcaccatagacatttcccataaaacggtaacgtttcatctggtcttccttttcgtttgccaaagctacaggatttacaatctgcggatgcttatactgccagttccattgatcaaaattataagaaccgtcggcattgtacaccggcatagtgggtgacatggccaaagcagaagctacgattgtctcttctttatatctgtcctcagtaggaacgatgttatacacagaataattaaaagacagattagtaccaaaagtgaatttcttataattagcatcgacttttcctctggctcccatctgttcaaaatccgaaccgataacaataccctgctctttcatgtaattaccggaaataaaatatctggcagctttgtttcctccggacagagaaagattatgacttgtgacgattcctgttctcataacttcgtcttgccaatccgtattcgtcagtccggtttcaccattgatatatggcattatttcgggaggtagcaaataagcctgattgataacatccggtttctttcccaacttctggttacgaacttcattagaatcattgatgctaccttcaatacctttactttccagtaaatcaagataagcattgttatgtccgtcataggagagccaagcatattcatacgcatccagcatatctatctttttagtacgctgctggaaacctacatatccatcatattgcacagtaggcttcatatcttttccttccttaccttgcttagtggtaataatgactacaccatttgcacctcttgatccataaatggctgccgctgaagcatctttcaaaacttcaatggactcaatgtcattcatattaatggaactcaaaggagatacattctgtcctgtaccatttcctgcttcaccggacatggggaaaccatctaccacatacaacggttccgtaccggcagtaatactaccactacctcttaccttaatagataatcctccccccggaataccattcggttgtgaaacctgcacaccggtcatcttaccaacaagagcctgatccacactggaaaccggaactgccaattcactcgctttcattgaggagatagaagtggttacatcgcgtttacgttgtacgccgtatcccactactacgacttcatccaacatttcgctatcttccttcaaagtgacattttgcaaggctttgtcattagctttaaatgtcaatgtctggtagccaatgaatgaaatggttacttctgcattttccggaacattggctaaggtatattcaccgtcaacgtttgtaattgatcccagtgtggttccttgtattgccacactcgccccaatcaccggttcaccgttttcatcaagaatctttccgttaattgatcttacttttgttttgtcatcacccggcatttgctttttgagagaaatcacaatcatcttattctttagattcacctccaatgatttgtcaaggatagatgacaatgcctctacgacgggagtattttcaaaagttgcattaacctttttattctcgtttatttcgtttttctgatagataatggacagccctgtctgactctctatttccttcaatacagttttcaatgtttgttccttaaaaactttgctgactgtctgggcatttacagataatgaacccaagctgagcaagaacaaaaggaataagcatagaattgattttcggttgttcatagcttttcttgatttaattagttgttacaaaattgattttattctctgatatatatatcctttcctctgcgttcgacggttatcgggatgatctcctgcaaagcagccatcacctctcctatcgtctcacggtttcttaatgaaatgcggaagcgtttggcacctacctgttccgattccagactgatattgacgtcatactggcgggatagcttcgctaccagttctttcaacgtaatatcctcaaattcaattcgattctccgaccaggctttccattgcttcacatcattacgggtacgtgtaatttttccggtggccatatccaacttcacgaattcaccgggtgccatctctatccgctgttccccgcgatggatttctacaattccttccatcagtgccgtagtgacaactgagtcttcaggataggcggaaacatcgaatttcgttcctttcactactacatcatatccacaggtttgcaccgtgaatttggctttttccttcttcgtgacttcaaaataagcctcaccgctaagtataactttacgattccgctcgttgaacttatccgaatacttcagtacggaaccggcattcagccataccaccgtaccatctgccaaagtcatcttgctcttttctccgtagggagcttcgaatacgaaataatcttcggtagaagataaggaagcaatgttccagatgcccaacgtagccccggcagtaagcaccacaatagcggctacggcagccactctgcgccagaagctgaaataacgacggggcaacatcggcataatagcctcttgcgtacgaagacggcgttgcagacgttgccattcatgcatggtctgttcgtccccttcattagtaaccttccattctttttcccactggcgaaactgcagacggttttcttccgcttgctcaatgtaactgaacaagagtttctcttccgcctttgaaatgtgtccttcaaagtagcggatcgccaattcgtgaatgtttgtttctgttttcataaattctctttctataggatgtaacaactaattttaattctacccaaccccagaaaaagaaaaaagcagaaaatttttagttctctgctttttctcctcctggttattctgtttattcgttcataatcacccaagctaaaaccattatatagatgtctaccggatacttatccttgaagtgacgttcaaaaagggcaagggctttagaaatatgtttctccacggctgtagtggatatttgtagtttatcggctatctccctgttcttgagatgtgtgaaccgactcagcaggaagacttcgcgacaacggtcaggcagctgaccgatgacaagtttgatttgctcctgcaattcgtcatagagaagtttgttgtctgcatcaaaggtgaagtcggtatagtaaagccgttcttccccatcaatggatgccaggtattcaatccggtgcttctctacaatggatacgtgtttcaggtagttcaggcatccgttgcgcaccattgcaaacagcaaagaagttatggagaccgacgaaagtaagtccctcttctcccagaacttcagaaaacattcctgaataatatcccgaacgatttcttcatcttcaataaagcgaatagcatatccacgcaaacgcggaaagtaatttttaaacagataaacgaaggcttcttcgtttccccgttttatctcctccaataaatagctatcatctgaaaaatcagccaaattcttttccatgcttatattttaaggaacaaagattgttagaagtgaataattaggttttgcaaacctattaaaattttgttccaatacaaaatgaaaaagggattgtttttttattcgcttactgattttgaagaattcccaatgattcagcattacctatttatgcctctctcaactcccaatgtcctgatttgttagagccgacacgtctgattagccctttctcctttaatgctgccataatacgttcaccttgccgtaaggaaaccgaaagcaattctgcaatctcttttgcagtgattcgattatttatccggataagctctaatacacgttgttcatttataccgacatttataccgacatttataccgacatcgacacgaggttctaaaccttcatcttctatggatgcctgataattacgaatcgtctgctctaaattacgaatatgttcatcgaacataaagttgtgaaatggttctatatcatcgttttcacgagtagctataagagattcaatatattccgctttatggtctttgttaatattggtaggaatgattccaaactcaaactgcaactgattcatcagcaaacgagacatcctgccattgccatcagcccaaggatgaattgttactaaatggaagtgagcgtcgaaactcaacttatagcattcaataacattcgtttttgaaagagcctttcgtcgctgatttatactttcgcaaagttctgccaactttgtaggtacctttgagtaattcatataagagcgtcctccagttccggctgtaacgttcagtaatcgtaaatctccattcgctgacgaaaattcacctaatgcagtttgatatattgttccagtattcttcagaacgatagaagatagtttcttaagcatatcaacagaaatatcactatggctctttgcaaaagcaatagattgttcgtatgctgctttcaggtctaagttcattagttgctcagtcatagaacgacctttcgcactgatgccttcatcaaacaaaagttgattctcaatttcagtgacagtagaaccttcaatagctgttgaatgagtaataagagaatacagatagaatttatcgtaatctatctgtttgtcaatacccagctccttaaactgggctaacaaggataatatcttctgttctcttgtcataaaaatgttttttgatgctgcctttatatggcataaagacatgcaatgtttttttgcaaagttagcaaaaaggcggattactccgccttttccctcttattcttccggcaattcccccgcccgtatccactttacatacgataccagagactccccgctcataatctttcccgtcgattcattcaccacatccaccaccgaagtcagcgtacggatgatccgtgagtaattgtcctcaccgttgtagcgcagattcccttgctctatcaacttcacaagaatccgggcaacaactttcggattaccgtaatactccacccttgcaggtgtatcatttttctctgtttgcctgatctgtttaatcaaacttttttttatcgacacagaccaacagctcttcaacgagagcatactcgcgggcactggcaattttcagtacatcgcgcaatttttcaatttccataattaataaaatatttaaatttagttccgagccctgaatgggcgaaaataaagaaataaaaa

SEQ ID NO: 6411 - DNA, 5255 bp, Unknown
  gut microbiota DNA sequence
ccacttttatagcgcagccttttaaatccgcgttatccgtgtcatccgcgtctaaaaaataatataccaaatggcgctaatcacttatcaccaaacactaatcacttttgttcttttcttttcttttccgttatgaattaattcaccacagagtaacacagagtttaatcaatttgaaatcaaaagaatagaactccgtgaaactctgtgttactctgtggtgaaaactcattacctttcccgtttcgaaccccaaaaagggagccttcttacagctccctatattccctttctgcattgaagcaagggcaaggtttcatgggattcaggtcatgatgacctacaatcagagcgtgtggaaagatgcgcttcaattcgcggagcagtgcaagcagcgatgctttttgctctaaggtgcgagtgtcggatggctgactgtcggcatccaaacctccttcataacagataccgatggagtgtcggttatgattgaggcaatgcgctccgattttttccggtgggcggccacggtgaatctcaccgtcacgagtcacgtagaagtgatagccgatgtcactgaagccgcggtggcgaatgtgatcgcggcggcaatcttcgaagctcaggcccacgccctgaggcgtggccgagcagtgaataatgagtagggtaatcgtgcgcatgtctactggcaggcgcctaaccctaaagctcccgcaatggcggtggctacggtgatgattactttgaggacaatgccccacacgttttttgacttcttttcttcattcataatgattgatgatttataatttatgtgaatcaggagttatcccaacggattttcgtcgagaccaccgccgtctcctccggaaccgccaccgggagtattgtcggacgagctgcctcccacggtgtacatggaagactctttcaattgtccttccagattaatctgagcattactcagctcacccgtggcacgggcgcggagtttcaacccctttacgttgttagccagtgagaagtcggcggcagattttgcgccttttttgctgacaattcctacggaaaaaattgccagatcatccatttttacattctttccatccagaataagttccttggtgcaggaaaccatatccgtcaacactcccttgatgacaccacttgagtagggagtattgtggttagacatgtgtttggcaagtttctcgatgtcgaacgtctcttcaattacgggacgcgcataccagaaacctttcagcgggctgttttcgcccgtcacttgatactttttgtaacgaatcatagtttgtagataatttaaaaattaatacttgaaaattcatgctgttgaactcaacaatgcaaaggtaatactgcgggtatgggcgtttgtctctttctggttgttagagccgattaggggcggttttagtctgttatttctatgtatatacttgataatgtcatgatttatcgctacctttgatgaaatataacacatgaatatcagatatgaactcttttgaaatccgtacctatgggcgtactgaacttgcccaactctattgtcccgatctctgtccggagtctgcctaccgtaagttgaaacattggatcgatctttatcccggtctgcgtgccggtctgtccaccctggggctttctccccgttcacgctcctatacgcccgcccaggtgagcctgatagtaggcgcactgggggaaccttaaagctaaggtttgggggcgtaaagctgaggtttagcggtgtgaagctgaggttgggagatgcaaggctgaggttgagggatgcaaggttgagattgagaaatacaaagctgagatgaggctttgtgatggtgaggttggtacacttggtacagaggttcacccttccctttcgcttcacacacacgtgcgcgtatataatgtgtgagtccccctgctaatcactaatccctcaccactcaccacttcttaccgcttacccggcttgcgataagtgccgtttctgtccgtactttccaccagaccgtgcttctgcaggcgcttcagccaggtggaggcggtttcgggcttgatacccatctcttcggctctatgtatgaattcagctcgtgtaaatctctcccccatgcattgcacaagcgcatcgcggtcggcatttccccgactggtcacttgggtggcgggcaggaaggagagtatgtggatggcgtggctgtagaggctttcggcgagcgacagcacagcgtggaaatcgtcggaggtgatgctgagatcccatagggtgatgatatggtctttcagattgtcgggattggtgccgggatcgggcgatacattgggtgaacgggttatctccccttgttccaatgcgcggagcattgccactacctccatgatgcggcagatgttgatggccagacgtgccacactgctcgacatttcactgccgtttgacagttctgaacgggtgaatagattggagaacagttggttgaaatccttcttctgtccgtcggtgaggcgtagtgtgaaagttccgcccatgacgatagcctttagtttttctttccattccatgcccagcgtgttgaaagtctcttcgagattattgtcgttgagatcgaactggtcttgccagtggtgtataccgtgcatgtagtagaatagttctcgggagaatagcccgttctcggtagtgggtatcagtggttttacctgtgcgggggtaccggacaggagcacggcaagaaacacctttttcacttcacggtattcccggtcggtgcgtcggttgtaggagatccggtcgtggtcgaaagcctttcgcatggtgtcgctccaatgtccgtattctgagccgatagcggtggatatggtgtcggcttcgctttcgcatatcaggcctgttccgtcggaatctatcaggttttgcaggatgccggttcccgtattgttaccggggatgaggaacatcttgtcgggaggcatcatgggcgcttcggtcttcgcccgttctttgcccaacgcttcgtactttgatttttcacgccggtagcatgccatactttcagccgtctgctttcggatctcatcatgaaagggctctaccaacagacgtaccagtgatagtatacctttgcccgatgtggatggtgccacgacaaaagtttgcaggcagggcgacgtcatttttcctccataagcacaccggacgttccgccccatacttgcccccagcacagtgaccgttcccaatagaagaatatcgtattgtgtgcgggaggtagcgcagctcaggatacgccccaggggataaggccaccgggtgcgttcgtcgaaagtgggtagaggtgatatcgggtcgctgcccgttgccgtgtcttcttcttcgcatatgcttacttcttctccttctttacgtgcgcgtgtgtgtgaagcggaagatgagggtgaaccttgtgtaccaagtgtaccaacgccggatggaatttcggcttgaatttttacgccgcacaactcggccaggtggaaggctgtgcctatatgtacgtcgttgtgtccggttttcagcgcgttgctgaatagtttttcggctgcctgcgggtcatactttgatgaaaggctgcacaaggcgagaaaatcctgacggcctgcctctccgcagtccgtggcgatggcaaaggcaagttgtatatactcttgataactgggagcgatgtctgctcccgcattcctgacggcttcggtcaggagatgtaatgaagatattggttccattgaatgcttaatttgtaattcgtaatttgtaatttattactcgccatttgtaattctgatcaacgctcccggatcatggcataggaaacaggagcgtacgaggtcttttcccgacgtatccactccttttcccgattgctggtggtcggtgtcgtacatacagtgtacatagttcatggcccagcggattccatctgtagcactttgccctatggcgcagggcacgaaggctttcacaccctgtccggtggggctgacgaacactaaggcagggcacagatagggatcgtcgaataacagttggcgcagtttttcggcttcttcggtagattcaagatggtcgatgtccactactaccagtccggaggcttcttctatgcagtcacttcgccggcgggtgaagactccgcagggagtcacgtagggcagtgtctgctgcttcaggaggcggcaggcattgtcatcacccagcagtgcggcgtttcgtacttcgtgggtgagtgcggcaagtttcgcgtttgaagtgataagttcgtgtacttcgttcacatccactgtgcgtagtggggttagtgtggcatttctcaggttttttccggaaattttatctcttatcggtgagataggaggcatgaatagcgacattctgaaaatgttttccattgcgttgtttcttagttgagtaactttcattttttttatttacttcggcagtctgtcgggcataaaaaagagaagatgtcactttgggataaagcggcatcttctcatagcggggcttaatctttgctaaagcgagagcaaagataggctcttttgcaacatgttattcaacactaattcatacctgtattttgttattattttctctttttacctcttgggtttttgaagtcgcattctttggcaatatctgtcaattcctgtcttatggtattgacagctatctgtttaccattatttttcaaaaacttttcgtttttatataaaaaacgtgcaagcgttgtcaatccgttttccggagatacgtccagacagtttgttatatagagttccaaatatgctttttctataatatccctgcggtcgattattctcgtaatggtagctcctgttttgggacctcttttcaacctaatcctttgtttaattgattgtttactgttgttttcgttctcttttgcagtttttttttgctgctttattagctttattatttttcatacttctaatgattttatgtcagaattagtgatgaaaaaatatgttgcaagttacgaaggtaagtgtaaaaagaagagtggacaagaatattgggataatattgattttatatactgttttacgacgcttaattgactgatatataatttgttggagtgaaaacggataggtgttcaaaaaacgttcgtttaatggacaccaatatttgtaaagaaaatgtttcttataaaaacatc

SEQ ID NO: 6412 - DNA, 24561 bp, Unknown
  gut microbiota DNA sequence
caactgacggcgaagttcggaatttaccggatatgttttttaattaacggatataatacttccgcatagcgcataaagcccagatctgtaaaatgaataccatcaacagtagcctcaccatcgtgcccgatgatatcctttgaagaaagaagatagatattcttctcacccgttttcttcattgactggaaaatagccgcaatcgtttcatttttagctttcacttcccgagcaacccttttatcaaaacgggaatgagtgaaaataggatcttctacaaaaagtatgggagtatcgggatgtttgctgcgaacgatagagtaaaatttctccgcccgttctttcatctgttccactgtggcgttaggaaggaaatcaagcacaaacatggaagcatcgaccgcagctataagttccgcaatctccagatcgagcaaagcattaccgctaaaccctaaattgatacattcacgattgagccaacgttccagaatatttgtatgggccattccgggacgggaagcacaaccaccctgcaaaatactggtcccataaaaaacaacgggcttctcacgtaccggcaaatcaacagcaggctggtcaagcgtagaaaggctatccacaccgattgccaatgaggtgaccccgtcatacaaagagagatataaaagatattcccgttcttcaggatccatattcttcacgatagtagcttcatttacctttccctgaggacgcccgctaccggcaaaaacccacttaccatcttgcagacaataaagatccaatcccttgattccggtaggagtcatgtggttcatgcttctgttatccctcacttcccactttgccccaatgcatgtagagttggaacggaagcgcaaagcaagtccggcactattgcgtcctaaatcccaaagcggtttgcgggaaaccgattccaaagaagccggaaggcgttcgtaacgggtaagagtagcatccgttgccttgcccaacaaggggaaaacggaagcatcgcgataaagaagttgggcctgagtggatgcagccagcaacaatcccaaaataaaaactctgattctcatgattagtagatattaagatgattcaaaggtacactgaaaaactgcatttataaacagttttacatcaattaacaggtaataggcctcctattatggctccacagctcttttgagtgcattcacacttattaaccgtctgaagtttgctttattacgaaatattcgtagttttgtatcgaattcattttaatactttatttccatggaaaagttgactatacaagaagaagaagcaatgatttacatttgggaactgggcagttgtttcgtaaaagacattgttgccaaatatccccaaccggcacctccctacactaccgtggcttccatcattaaaaacctggaacgcaaacagtatgttacagccgctcgcgtagggaatacatatcaatacacacctgccattcgtgaaagcgaatacaagcgtaccttcatgagcggcttcgtgcgtaactactttgaaaattcttataaggaaatggtttctttctttgccaaagagcaaaagatttcaactaaagacctgaaagatataatagatatgattgaaaaaggataaacataaaaaagaatcgcatgaaatactatttttctttattagcttgtctggtaagtttcattgctcacgcacagactacttactcctatagagtagaaggcgaattgacagataattcgtttaatggaaaaatgttatacatcatgcgatatgatgacaatcgctatattgatagtacccgagttgaaaatcagaagtttgcatttgagggacggactgcaatcccctcgttttgtcgaatcgatgcaggacgcaactatggcaactttattttggacgaaggaactataaaagtcaatctatatactcatgtccctacgggtacaaaactaaatgaagctttcaacaagacgatagctacagtcgacagtatccgaaaaaaaggattcgcacatctggcagaacttaaaaaagaaaagccgaatgcagaagactggcaaccggtatgggcagaatattatgagcagaaaatccgcccatcactccttggatatctaaaacaacaaattatatccaacaaggataatggtgtgggagaatatgctttcagaaattatagtatggcatgtaataccgatgaaatggatgctcttcagacagaaataggcaattggctgaattccttaaaaacagtacaggcaataaaagcacgtttcgaagcactaaagagcactgcagtaggcaagccgtttgtcgatatagccggtgaaaacacagaaggtaaagaaacacgattgtctgattttgtaggcaaaggtaattatgttcttgttgatatgtgggcaagctggtgtgctccatgccgggaagaaatacccaatttagcagaaatctacaatacatataaagacaaaggcctggttatattaggtattgcaacctgggataaaaaagacagaattattaaagcgatagaagatctgaatatgacatggccacagctactggatacccgacaaaaagtaatggaactttatggcgttaatggtatcccgcatatcattttatttgccccggatggcactattgttgcgcgcaatctcaggggagatgaaatgaaacaaaaagtggctgagattatgaaagacaaataataacaaaacaaatcaagatgttagcttattttctaaaaatcaatgtagccattgcgctattttatgcgttctaccggctatttttctataaagacacgttcttcacgtggcgcagagccgctttgctctgtttctttgccatttctgccgtctatccgctactgaatatacagacatggatcacggaacaggagcctatggtagccatggcagatttatacgctgacatcgttttaccggaatttacgataacaccggaacaggcaacttccgactggaaaagcctcctgctccaaacggtcggttttgcttattggggaatggtaattgtattagcgatccgctttttcatacagttggctggaattatccgtttagctttccgttgccgaaaagcaaagataggaaatacgaatgtacatctgctcagacaagcaagcggacctttttccttcttccactggatttttatccatccgacttcacatacagaagatgagctaagcgaaatattaacccacgaacaaactcatgccaaccaatggcattccattgatgtacttgtcagtgagattgtatgtatattttgctggttcaatccttttgcctggctcatgaaacgggaaatccgcactaatctggaatatctggcggacaaccgcgtactggaaaccggacatgactctaaagcctatcagtatcacctgttaggattatcacaccataaggctgcagcaactatctataacagttttaatgtattacctttaaaaaaacgcatcaaaatgatgaacaaaaagagaacccgagaaatagggagaactaaataccttatgtttctccccttggcagccttacttatgataatcagcaatatcgaagccgtggcccgtaccacgaaggagatggcaaaagatgtcatagaagctgtggaagagaatctggcgtctaattcaacaacgccggagatggaagttgctactgaagcaataccggtggaaacgcccatatcacaacaggataaggacaaactcgtgacctacaaaggaaaagtagtggataaagacggaaagccggtggaaggcgccgaacttctcattgatggtagccacaaactccctcaagatcaatcatttgttacagacaaaaatgggaatttctctttcatggcttttgagaatgcccatataggagtcatatggaataaaaacgataaatatatgctgaaaggaatccgatacgatcaaaaagagagaaccaatctaaagatcgtcatggatgaccaatggcagaatccgccttccaatgatcctaacaacccggtgtttgaagtagtagaaataatgcctgaattccctgatggcggcatgtcaggactgatgcaattcctgtcgaaaaacattcaatatcccattaatgcacagaaaaaccatacgcaaggtcgagttacagtgcaatttgtcgtcaataaagatggctcaatttctgaacccaaaatcattcgtggagtcgatccggatttggatggtgaagctatacgtgttatcagtttaatgcctaaatggaaacccggcatgcaaaaaggccaacctgtccgagttaaatatacggtacctgttatgttccgcttatcggatgatggtcaaaaagaggagtataagcctatacctaaaattgatgaaaccgttgttgtggggtatgcctccaaacaagctcctgcagaggaagaaccagtttttgaagtggttgaaaacatgcctgaatttgccggtggcatgggaggactgatgcaatatctgtctaagaatatcaaatatccggtagaggcacaaaaagccggaatccaaggacgagtcataatgcaagtcatcattgataagaacggtaatgtaaccaatcccaaagttacccagcccgtagaccccttattggatacagaagcaattcgtgtcactgcaagtatgcctaaatggaaacctggtacacaaagaggaatgccggtcaacgtaaaatatacattccctatcgtattcagattacaataaaacaatctcttttcaacattaattctctctcacataaagattatctgcaatgtcctactcctgatttttaacagcacaatcaagagtaggatgcagataaccatttatttatgcagcttcacgacttctgtcggtgccatctccacattccgcttatctacctggcgaaccacgcttgccgctaattgcaggaaagcgcgtccggtcacggtattctcgtcaagtgctaccggagtacccttatcgccactttcgcaaatgctttgtacaataggaatttgccccaacaaaggcacattcatttcttccgccagcttcttggcaccttcctttccaaagatatagtatttattctccggaagttcggcaggtgtaaaccaggccatattctctaccaaaccgagaataggcacattcaccttatcattgataaacatgttgatacctttgcgggcatctgccaatgccacagcctgcggtgtactgactacgatagctcctgtcagtgccaatgtctgaactactgtcaggtgaatatcactcgttccgggaggaaggtcgattaagaaatagtcaagctctccccaattcgcatcccctatcagctgtttcaaggcattgcttgccatgccgccacgccacaacgtagcctgatcaggatcaacgaagaaaccaatagaaagcaatttgataccatacttctcaaccggtacaatcaggtcacgaccgtctacgtgttcagcataaggacgcgcatcctccacctgaaacatcttcggcatggatggtccgaaaatatcggcatccaacaaaccaaccttgtaacccaacttcgccaaagatactgcgaggttagcagctaccgttgatttacctacgccacccttaccggaagaaacaccgataatattctttacttgaggcaataatttgcctggttcgggacgtgctgcctgtttgctttccgtagtaatggttatttctacctcatcagatacatacgtatgaatagccgcttccgctgcctttattacagatttcatgaaaggatcggtcggtttctcaaatatcagtgagaaactaactttcatcccgtcaatacgtaaattatcggcaatcatttccgcctcaaccagattctttccggtaccgggatatcgcactgtggccagtgcatctaaaattagtttaggataaagtgtcattactctttttttattttgaagtttgcagcccactccgcttactgcggttataactgcgatactcatctaactctatttccacatcgggttcgtgcagttcgccttccttcggcagatggaacttgatatacttgatgttcaatccacggtccaaccactgttgctcgtaataggttttgatgctgagaatttcatcagccatgccggagtgatacagatcttctgtcagcacatccaccggaagatgattttcctcgatcatacaacgggtataagtgaacataaagttactatctgtcttgagatgaacaataccatccggttttaggaatttacgataacgttccatgaaataagtggaagtaaggcgcttggtagctttcttcatttgcggatcagagaacgtcaaccagatttcactcacttcattttccgagaaaaagcggtcgattatttcaatgttcgtacgcaaaaaggcaacattcttcatgcctgcctgtaatgactccgtagcaccggaccacatacgggaacctttaatatccactccgataaaattcttatcaggaaacaatcgtcccagcccgacggtatattcaccacgtccgcaacctaattccaaaacaatgggacggtcattcccgaagaatgactcgttccattttcctttcatctcaaagggcacgttatctactgctgaataaggatattcgaacacatgcggataacttgccatatcggcaaacttcgctaacttacctttactcatgcgttattccacaatggttacccagccatgcgtgtcaggttcgtcaccatattgaataccacgcaatttgttgtacaacttcgtgcagacaggtcccggtttgccgtccttggctattacataagaatgtccgttttcaggatcatctatgcgctcaatcgggctaatcaccgcagccgtaccacatgcaccggcttcctcgaacgtagtaagttcttcttcagccaccggacgacgttccaccttcatgcccatatcttcggccaactgcatcaagctcttattggtaatggatggcagaatggaagtagacagaggagtaatataagtattatcttttattccaaagaagttggcagcgccgcactcgtcgatgtacttcttctcctttgcatccagatagaactctgcggaataccctgccgcatgtgcttcgtggctggcacgcaagctagctgcatagttaccaccgattttataaataccagttccaagcggagcagcacggtcatacttacgtgtaatgacataaggagtagctgcaaaaccgcctttaaagtacggacctaccggagtaacaaatatcaggaacatatattcattggaaggacgcacccccacctgtgccccggttccaatcagcaacggacggatataaagggaagcaccgctctcgtaaggcggtataaagcgttcgttcattttcaccgctgtcagcacagcttctttgaaacgttctgtcggcaattctgccatcatgataccacgacacgtagactgcaagcgggcagcattctcttccaaacggaaaatacgcaccttaccatctttgccacggaatgcctttaagccttcaaaagcttcctgtccataatgcagacaggtagctgccatgtgcagattgataagttcgctactgctgatttcaagttttccccactcaccttcgcggaaattaattctcacattgtaatctgtcttcatgtatccgaatgacagattagaccaatctatttctttcatatctcaaagtattagtaatctcattacgtacattctgcaacaaatttagtctttattcttcactttcccgcttctccgacagtaatttttcgatttccttgtcagctttggtcaatttatcgctgcaaaacgcaataatctcattcgcttcctttattttttcggcaagcgcatcaatttccaattcattattgtctatttgacggacaatcttctccaagcgctccatggcttgggaataggtttcttttttctttgaagtagacataggaatattttatgatttatgatttacgacggaggtcacttcaccccggtaaaaacgggtgagtatttcatctttttcattcaagagggtggcatctttcactacttttccatctttcaaagtaatgctatagccacgggcaagcattttctctggcgaagcatctacaagacgctgccgcaacaaatccaggcgatgctgctggcgcgcgagagaggttgtaacagcctgtgagatatccttccgggcggtaagcaatgcaagcttggcatcagatacgcgacggacaacagcagaaggaatacggtttctatacaaggccagccttcgatgttcctccgtcaaacgggaaatcacgctgttgtgcaattgggtgataagcacttccagttcatcagcagcaagatccatgcaatttataagatactctgcagcagcagtcggggttttcacacgggtgtgcgccacagaatcgagtaccgtatcatctctttcatgccctattccggtaattataggcaacggaaattgggcacaagcggcagcaagcaaatacgtatcaaaaccggaaagatcggaagttgctccaccgccacggatgatgactacggcatcaaaatcattctgacgacttaagattagatccaaagctgctaatacagattcttctaccctatcgccttgcatcagggcgggaaacaattctgtataaaagaaaaagtttctgggattattctttaactgatggcagaaatcaccatagcctgcggctgttggagaggatatcacagcaatgcgttgcggcaaagttggtatatccaactctttattcagcgtcaagacaccttcttcttccagttgcttcagtatttcccgacgacgacgtgccatatctcctaacgtataagtaggatcgatatcctgtacggtcagactatagccataaagctcgtgaaagctgacagtaacctgaaccagtaccttaataccggaaacaaaagcctgccctgtcgcttcttcaaaataaggtttcagcagccgatagacattcgaccagatagtaccccgcgcctttgcaaccagaccattgctacgggggtctttctgaataaattccagataacaatgcccggtactgttcgttcgcacatcactcaactctgcctgtacccaatattcatcaggcaggcattgttcaagactgcggcgcaccaaggcattaagttccagtaaagataatgcttccatattgttcagctacgagtgacaagctaccagctacaagtgacgaactacgagtaacagcctgtaatcagttatttattatttgatttataatcattgtatgccttccacatatcaggtactccatatccgtagatattatccgggaaaccggcacggtcaccggatcggcgcaccaactcaatcacttcttttgccgtcaacgtcgggcaagcctgccacaaacatgtcaccataccgcacatgataggtgaagaaaaagaagtaccgttagcccgtccctggttgccatccgtacggatcacatccgatccaacccctaccgcaaccacatccggcttcacacgatgatccgctgtattacctacggaagaaaaagtagccagtacagctctcttgtcaatcgctcctaccgtcaatacattatcagcatctcccggaggagtgatctttttccaagaacccgcaccggagttgccggcactgcataccagtatcattcctttatctgcaatatgggaagcctggcgcgacatcaatgcatgacgtccatccagatcgcgatatttataattcttcgatttatcatcaaatgagtagtatcccaaagatgtattgattacatccactcccacactatcggcaaattcaaccgcagccgaccaataatcctgttctaccaggtgttccgaatattcatcctcactgcgaagcaaccaaaaagaagcttcgggagccgtccccgtcattatatcaggtcggttcatacctatacaggacagtacactcatcccatggctgctttctgcaaagatatcagcctgttgatttacaaaatcctttgtaccgagaatacggatattctgcatagcagtaatcttatcgacattatggaatccggcatcaataaccgcaattgtcataccctgccctttgaagcccgcttcgtgtaatttgtcaccgttgctcatctgaatctgagtgatagcacgcccataaatgctatccggatgtatcgtcggttggttcaacacagaatcacgttccgtcgccatcgatggtttgccggcactgggagaaatccagactttctctgttgaaagcacaaaaggcagtgccgcaatacgatcaatcagagtcgtatcgttgcaggacaccgttacaaaattatcccatttccccgttaccacaatcttcactccctgtttgcggatttcatctatatatttacggcataccgggagatctgtagaatcaatcggaaggttctgcttccggcggcgctcaatcgcttttgccgacaagtatttctccggtttttttaaagaatattctgtagcagctttatcttttaaactaatgcgatacttcaatgtatcttgttgcgccgatgcccctgttgcaagcagggcaatggctaaaaaggatattaattttctcattctattattttattacttattcattttctgaaataaccagcccgataccccgttgggaagcaatgaaagaaccacctactacccgccttccaatatagaatacagccgactgaccgggtgcaatagccgatgcctctgacaggaaatgtacaaacaaccgcccatcttccagccttttcaccgtacagggaatcggcttgcttcggtaacggatgcgtaccgtcaaatcggaagccgaaaagaattcctgctcatcaataagattatcctgttcggttaacatatattctgtccgcaattgttcggcatcacccagcatcaccgtatttttctgcggatttatcttcaacacataagccggtttccctaaagctatttccagccctttccgttgtccaatggtataataaggaaaacctttatgctctcccaacttcactccttcggaactgacgaaccatccaggaccaattgcactatctatttcaggagaatgttcgcgcagaaagtcccgataatcacctttgatgaaacaaacctccatgctctctccctcttccgccttcagttgataacctttctcacgcagatattccctcacttgcaacttcgtataggtgcccagcggaaaaatgcaacgcctcagcacatcctgccccagtcgccagaggaaataagactgatctttcttatcgtcatctccggccactatatatatctttccgttcttttcttccagacggctataatgcccggtagagataaatgcgcaacctagtttgtctgcccactctgttagtatgcggaatttaaaggtaggattacacatcacgcaaggatttggagtccgcccctgacaatattcatcaataaagttctgcacaattactttgcgaaaagcctcacgttcatcagctacatggtgttcgatacccatactgccggcaagttgccgagcttccacaggttcgtctccccacacccacatggtcaatccgactatctcatacccctgttctttcaacatcaggcaagtggcagtactgtctataccgccgctcatacccaccaatactcgcttatcaggactgttcatttttagatattcattctattagcttacaaaaatagatgatttcggggagaagaaacagaaaaggcatacctttttcacatgacttcacatcattctctttgtttctccctacctttccgtacctttgcagctacggagaacttacgagttgtacaactcgcaagttctccgtagtaagcaaaaataagaatagtaataagttcacagcttagaagtcagcgtatctaaagtctatttcatggcagaccgcaacttgctcaaacgtctcaagaaaatagactgctatcgcataccattgagctattatcttcccaaagaactgttgacacccgaaattctggaagaagaaaaaggattgaaagaggaaggaattatataagatatatacatagactttaaacaaaatgagtttgccataagcattaataacttatggcaaactaaagattacatcggcacaatagtcactccccaccgatactcttggttagcaggaataagatattgtgaatcggggatagctccccaactgtcatacccgcctactcccatttgtttcatatcaatgcagacttccacaaaattctcaggcgttatatcattgatatgagtctggcgcggtctcacatttttagctgctatagtgtcatgtttcaattcttcttcgttgcggttgagccattgataatctcgcagaatggcctcttcaccgtcaaagtcctctattgaattgcgcaatgcggtaaagcccattgtatggtcagcataaattgtcagccctttaccattcttttctttcagagtaagccagcgggtatcggtacggtacccattctcctgtggccgtacatacggaaaatacatctgctcggcagtattttggaataaatctacagttaccccggcattgcgatctatgtaattctcttccggaccacgcccgaaataggtaattaagttcatatccacgaacagacggaaacgcattccaatacgtggtaccacaagttccgatcttcttttctgaatatcctcactacctaaagtaaaaggatctatttcgacctctgcatctcctgtccgattggttttctgttccacaggggtaaaagtataatcagcctttattacaccggaaggatagatacgataagtgacaatatatctgttcccggcaggtaataaatagtcaacagtcagtacggcatctttaccatccatttttacattcgcatctgcaaccttgaagtctttgctggcctgtttccacgtttgtaatcgtttaggcgactgacttccataatcattgtcattgggtgcacgccaaaagttgggttgaaaaccaaaattatccgtaaaatattcagtgccgttcattctataggaagtaaccagtccttctttcttgttaaatacaaaattgacttttgacgatgctactttcaacaattcgtcttctacactacaacttaacgccggcccatcaactttgtaaatacgcgccaatgactctattggtaaacgaatttgttctttagctatttcataacctacaggaattaacgcttcctgctgagtagtcgtcacactgaattctacaaaatattcagtacccacttttggtttcaatccactcacattcacgttcagtaatttactatcctgaggtgcaatatccaaacatactttgccgctacgaatcgttttcgcattttctttcaccttataatgaatcacatatttcttcagattcgtaaaataaaatcgattcttgacgatgaattcaccacgggccagatctatagcctcaacagctatattctgatgcacatatttcacttcgctataagccgggtgaggagtgcggtcagggttgacaatgccattacaacaaaagttaccatcgctcggcatgtttttcccaaaatctcctccataagcccagaatgaacgtcctttttcatcttgggttagaatcccctggtccacccaatcccaaatatatccaccttgcagattgggatacttataaatagctttccactgatcccaaagactaccggtagaattgcccatagcatgtgcatattcggatggaactaccggacggtcacttccattctttccgatgttttccaaccagcctgcacttggatattgcggaacgtacaggtctgagttccactcccactgagcacgttcataattcaccggacgatccataatatccttgtccgcctgcttcatccacaaataggtctgataaaaattatagccgttcccgccttcatttcccaatgaccagaacgttaaagaaggatagttcttattacgttcgaacatattaatcgtacgatacatgtgaggtttcaaccattcggggttattccccaatgtaccaccttttcgtaaatcatagcgcatgccgtgactttcgatattggcttcgtcataaacataaaaaccatattcatcacacaattcgtaaaaacgccggtcttgtggataatggcacaaacggactgtattgatattggcacgcctcatcaactcaaaatctttacgcatcaactcttcggtaagataatgcccggtttccggatcatgctcatgaacattcacacctttcaatttcaacggttgtccattaattaacaaaaccgtgtaattcttcccattagcagacttttgttctatttccttgatttcaatacgacggaaccccacattaaatggcaccacctcgcttgttttaccattctccctgacaatcatcatcaacttatacagattcggaacttctgaggtccaagtttccacatccggcaattgtcgctcaaaagtcaccgtgaccatacctttcgatttcatggacacattcttttctccggtagcaaccactctgcctgagtggccaatcaattcatatccaatagtcagatcggcattagtatccttatgattctttaaatcaagggccaaacggaaaatcccattcctgtaactgtcatctaaagtagaagttatgcggaaatcttttatggaagctttgggctgcgaataaagaaacacgtcacgctcaatcccgctcatacgccaaaagtcctgacactccagataagaaccggtactccaacgaaatattttcaatacaagtgtattttcgcctgatttcagatatctattaatcagatattctgccggattctttgagtcctcgctataccctacctcatacccgtttatatacacatagcatcccgacttagcacctgcaatatgcaaataaacgtcacgcccttcccaatcggttggcagagtgaactccttacgataaacacccaccggattttcttccggcaattgaggtggctgcggattacttgattgaaactcataacactgattagtatagatggcggttccatacccctgtatctcccaatttccaggcaccttgatactcttccatccgaccacagcagccgtagtatccacaatatcagccggaagcttcttataggaatccacataatagaatttccaaataccattcaaaagtttataatacgggctttcttcataccgcccggtcatagcctgcgcacggttggcatacgtcataaaagaagttcggggatcttccgtatttacagaagtcgtctgaatatctttccaataaggcagatgcgagtacttaaatgaacgcgaaggcactcttccacgtcctttcacaagaatagaatctcgagtaatttctactgtggagtatgcattttgcgtttccgtctctatcatgccttcctgggtaatcatcgggattcctttgtaatatccaaatgccccggcatgatgatgtcctgagaatacagcttttacacatggatatttcgaaatcgtattcaaaatttccatattgtttaaagcagtaaattcactctgcggataaagtggatgatgtgtaaagatcagtacattgttatgatttctttcacattttcccaacaagtcatccagccatttcatctgctttctgctgattcctccattccatctgtaggcttgttttcctccagtttgttttatttgctccagcatctcagccaattcctgttctttttcagttcccgttacattagcataagctgacacttcattggtgttcaacatgatgaaaacccaattttgcttcttgaacgaataatattcggaaggcatactcaactgtcgatagagaacagaattatctgtcacttctttataatcatggttacccgtaatatgataaatctcattattaagatgaacgagagaggacattatcttttttaaatcactgttctttctgtcaataatatcccccagattaatagtaaactgaacattctgctgattgaaataattgatgcaagtatccagcttctgcaatgcctgcctataaaatcgtgcattttccgaggtgtaatctgcatactgcgtatcggcaaatagtccaaatttaaggataggagaaatatcctgcgctaatgcactgcctcccagaaagaacaagcatgtaaatagtctgataaacattttcatggtaattcattttatagttataaacaaaacgaagaatctgtatacataaacttgaatgcttacagattcttctacttgttcagtatgagaatacaatcaggaaattcctgcatttataatctcattatctaaaacctattgattcaattggttatatctaagttactcaatactcctttatacaatttagcgtatacaatctttccaatgaaaggattttgtattgaaggagtagctgtatcacgataatcgccaccaattcctaacagataatcaggtgcttggtctttctttgggaaattaaatgttccggagaccttgacttctttcactttagcaccattaatatacatcctaaaagttgttttatcgtatgtaacaacagcatggtaataaatatcttttcctaattgaatgggagtctgaaaattattatttggcaatacccacttattatttgccctataataaaacgccagttggctaccgctggtaatttcataccccaatccaccgctttccattgaggagaatgggtttactcctccatcaggagaaaataggatttccatagaaaacatccctttcatagccttaccaatagcatcttctttactataaggaatatagaagaaattacttccatcaaaaacggcttcatatttctcatacgaactattccaacgtgtttctatggcattcgtcgttccttctacaacgggcaaagaagatatttcttcattcatattagtagctatccccttatctgcaaattgtacatccatgattaatttcggaatttcttcattaggaaaacctattatgagaacggtcaaatgactgtatttctttattttttcataaatgtccggttcattataatagattctataattccacgaatattgtcttacgggcctgttattaacttgcgcattctcaaaattcgttttcatagcctgataaacgtcagaatcaaaacttattccatcaacattattatcctgcatagatttcagccaaccatcacaaatttccttttgctcttgttcggtttttcctaccaaactgctccaggttgagtaaaaacttacatgccatccatcatttgcaaatgaggtcagatgcgtaatataacgactttcaaccaaaacacgatgctttatattatatttgctgtctaagcgatacaaggtttcacgaataatcgcttcattctcatccgtactcaaatccttaaaatcaagccataaaaaattaaaatcaggtttcatcacaaggagatcatccatatattcctcaaaagtttggcctgttgaagtttccaattcatgcccaatcatcaaaacaggaataccactctctctggaaacatgaatatccacttcaaaattgcttattccataatcaacagcatcctgtagcttaacaacatcattgcacttatgagctcccaaaatcattgtttgaccaaaatcgtcagtagaaagaagacttctggtcatagggccatcaacgttagtattcaataaatcagaagaacatgatgtcaatatcatcgttcctaataataaaccaaataacatctttaactttttcataaacatatatttttaattcaattattaattccaccccggattattaggtttcaaatctggattcctttcaatttccactcccggtacgggccacaacaaatctttctctgtgaatacgcgagttaccagcctccgcccggttattccgtatacatctcccggcaatacctccaaggcaataccccagcgacgaagatcgaaccaacgatgtccttctgcaataagctcaacggctctttcgtgtttgatacgtgtcaatacctcttctttagaagaagctttcagccatgcagggccactgttaatagcaggcatattggtagaagggcgttggcgcactttattaatatattctactgccgtagcttggtcattcaactcattcttgcactctgcatacattaggtacacatctgccagacggagtatcggaaagttaataggagtatgttctctattatttatctctccattcatattaccttcgggtacaaatttccggaaaatgtacgactctgttctagcaggactcaatcgaataaagccgtttgtttcattcggagctatgttccgggcaattataaactcacaagtcttaggctgattgtttacccatcccggataagtagtataaggcataatgatggtttcactcattctcgggtcacgtttcgaatacatttcaagtaacttatctttgtattcgggataagacgcaaccgttttacctccttctgcaagtaccgatacaaaggttttatccttcacgtccgtactgctgaatcctggaataacttcttcccaatcaaaaggtttgccatctttatactcgtacatgcctaccagcgtggcggacggtagcacgacattccagcaactgccatacgtagcacggctgcccatatagaaagtcattggcataccataatctttgcctacacctcctgagttctgaatagcgaaaatcatttcatcactttgatcgccttccggagtgaataacttagcataatcagcatacaaagagtaattatatcctttgcccgacggatccaatataatttcctcgaaatccttggcagcttttgcatactcttttgtatataaatatacttttccacgcaatgcataagcggctcccaatgtcacgcgtccatagtcatcttgtatcctttttacaggaagattgctattgactgcggcatccaggtcagcaagaatgaactgtacgacttgctcttcagagcttctgggcttcttcaagtcattatagtctgtactcaagttcacactttcgtcatacagtggcaatgctccataaaaattataaagttcgaaataatacaaggcacgcaaaaatctagcttctgccaaatactgggttttaagttcttcactcatactttctatcccaggtaccttctgtagcaccagattggctctcatcaccccgtcataaagcgacttccatttatcctccactaaggcatgccgatcactataagtacctaagataaccggtccaaagccctgagaatcataccccacacctatatccgacatacaatcataggcaaatctcatcccaaaagcattatcttctctaagagccgcatatactcccatcatcccttgtttggcatgggtttccgtctgccagaaaatgccatcgcttatttggtcagccggatacctatccagctcataacaactattcaagcacattgatgcaacaaatgcacctaataatattctatactttttcataaaacatcaaattaaaatgaaagattaactccaataacagcctgtctcatagaagggtagtcaacgccagacacttccggatcgagaccatcatatttagtgaacgtaaaaaaattctctaagctaccgtagattctcacacgctctataggtagagatggaaatgccgttctcgtaaaggtgtatcctaactggatattcttaattttaaggaatgatctgttctgaatccagaagtcactaatcaatgtattcctgttatcactgaattccagtagacggggatagcgggctgagccctgaatgccttcataccaacggccatctgctatcttcttgttgagctgataactgtggcgaacaaccggacgaaaataattatccagccaataagtttccactccggtgactccctgcaaaagaacagagaaatcgaaacctttataagcccctcccaagttcacaccaaaagtacacttcggagtggctccattaccgataatcgtacggtcatcatcattaatcacaccgtcaccattcaaatctttatatagtaagtctcccagttccgggcgattagaaggaaatgtttttttaggcttgcctgtacttggatcaatcggagtattatccactaactgctgcacaaagtccaaatcctgctgtgtctgcataatgtgatcaacaacatagccatactgaacatttatcgaataaccttctttaatcatatcagcattagtaatagcactttcattacccttgaacttggttaccttgttgtttataaaagtgatattaccattcacgaaataagagaaatcctttatcttatcttgccagcccaaactaatttccacacctttgttcaccactatgcctgcattttgtcttgggatagttgcattcccgttcacaagcggagccggaagatcgatcaggatatcttccgtctttttatgaaaatattcgaccgtaccggtaaaacggttatttgccaaaccgaaatccacccctacattaaagattttcgtcttttcccaagtcaggtttccattaggaatagcttgcatagctactccggtagctatattattatttaggatatagttggatgccgaatataaagattgggcatcataattaccttcaatatctgcatttttacttctcaacgcattgttacccaacacaccatacgaagcacgcagtttcagattactcaacgtcaatctttctgaaaaatctttcacgaaaggttcttcactgattctccaggcagcggaagctgaagggaaatatccccaacgattaccctccataaaacgggaagaaccatcggcgcggagattcacttcaaacagatatttgttatcccagttcaatttcagtcgactgaagtaagaatgcatcacccattccactgtattaccagaagacgaagcagctccggtagcgccatcaatcactcccagtcccggatccagtaagtcctgcttggttgtcttgaaccatttatagcggaacagttcctgactggctcccaccataacgctatagtccagtttggaaaccttattctgataagcagccgtcacatccatcagatagtcattccatttgtaatcactattcatgatgtgagttttaccaatgccagtagaagccaccacatcgttcaggaaattccattgctccagaaataccggttgagaatcatccgccttattacgatgcatatagttgaatgatccagtcagcgtaaatcctttaaaaggagtcaatgttccgtaaaaacgacttttcacataccgttcttggatatctcctgcagtattatataaacgataaataggattattggctgcattctgagcatcgtcctggtcattattgacagaacccaaccgaccatcaggagcgcgaaacaccatacccggagaagtagcggcagcgtaagtgaagacatcttccatcttattcgtaccctgctccgtaaaagatacatatccattaatattagttccgaccttcaaccaggaagttacgtcaatgtccagattaacgcgtgcttgcgtttttttataaccagaattatccatcacccccggtgaatgcaggaagccaaaagaagtataaaacttgactttatccgaaccaccgctaattgaaacactatggttgttactcaaagatgttttaaacaactcatccatcagacttgtatttggatatttcaacgcatcttttccttcattggcacgccacaatttgatggcatcatccgagtatttggttggcaagtttgaattggaaaaaccttcatttatcaattccatataatcagcatagttagacactaaatcaaaggtttttcctacagattcccaagagagatagccattgtaatcaacttttgtcttaccctgcttgccactgcgtgtagtaatcaaaatgacaccattagctgctctcgaaccataaatagctgctgatgcagcatctttcaaaaccgatagattctcaatatcctgaggttgcacgctgtttaatgaaccttctactccatcaataatgacaagtggcgctgaattattcagggttccttgaccacgaatcattatagacgccgtattatcacccggtttatttgaactggaagtaacctgcacaccggcagccatacccgccaatccctgtgatacatctgtaatcggacgactttcactcatttccgccatattgatattggcgacagagcccgtcaggtttaccttcttttcagaaccatatcctacaactacgacttcatccagtgactgcgcatcttccgtcaaagctattttcagttccgtagtattgccggtaattttaacttctttagtcagatatccaatataagaaatctgaataacactgccgacctgtacattgtcaagcgtgaaatttccatcaatatctgtaatgactccattgcttgtaccttttataattacattagcaccgataatcgattcaccctgtacatccagtactttgcctttaatcgttttttgttgtgtgatactctctactatatcagtatggagtgacgttgaactggctcttgtcgcccataatgatccggtagcaattaaagctagtgatgcccccaataccattcttttggggagagaactgcaatgtttgagttttcttttcataagtattaaaaattagttgttattaacgttgcaagtttacgccttttcactttataggcattatccaaatcgtccaaagaaacgatgaaaattatccgtggacatttttaataggattcaggaaaattttcatagatatacataccattcctatttcaatgtcacatctttgtaaaaatcatccccgacaataatcatatatattccgtacaataactacaatcctgttttatttaatagcactaatattgcagcaataatatttcaaaaaagaagcaaactattaaaagcaattattatatatgaaaacaagaattatcctcttagtcgtcttttctttctgcctcttgggagacacatttgcaaaaagaaaagtggaagaacctccaagcgacagacaacaatgggctgacctctgttataagatagcacaacccattttggaaaacatgagtaaaggtgaactgcaaaagaatatgcagttggaacttagccccacatgggatggacgtgataaacgcgtagcctacatggaggcctttggacggctaatggcaggcatctctccctggttatctctccctgcagataatacagctgaagggcagcaacgccgccaattgcaggagtgggcactacaagcatacaagaatgctgtagatccccaaagcccggattacttgttgtgggaaggaccaacccaaattctggtagacgcagcctacatcgccgaaagttttcttcgtgcaccagatgccacctggaagttgttggatgaagtcacccggcaacgttacatccaatgtttcaaaggattgcgtatcatccgtcctgcttataataactggctgttgttccgtgccatgaccgaagcttttttactctcgattggcgaggaagctgaccggtttgcacttactgtggcagtgaacaaactcaacgagtggtatttaagtgacggctggtattcagacgggccggaatttgctttagattattacaattcttatgtcattcatcccatgtatgtggaaatattagaagtttgcaaagcaaaaaaatttctgactcccgtcagcactgtactggctatttgccgtatgcaacggttcaatgttttcatcgaacgcctgatttcaccggaaggaacttatcctgccttcggacgttcagtgatatatcgcatgggagctttccagacgttggcattagctagctggaaatatggattaccagaagggctaagtaacgggcaggtgcgtagtgcactgagtacagttatgcggaatatgtttagtatagaaggaaatttcgatgataaaaatttcctcaggctgggttttgccggacaccagccagaactggctaactactacaccaataatggtagtctctatatgactgcattggtatttatgccattagctctgcctgttacccatcccttctggagtgatcaagcagcagagtggacttcccagaaagcatggagtggtaaaccattcccaatcgacggacatcactcactacgtaacgagaaataaaaagaattcaaacaaatcactaaaaataaat

SEQ ID NO: 6413 - DNA, 61750 bp, Unknown
  gut microbiota DNA sequence
ctttattacttttgttagccttatccatctgctggagctatgcgcaacaagctaaatatgtattctactttattggcgacggaatgggcgtcaaccaagtgcaaggtacagaaatctatcgggcagaactggaaggaaaaatgggaattactcctttgctatttactcagttcccctattctaccgttgcaattaccaattctgccacaaacagggttacagactcggctgccgcaggtacagcacttgccaccggccgtaagaccaaaaacagcgcaattggtgtactgaaggatcaggaaactccaattaacagtgtagctgtatgggcgaagaataagggttgccgggtgggcattgccaccagcgtcaccgtcaaccatgcaactcccggagctttttacgcacatgccgctaagcgtaccctttatcacgagatcggaaaagacttatataagaccggcttcgatttctatgccggttccgacttccgggatgcaacagacaagaacaatcccacgactgacaacttatatgagatggctggcaaaaacggatataccatcgcacgcggttataaagattatctgaaacagagcaaaaaagctgataagatgctcctactgcaaactgaagaagcctctaaacgtgaatttgtagccattccttatgctatcgaccgtaaaaagggagagatgactcttcaggatatcacccgttccgccatcaatttcttgtcgaaagatttatccaaaggctttttcctgatggtagaaggggggaaaattgactgggcctgccacagcaatgatgctgcaaccacatttcatgaaataatagacttcgataatgccatcaagatagcttatgagttttattcgcaacatccggatgaaacactgatagttgtcactgccgatcacgaaaccggaggctttgtactgggtacaggcacttatgacctgaatctgcaggtattgaaaaatcaaaaagttagcgaaaacggtttcacccgcatcgtcaacaaaatgcgcgccaagaccagcaatcaagtgagttgggaagccatccgagaggccttgaaggacaatttcggtttctgggataagatagaactaactgccgaacaggaagcccgattgaaaacagttcatgaaaaaagcctgatgcatcaggagatgaagctggaaaagagcgaatatgcacaagacgaaccgatagcatcggaagctaaacgtatcatcaatgaaatagctcttgtaggctggaccagcggaggacattcagccggttatgttccagtatttgccattggagccggagcagatctgtttcaaggccgtatagacaacacagagatacctataaaaatcgctcaggctgccggataccctatagatttctaaatgattatgaatttatcttaggcgcggattaatccgtgcctaaacctccgaatcttttcttttctgataactctgtggcgtacatccgtactgatttttgaaacaacggctgaaatacaccggcgaactgaatccacagcgatcgcttacctccgcaatcggcaaatcagaatatcggcgaagaagagttgcagcatgtttcaagcgataattgagcacaaagttattaggagtcatgcccgtcaaagctttaaatttggaatacagcaaagagcgacctataccaacttccttacacaattccggtatatcaaaatcaggatcatcaatatgtttctcaataatttgtgacgttttgcgcaacatctcctgatccagagggttgatgctggtcaaatcaatttccgacagaggtttcttacgaagctgatgttgtatcagcaatctgttccttaccagattattagctcttgccaaaagcaactgtgcattgaaaggtttgcttatatagtcatccgccccacgattcaacccctcaatactctgctccgtattgttgagcgcagtaagcagaataataggaatatggcacaaatcaacattattctttatttgcaggcacatttcaattccagtcatttcaggcatcataatatctgatataatcagattcggcttatgctcgtaggcttgagcaagcccttcttttccattatttgccaggtagacttgatagaaaggttcaaaaagctgtttcaagatttgcagcagttctttattgtcttccaccaacaacagtttcctgtcgttctcctttgccgtttcctgcgatagtgagtctacaggaacttcataaaaagaggctattttctcgcctaacaatggtcctgtagtagtcatcatatcagatacactatcaacaaactgaatatgttcgtcttcctgatagatactcatgttaagcgataaagcaattgtaaaagtgctacccttcccgacctcactttctacagaaattgccccatgatgtttttctacgatgcttttggtcaaagccaaaccgatgcccgtacctggagattgttcgtttcccttctgattcccgccttgataaaagcggtcgaaaatatgggcggaatccaaatctgagatgccactaccggtatcgcaaatctgtatcttcacattaccgttatcagtagcaattatcatacctattttccctccgtcaggggtatatttaaaggcatttgaaagcaaattaaaaaatactttctccaattgcttagcatcaaaccagcacactatctccaccggattgcactgaaaatcatagcaaatgttacgttgatgtgcaaagtcactgaacgaaagaaatatctctttcaggaatttccctatatcccgcttctctatttgcaatataaagcggttctgggtaaatcgtctgaagtccaaaagttcagaaaccaaattagtcatctgctgtgcactctgctttattttcaatatcttgttgtatacttgcggaggaagcagctgattctgcaacaaagtatcaatatggctgacaatcagtgtcaatggagtacggaattcgtgactcacattagtaaaaaataccagcttggcatgattcatttcttctatatgctgtttttcgatacgctctttttccagcgattgcgccaaagcctgttttacgaatcggtttcgggcatagtaagtgatgcccgaaacaattgtaatcatatagaatatccatgcccaccaggtggcataccaaggagtggcaatatgaatagccaattgaataggaagctgaccggaagcatacgccatacgtacataaagtgtataatcgcccggatcgaggtttgtgtatctggcctccggagtcggagtaaatgtccagactttatccaatccttccaatttatattcaaagccttgctgcgcatatttgttctgataatcagaatgggcaaacttgataagcaggttattgtcctcagtatccagcattagcctcttcgtaaaaggaagcgctgcagtgagtattttattttcaggcgacggttttatcaaccgattgttaacatgaagagtagagaaataaagagaacttatctctacctgggaagcatgaaattcttcttccgccaaaagagtaacccctttggtatctccaatatagattttattgtccgaagagacataaatcccgcaatcccgaatgatcggagccttgagatagacttctttctgtcccaagctggtaaatgactgctctttcggatcaaaaagtatgattccccagtctccggtaaggataaacttattgctggcagtctgtttcacattgtagcaataattgctgggcaatgtgctgttctccgtattataaacaatcattttcttggtattccggtcgtaaaacagcaatccgcttcctaacgtacagatatatacaccgtctttcgtcacccgtacatgcgatatgctgcccttatagcctatatcctgcagtttgagagtacttctttgagtaacatcagaaagagggacgatcacaactttgtctgcttggttagcatagaagtttccttctgcatcaatatcaaaatttatacagtaagactccggtttgaacagaaacgtaaagtgattagtcaccggatcgagttgaaaaacaccttcacgggaagaaagataaagtttaccattccacatcttgacctgatagatgaaatggcgcggagccggagtattttccaactgatgttccaggtaattataaaagcttttttcctgaaaatcataacgtgacaatcctcctaagtgggttccgatatacagatagtcattctcccggtcatagcagatactctttacattgttatgcggaatagagttcagtccccctgccgtaaattgatgtaccagttcccagttttcatttatgcaacctaaacctcctccgtcagtactgacccaaagatttccatgtttatcagccgtcatctcaccaatgtatgaataatataggttggaaagatttccggcctggtagtcataatgtacaaatccactgcggtcgggagtaaaatagttcactcctccatagaaactgccgatccagatagttccctgccgatcggtgtaaagagaaaaaatagaaggatgattcaagccccccacatactgaggtatctgtatcagtgtataggtttgcttccggacatcatacttttgtaaaccaacgaaagttccaaaccaaatattatgctcatcatcctcgacaaaggcacgtatctgcatattgcggattccagcacttccggtaagtacataaggaactttttgcaatacattatccttgagccgatacaatccttgcatgcgagtgcctatccacacttcttcgtccgaactctcgaaaatacaatatacatctatattttccagtaaaaaccgggatggctggagtgtgttttgaggaatgatatacattccttccatcatgccgacatatatattggtttcgctaattgccagcgtgtttacggtataaggaggaagtttcactttcgaccggacggtatgctgtcggcaatcgtaagcgaaaagagaatctttccgggcataccatatttcattctgatagacagccaaagcagtagtagcattgtctgtcgtatattgcttaaatgtggaggtatgaatgtcatagccaaacaaattattatcagctatgaagaaaatatcgccatcgatatcatgaacaatgaaaggtacataattaccaatccaaagcttttccccatccgcatttgtaatttcgcccttgacataagtaatttgctctccatcatacatattaatgccttcctgcgttccaaaccacattcgccccaatccatcctgggcaatactcaaaaccgaaggttgtgatagtccattttgtaagcccaaattacggaaatattcggcagttgccggaagtgtgctaaatagcaaaagaaatagagatatgattctgtttttcattagtatggtttccgcattttattatgaatgcaaaaataaggaaaaaagaatatagctcctactaaaacaaagtttattgttgaaagaactgcccccaaaagttagacacaaaactttaagagtgcagttcatatccaacttttgagggacttcatgtttctctttataaagctatacccttatttgaaaagtaactgtgccatgtgatacaaactcctgcgccaagtcaggaattcatgggccgtatcgggagaaacgaaagacgttgccttaaaaccggctgccttgaggtcattcacggctttagtcacaccatccggattctccttgcttccgcaactgatgaaaatggatgccacctgctttttatccgtgatgtcgtccggtgcataagtcccaccgctcaacagtccatagtaattgaatacttccggacggcgcagagtaatcagtttcgtctcaaagccacccatagaaagtcctgccatagcacggtgcttcttgtcggcctgtgtacggaagttactatcaatataaggtatcagttcgtctaccagcaccgtttcaaactccttagccgtgaactctttgatatgtccaaatttcacatcattcgtcataccatacgtcattacaatgatgaacggttcaatcttgccttcagcaatcagattgtccataatcagattcgcatgtccctggttggaccatgccgtttcatcttctccccatccgtgctgcaaatagagaaccggatatttcttcttatcctttccgtaagtgggcggtgtataaacaaatgcacgacgatgggtatctgtgctcttggaataaaaataaacctgttgaacatttccatgaggcacttgcttcatagcatagaaatcctcatcatgagccggaatttcaataccactttcccatcggcaagagccgtaataattcttagtacccggatcattaaacacaccaccatcgatagccaggtgataataatggaatccctcatccatggggccatctgtagtacctacccatacaccttctttatctttgcggagaactgtgccaccacgaccgcctaatccaagactgacaatgactgatttggcatcaggagcaactacacggaagcgggcgtatccttgcgaattgaccataggatattgctgtccgggctgattaagtacagaaggacggaaatcctctttcactacagcagtatcgcttgccggatcaaaatccttaatgatactatagacacgtttcgccttataattttcatcataaggcaacggatagttacgtgcaccgagccatgaatcgcggtcggaaagattccagaaagtaacattgtctaccacatccttatgtttgcgaagtactttaaacaagcgagcatactgatcttcctgaagcgtttttactacctgactgatgttgccgccgtcacgactgaagttgagctgtcctcccatctcctgattggcacgaatatccaactcagtaatatggatatgtttcactatagtagaatatttcgtcagggcagcatctacatcttccatgctcggaccatagacattgtaatgtccctgcatgccaataccatcaatgggcacaccttcttccttcatggatttcaccatattatagatgcgatcgcgttttccaggatcagcagcattatagtcattgtagaaaaggagtacattaggatcggcctcacgggcataaataaaggctttcttaataaactcgtcaccggcaatctgataaagaggggaattgcgatacggacttgggtgttctcccatgcctcgtcggccaccctgccagccaccatcggagattgcttcattcacaacgtcccacgcatatatcacgtctttgtagcgttccacgatagctgtaatgtgatgtttcatattttgaaaaagtttctctttcgacactaaatcccctttttcatctttatacatccattctcctatctgggcatgccacatcagacagtgcccgcgtaacttgattccgttgctacggcaaaaattggcaattttgtcggcattctcccaattgaactgtccgtaggcaggctcggtgggttgcggcttcatgtcgttttctgccgtaatactgttgaagtcttttttaataatggcaatctgttcaggattcgagatgttacgcatattaacagccacgccgatagagaagtaatctttataggcatccttcagccccgtttctccgctttgtgcgaatccggtatttgcgcccatggtcaatgccaatgcgcaaagggaaaatttgaataaatgtttcatctgataattatttaaaaggttttcatagtatatctattatctaccatgtatttgtacatgcatatcactcactaattggaaacggttacaaaagaatgcttttttcagaaagattcttcatatttgtgtaacacgttttttcgcttatgttacctcctttagtaaaagtgaaagaaaatggattctcaaggtcagtaccgccactgaagtaaagagaaaaagatgtttgtaatcaaaacgaaacatacatgacacaaaaatataacacacatgtctgaactttgccgccataaattaatcgactacaactaatgattatgaagaaaagcgcattcatgctgctcatcatcctgctgtcactgacagcaaacgctcagactccgtaccacaacgaggacggaaagaagattgataaagaagagttggaaacaaaggattacctgccggaaatacacggtactatccgtactaagtttgagtatcagacagaaatggctgccagtcgtttcgaagtacgcaatgcacgcatcagcattaccggaaatgtattgcccatcgtagcttataaggcggaaattgatctctccgatgaaggacaaatcaaaatgctggatgcctacgcccgtcttttcccaataaaagacctgaccgtcaccgcaggacaaatgcgagtaccatttacaatcgacgcccaccgctctccacatcagcaatatttcgctaaccgttcgtttattgcgaaacaagttggtaatgtgcgtgacgttggcgttacattgggatataaattcggcactggaatacctgtaaccttagaaggcggactctacaatggttcgggactgactaatcaaaaagaatggcacaaagaagtaaactattccgccaaagcacaattccttttcgccaaaaagctgaatctggctttaagcatacagagcatccagccacaagaggtaaggataaactcgtatgacatcggtgctttctatgaattcgggcgcttccatattgaaggagagtatttgtacaaaacttatgcagacaatgcctatgacaacgtgcatgccgtaaatagttttatcaattacgacctccccttacaaaaagtattcagcaagatgtcctttctggcacgctatgatatgatgaccagtcaaagcgatggtaaagccatcaacgaagaaaccggagccttgactaccaccgactacaaacgccaccgtataaccggaggtatcactttcagtctcagcaaggcattccgcacagatctccggctgaactacgaaaagtatttctatgccaaaaacagtattgccaaagagtctgaacaagataagattgtattggaactgatggttcggttctaacacctcacatgcacctgccaacaacaggtgcatcgtccggtaagtactctttgactctctcattcatcctacttaaaccgtttcaaatccttcttctcaaacacccattccggagtgtagagcttaccttcatcattgtcagacagctcataccaaggcgataatccacggttagcgggattcaccaatatgtgaatctgttgagccagcatatagctctgtgccagcaggaacactttctttcctgtttgagggtaaatcgccacatccactacaatgactgcgtgccccggtgatccgcctttgataaacacatctccgggttgtaaagatgtataaggaacataaacaccaggttttaaatacctccagaagcatctgtgacgtatcaaagccgtacctgctccgtacccgctccgtactttcttcgtgtagaagtacctttgaccgaagaatgtacggagcaagtacagccctgatacggttcgggtacggtgcagatacaaaaaagacacatcataacgaaagtatgaattgtataaaaaagagattaacagtcatccttttcatgaccaacaaataatacaaattcaattattttattgaatatacattatctcttcctaaacttttccatacaaaacttgattatttacacgaaaaatcgtatatttgagtaaataactcagagcttatggcaaatccgattcttcctggtatatcagaagctgaacaagaactgttgtacaagaaactaaatgaatacaatcagggaagaacctcttacaaagaggcaggtgcttatctggttgtactgccccgtccggaatctccccgttactccttatgggtgtattctcctcttcccgaacgccagtccattttttacgtccaggacctttctacagacatccatgaaagtctgcgagcggcaagcagcctatgttattattctccacgttgcattctgttggtagaatataatgccaaacgcatgcagagtaagggagacgacattatctctttcggaaagtatcatggacatttcctgcacgaaatcttccgtatcgatccggcatatgtgagttggattgcttataagtttactccacgtatacctaaacaggaacgcttcgtacaaatagcacaggtgtatcattccgtccatctggatattcagaagcggcaggcacatcagaaatattctaccagccgttttctggggaaagaaggagataaagtgaaagaactgacactgaaagtactccgtgtccggctggaagacgatccttacaaaaccaccgtgaaaggaacgactccttatttctatgtccggcagatactgactttggaagatcctatcggcaatctcgtcactttccggaccaactcgcgtacggcaagccgggaatcgtgccaagtgcccgctacggaacatgccttcgagcccggagaatcggtatatattgcctcggcacgcatctcttgtacctttacttcgggaaacaaacaatacacccgcctcaattatgtcaagtttaaataaacttaaaagatagagcggtattattcctattaaaaacattcgtcctttctttgtcggcagaaaagggggtgctataaaaatagctgagattatacccaatgaacctgatacggttagtaccgtcgaagggaattttctttctatattctactattcgtttatactactatccctttctgtaagtataatttctaaattcagagtttgaatgtttgacgtacaattcattacgcattttacggcatccatttcttattcggactccgcacgcatagcccttgaagggggatgccgctgggttcagcttcggatgaaggatgcttcttcagaagagctgaaagccacagtcatgcaagtgcaggaactctgccgtcaatacggagccacgttcatcattgatgaccacgtggaactggtgaaacagattggcgcggacggtgtccacttaggaaaactggatatgccgataaaagaagcaagggaaaggctgggcaaagatttcattattggcggaacagccaacacgttcgaggacatccagcaacatgccgctgatggcgccgactacatcggttgcggtcctttccgcttcacaactaccaaacaaaagttatcacccattctggggctggacggttatcattccatcctgacgcaaatgcgcgaagaaggaataacaattcctgtcgttgccatcggtggaatcacacgtgaggacatcccatccctgaaagcatcaggactgagcggaatagcattgagcggcggtattctaaaagctgaaaatccggtacgtgaaatggaaacaattatacgactgacccaatagaaatcaattagtgaaccatggaagataaaacaaaaattacttatcccgaatccgagaaagtctatatgcaggggcaactccatccttatctgaaagttgggatgcgaaaagtgaaccttacccctaccgtagtagtggaaaacgggaaaaaagttatgacggagaatgcgcccgtctacatatatgatacaagcggcgcatacagtgatccggaacagaaggtagatttaaagaaaggtttgccacgcctccgcgaaccgtggatacaggaacgggatgtagaacggttgacggaaatcagctccgaatatggaaagatgcgtctggcagacaaaagtcttgactccctgcgttttgatcatatcactttgccttatcgtgccaaagcaggcaagcagattacgcagatgtactatgccaaacagggtatcgtaacaccggaaatggagtatgtagccatccgtgagaatatgaactgccaacagttgggtatagaaacttacatcacaccggagtttgtgcgtgatgaaattgcggcaggacgtgctgccttacccgccaacatcaaccatcccgaagctgaacctatgattatcggttcaaagttcctcgtaaagattaatacgaatatcggaaattcagctacctcttccacgattgaagaagaagtggaaaaggccgtctggagttgtaaatggggtggagatacgctgatggacttatctacaggagaaaatattcacgagacacgggaatggattatccggaattgtcctgttccggtaggtactgttcccatgtatcaggcaatggagaaagtacacggaaaggcggaaaaccttacctgggaactatttaaagatacactgatcgaacaatgtgagcaaggggtagattattttacaatccactgtggtatccgcctgaaaaatattcattatgccaatgaccgcctttgcggaatggtgagccggggaggaagcattatctcccaatggtgtaaaatccatcagaaagagagtttcctgtatgagcatttcgatgatatatgcgatatatgcgcacaatatgatgtggcactttcattaggtgatggtttgcgtccgggagctatccgtgatgcgaacgaccgggcacagtttgcggaactggatacgatgggagaactggtagaacgcgcctgggcaaaaaatgtacaggcattcatcgaaggtccgggacacgtacccatgcataagatcagggaaaatatggaccggcagattgagaaatgccacggagcaccgttctatactctcggtccgctggttacagatattgcaccgggatatgatcacatcacaagtgccattggcgcagcacaaatcggttggtacggaacagcgatgctttgctatgtgacacccaaagaacatcttgcattaccgcagaaagaagatgtacgcataggagtggtaacttacaaaattgccgcacacgccgcagaccttgccaaaggccatccgggtgccgaagtacgtgacgatgccttaagcaaagcccgctatgaattccgctggaaagaccagttcaatctgagtctcgatccggaacgcgccttgcaatattacaaggaagccaaccacctgaacgggaagtattgcaccatgtgcgggcccaacttctgtgccatgcgcatcagccaacgactgaaagattgtgattatgatgcagaaatagaaaatacagagaacgaataactttttaaacttataagaaaatgattgaaacaaaagtatccaaaggtatcatcagtacctattttgaaaaattagagagaaatcttgatctggacgttgccattgtaggtggtggtccgtcgggcatagtagccgcttattatctggcaaaggccggattgaaagtagcgcagttcgaccgtaagcttgctcccggcggcggtatgtggggcggtgccatgatgttcaaccagattgtgattcaggaagaagcgattgacattgtaaaggaattcaatatcaaccacgagaaatatgaggacggcttatatgtgatggactctgtagagagtacctctgcattgctttatcatgccgtacatgccggagccaccgtattcaactgctattccgtagaagatgttatcttcaagaataatacggtaagcggagtagtggtaaactggactcctgtattgcgcgaaggtatgcacgtggacccgctgaacatccttgcaaagatagtaatagacggaacaggccatgacagcgaaatagccgctaccgtagcccgcaagaatggcagtcgcctggctaccgaaaccggtggtgtaattggcgaacgttcactggatgtaattgcaggagaggaagaggttgtaaacggtacgaaggaaatctatccgggactttacgtttgcggtatggctgcttccgccgtttcgggtactccgcgtatgggaccgatctttggaggaatgttgatgtccggtaaaaaggtagctgaggaaattatagcgaagctgaagaagtaatctctcagaagccactatttatcaaggtggacaatttttcaccacagattacacagattttcacagataaaaagaaaaaggaattgattctcaatatttgtaatctgtgaaaatctgtgtaatctgtggtgatcttcggcatactcttgtatagacttatcctgcaatctttttcagcctcctgaaatgagcaagcaactcttcggcatctttccacgtatggtaacggttccagatatctcctaataaagctgcaccgccaaagccaagagactttatttccgcaaggttcacctcacttattccgcctaaggctactaccttttcatggatgactccgctttcctgtgcttgtttcaactcatcctttgaatatcccgaacgatatccctgtttggaaatgctatcgtaaacaggactcataagcacataattgaacagggagactgtagtttccacttcttccaagctatgacaggcacgactcagtattccctcataatttgcaggtgcctccggatgacgggaattcaagtgaattccgcctaaaagatacttatcttttaaagagaagaaatcatgaatgacaatccgggttctatattccggagcaataccttgcagcagattttctaccgcatgaacatccgcatccggtttgcgtacatgcagcaagtccagtccggctttaaataattcagtgacgatgcgtgcttcatccggaataaaatccggagaggtgataataattagtttcatttttctatccttcatttaccggaggcgtcggaaacgggaaatgccacaaaggaccattcccctgccctatacgtaaattcttcccggcttcaatagcacaggaaatgtattctttggcctgttccactgcttcatacaaggatgatccttgcgccagaaaagtggcaatggcggatgaaagcgtacatcccgtaccgtgcaggttggcagaatgaatacgcctgccaccaaaaatatttagttcttttccgtcataaagtacatcgcacatttcatgaccggtcagatgacctcctttaataagaaaagcacagtgatatttttcgaataaccggcatgcggcatcctccatttcatcaatcgtctgaaccggttgttgcaacaatacttctgtttcgtgcagattaggagttacgagagttactttcggaatcaacttagtacgaatggcttccaatgcctcatccgtcatcagactatgcccgctggtagaaaccatcaccggatcgaaaaccactttccggggagaatagcgacgcagtatccgtactatttcatagataatctctacgtttccagtcatacctattttaatggcatccggttgcaagtcttccatcaccgcctgcatctgttggcctaccaactctgccgcaacaggatgaacagcttgcacacccaatgtattctgcactgtaatggctgtgatagcagtagctgcataacctccaagtgccgagatagcttttatatctgcctgtatgcccgcgccaccggaactgtcggaaccggcaacggaaaggacgattgctttcttatccataagccaaattacaactttataacattccctgtacggctactctcccatgccgcctcaatcaggcggataacgccaagcactccgcacgcatcactttgcaacaccgctccattccggatatgctgataaatattctcataaaaagcagcgtagtttccgggaagggtaggataaggtttccgcaccacattaccatctgtttccgtatggagtattccccattgggattcatcctcttctccccaatgcggagtatccggcaacacacctttagtcagatccgcctcttgaggatcaagaccatacttcacataagagccttccgttccatgaagaacaaagcgaggctcattctcacacatcaaatagctggctttcaaggtgattttcacttccggcatccgggcaggtttcatcagatggatgataaaataatcatctactttaccaccggtacgtaaagttgcaatatcagcaaatacagcttcgggcataccaaatagttgaacagcctggtcgatgacatgggcacccagattataagtcagaccaccaccattctcgccggtttctttccaggtattcggcttgatgaaattccggtagcggggaaaggttgattcaaattcgaccagacggcccaacaatccctgagccaatatttctttcacggtcaggaaatcacaatcccaacgacgattctggtaaacacttaaggtcagttctttttccgcagcaagggctacgagttcttcaccttcctctacagtagtggtgaaaggtttttcaacgataacatgttttccggcttcgagagcacgacgggcatattcgtaatgggaactgtcaggggtattcactaccactaactccagttcttccatccctatcaactcatcaaaactacgcacaatacgggattgcggatacttcgcccgtgacaattctttactacgctcagtgacagcagtcaactcaaaatgaggatttgtggaaataaaaggagcatgaaatacttgtcccgacattccaaaggcagccaatccggttcttatcttatccatatctttcattttttctttcggcaaaactaatgattttatcgctgatgtaccacacatgaaggaataaggttttacgaagaaagataatttaatccttcggaagctcctttttcagtacaatgagagcctgattcatctccaccgccttgttccatatctgctgcaactgtccataatattcggaaggcacgaccgaggaagacaaaatgaatgtataattcacaatgacgttgttcctgtttctttggattgcatatttgcattgcagcttgccgtcttcagtctttatcacttgcgtgtgggggatttcttccacctcatagccttcaggaagcgtcagcgcacaagagagagtgacttttgacggataagggaactctaccggaaggatccgctccgattgtataaacgggttctttgtcaattgcggaaaaagaatcggattaatatatatatggtcatccgacttttccgcctcaagtacaaaatcaaattcttcctgtatagttgtgaagttatcttccttatctgttagcttcagattagtaaccgtcagtttttctttcatcaattcctgtttattcacaagagagtctttcgcctggttctctttccggtgttctaaagcttgatgtcccttcagaatagtagtctgacgtccggttatcagattctcccgggcattagcactgattttcatgaaaacttgattggtagatatttcctgcaagttcacccacttttgtttttccggtatatcggcagaaagcatacgtgctttggtcaccgacaattcaatgggcagcacattgagagccggtacctccatcgaactatccagataaacatactttcctcttgcctcatcataaatagccactacgaaagtgttcaatttctgaagagagggaaagttagacggcaacattcccccggaacgccggctcataaccacaggataggccttgatgccgtagcttctgagcatactgataaaaataaaattcaaatcggcattactgcctgttccggctttaagtaccttctccagattctcactgtaaagtttatactctccattccaagacaacttttgcttcagcaataggaaaacacctataactttttgattaaaagtcaaattgcccgattggttgagttgccgaatctcttcaaggtacggacttttccacaacaagtgtttaccaaagccttcgttctcctcccgggtcagttgtttatccacatcctcccagttctggctgtaaggtttgtagccttcatccggataattggttccttgcaaatcgaaactaacctgtattctataatcttccggacaccagcaaaaagattcatcctggcggatggcaggcagattttgggaagtaaacgtaagcttctgtgccgaaatagtaaagtcatgcgacactctcgctacgccacttgttgtatgttgtgcggcttgtaccgaacctttctcttccagaacatctatatattggcgccctctaaactctatgttatatacaaatacatgaggaatagttatttcgtattgattgtatactacgggaatttcttcctgcatcatccagttgtctatgtgtacggaatagtcggaagtcattttatagtgatattcgataactgtcccgaccttgacagcaggcaatgaaaacttcagtactctgtgataggtattcagcctctcatcggaaacgagctcccgcttcagacgggttttaacaagtttcccattttccagattataggaacatccgtccagatcggagatgcggtctttctccttatctctgtcagaaggcgcataataaggaatggctacatcagcttgtgaaacaccttgcggcttcaatatcttgatgcgtacccaatgttccgtatacaattcaaatttatcattataagtaaaaccgctcttgcctttatgaaacagataaactgccactgcggtagtgtcaggagcgtatgtctccagtgatagttcctccttggagggtttgccatacttcaggtcaggcttaattacagtagtagcttgttgtgaaaaagccatcgggaagcataaagaaataagcatgcagaaaataaatagcccgtgtttcatgattcgactttttaagattaccaattgtacaaaaataataattaatacaatacagcggcgttgatcttacaaaaaaaacaggtatttttgccacacacattatttatattgaataccatgaagaaattagcttttttagcctgtctactccccattctatgggcggcatgtagcagcactgcaactacccgcaaagaatccggtgaatgggcaaaagttcccgaaatcctgaagaacattgttccgcctacttttccggacagtatatatgacgtaactgcctacggggcaaaaagcgatacgagttttgacagccgacctgccatattggaagccatcaatcaatgtaatacaaatggtggcggcaccgttctcatccctgccggaaactatttcagcaaaggcaccatcttgctgaaaagcaatgtaaacctgcacgttgcagatggcgcacgtctggaattctcgaccgtggcctctgactatctccccatggtattgaccaaatgggaaggaacggaatgtttcaactactcccctttcatctatgcctaccagtgcaccaatgtcgccctaaccggcaaaggcacgattgacggcaacggagctgtaactttcaatggttggcacgccctgcaaggtcctgccctggatcgcttgcgccagatgggtatcgattccatcccggtatacgaacgcgtattcggagagggatattacctgcgcccatgcatgatacaattctacggctgcaagaatgtacttgtagaagatgtacagatctacgattctccgttctggattatccatcctgtattctgcgacaatgtcaccgtacgcaatgtatatatagacagtaacaactacaacaacgatggttgtgatccggaatcaagcacgaacgtactgattgagaacatggacttcaatgtgggagatgatggtatcgccataaaatcaggacgcgaccaggatggctggcgcatcggccaagccacggaaaatgtgattatccgtaactgccacttcgcccggtgggccattaccatcggtagtgaaatgtccggtggcgtacggaacatctttatcgaggattgcaagatagacagttgccgcaacggtatttacttcaaatcaaatctggaccgtggcggttactttgaaaatctaaacatgcgccggatagaagcggacgtctgcctgtggggagtgattaatttccgtacgaactaccacggataccgcggtggaaatcatccgacactcttccgcaatatctgcatagaagatgtaacttgcaaccgcgtggacagcgtagcactcatggcaaacggattaccagaagctaaactttataatatcaccctgcggaacataaaggtaaaacaggcaccgaaagccatacagatggacaatgtagtgaacttaacgctcgacaacgtagaggtgaacggtaagcggattacttccgctgaacaaactgattaacagcagaaaggattatatccccatgtccggaacatggggatatttcatttattcttattcaacttaataaactcactcggagtaattccaaactgcttcatgaaacatgaggtaaaatatgaagtggtagaaaatcctaaactctcagcaacttcattgatccgaagatcacctttagccaacatttcagcagctttctttaatcggcataaacggataaagtcattaggcgccaaagaagtgatagctttcacttttctataaagtgtcgatacgctcatattcatatattcagccaggctttcaaccgataaacaggaatcagacaaattattcatcacataatcattcatctttccgataaatttctcatctatactgttagacgcaacacttataagatgcgcatgaggtgaacggacaaatgtagaacggataagctctctgttagctaaaagatttgaaacctgagccagtaaatgctctgtagagaacggcttctctatataagcatcagctttcgattccaatacatcaatatgcgcctgtaaagaaactttagctgttaatacaataataggaatatgacaatattttatatttgttttgacagacttacacaattcaattccatccatcaccggcatcatcaaatcactaataatcagcgatactacatgactttccaatatttccaatgcttgtttcccattatcggcaaccaacacattatattgtggggttagttcttcacaaacaaactgacgcaattccacttcatcatcaaccaccagtacattatacatactcttatgcatatagtctttatttccttctacagaagaggtttccttataaaaaggagaatgttccggctctgcaacatcatgctgttccaagggtaaatcaagcacaaaggaattcatctcagtaatggaattatcaagataaaaagcgccattatgcatctcggccagtgatttagctaaaggtaaccctaatccggaaccttttgccggtactcttgcatcttctccaaaatactggaaaaaaggtttaaagatgtctgttgtcacatctttagggattctttctccatcattgttcaccctaatccgaacaatagaattgtcttctttctgtatactcactaaagatacctcaacaatatggtcacagaatttaatcgcattgttcaacatattacttaatatctttatcaaagcctctttatcagctattatttcacatccctcattaggcatggaaaaatgaaaatcaatgcatctggtttgagctatcggagtaaaacggctataagtctcttcaagtagttgtttgatatccagttttacaaaactcatcaagaaggtagaagattctatctttctgaaatcaagtagttgatttaccagatcaagcaaacgctgagtattcttactcataacagttatattttcattctcagcaagtttcttttctcccgactttattatacggtttagtgaccccattatcaatgtcaaaggggttcttatttcatgagtaatatttgtaaagaaactaatcttagcctgaagtatttccttatacttctcgttctgtaacatttctatctgatgtcgttccttctctttgagttttcttctgtatctgatgaaaaaccaagtaaatgtagtaaagataataagaacatacaagaaatacgcaaacggcatactccagaagggaggttttacaatgatagccaatgaagaagcttcgccagtccatgttccgctttctcttgaagcttgtacacgaagggtgtatttccccggtggtaactttgtataatacaatttcttaggcccttgactaacaatccattcatgatctaacccttcaagcttatatctataccatacatcctgagaaatagaataagtaggtatagcaaaatcaatactaaaagtagactgatcataacgcaatgttattttatctgtaaaaataatcgattgtttcaaaggagaatccggttgataggtctctatttctttattaaataactgaaaacctgtaaagaatacttttaatggttctgatgcctttataaaattctcaggcgagaaagctatcattcctttcaatgagccaaaataaatattaccgattcgatcctgatagccggaattataattaaattgatctatcggtaatccattcaacgttgtaaacctgcttaaagctttctgttcaggatcataatgcaataaaccattcgaagtagttacccataacattcccgtggcatcctctataatctgataaataatttgtccggaataatccagtttagataaagtctgagtaaatgtcccatctgtcctgtcataaagaaaaagcccgtttccttcagtaccaatccataaacgcttccgggaatcttcgaagatagtagtgatatagttacttatgaatggcattgtcttaactgttatcttctcatgtatcccattatatttgaatgtaaacaatcctctccccattgtaacaacccataaagtatgatctaaatcctcataaatggaatgtacaagtccccagtccagttgcggaacaatttcaaatctattctttgactctacatagcggtataaccctcccattgtaccaaccaatatttcattaaaagaagtcttcctgaaacaaacgattccattaaccaataatccggaagcagtattctcactacagaaatgattgattatattttgcgacttcaaatcaaacaggtagataccactatcaaaagttccaatccatatcatattcttatcaaccagcaagcattgtatatttttggatatgggacgtccatcccatttcagattagtcaacgccctgaatacttttgtcttggtatcaaaatagcataaccctccatcttcagttcctacccataaatttccttccacatccggatgaatttcacgaataacatttgcctttatacttcctttttcatctttcggcagatacttatcaaacaatgtattattattcgacaagtaattcacaccaccaaaaaaagtccctacccaaataccttcttcacggtctttcaacaacatatgaacagcattatcagaaagcgaataagcatcattatacgacttctgtaaatgatcaataaatcccaagtccaattgatagatatgaatgcctgactctgtaccaaaccagaattcatctttattccgttgaatagccgtatggatataaataggattattctgagaatcattgctaaacaagactttaacttcaccattgttaggggaaaaacgtctggccccaatacgatctgtagtcacaaccaagtctccattactacattccagaatccgataaagtagaatatgttttgttttctcttcttttgtcaatataggataaaacgaaaactccatacgttgagggttaaacaaatagatattaccatccagacctaatacccatacactaccggactgagtcactgttatccctgtaggcacaaagaaatcagatgcagaaaaaaacttatgatttccatttttcacatccaagcaatatatgcccttggaatttataacccaaaggtttccctgcttgtcaaaaactaaattatctattaaaccttcaattgtcaggtcagcactgacaaacggagcaaaagtatccttctccggattgtaaatacataaaccatctgaagttcctaaccaaagagaaccatccggtgcttccgccagagcaagaactgtattgttgggaagagaattgggctgttccggatcggccacatagttcttaaactttgtaccatcgaaccgattcagaccaactttcgtgccaaaccacaggaaacctctacgatcctgaactgcacagaaaacagtttgctgagaaagcccattctctttgtcatatcgcttaaaataatagttttcggcaaaaaggttagttactaccaaagagagaaaaattagtaataacgctatttcttttttctttatgagcataactatacaatatgattcattgaaagtgatctacaaatataataaaaacaggctactccctcagcaacagatggttcttttccgatcatatatcaaaccaaagccattctatctatggagaggttttccacctactccatagattgtcaatctactacgaagttcaggtaaactcatatcaatctgagatagatctttttttccgaaagcttcttccagattaacaatcggctcaatgttcgcaatgcttgcccatggaagccacaaggatacagacctgaaagctaaatcagcaacattagttgcttccggcataaatgcacgatatttataattcattctaccgtcaaagtctgtattcagtttcgtattattctgtaagagttttgccatatgtaaatagagttcatttccggttttgatatacaatttatacatttcataaaacatataagctataaaattatcagcacccgaatgtcctgtagcaataatagaaaaccctgtaatgcctcctttaacaaaaggattctttttggcatccattgcatctcggttaggaatggcaaaatcataacaatatgtccagctcatagcacaatttgcagcatgttctgccgctttcagatatttcagatcccctgtcagttcatgtatggcattgaatccgtagagagcaaatatagctgcctctttatcaacagtattaggattgtccggagttccacctacatatttccctaatttcaaatacagttcattgtaagagaaatcagcagctttgattgcagcttctttatatttaggctctccagtatgttcaaacatcttcaccaggaatctaatagccaccggagtattcaatttagaagtaccatgagtattcctatcccctcccgtctcaacatcaccattcgtcttatatgctctataaaaagagccgtcttcattttgtttcttcaccaaattagaagcaacccttttaagagcttgattccacgcttcctgaggctcattgtgagccacagaaatacgataggcatccagtaatccctccatgccatccacaaaacatcgaagaaaacttggatattcccgcctttgtccggctgtggcattatcagcaggatcccaccatacagtggggaaataagttttcatgatggcatcagaaacccagaaatcaaccattgatttacccttttccctagtctctgaatcatgatgatccagaccataacgatacatgtgatatccaacggctatttgttgtcccacaaaacccatttgaaaagatatcccttcagtgtttgtaccatcaggtaaatcaagtgaccatggtaaacctgccgcttttatgtttccctttccaaacatccgatattcagctttaaaaagttctatattctgccggtaaatttcatccatattcatatccacgattgtcggttcttccgttttatagcccataccaaacgcatacatcatagcttcattataattatcctttttatcaggaatcaaggctacagaatagctatgtatattaccctctttcaccgaatggtatcttttggaccatatagtctttgcatccctttttcttccggcaacttcatacgttctgggcccttctgcacacggataatgaaaatccaccgacaatgaaggatatatagagtaacctattgaaccatattgtaacgcatcattcacctcatagaatgttccaccaccaggattttgtccgacatctatcctaggattataatgcatgagggttaaagtagttcctgttatcttttcccgaagcatagccagcggcagtcccgtacgcgtttcttttacatacatccggtcagtattcaggtcagcagcaaccgcatcctctcttacttcagaggtatttctatataaaacagaaggaataaaatactcgaaatcattgttatcagacgaacgaagcccggtttgaaatgaaattgtactggcaaatccgacatcctctgcccgcgcttctttcaccttcacatctctatatatcccaaatactccatcctttaataaagtatacttatcttctacaataaatacagaccctttttccgtgttgacactggctgtagcacaaaagccatatttctttcttattacctgatgataaggttgcttataatcagtttcgatatattcccccgttggtaaagtatcacttccccggacagtgatccatgcaggcagttcttggcttcctactatctctttaccattctgtaaaaatacagcaaaaccttcatccccttctcttagtataagggaataatcaccatttttaatgattttctctgtatcactttcttctatacattcctgagaaatagttttcaaatcacttttcccgataatcgcatgataatggcaggatatgcccaatagacaaaatcctgatatcatcagcatccggaatacaacctttattattcttctatctttttccataagttcctgaattaatatattattccctgatgtgcagcatataccgcatctttctgtctcaatgtagataaagattctgttcctatacgttctatatccatatctccataagcatcccgtatcttgaacaatggatctaaagcagatgcagtaacccagggtaaccacaaattaaccccatctccccaacgggtgaccaatcttaaggcttccgtctgcaatcctcgataagcataccccaacgtaccatcataatccatagtctgtttcgtatttttctccaatagccgggcaatatgcaagaaatactcatcgcctgtcaaaacatagagtctcaagtattcaaaagaattatatgaaagcccacaatctgctccggaatgtccggtggaaatgattgtaattccaacagtagtctttttgctatcccaagccatgaggttatttcctccggccgccggaatattccaagcatacatataggttacagtgtaataagccgcttgggatgctccttcaagccatttttcatcttcggttaaatcgtacaaacaaaggaaagcctcaataatcttttgcccggactcacggtcttttacatacggattatcaattacacttcccacatatttatagggttcatgaatctcgcgatagcaaaattctccggctttaacagcagctgtcttatagcattcttccttagtaactatatacatgtaagtaagaaaacggatcagattggaagtaagtagtttacccgaatctatagaagttccgccattgtcaaaagctttgtcccagctaccgtcggcatattgtcggctcaccatccagtcagctgaccgccggcaataatccaaccaattagttttacttccgggaaaatgtttttctgcatgggaccatgctaaaatcatagcctccaatccaccttgcatattacgtaagtcattatgattacgaaagaaattccaaggagatatatcccaccatatccgtggcatcccatcaggcgccgaactgttctccgcccagaaatcaagtatctgctctcccttatccgtatagatggaattattggtttccaaacctttccggtaaagataatatgcgcaaggaatctgcatccccacaaatcccatagaataggaaatctcattcacttctccacttggaagatatacggagaaagggaaaccgggggcattattatccttcagccaataatgatctaaaacctccagactgtaattcattacatcttcgttatccacctccaatacttcaggattgtacagattgaacgtcgctttccagtgttcctcaagcgcttttggaaaagctgcttcttttttaaattgcaattccagcatataggcatgctctacaccaacccgtacaggatgactccgacgcgcccaccgtctttcacgacttccacctccatctgcataagtatgctcaccttcagaaccaggaaaacaatatactaatgcaggactttggcttgccaaataaaaacccaatgagccgaaatgcatatccgcatttaccagatgatccattcccacctcttccttaaaagtaaccggattgagattatagtctgccaaagcaacagatacctccgaacttttatttctgaacatggccagaggtaatcccatacgttcctcacgagccagtatccaatcatgagtaaaatctgctcctatggaggattcacttaaattagattcatctttatatatgagagaaggtatgaaatattcgcatccggtaatagcttgctgtacttcattccgcaccataaagtaagagttgaacgcatgatccttaccggaagctttcatgacatctactactctcgacaagcgtaatctatcttcattctccgccacggtatatatatccgtcacttcaaaatcagaaccggagtctgtgattatcctagctttacaaaccaatcgatcattttgtttttctgcttcctgatacgctgccctgtaccatttagacgactgtacacctactgggaatacctctaaacacacaatcgcttcatcgacaggtatatatttctgcccccatcctgctattgttactgtataacctgtattctctttccaggcgagtataagttccggattaccggaacctatactaatattttcattatgaaccgggcctggaggctcctctgttaaatcatcattatctgaacatcctgcattcagcatcaggcaaaaaacaactgctataattttcattattttattgtccatattctaaattgcatagatagtaaatgctgtaaatgataatgcattcgtttctccacccgggaaattgactacatatcccatactaacttccgtttcttgttccaaagttatattaagtggcatggaaacacgacttgcaggatctccacaatcactctgggctataatactcggacttttccattcaattcctttaccttttgctacaacaaagaaagcacggtcttttccaccttcattttcaatatcccaccaattgaaaccacgggtagctataaacaggtattttcctgcaggcaaagtgaatgtctgataaacagctccctgtaaggcagtaggattcccccagttctcagcacacataaacaagcggtcactccaaccgtcatacattgtatactgtacggctgcgttagatgttaaccagtctgaaaggatgccacgacgagaatccgggaaataggaaacaacattaaacggctgtttataattctttaaatattgattcgtaatatcatcaaactcttccggaattccagtaatttctttcgtttctgagaaaagataataatcaggaatgttctccaactcaagtgccacacgataaaaagcattgtccctgtaattctctttatagccggtacgatattttatcgcatctatagacaccgtcagttctccgtcaccgctaaaattagcttccacttcctgttcggcaacaaccggacttttactgtttacaaagtggttaatacctaaataaatacgagctttcactatacgtggagcaggcttacttgttccggaaactttcttcaccttaaacttggcaacaatgttaatgccttctaattttgcatccaaatcagatatctcataataaggtgtgatgtgaaaatcctgacgtacatcctttttcagatcataataaatagaatcatatcctactgtcccagctggaaactcatttatttcgaacggatactttacattccctaaagttagtttatattctccggaatgtagcaattgctggtatgaaccatcagccaaagtgtgcattttcgttccccagtctaccttaccaaacccttcctggaaaaagagaaatatatcacgcgcatcattaccatcacatagaaatggtttatcattatagagtaattgcccagagaaagttacgctcggcgcatcataattatcatactcacaagcagtaaacaatatcgtagccaataataatataataatcttcttcataatcaatttactattaataggttttagtgtttcggattcttctcaatatacggattaccttctgtcatcggatattctgcataatacatatcttgtccgaatcggataggtaatcccttctcattatcattaccacgatgctcaatatacacccttcggaaaagccactttccatcttccggctgtcccggagcatacactttataaggccacaagccagtcatccgggctgtcgaagtattccagtcacccgaccatatctgatcagcaatacgccacctcttcagatcataaaaacgatgatcctcaaaagccaactctatcttacgctcattctgcaaaagcgcaagtgtcaaatccgaactttcaatacggaaagcagtacctccggcacgttctcttacttcattcagacaatcagaagacaactgtaatgtattgctgcctttataattagcaacaccaagttgattaagataataagcagcctcagccgcattaagcagaatttctccatatcggaaaatgatatacggtactgcgctctttcctgatgcttcggaaccagtaaccggatctatatatttacgcaacaagaaacctgtatggctggtataataactattacggataggaccgtcaatgctggtcagttgctgcccattataaaagtttttgtccggatcgtatacattctcgattaaatccagcattttcaaatcataaccggaagcagttttcacagccagccctgcctgtaattgaatctcttttcctctgaaatccgcaccaggcagaattacggttccccacaaacgcggatcacgtccttcgaaaatacccatcggagaatcataaagaacatagttataagcggaagtttcatttcccattgattcgataatctcattacccacataagcattcaactgtgatgaaccggaatttatagtttcaaaactctcgaccaagtttaatgtcgggttcacatggccaccaaaattagcagttgaacgttgagaacgaggaatattccacactgtaaaattgtttgggaaatcagtacttccatcataatcacgaatgagaataagttccgggttattcgtcttggatacaaacacattattaaagttctcacccagactgcttccagtaccttttagcaaagaataccgtcctatttcctttagttccagataggcatcaatacaactttgcagatattctgttgctttattcttagagattccgactgctccgcttgtcaaggtcaatcccattgttttacttttatcctcattgtaggctaaagtacctgcatataacattgcacgtgacttgagtgccaatgcagaagccttagtggcacgtgtgagtaagctacttccctgcggagcaatatcaagcgcctctttcacttcatccatttctgtcgcaacaaactcatatacagctgcctctgtatcacggggtttagcatattctatcggagtagtactataatcgtacacttctgtaattaaaggtacacctcccagatttttcaccatattgaagtaagtaaatgctcttagaaaacgtgcttcaccaagaaaataagcacgttgattttcaggcaaatgtgaggttttctctgacaaattcctgatatgaatattgatatcccttatcagattataatcatagtaattacggtaggtacgaccaacattactcgaaaattgccaataataactattactggtagcctcatcccacctgcatatatcataagattcattatccgaagcaaagttctggtccaacttgatgcgctcgtataaatttgcagcaatactactgatactggcaacagatgaatatgcttgatcctcggataattctttgggatcattctgactcaaccagtcttcacacgaggtaaagctcaacaaagcgacacatgcatatactaatatttttgttttcatatttatgctcttcttttaaaatttaacgttaacacctaatgtcaataccttatgttgcggatagtcctgaccattcactgttgaaatttcaggatcaaaaccataatcatgcaacgaactcagacagaaaagattggttccttggaaatatatgcggcattgttccatacctacctttcttatccagtttttgggtaaagaatagccaactacaagattacggagacgcaggtaattaacttctctcgtatagaaactgttccaccaacgccccgaatgactttcctgtccacgcaaggccgggaatttccctggaatccaaggagacttcggatcaaaaatatcttcatgcctccatacgtcaatattgttatagtaatatccattcacgctgcgcgttacaccccacttcaaatcccagtcagcaacaaatgtatttttaaaaccaccggcaaagtcagcagccacatcaaatcctttccattcaaagcctaaattaatgcccattgaaatcaacggattcttattggatgtgcttgaatcccagggccagtcagccgatgcataggcttgaggacgttcgtcaaaatcattgataattccatcaccattgacgtcacgaagtattacgtcacctggacgaacagtagcattattttgaccgtcctgatcaaccggataactatcaatctgttcctgtgtttcaaaacgaccgataacttcccacatccatacacctccggcattaccctgatctgtattgagcactacattggaccagcgattggattgtgcccaacgatatttatcccatgcattaccgaatatttctccatgacgtttaccatttttctgtcgggcaaatgttatattagccccaacactatactttaaatctccaactttatcattccatttcacaaatgcatcgaatcctaccgtcatatctgaattcatattctcaggtaaagcactcaaacctgtctccaacggaaacataatatcactcggtgtacccggaataccatcacgcatacgtttaaagaggtcaaactctcctgtaagccgattatcaaagaagccaaaatcaataccgacattcatcaatttaattttcatccatgaaatggtggttacaggaattcccttaggtgccgagcctattacttttctacttttcacagaactgaacgggtcatcaggcataagtgactgacctttgtaataagtatacccggaaaggtatgcaaagtcaggatacaaaccgcccagattatcatctcccatcataccatacgacgctctcaacttcagattcgaaaaccagctacttatagatgaattcttaaaaaagttctcttccgaaatacgccatgccgcactaactgaggggaaaaagccccatcggttgcctttcgggaatttccatgaaccatcataacgggccgataaatcaagaatataacggttttcataatcataacctgcacggaatacccagctggctgtagaagttatagctttattctcgcttaccaagttgttatcattagttgatataagatctataaattcattttcaactggatgttgctgtacattcagcgaatgataatcccgtttggtaaactcaaaaccacctacaccagttacatgatgtttaccaaacatattgtcataatttagcagaaactgtccggaaaactctttgatagtcgtatcaaatctttccatccaagtttcattagcagctgatttatcataggctacaatgtattcatccgcagccctgtcataagtatactctttccaacctttctccagattattcaccttattctgagaggtccaataggagaaaatgcctttccccgtcagccccttaatgggtgttttccactccatatcccaatcaatctgtaccacggtagtattgttatctgatttacctgcattatcagtagttagtgcagccaggttaagaccagaagcaccgggtacattattcaaatagttggggttatcatttgcataaggacgataaatgggcggaagattaaaaaccgcctgacgggcatttgcataatcatcactacccggaagagctggattagtacgattctccaaacgtccgttcaaccggaaacccaacttcagtttctcactgatatcaatattgaaattagactgaatattagtacgttgaaaattataatccttgaaaaccgcatcctggtcaatattactgattgataaataataggtggtcttatttccaccaccactcaagtttgcatgtatgtatgattgaggtgctgcattactaacatagttatctccccaatcaaatccacgatagtcttcaccagtttctggattataatatcccgtacgccatttttccaattcagctctagccacatccggagaaactgacagggtacccagattagcctccttcatataattagcatattgccattcatacgcattcaacattctgggataagaagtccatgattgccaactgtaattgaagtccaaagttacggctgccttttggttcttagaaccattttttgtagtaaccagtacgactccattcgctgcttttactccatagatggcagctgctccatctttcagtatagaaatgttctcaatatcatttacatccagattattaaactgtgcctcatcttttataataccatctatcacaaagagaggagtacccatatttctgatctgaatagaagtaccgctacccggctgtcccgacttctgtcgggtagtgataccggctattttaccaaccaatgctccagaaacagtcgaagaagtagtacgggcgatatcttctgtaccaatagtagtgactgccgcagcaatactccctttacgtttagttccatatcccaccacaacaatctcatccagaatttcctgatcttctttcaatataacagaaagaaatggtttatttccagctataacttttacagttttatagcctacgtaagaaaattccaaaacgtcggtaccagcaacgttcaactgaaacattccatcagagtcagtaacagtacctgcactcgtaccggcaacccgcactgacacccctatcaaaggttcatcattgtcatcggtaactttcccttttactgttttctcttgctgagtaataacaacagactttgtcgttgcatagccttctgatatgaagaaatttcctaagactattgacaagagaataaatttcaacaagcgaagcttgttactaaagaaatcgttcatcatcttattagttttaaagattaataaaacaggttcaataaaaacattaacgagggttaacaacatcgtaatgcaaagatatccccctcattcaaataccagtgaaaataagccgtcattaagtatcaataatctgttatttcaggtgtttgaatgatttctagtattttttgaatgattacttttgagtgttatatgtatgtttgcagcggttaacaacactcccgtattattataaatctattaattcaatcattatgaaaaagtataatttattatttgcttctctcttatttctatttcccaatgagacgattgctcaagaaagagcaattataaaaatagacacagatcgcgtaattgaccagatcaatcctcatctatacggaaatttttcggaacatctgggacaaggtatatatggaggtatttatgatccgaagtctattcaggcagatgaagatggctttcgcaaagacgtcatcgaacagacaaaagagttaaaagtttccatcttacgatggcccggagggaatttcgtttcaggttaccattgggaagatggtattggagatcgtagcaaacgccctactcggattgacctggcttggggaggtaaagaaagtaatatgataggaacagatgaattcattcaatttgcccgcaaagcaaaagtggaaccttatttctgtgtcaatctgggaaccggttcattggatgaagcacgaaattgggtggaatactgcaatgtggagaaaggaacatactactcagaccttcgccgtaaaaatggatttgaaaaaccgcataaagtaacgtattgggggttaggcaatgaagtagacggtccgtggcaaatgggacacaaatcacccgaagattattctaaaatggcaatagaaacagcaaaattaatgcgctggattgataaagacatcaagctcattgccagcggttcaagcaattacgatgccgactggaataaatggaaccggacaatactggacgaaatgtataactacatcgattacatctctcttcatcattattcgcacaacacctcagattactacacatatctgacaaatactattgaagtagagaactacatccgtattgtagaacaacagataaaggaagcgaaaatgaagaatcgttcttccaaagatgtttttatagctttcgacgaatggaatgcatggactcggacattcggaggtactgacaataccctatcggaaatatatgatttacaggacgctcttattgtagcgcaataccttaatatattcttacgtacttgcgacattgtcaagatggccaatatggcgcaattagtaaatgtcattgctccgatgcgtgttgacaatgataaattatggaagcaaaccacttattacccactctatctttttgccaataattgccgtggaaaagcactggacatatacataaaaagtccggcatattctactgataaatataaaaaagttccttatctggacgtttcatccacttatgaaccttcacggaacgaagtagtgatcaatgtcgttaaccgtaataaagacaaagctattacagctgatatcctttctcaaaccggctctttcgataaaaaagcgacagccaatattgtatcaggagcaaatacaaatattacaaactctgtaaacgaacagaacgttgatataaagaaagaagaaataaaaacttccggtgagaaaataacatattcatttgctccgcgatcattcacacagattattgtaaaagtaaagtaatcctctttcacaaaatgacatcattctttataagattgtcataacatacaaaggctgaatcaaactaggatttttgattcagcctcaactatttgaatatatactttccttgctgtattactccgtaaccaacggacgtttacgccagtcatccttcacatagctgtcgggatagactgttttatcttttaactcaccacctttcaggcgtatccaggaagtaaaggtacgttccccctccttcaacacaattacgcgtgcaccgttagataaatggttatattccgtattaccacctgtgaaacgtccataagccagtacgatgcctttccacatgactgaatagtcattatcatggtcatgtccgacaaaagtacccattacatcacctgcttccttcatagcggcaaacataccggtattaatagcagctgaacaagctttctccatacgcgtaccataaaggatggcgttctcatcagaagctgcttcgttgtattcggacagcgggatgtggaagaatgccaaagcaggcaaaggctttccgttattcttagcggtaaaagctgcactttgttgacgataccagttcacctgatcaaaggtaagccagtcataccctttcacatccggtaatttggagtacgagtgagaatccaggcaatagagcactgaagcatctttcttaccatccgaagatttcacggtgaggacgtagtcgggagactcaacgctaccacggtcgggctggatgttgtaaggcatggaacggattatatcgtataattcggcacgtgttttaccttgttcgttatcatggttaccgaaagtcacgacaaaaggtatcttacgggaggaagcacaatcaagtacggctcgcatggctgtatcagcaggcggtgcataaactacatctccggtaaaaacaatcaaatcgggacgttcggcatccagaacttcattgatacgcttcaaggcaatggctgaagctggattgtgatactgaaaatggatgtcggtaaactggacgattttaaactctccgttcttgttaaactttaagggggcaacctgtgcctggcagaacagaactgtcagaaaagccagacaaagggttaaagaaattctcttcatgttgttagtaattagtttttaggtagtttattaggttgaaatcagtattattctttggttatcaaaactgttgcataagctgagataccttcttcgcgaccggtaaaaccaagcctttccgtagtagtagctttgatggagatgtcgtcttcatctattcccattactttggcaagcgtctgctgcatggcgggaatatgggatttcagtttaggacgttccgcacagatggttgcatcaatgttgcccacggaatagcctttggttgcaatcagttctacggttttcttcagtaatattttgctgtctatgtccttgaactctcctgcggtatcgggaaaatgataaccgatatcacgcatattggcggctcccagcaaggcatcgcaaatggtatgaatcagcacgtcggcatccgaatgtccgagtaatcctttctcatgctccaggcggataccgcctaaccagagttcacgtcctgccaccaactggtgtacatcgaagccaaagcctacacgtattttcatatcgttcttcttttattttattggatgaatgcacgaaagtacggaaaaaaaagcaagtggggaataaagacagaacgcaaattacacaaattacgcaatttttcgtcttatataaggcaaccgataggggcctgaaagaaattgcgtaacctgtgtaatttgcgttctattccgtattccttatgatttacggtctatccggcagttgggacagcaggtctttgtagaatgccctgacgtccttccagtgatagaaaggagcgatgtcggtcttcaccgggatactcacttctttctcgttcagcatgaacttcacgatgatatcgtctgcactgcctttcttacggaagaaaacaatctgcacattggcagccataggcaccattttgaagttacaccatgcctgatagaatttagctggatcggactcttcattataacagttctccagtctcagcaagcctaccagaggaataacattaccgtcgtgtccgaagcggaaagtggccgagtttgtaccggaggcaatcgccgcgtctgccgagtccatgatattctcaaccagagatttagcgtttgccagcatcagtccgttcgtcatgggcgaagggccgtcgcatacatagttcttatagttatgtatctgccagatatcaaacaattcctgcttctcaaagatatcataaaaacaaacctccggttccacgttctgcatatcagaagcaacccaatacagaccgcgcatcagttcttcaggattcacattcttacgaatatactctttgctattgaacagtgtattcatcagacgttccggacgtacatgttcttcttcgaacttacggaattcctcataccaaggtcctttgcgtgaagtaaacttcatagcttcctgtgtatggaaattcaggtaatccatatatttattgctggattcgcgctcaatccgcatcttcgggttgaattccttcaggcgttcgcagaatgcatccatgctgagcacgcaacggataactacggtagagcgggcagacatttgcggttcgcctttaaatacttcagggaatgcccgatacatacgttcggcaatgcctcgttgttgcttcactcctaccggactgaggtcgccgccgtgtcctttggcatctgcccagacaatgtccagacgtttacggacatcctcgcccaaatcggttaatgctccggctgcatgggctttctcaaagacttccatcacgcggacgtagtcttcatccgcaattagccagcgggaaccatgacggccatagtgactgatatagaacggttcataacctttcggagccttggtctggacgcccgaaggaccggggtaagcgtaatatacaccacctgtcgttgcaatatcattgaagatttcttcgcgtgtagcttgtgcatataagccttgcacagcaaaagcggctaacaggacgattgaaaaaagagttcgtttcattctcataaacaagttgttatttttaatgtatttattattatattagtaaaaacggaaaagaaaagaacaaaagtgattagtgtttggtgataagtgattagcgccattcggtatattattttttagacgcagatgacacggataacgcggatttaaaaggctgcgctataaacgtggataaaaaaaaatccgcgtcatccgtgtcatccgcgtctaaaagattatttatcatttagcccataaccctattgtaataaatcaaccttcatccttatttctgataatccggattctgtgtcagatacgggttcgtggtaaactcatcctgcggaatgggatacaatttgtacttatcgttcacatctttacccacatacgtaccaacttcaccgtcgctgctacctttccagtcccagttatatccttttgtgaatttgccaaagcggatcaggtctgtgcgacgcaccaactccatattcatctcacgggctctttcatccagaatgaagtccagattcaactggccgtcggtaatacgaccggataccccgtcaccatagttgccggacatataagcacggtctctgatttcattcacataacccagcgcctcagcacgcgtgccttccgcagccccgcgaagaatagcctcagcagccatcaggtaagcatctgccgtacggaacatcgggaggtctacagacgaatacttagtaccgccatctaccaattccttacggtccttggttacatttctccatttgatgcacgcataaccattctcaaaagtcttctggaaagccttaccttctacccaagtttcctttgtatgaccgatagtaaagaactgtgcacgcttatctttcttattatctccccagggatcattttcatagaaggtttggtcagcctcatcaaacttatctacaagcgccaccttcacacgggcattaccccaaccacggctacctactccagtttttacatagctatccatcggaccattcatcaatgctttaatcagaaagttggttccggcactgctctgtgcatagtcagcgtcctgcaccaaaggccagatgatttcggagcaagtattgttatctgccaggaagatgtgacggtaatcagaagccaacggataattaccttccgtaatcactttcttggcatatttataagcattggtatattcattcttgcctacccatgtttcggcattcagataaacacgtgccaggagaaaccaagccgatacacgatccacacgaccatattcattccgcttcggttctttcagcaaggttgtcagttcttccgtttcggaaatcacatagtcgtagatttcctggcgggtcttctgatgaggaatcgtacctacatccatcgtttcatcaatgaaaggacccgaaccgtacaagtcgcaaatcatgctgtagcaataagcacggatgaagcgtgcttcggcacggtaataaggcatttcagcctgcaaagcatcgtatacgccacggtctttcaatttaccttccgtactttcgcgcaagaactcattacagtagttaatggccatatacagacgataatatgaatagcaaataatctttgtcgaagggtcccagttcatatacaacagtgacaaacttccatgactgccaccggaatggaaaacgatctcatccgtacaagcctcttgcaaatagaacagggcacgtgtataaccactataaccttcatcaatacccggcacgtcgccgtttccgccatcaccacccttttgtccggtctggataaggctggcgtaacactttgccaatactccgatgtatccctcaggcgtagaataaaccttctcgcccaccaattcattgtcgtccaaaggcaatgtatccaaatctcccagacaagaagaaagaaggaagagagataccagacatatacttgctaacttgaaatatttcgttttcattgttttctgatttttcatgaattaaaaattaagatttactcccagcatgaacatgcgcgggcgctgatagatattcttatcgataccgctataaatttccgggtcaagaccgctatagcctgtcagtgtacatacattctgcacggtgaaagagagacgaagagaggtcttttcgttccacaacttatcgaaggtatgtcctaacgtaatgttgtcgatacggaagaagtcgcctttctccaggaagtaatcggtatagatgcgatcctgcgtaaatccggtttcaagggtagaacgcagaatattgctggaaacgccggttccgccataaagtccgtccaaagaatcggaggctttcacatagttataaacataagcaccgaagcttccatgtccgttgatacccaaatcccagttcttgtatgtcagacgggtagaaagaccgcagtagtaaggagctttggagcttttgccggtcacgtacttgttggcatcttcttcgctgctggtgacggaaccatcttttgcgatatatttgccatccagcggcttaccattatcgtcataagcctgttgcaacaggtagaaagtattcggagtttcgcctaccatgtggacttgcagatatttacccgtaccgccggcattacctgtcttcacatagttgtcttcacggtcaatggtgttcagctttgtaatttcagaagtattccaggtaaaattaccgctgacagtccattcccaatccttatttttcacgggaatcacgttgataccgatttccagacctttactcttcatattaccgatattggtctcaatcatattggtaaagttgcttccggcaggaacgaatatcttattcagcaggtctttggtagtacgccagtagtaatcaatcgtaccggagatgcggttgttcaggaaaccatagtcgataccgatattataagtttcggtagtctcccacttgatgttggcatcgtagccattgggacggtaagtagtgtaccattgatcaccgaagtaatagcgggattcgtcataagatgccgtataagtcggcaggtgctgatagtatgaaccgatggattgctgaccggtctggccgtagctcaaacggagtttcaaatcggacagggctttgaagttagagaggaaagcctcttcgttcacacgccaggctgccgcaactgaagggaaatacccccaacggttatcgggagaaaaacgtgaagaagcatctgcacgcagagtagccgtcaacatgtagcgttgtttccaggagtagtttacacgtccatagaaagaaagcaggtaaagttcagcttcggcatgctggggggtagccagttctttgccttcggtgtcggtggttacactattattcttataccagaaacgttgccagccataaccacccataacattgatgtgatgatctttcagttccttatcgtaattggcatagaaatcgagcaaggtgttgcgcttggtctgatggtatttatagcgtttgcccgtaccgtcattctgattaccagtgtacatggagggagcaagatcgggcacattttcacgattgtcattcttctggatgtcatagcccatattcagattgaagcgcaggtcttccaatccgtgcaccttgtagtcgagggcaatgttaccgatagaacgttttgttttttcgagtttgtcagccagttccagatcggcaaccggattcgcagcggccagcgtgatgggtttaccgccattcatccatgtataatatcccagacctacattaccttcatagtcttcgtaaacaggacgggtaggatcaaaagagatggcactgccaatcacgcctgttgaaaccggttgattattctcaatacttcccttgacgttaatatctacagaaagatgtttatcaaagaacttcggagacagacctacactggcgttgatacgctcgtagttattattcttcaatgtaccattctggttagtatatcctacggatacacggtaaggcatattcttcaaagctccggtcatggacaagttatgatccgtacccagtgccacgcgatagatttctttctgccagtctacatctgcattgcccagcttgaaagtctccggagcattggcatgctcggcaaaagcctgacggaattcttcagtagaaagtacatccatatactgatatacattgcttactgtcatgtttccgttatagttgaaggaaggacgggaggtaccgtcggcacttcccttcttggtagtgatgatgatgacaccattggaagcacgcgaaccgtaaatagctgtggcagaagcatccttcaatactgtaaaggaagcaatgtcgttcggattgatggcactgatagaagtattgcttacgggtactccatcgataacaatcagcggatcattatctgccgacaaagaggctcccatacggatacggatggtaccgccgctacccggtgcaccattgcccggcacgatattcacaccggcaactttacccaccagagcatcttcagcagtcaattgcttacctttgttcagctcatccggtttcacggtcagcaaagatccggtcacgtcgcctttcttcacctgtccgtagccgatgactactacttcgtccagcaactcgctgtcttcctgcatggtaacgacaatgagaggtttgtctgtcacggtgatttcctgtcctttataaccgatacaggtgacggtaagtacatttccggtagccgccttcagtgtaaaattgccgtccacatcagagatagtacctatagaagtacctttaataagaatgttagctccgataaccgattcaccggtagcatccttcacatgccctttcaccacgatgtcttgtgctgaaagcgacagggatagtagtaatcccaacaaagggagaagtcccttgacaagtctaaaaatgtttttcataaggttattattataattaataaaaaaataattttctcttacctctgtacctgtaggggcgaatctctgttcgcccgcacacggcacagacttttttctataatcctcgtgtaacctgtttacccgataaaaaccaatacccaaagaaaatctattgttaactttaatttctacggcaaaggtagagcataactttccgggtaagagagctgagtagatacgtaaagtagatataagtagacgctttaaaatgataagtaattgaaatacagcacaaagccacttccctacatgagtcaggaaagtagatttaagtagacatttgaggaaaaaagaaagagattttattagcctatttgctgcacagcttccataaattcatccttggaaagcaaagatttgttccgcactttcagacgatagttgtacaccgtctgggcagaataatgaaggaagttcgcaatcttcccactatctgtaatacccaatctgatcagagcaaagacgcgcaactcgggggtcagcagttcaccttccttcggacagatgcgttcatcttcctgaagtaaagtattgaactgttctatgaacttaggatagagtttcaggaacacactatcgaacgtgtagaagaattctttcaactcattggcaacaaaagaagaggaattgacagtcttatacaaatcatccaattgcccggttttgattttacgggcaagcattttccgttgttcttcctgcttgttgatatacagagagcacatattgaatacatagccgatatattcttccttcacctgattggattcctgcaacttatcattcagtgtatgcagatcagaattgatatgtttaagttcctcattcatagtgttcaccgctttccgggctacattcagccgcttcatctgatagaaaatgaacatcagagcaatcagcaatatgatcagcaagacagatgtcagaatgaccagggcaaccatttgtgttttctcctccttcaacttgttttcgtacgtccggctgataacgggaagcagttccgaaatctcctgcgtacgatagcgtgcattgcagaaggtggcatcttgcatagaacattctatataggtataagcacgttttatatctccttcctgaaacagaaggttcgctaacttccacaaggagatgtattccttcgttgccgcctgaatatcggcaatagccgaaatagccagatatttcttctgcaattcggtattgcccataaaggcataagcattggcgaggccgatagaaggaatggcaacactgtaccccttctcttcatgtgtcttgtagcaacttttcagtatctctatggcctcatcatacttttcttcatacagcaatttctcactcatcatcaacagataaccctgtgaaccgggacggcgcatactgataatagaatctttatattggtatgccaacccccggtaatgttctttcatctgatcagagaaagcataatccgccatcagcgtataaacctggtgatactgataataataataggaaacgccggaagcgtccagatcagcggacttgattccatccagtatttccagcccttccttatacatggccactcctatcattacttcggctatatttagttcagccgaacgaatgtaaaggggattcttcatgcgcttggcaagttctacgcgctgattggccacccatagagccgagtccatacggtaagagcgatatttgccgaataattcgcggtaaagatcataacgctcctgatcggaatgagacagccggagttttcgttgcaaggcatctatttgttcctggcgtttcagggtatattgaggacggtttctgatagacatatcaagttcacgaagcaaagaatcaatttcactgggatggacatgcagggatagggatgctaacaagactgccaaaaacacctttagtttcctcatacggatttctttctcggtttaacaatagatcttcacggacaaaaatacagaataaatatctgaaatggaaagtttcatgaggcttttggcaggaattcaccggaaacgttgacgtacggttctgaataaaatgaaccatcatccgacaccctctatttttgaaaaaaactcttcccgttctttcagttctcactgactccccctattcatcggcattccggctgaaacttccagctttatagctgtttcaggtatatttcagccggaatgccgatgaacagggagtttgagataagctgaaagactgaaagaagaaaaaacactcaatgtattgaataacatctgaaaacaagcagtcttatgatccggaataagcaatgttatgaatgattagattgcttattatcatccacaacaagcaatctaatttcaggcaagtccgattcctcttttagcatctatatatcggtaacgttggatatatagatactacacatccgatatataggtgcaacgcatccggtatatagatgctgcgcgtccgatatatacagctaataatacactacacaccactccccccttctgccgcaaggcacttgtagcccgtaacgcgtagctcgtagctgattcatcttctgcgacgtccgaacaagtcctttatcccatccagatcaaaacctaacgtaaaacgaagtgtctggtcgagcggattgctctgtgccgtagataccagataagcagcatctaacgagaatacgctcatcttgaatcctgcaccaaaagaaaaatatttgcggtttcctttgttctcatgttcccaatgatagccaccacgaatggaaaactgttcgtgataagtatattccaaccccaaagaccactgtatctcctgcaattcttccttgaagccgccgggagcatcactgaaagatttgaaaatacccttaatgggagaaatatcattataatcacggtccaaacgctcttcatactcttcctgcgactcatcttctccacgaacaggacgggtaggaaccatatacttattggcatcaaaactaactccgattgtattataatcatctatcggaaataacagggaagcacccaaacgtaagttggtaggcaagaactggctggtattaccactatcataagaaatcttcgtaccgatattggaagcattcagtccgaaagaaagcatacactcccgttgggcaagtatgacgtaattcgtataatagaaggcaatatcggcagcaaaagcagagccggcggaaacttcttcatcttccctgtacgccaggtcggaataaatgtatcgcaaggcaaccgcagcagagaaatgttcggaaagcatgcgggagtacgccacatctaccgccatttcataaggtttaatggtatatccgggagaattctcatcctgatatgctacgggcacttcacccaaagagaaataacgcaaagaaccgctgacagcctgataatctccgatacggtagtagccagccagatatgccagatcaatatcatttaccaacttgcgcaaccaaggtgtataggaaaccgctactccggcacggctgatcgtaaacggatacttagccggattccagtattgagagtttacgtccggatctgtagccgcacccacatctcccataccaccgccacgggagtcaggggcaatacccaaagagttaacaccggtattaacgggattaaactgattcttgtcctgggcaagaaggtgtacggacaagaaagctatgagtaatagcaagatgtatttcttcatacgatattatttataatacgatctcaaatataaaaaacaaaatctaacttaattcccctccttttgggaggaggggtacccaaagggtggggtggtaggtgaaaaaagaattccttgctcttatgatttataggtattttattgctttacctaccacctccccctacgggtactcctcctcccgagaggaggagaatttagttactcctttcaattgagatacttatgatttctaataacaatactaataaaacagagaatccccctgtttattgtgacaggataatgattttctgtgatttcgtactttcgcgactaccgtcggagacaatagatgcacgatacagataaacacccggtgccagacgttgcccgccattactgcacaagtcccattccacataataagtttgtccttcggatactcccttctccagatgtgtccacatttcccgtccggcaaaatcgtatacggacatacggaccgcaagcgtggaaccggggcgattgtgagaaagaacgaatgtagtactttcacgggcagggctttgtgtacaaataacagagaacagaccgggacgcaatccgcgaaccacctcaaactccaaagtctttgtagaggaattattcagcaaatcccaggcacggaacgacaacgtatgtttaccctcagtgagttcgggcacagaaaagtataccgttccccgggtatagtctcccgctaccggagtataataatcattcagattataagtcagcaccgcactgccgtcgatacaaagcgaaagatcatgcccgataccattgccaaccgtattgataccatccgcatcttccaattccgccacaaacaacggggtggtattggtttgtccaccaggactaaagtccggcgtattcagataaacggttatcttaggtcctaatgtgtccgtcagagaaacaccatcatccgttccacccaccaggaagcggtcgaaagctccgccggcttcatgagaatgaacggcatccagagcataaaggctcaataaaccttcctcatcggaatagttgatatccaacggcacggggaaagtaaattcaaaccgtccctgacgaaccgagtcactgcccgagaaaagagttttactgcgctcggtataagtgaaagctccctcatcacgattatcaagagttgtcacttcttccttactatccagcacagtaggatgtactgtaccggtaaagtcttcagccaaaactccttcgggagtcaggatacgtccttttactgtaatcttgctaccggctttcacctgcggatagacgctcgtttcttctgccacattcacccccgcaaattcgtctacctgcacctggtaatcgggatatgccaaagtcagggcaggatcgccaatcagagagaagttcagtttattcctatcgttagccaaagattcatcgcacttggaaagccgcatgatgtctccaaggcgcaaacgtttaccttcgggacgcgaaaaaatatgacggaggaaagcctgattcaacgtggagttttgcgaagcatacaccacccgcgatgtagtgagtaaagctatagcaccacctttagtattcaggaaagcctgctctccggcagaagtttgtatatcatcaaaacgggtaaagtcacaggtggcggtaatccatagaggaaggcggggagacgtcattttagtgatgtcagccatcgtcagcagattctctgccgcccatgcagaagtacttccatgacctgtatagttgactaccaacattcccctgttaaataactgcaagaggcgtttcgtagcatcaggataagtttctccggtagcggaagattcacgatggaaagcatcggcatagatccggttgacaagcagggaaggatagtttctctcggtgtaacttgccaataattcagattgagaagcatgcagattcttatctccgtcatcagctacatagcaaactgtatgtttccacgaacccgcctgtttattttccatataagcaattgtcttatctacagcagcttttgcctcagccgctgtacgaacggggaaacgtccgataccaatatccaacataccggctgtaagatcatccccttcttcatcatcaagaaaaccgaagtaatcgtcagttacataggaggaagtctcttccagagaagcttccgattggtaagacagcagaaagttttcaggccggtaactcttccaggaagaagtcaacatacgattatcgtaactgcaatctccgaagaataacaagtatttgggacgttcagcttcattcgggaagcgatcatacaacatcttcatcagacggcgataagccgttccatctggtgtaccggaggaaaactcattgtagatttgcggagcggtaaggacaaggacggacaatccgtctttctcacgatgggcttgtgccagtcgttccgcctgtgccagcaggtctttctggtcgggagcaatgataatcatatccgtagcttccagagaatgcagattctgattcgcaaccccacctacgttttccactgtatcaaagcctcccgcttcgggagtgatggcaacaaactcacgcaactctcctgcgggaatagtaaatgtataggtgccatcggcaaaactgccttctattctaccaatgtttgcaggattggtgacatcccacacaacagtagaagctgtggcaccggaaagaacgaacgttgtctccttatgaatggaagccaaagagcgaaaagtaagataaggagtgttcaacgtaagtgtacgcatgtagtttaaggcaatgtaatccagacgccccgatgtacccgaagggcgggtatgggtgatggttacaaccgtattttccgacttagtcccttgccaggaagcatttatcgttgcagaagtagctctggtataatattgattatcggaatcaatggatgccagtgtgatattgcctttcggttcaccattcactgaaacagagtagctggtagacgcatcaatggagcgggcggcaaagacagtagtcaaccatccggcagcttccggcacaatgcccggcaagttcaatgtataacttttcgtatttccggccacatagtcataatcttcataaagctgcctgccggtacctgcccaactatatgcatctttttcatagatagcaaaggaattgaaagtcgtcagtctgttggccgaagtctctttcaacgaagaataaatttcagtttccatttccggaatatcctcccgatcagtcaggaagtaatacccttcatcagagtaaaagttgcgctcgcgaacaaagtaagtattttggctatccggtgtccaggatacagtgccacgaccataaaacaacacaccatctgacaaacgcaacaaaggaacttcgggcaagtcagctgccggatgttcattgaaacgttgggacagcaaataaccgccataaccaaatacgcggactttttcgggtcttgagaatcccatctttttcaattcggcattcgtgattttaaagactccggtatttctcacacttatcttcgtccaacggccggaagcaagaagtgatgttgtacaatcctttaaagatacttcggataaagttgttttcagatttcgggtagctgtttcctcccctattctatctttcttaagaaaagaattcacggatagtttgaaagaattcagccgttgataacttccttcacgaaaaacaacaggaacaaagcttatggagagaaaaccacgatgtgcggaaactttaatgaaagagtttatctgtggagatgccggcaagccttcccggaaagccacattttcattgggtagctgacgtaaactgtcgagtcgcatctctaatgccgccacctcactccggtttaacttctgatattccggaaactctatttccacctgataggtgaaggaacggaagtctttccccaaagggagttcacgcgtcactacgggaagcgcctgtgcagaagacaattcctgccagttcagcgtaatgaattcctgcgctgaaaccggaagaagaaaagcgataaagcaacaaagcaaccagcaacgtttgataaacatatcgtaataaattgactcaacgaatataaaagtcgagcaacttatcttctccgaggtatccttccaaatgctgtcctatctgtaccggacctacgcctgcgggagttcccgtaaacaacaggtcgcctattttcagcgtcataaagcggctgacgtatgcaatgatctcatccactttgaaaagcatatccgaggtattgccatgctgcacttccttaccgtctatttccagacggaaatcaagctgctgcaaatcgcctcctgcctgctccaaaggaacaaaagttccgatagctgccgaatgatcgaaccctttgcaaagttcccagggattacccgcttcacggaacttacgttgcaagtcgcgtgccgtaaagtcgatgcctacagtcactgcgtcataataacgattggcaaagcgcggcgcaatgttttttcccaaacggcagatacgtaccaccacctcagtttcgtaatgaacctcatccgaaaaatcgggaataaagaaaggctttccgtctttcaatatagccgagtcgggcttcatgaagataaccggctctttattaactaacgtatgccccagctctttattgtgcagtgcatagttcattccgacagcaataatcttcattattcgatttcgttaaaattcaggcggttgaacatcaccgccaaatgagcatatagagaagtattctgaacaacgatattttccggcacacggatacggaacggggtaaagttccatacagctttgataccacccgctatcatggtatccgtaatgcattgggctatctcgataggtacagtcagcacaccgatgttcacatcatattcgcgcatcttctgctcgaattcactggaatggaagatcggtattccgttcaatgtagtgcctaccaattccggggtcacatcaaatgctgctacaatttccagcccgaagtgcttcaaaccggagtcgcgcaacaatgcaccacccagactacctactccaaacagaaatgctttatgcatatcggtaaatccgaggaagtcttccagtacggctatcaacgtatcgacttcgtagcctacacgcgtacgcccggagatgttgacatacgacaaatccttggctatctgtgaagcatctatattgatttctttagatatctgtgtagaagagacgtaccgttcgccccgctgcttgagcagcttaacattcgacaagtaccacggcaacctgcgcaaagtaggctccggcactttcatgctatccttatattgaattgcctggttcgtggtcattttcttcatttctttcggttacgggtggacaaaaatacgctttttttggaaaagaatactccaacagaagaaagttaacataatttccacaaaagttttacttgtcagcaaagagggataacggcaaactaagggaaactcccaccgaatggaacttcaggcaatcgaaaccggcaaagactcctatccgcgtcctatcggaaaacccgatcgaatatccaatctccgtataagggcgcccaccatatatcacgatggaacgaagatgcaaagcttcatcaaatgcttttcttgacagaaaaggaagatgtttcaaaagcagatatggagtataccaggagacattagcctgtgcccagcgggtattagtggacaaaacgtagttgtccagtaaactaaacccggtatcgaaagaacgttccgtaaccaatatgcgggtagaagcgaaatgcttaaagtcggggaactgaagattctttgcatcaaagaatgaacctgcattcactgaccaatgcaggcgattgaacattccgaattcgattttctgtttagctgagaactgcatcaggtggtacgaggtaagataacggcttccgctcatagggaaagctctgtcatatttcaaggcaaatgtaggataacgggaagcttcatacacttttttaccttgcgacatgtgatagtagtgagccggagtgtactccaactcaaaagaagctttcaggatatcattctccggcattggtcggaaagcagtgttttccggaatattcggttcggcatctcttttgaaccaacttttacggatatggttatccagcatcttcctgcgttgccaggaaagtgaggaagaaaaaagtaatccgttagctggctctatcgcatggtcaactgtgaagaaggtattctcgtaaagcttcagatggctatgaccgaacagcgagctggacatactgttaatcaaacgggattctccactttccgaattataatcagcggacagaagacctccggaaagagataaataaccacggttccggggagcataatccaatgtcagttctccttgtccaatccagtttttgcgggcagtggtataatagaaagaaggcacaaaacgaagtgtagaagattccgataacttcactcctgtctttagcttaactcctaaccagaagccatccacaaaattatattcgggaatataagcggaaagaccaggtaaagttaaccatgcatttttattggaagttctgaaagtctttccccacataatggtattcagtacttgcccgaccgctgttttcttctcggttttttctccgggggataaatctttcagcgcaatcttttcttctttatattgataactctgcacttcttccaatcgcaacggcacactacggatagtggtccaataaagagaatcccgcttatcggcaagcgaatcaacctgagtatctttgcgtccgatccgtgccggacgttcaaatttatgtttctttggctgcgctactgcattggcagttacaggttttgtcgttttatccgtactggtctccggctggatatccgtttttacctctctatagtgtattgctgccagataagaagcctctgccttgaaacccattatatcaatggtagaagaggtcgtaatagaaaccggcagaaaaacagaagactgtacttccttgcaagtgatcttaatctttgctttcaacccggtagcgcgaacattgacatcagcagctgatatacaccataaatcttctacaatgaacaggtccccttccagcaaacggctatcgtctttcttgggaatcacacggatcttatttatcatttgtccttcttccacaaagcaagcgtcaagtttgaaacgatagtacgagaaagcatttttatttaacggggaaactttaccgaaaagctcgggggtatagagattaatcgtagttatacccatgtccacccctatttcttctggaaaagagttcttattggctaataccttattattccagacattgggggcagtaaagttcacaatctgctgttgctccaagacaaacagctttccaagccattcttttgtatctttccgcacctctttggatagtttcaggacagcgggaatagcggtccctttaccggttcccttcagatacgtgccggcagtgtagctttttatctgagtgcgataataaggagcacgtgctatcgctttacgcatcactgcataggccggatcttcatttcccttggtgatgtttacttccggcaggctataggtacgttcggcaagcactatatccttctcataatcacgattcagcatttgaaaagtaaaggtctgggatatgaatcctaaagaagaaacctcacaggtatattgtccggcagataatttcgtttgaaaccgcccatgctcatcggtagttaaacctgacttcatttctctcagatagagagcggcataaggaaccggctttccgtcagtatctgtaacagtacccttgaaagattgtgcaaaagacagtatagtaaccaaagacaataggaatagccagatgattcttttcatatttcgtatatttgaagctaaatagcgttttctattagacgacaaaagtccaaaaagattgcaaagttccacgcaaaatattacttttggttcttaaaacagaacgaatatgaagaataatgattggaaagaacggttgaatgttgtttattctaccaatccggactatagttatgaaatggaagatgatggggaacaggttaccccggaagcttccaggcagaagttgcgtgttcaattggatcgcaagaatcgaggaggaaaagtagtcacacttgtcacgggtttcgtaggtacggaaaatgacctgaaggagttaggtaaattactgaagtctaaatgtggcgtaggtggaagtgccaaagacggagaaatcatcgtacagggagatttcagacagaaagtactggaactacttaagaaagagggatatacgcagactaaaccggtcggataatccagtccatctgttttcagtaggtatatcacttctttcaaaaacagcaaatatgcataaaaaaacgaccgctacggaaactccgtgcagtcgtttttttatatatattgagttgaattattcagctttcaaagtgaaacgcttgaagtctacaatcttcaattcagggtcagctgctgccaacacttctcttacggtcttcttagagtccatgatattttcttggttcagcaagcaaacttctttcaagaacttagccaaacgacctttagcaatgttctgaatcatttgttcgggcagatgtgcagccttctcagcagaaacagtagcaatgatttcttttgcttttgctatatcttcagctgtaatccaacctttagccatgttgctctccatgtgatcttcgctgtccacgtgagtcgggttgatacctgctttcttcaaagcagcctcaacagccttctgtacctgttctgctttggtcttctcgatagcaacttcaatttctttctgcttcacttcttcagaaacaccatcctcgtcaattgcaatcgggttcatggcagcaatctgcatagccacttccttagccaactgctcgtcaacttctttattgaaagcaacgatagtgcagagaccatttctattcatatgattgtaaacaacagtacttgcaccctctacagtcatgtagccgtcaagttccattttctcgcctgtaataccgctacggtcagtcactgcatcctgtacagtaccgttacccatcggcaatgctttcacttcatccaaagttttgcagttgttagctacagcaagatcaagaatatcctgagtcaattttatgaaatcagcattctgagctacgaagtcagtttcacacttcaacgcaatgattacggcaaagttaccggtagttttagccaaaacacaaccttcagaagcttcacggtctgaacgcttagcggcaacagcctgtcccttcttgcggattatttctattgccttgtcgaaatcgccttcagcttccgtcaacgcattcttgcagtccatcatacctgctccggtcattttacggagtttggtaatatcagccattgttacagccataatatattttctttttataattaatattctaaatgataaaatggtaagatgataggatggtaagacgatattatcatcttatcattttaccatcttaccattcaattatgattaagcctcttcgtcttccttcaggaaagcagcagctttagctgcattgattgcttcctcgtcagatttatcgagtcttgcttttgtagctttcttcttgcctttattggcaggagcttcaccagctgcttccatgtctactttttcagcttttctttcttccaaaccttcctgcatagcagcgcagcaagcatccagaattacttctattgatttagtagcatcgtcattagccgggataacgaaatcaatgttagaaggatcagagttcgtatcaacgataccgaatacaggtatacccaaacggttagcttcgcgaactgcgatattttctttcataacatcaataacgaacagtgcagacggcagacgagtcaggtcagcaatagaacccaaagtcttgtccaacttagcacgttgacgtgaaatctgcagtacttctctcttagacagattagaatacgtaccgtcattcgtcaatttatcgatggtagccatcttcttaacagccttgcggattgtggggaaattagttaacataccgcccggccagcgctcgattacataaggcatatttacagcagaagctttgtcagcaaccacttgtttagcttgttttttagtagcaacgaacaggactttctttcctgatttagcaatttgcttcaaagcttcagcagcttcgtctactttagcaactgttttgtggaggtcaatgatgtggataccattgcgttccatgaaaatataaggagccattgcaggattccactttcttttgaggtgaccaaagtggcaaccggcttccaataatgtatcaaaatttgttcttgacatcttgttttttctttaaatcgtttactttcttttttgttttttctaaaccaaccgccgggtagtctatcaatccagagtcccggtagtttagatactaaacgctctttcagttgagagttgagagataaaagttgagaattaagcaacttgtccgccccaacatttctgcaactcttaacgtttactgaactggaatcttctacgagctttcggttgtcccggtttcttacgttcaacagaacgcgggtcacgagtcatgaagccttcagcacgaagagcagctttgtcttcagcattcatcttcaccaatgcgcgggcaatagccaaacgcaaagcttgagactgaccggtgaaaccaccaccgcaaagatttactttaatatcatatttttcagcaacacccagcttgctcagcggttgttttactacatactgaagaatagttgatggaaagtactctgcaaggtctctcttgttaatagtaatctttcctgtaccttcggttacgaaaatgcgtgcaattgcacttttacgtctgcctaatgcatttactacttccatatctattatttaagtaagtttatatcaattgttttcgggttctgagcatcatgtttgtgctcgctgccagcatatacgtacatattgctcagcaatttagcgcccaatttgttcttaggcaacataccctttactacttttctcaacagtctgtcatcaccgttcggtttagcctgcagacgagcaggagtcatttctctctgaccaccgggataacctgtgtatgacaaatacactttgtcagtccacttattacctgtcattttaactttgtcggcattgataatgattacattatcaccgcaatctacgtgaggagtaaagtttggtttatacttccctctcaacagtttcgcaacttttgcgcccagacgacccaatacttggtctgtagcgtcaacaataacccattctttggttaccgtagctttgtttgcagaaatggtcttgtaacttaaagtatccactcttgatttgttttttaaatgttactactaaaaaaatcttcattacggattagccaccccggacaaaggtggattaactcgctctgaattaattgcttatccttattagataataatcggcttgcaaaggtacggattttcccaaaactggcaaacgttttcttcttttttttaaagaagctgactatcaatcacaagcaatgttaggacacaaaacaagcaatgttcccatgcaaaagattgcttgctttgcatcggaacattgcttattatatccggatagcccgttttaacgaacaatatcttcagggaatacaggcggcatcgttacccgcttccaggtttcatgataccaacagttcaattcattgccattcaaatctttagaaataaaatatttcagatgcataagcccgccttctcccatctcaaactccaggacattatctttattatccagcatgggcagatgaatattcttctcaatactttcccgatagctattgtccgtcagctggatataggtaccatatccggtgattatggcatctttgccgggaataagagtgaaattgacgatgcgcccgtcatcgctcaataccttgaatgtgttactgggcttcaaagcaccgggaacatccggaatttcggatacatagtgacacagctgccagatacctttcaaatccgctggtttgaaactcgccttcttctgcgctgccgctcctgttaccgccaacagcactgctgccaacatggtaatgaaatacttcttcttcatgttcgtatatatttggttaacgtataggcatctgactgtcacaaatataagtaattattttaatattataacagtttattagtaaaaaaagagcccgcacaacaagattgtgc

SEQ ID NO: 6414 - DNA, 919 bp, Unknown
  gut microbiota DNA sequence
gatgacagcgtgattccacagataacgccggaggaatttaagcaatatgtagccgatggagtgattcaaggtggcatgattccaaaattggagaactctttcgaggcgttgaatgcgggtgtgtccgaagtcgtaatcactttagcatcagccatcaacgggaacagtggaacccgtatccgaaaataattcaaaaaaaacggcaataggctgtaactttctgaatacttaaccgtcaatttattagagatgcaagaactcagctttcgtaatgacattctcccgctgaaggataagctctttcggttagccctgagaattacgtttgatagggcagaggcagaggacgttgtgcaggaaacgctgataagggtttggaacaagcgtgacgagtggtcgcagtttggttctattgaggcctattgcttgactgtggcaagaaatctggcgatagaccgtagcgagcgaaaagactcccgtaccgtggagctgctccccgaaatggagcaagtctccgatgcatcgagcccttacgaaaagctggtgaacaaggaacggatggcgttgatacatcggctgatgaacaagcttcccgaaaaacagcggttgattatgcagcttagggatgtggaaggtaagagctataaagaaatagcagcggtcctgaacctgaccgaggagcaggtaaaagtgaacctcttcagggcgcggcaaaaagtaaaacaaacgtttattgatatagaaggttatggactctaaatatatagaacaactcttggaacgctactggcagtgcgaaacttctttggaagaggaagcatgcctgcgtgctttctttagcggtaacgatgttcccggacacttgcttcgctacaaggacttgttcgtatatcagcagcttcagcaggaagtgcatttg

SEQ ID NO: 6415 - DNA, 4564 bp, Unknown
  gut microbiota DNA sequence
ggcttctcgctgcctttcttcacgtaaaataagaccttgaatgtacttcgcatagctcactccttttttgggttacaaaattagtttatagtgggttaccgacagctatgcagaattacgcaaatcgcagtaaaagaaccttttaacaagaaatattcacccgttacgggggtaatgaggtggtaactgaacttctgcaccgtttggcttcgaggtggcattccgttggctctgcctaatagaaaaacaaagcgtaacgaacgctctttcagctaattcgctacgctttgctcaaatttgcaaatccgctatgtgtttattttagattctacgataaacttcatcaaatggtactctgcaccgttctccccagattcctttatttccgtcccgtattccacaggggataaccatatttatttcagcaccatgaggcaatttcagtatcctttttagccgacggctatccaaaccttccagaggacaagtgtcatacccttcgtttgccatagcaatcataaacgtttgggtagcaagtgcacaagatttatgggcagtcacgcgcatatcattttcggaaacttcgagcatcatcgggcggaaaatgctgataatattaaccagtagttttctgaataatcccaaaattccaaagaaacgggcataaacaaacggcatcaatttgccatagtataattcccggtctttgatgcgtttggcctgacgctctttcggactgtaacgccggatattctcccgctcgaagtcaagtacaaaccgcgcatgcttcctgtaccaatcacgccgtaccacgaaaacaactatttgtgaagctgtagaagtggctttctgatcgagacaagctcttgaaacctttgccagtaattcgggctgagtgatatgatagaactcccacaactgcatatccgagctgttgggagctaatgtagccaattccagataatgttttattctttccggatctatcagttttgttctgtcatacgctcgcacagagcgacgataatggaggacttcgtctaaattcataatgctgtaaatgttataatactattatacttttccttagagctaaaaaacttcaggatattcatagaattaattctatcgtagtataagattaaaacagccccataagctaattgttcctcaactaaccggacttttcgtgtaatcagaatgatcgatgtgctgtatatcactaattcgtgatgctttcccaaaccagtttattgtctcgttatgaatttggttatttttcaccattgtgtgaatggccgaaacagactatttttgcaaaaaattaatcattcataatctattaagcaatgaaaagtaatactatttgtcaagtaattcttgcaggaagcatcatattggcttcttgccaatctaacaattctgccaagcaagatgagtctcaacagacaatgaacgaaaccgttatgaacaaagttatagattgcgaaatcagtgcgggaaacatcactttcactaatgccatcaatggagctgaaaattgcgtgaaactgcttgatgatggcgcattggaattccattgtgccgaaggactggatttcttcagtgacccgaatggaaaactgtcaaatacaacgcttcctattctgcttgtccccgttgagaacacgaaaccttttacgttaatagccaaggttactccggagtttacaacagagggattgtataatgcagccgacctttttgtatattcttgtgattcactttggcagaaactggcatttgaacaggatgaatacggtaaccaccgtattgttacagtaagaacacaaggaacatccgatgacaataatcatgacaaattagatgtttcatctgtttacctgaagatctcttctgatacaaaaaccattgccagctattattccatcgacaagaaaagatggaacatggttcgtctatacaagaattattatccaaagaacatctatttgggcatcagtagccagtgtcctcaaaaaggcagctgcacaagtcgttttgaagaaatttctttgtctcacgataatgttagcgatttccgcttgggagaataagccattatatattgaaggtgtaattcttaaaatggcatgacaaaagccgcagaatatttctactttctgaaaaagcttatgatttaagtatagttttggaatcaattgataacaaagaaaagaatcttgctcttatctttaaaaataataagaaagagcaagttctatcgattttcacaaagcgctttaaatcatccatttacaacttttctcagaaaaacccactccaaggtatcaaaagagcacaatacttcccgcactacatcctatctttgcaatgtcatcagaaataaatgatggcaagtaaaccctattttttttaaccaattaaactttaattattatggctttagagtatgtagtgaccaaaagagtgtttggctttgacgacacaaagacagagaagtatgtagcgaaatctgtacgttcgggacagatgagttttagtaaaacctgtgcaaaggttagtcgactttgcggaatccaccgaaaggtagtagatttagtagtcagcggtctggttgatatgatggcggaggatattgatgacggaaaaagtgttcaattaggagaattcggcattttccgccccaccattaaggctaaaagtgcggatacagcggaaagtgtaacggcaagtaatatagtgcgcaagcgtattgtatttactccgggaaagattttccaacgtactttgggagaaatgagcgtgacacgttctattcccgttgatacggattatacggacggaagtagttccggtggtaacggcagtggcggaaatcagggcggtggcaaccaaggtggtgacggcggtttggatgaaaatccattaggataaatctccttgtcagagtgaaaaagtgagtagtgaagttctttcgctactcacttttctgctactataaaaaattcactactcgatgtaaaatcattcttgccgagtagttctttataaatagatattttacgaaatcctacctttctcaatatacttgttatttcttcctccgaataatacctttcccaaatgatgaaatgtttggctgtgtcttcaagtatcaggttatattgatatgcaaaaactttgttctccggataatggaatgtttggcttagaagtaaatattcactttcattccagaacccaccgcaaggggcatattcccaatctcggctttcctgtctgtcatcaataatcccttccgagaaaacatcaaaaatgagaatgcctccatcagccagcaaaagatatatattgtccagcaatcggtcgcgatcactatccggatgggttcccatatcacaatagatcatggtgattgtatcatacttacccataggataattattgatgtagtcacctaaaatatagttgatttcctcccgttttccaatggcatattctatagaagctttattaaaatcaatgcccgtcaccatataatccttatctgctaaaagcgatgtgtacagtcccggaccgcaacctaaatcaagcaaatgactttggggttttgtgtgctggagtatgaaatccactatcttcagaactgattcccgcttccggctggcaccatcagattgcggatcaaggtgctcttttaatatctgctgctgaatgtaagggtcggtccaaatgttatgaccggacttttcaaataaaacaggtttatgatctatgattctcatgtcttcttgtagatagttctttcatattatttattaatagctcattggcaaacaaatatctgtttttccgaatgatcacaaaatgcttcttcttcaaaactgccaaacttatgaagaagttcaaaaccgttccattccaggtatgaatctaactcttgaggaaagaatagcctcatatccaaattctgaaccgaatcaaactcaccattaatgaaatagtgccattctatgcgatttatctgagttttgctctcgtatcgcataatctgctttatcaatacttctctcccatctttggtggtatattcagcaatttctattggctctttttcatgttctacaatgtattggatattaggattaaaacaatctaacagaaatataccttctgctttgagatgatttttaaccgcacgcaatgccttaaacaaatcttcattttgatataaatgatggatcgaattgaaaggaataaagacaaggtcgtatttcttctgtaaatcgagagttctgatgtcagcctcaataaattctatttctaatcctgctccggcagcttttactttcgcttgttcaagcatagaagcagtgtagtctaccccgctgatatcatatccttcctgcgctatcggaatagtaagtctacctgtaccgcaacaaagttcaagtatacaggcagacttgtttttaggcagccatcgcttgtaaaatagcaaatcatctatatgggtattcattccatcataaatattcgcatcataaattaaatccccaac

SEQ ID NO: 6416 - DNA, 454 bp, Unknown
  gut microbiota DNA sequence
gtatttctttcactaaccacccatgttccttctgcttacactccatgtttcttccgctgacaagcgattttttagcatgtccacgtatgtggttcaagtgcttcacataggtgaagcagtatgcctacgattgtgaagcacgtaaaccacagatgtaggcacacagaattaaagcatctgaaggtaaagaaaacgctatgtaagagcaagtaagaggggatgcaaagcagagggaagcgtaaagtaagagcggatgcaaagcggaagggacatgaaaagcagaagggacacataaaatacagggcaactataattacaaaacaactcttttataccaattcttaatcattgattattagataattacaagaagtgcattttctgtcggcaagaagttaagagtttgtcgacaatctgattcttttttttgcttcacttttcattcatataaaaa

SEQ ID NO: 6417 - DNA, 29520 bp, Unknown
  gut microbiota DNA sequence
tcccaacccggattctgcaccatattaggattcatttgcatttctctcgccggtatcggaagactccagtaatgatctcctccccaggcataattattagttctggttccccatatctgggtcataccattcatcttgccttctttgtccttatagaacttcagatctttccaagttctccagcgaatctcatcgaaataaatcacgtcttcacctattaattcccaatggcgttcgttcatgatacgctggtgcatatctgtttttcctgtaacctgagtaaattcgttggttcccagtaattgggctcctgccctttcgcgcacctcattcactttgcttatggctccgggaagatcattcaactcattcaatgcctccgcccaattcaacagaacatccgcataacggataaacggcaaatccaattcagaatatatattcggcaactctaatccttcacccacaaacttacgatttaagtaatagaacttcaaacttgtatctgttttcaaatccccatatgtggtataagaacggaaaggataacgcatcacatactctttaggagttccttcaaccccaccaagaaaagaggcataaggggttataacggacattgccattctcggatcacggttttcataggcttttttaatcctctcctcgttaccggaagcatcatatttggacatatcagcccccgcagctactgcgttctttctttcagtctccgtgatgttattccgcaggaaatacaccatacgcttatcaatgcccatatcattatatccgggaataatgtcatcccaattgaacttactaccgtctctattttcgtaagactcggcaaactgcgggtttataatataattattccaccccaatccattgcctgaagggtcgggcggcaagcatctgttaccgaaacctctgttcttcttctgcgtataatccggatgatccagacattgcaaagagaatatcatttcatcgcaacgctcattttccaccttaaacagtttcttgtatgactcctcacccgcacctttatagagcgtgtatccacaatcctttactgcctgaaaatcatcagccgcctttttccattctttcatccacagatataccttgcctcttaaagcataggctgcaccttttgtaatatgcccgtaattggcatcatccgaactgtatttatccggcaaatccggattattgatacaggaagtcagatcatccactatatatccccagacttcatcctgagtggaacgtgccagttttgcctcatcaatatccttaatcggatctttatagtaaggaactccattatacaagatattcagcctgtaataccaccagcaacgcagaaacatacattctgaaatatagcggcttcttttagtctcatcaaatccctcgaccgtaggcagattgccaatcacatcatttgccttgataattcccttatagaatctttgccagggagcagaactccccttaacagagctcggagaatttgtcgcaaataagaaattaaaagtaggagctatacctataccgtaatccatagtactggaccatatatcaaaccacccgttggcaacatcgctataatccacatacaattgattatacacacccgctatcgtctgttccgccaaggtaggagtcgaccatacattcccttccgccggctttccattgggtgacaaatccatatctacgcaacctgcggttgacattcccacaaggaccactgcggccatcgttttcatcagatttcttcctttgtttatatttatcttgttcataccatttaattttagaaagtaacatttacaccaaaagcatattgtctcataggagcatagcccactccactcatcatttcaggatcaatacctttgaacttagtaatcgtcaacagattctctcccgaaacatagacacgcacattttgcatgcacaccttctgtacccaatctttggggagcgtgtagccgactgtcagattcttcagtttcagataattgccattatgtagaatatgctggccggaaacacttacctgagctgctttatccatggtgagacggggatttgccgaagtaagatttgtccgcgggtcattcggattctcaggatcgtaaaagtaatggtcataagctacatctttacccattccatacccaaaccaggttatactactattctcaccagactgataccagttgattttgaatccggcagcaccagcccagttcatagagaagtcaatgcctttccatgacaggtttgtctggaagccaaagtaatacttcggtgttttagaataaccctggaaatccttgtcatcgtcgtcaccataaatgccatctccatccaagtctgcataaatgatatcaccataccagatattactcttgccgattccctgtttcggatagaacttatatccggcatccgtcatggcctgcaaccatttcatatcatcttccgtacggatcattccgtcagaaggccctcctttcggatttaccgtaccatcggcattaaaatagtttctattgcctttatatacgttcagcacataaaattcattgatcatgtgcccttccaaaacacgctgcaagtctcctgttgaaacctcacccaaattggtataataagtggaactaccatccgcattctgctgccatccgcggacaagttctcctttgtatttggttacttcattcttgttgtaagagaagtttccggatatgccgtacgagacagaaccgatccgatcattccaacctaaggttatttcaagtcccttattagtaacctctgcaatattctgtcggggagaactgaacccagacaaagtaggtgacaaagttggattatacaagataccgtccgtcaacttattataaacctccactgttccactcaaacggtttttcagcatagagaagtcgatacccaggttggtaaccgtagttgtctcccattccaggttatagttggaaaaacttcccatgcccagtccgggaacctccttgttgccaaaagcataatggggagccgtagcataaacagcctgccattcatagttaccgattgagttatttccgagttgtccccaggaaacacgtaatttcaggttgtcgagccaattcatcttcttcatgaatttctcttccgacaaacgccaccctgccgaaaaggatgggaatataccccagcggttctccggagaaaaacgggaggaaccgtcataacggacattcgcctcaaataagtaacgggaatcatacgtataagtaacacgaccaaagacagaacgggatgaaaactctgtagtgcttccatcgatataatcaggctccgtcaatgcgtcaaaatctgtaagactggtatcaagcattcctttcttactaatgtcggtagtacgtgcccatttgcggaattcctcatagcccactaaggctgccacatcgtgtttacctttgaaaatctgtccccagtttaaggtggtagtatttttccagctctgatttccatcaatataatatttcacagggtactccgcaagcaattcggaagtaggaggaacattcatagtttctccacgttggaatgaaaatctttcctgataatcggaataatgccacagattctcctgccgataatgatcgtagtagaagttagaagtcaaatggaagttcttaaggaaatcaatcttaatataaggattcacaaagaatttcgttgttttataagagcctcccgcactattcagataataaaccggattgttgactaccggatcttcttcgagggcttcgggagctccatatttcccatcgtaatacggataggttcccggtgtacttttctgcatttgcaaaccattcaaatcatcaacattatttctttcctgatctacatgataaccccatgcattcagccccacagccaagaaactggcaacctgtgactccagattactgcgcatataatatttcttcattcctgaattcaccaccagaccgggattatccacatacgtagcattcaggctataccgggttctcttttccgcaccggtaagcgtaatagaatgttcttgcatcaatttcggattatacacctcatcgtaccagtccgtattcggataggccacataattcgggtaacccgattcggatattccattcggattgctggccgctgcacgccacgtatcaatggtagtttggctaaacacctgtgcctgccctgcattgtccgaagcctcattgataaattccatgtagtcggcatagtttgaaaccatacggatcagattagccggtgtattataggagaattttcctgaataggtcacgttgattttcccgtccgtacctttcttggtagtcaatagaataacaccattagcaccccggttaccataaatagcacacgaagcggcatctttcaggatggagatagaagcgatatcattaggattgacattattcagcgacatttccattccatcgaccagcaccaatggtgcagaatcatttaaagtacctgtaccgcgaatacgcagagtagatgattctgagttgggcttactggatgtctgcatcacattcaatccggccaccatacccgataaagtagaagcaagcgtagttacgggacgcgacaaggtcttatcatcaaaattaaccgtagcaacagaacccgtcagattcacttttttctgagagccatagcccaccactaccacttcatccaacaattcgttatcggacatcatcctgatgtccaagacactctgattgccaaccactatcgactggcttttatagccgatatacgatatctccaagacatctcctgtagccacagacaatgaaaacttcccatcaacatcggtcaccgtacccatagaggctcctttaaccagaatgctgacaccaataagagcctctccggtatctccgtcgattatacgtcctgtaatgttccgttcattttttgtttgatccgccgaaaggatagatacgtgcaccgtttcatttgccaaagaagacgatcccaccgcgttcgcagaaagactccccatatatataagcgaacacacgaggaattttgtatttacctgcataagatttaaagttttaattaaacatcattttttgttttccataaaaccggttcttcctgatagtttccggatactaacaagctgaatccagccattcaaaggtagcgcttatgtgcaatttccgatagaacgaaaaaatcattttatagaataatcgaggcaaaaaggtattagtagtgtatccggctatacctctgacacagatattgtacaaacaggtcttattcttgcatacagaatacccgagatgtacttgctccgtatcaaatccgtagtttcttcgtccagaggtacttctgagcaaagaatgtacggagcaagtacggctcagatacggcttagatacgatttaaatatcccactacttcagttgagaagttgttttagaggtcaagaatcaaacgcggacggaactccgcttccagtatttcccgctgacgggcatcagctacaaataaaccggtcgacaaaacttcgcctatggcaccattgtccgtaaccaccgctacttctcttttcccttccaccggttttccgttccggggattaataatatgttttcgctcatgcgaatcattaccggaagtagtgaggcattcattctgaagaagcaactcctgtggtttccgcccgtttagaacagcgccctgtccaaaaccgaccttccatccatcagccaagggatgatgcccaaaagccaatacagaactgtttcccatattgatcaatgcatccttcacttcataatgttgcagcaatttccgtgttttttccaaagcatatcctttcaggaatccggaaaggttgatagtcactcccggttgcaaaaagagaagggtacgctcctgaggtgatagttgaacactacggattaaattgggtgtataatcagccgaatgaatagttacatcaaaacatccagcggtacgggtatagcaatctacacagaaagtaagcatatcataaagctcgtggctgacctgttgcggatgtacagaagcagtccggttcaaatatgccagttcactatccgcatcataatagttggccatcttttctaaacgacacagcattttgtacaccgcatcgactaccgacagtaaaatgtcctccccctgcctgccacacagcattatatcgacacgtgtatgcatagatggaaaccaggcataaagcaagccaccctgagaaggtgaatatttataaagatgtttaataacgtccggcattttcaagtctgtgtttcctaaagaaaaatgaaagggcaagccacaattctgcaactcacccttttcaaagacatactattaattacaactctttgatctttatattcttaaaccaaacttcatcgccatggtcttgcagaagaatgtttccagactctgaattaccgaagttaggccaatctctatacttgctatatgcaaccagtgcatcccacatctggttctgacgtgtgtattcgatgagcttcacaccattcagccaatgctctacgcggtcacctttcacgataatcgtagccgtattgaaatctttcttgttgaaaggtttatctgccggagcaggaatcaaatcgtaaagtgaacccaatgtacggtttcctttcacgcccaatttagcatcaggatgcttatcatcatcaagaatctgaaactcgcaaccaatagccgaaccggctcctttattcatatcggggtttacgaaatatttcactccactgttagcgccttcagtaatcttgaaatctactttcaggataaagtttttgtattggcgggtagttacgatatcgccaccgttagcagattcagcaccaccactcttcatcactttcaggatgccgttttccattttccaacccttttcagggaaagaattcaatttggctcctctccaaccttctgaagtcttaccgtcccaaagaagtgtccaaccttcttttgcttcgttcggagagatggtattggggataacatttatctccggagctttccggtctgtctggtagcgctctacgtctgttgtacaaatgcggatattcttccaactgactgtttttccttcatcggcagcattaccgatagcatgtacctgcaaagcaataaaaccggcaggggtcatatcgtcccagatattggcacaaggcactccattgatccaggtagcgatagaattacctatagcctcgatacgagccttattccactcattgttcttgaaagcacttttagctgccggattttgtgtcagcggataaagccagttgcgacgggcctcatcatagatgccacccgaccaggcacgcttagagggatcaatctcaaactgatagccgtgcacgcgtcctttctggtagtctttcttgctttcactgcgcagctgcacaccagaattcaagccatcatctactttgaaatcaaactccaggataaaatcaccatacgtcttctttgtagccagaaatgtgttaggtgttcccatcttcgaaatgccgacaatagcaccatctaccactttgtattcggctttaccattcagcttcttccagccactcaggttcttcccattgaaaagcggctcccagttttgcgccgaaaccacagatgcacaaaacacaaacaaaagcaacaaataattctttttcatattgatatttcttctattgattatttaatactatgcaattacagtttatagaactcatcccatcctttacgaggcggtacgccggccaacattgcattcgcaaactcattatttgtaatctgcttggtgcgaggatcaaagaatatttgcgtattgagacgttgagcaatcactcctaatgagaatacctgccccagcacaccgttaatttcaaacggtgagcgggtcttttcctgtcccatacaagccaacaggaaattttcgaaatgattcgacggactcttaggtacttccggcagtttacctgccatttccttagctttctcctctggtattatggaaagtgtgctgccatggcttccacccttaaatatcaaatcctttgtataaataatctttccggggttcagactagaggccggcgtatctccctgattagttgcaggaatattaggatctaaaccggataccccataaccggcagggataggaggaagattgtccagaccatcataccatgtaatgtcaaccggcggcatacccttacgttgagggaaacggaacaggatagtggaagaataagggaagaaatagtcattatgtccattggcatatttcatagacacttcgtagggcaatcccaattccaggaattcgtgaaccgtatccaggatatgtgcaccccaatcacccagacagcccattccaaaatcgtaccagcagcgccactgtcccaaatggtagtctttgttatattcgtgataaggagttactcccaaccaggcatcccactccatgtctttcggcagttgctggccggaagggaacttatagatattggtatcccatttgtgccagcgacggggattgttcatgtgtgccgtcacagccgttacatccttgataataccggcatccatccacgccttgaactgaaaatagttagcttccgaatgtccttggttaccgacctgtgtagccaggttcggacgtttcagtgcagcttgcatcagcaattctccttcatagaaagtacgtgccagaggtttctccacatacacatgtttacctgatgccaaagccagcatactgatagggaaatgtgaatgatcgggagtagctatggctaccgcatcaaaatcattgcccgccttgtcaaacatctgacggaaatcgcggaagcgtttcgccttaggatactggttcatcactttctgggtgtgagcggctcccatatccacatcgcacagagccacaacttctaccataccggtacgggcaaaatcgtttataatctgctcgccacggtttccaatgcctatataggcaatcttcactttatccgtcactttcctttgcgtagtggaagcacgggctcccagcacatcaccggctccgaatgccagtccggcagaagccattgtcatcgttttcaaaaaatctcttcgtgtcgtcatatatcattggtattaattaagttactgaatcttgatcatcttcaggccgcatttcttttcttcaaaaacagacttcttatcccatagaacagaatgcgcaggattgtccaaaagacataaagcacgcccgaaaacgcgaggacatagaaaaaggatgtcagcatctccgagaaaggtgtctcataagaaattatggcatacagatttgccagattgcctataatgaagcacgccagcaaagtcagcagttctatctttttccggcgggcagtaatgactgtatttttcatacggcttcaggtgttttagcttgatgattcaggtaattgattttatattcatcggggaagtatagtacccgttcttcctgtaaggcctgatcgcccaacaggcaaagcatacttgcataatagccctcttcagctatgcgttctggctgcctacgggtaataacagcctcaacaaaagcttctaataacaaagaagtaccatccgatttaggtcgttctcccagaataaattcccctttgttttcattggcagtttccggtgcccagctagttccggcaaaaggtaaggaatcaaacactttattctcccagtcgttaatcatctgcaaaaatccaggtgcaggagggacactttcaaagaagtatttacctttctccggctccaccgtccccagattacccatgatttgttcttccaaaccatagaatttattggatatgacagaatcaaatgtcatcttcactccgtcatcgaacacatatatgcaacttacattatcatatacttccctaccgtctttccaataggtgatagccccatgtcccatcactttctcgggaagcttttgcagtgcccaactccctatttgcaactgatggcaagccagttcagtcatcagtcctttggaatattcgcgatacagacgccagttaatcagacgttccagatcaggtgaaggcacttcccgcctccagtctccattccggttccaaaaagtacggatggcgtttatctcaccaaaagtaccggcatgaatcatttccatggccttaatgtatcgcggatcaaaaagacgttgctggccggtaaagaatactttctccgtactgatgtgcttattatagatgcggaaacattcttccatcgtaaagcctatagatttctcacagaacacgtgcttgccggcatcaaaagcatccagcactatttggcaatgggaattaagaggagtagctaccagtacggcatcaacggttttatcttccagtatttcccggtaatcgtcataaactttagctttcggagccagctccagtgctttttcaatagaaggctgatagatatcgcacaatgccacaatttctactttaggattctgtaccagaaagctcatcaaaaaacgtcctcttgaacccggaccgataatagccagacggcacttttcaccggatgtttctacaacttccgaaaaagcagaaagccaagggcttgccgatagcagcactccggctccaatcatccctatatctttcagaaactctctcctgctgatcaatgtatctttcataatataatctttaaaataaagcctatttcccgtcttttactgaaggcggaacagcgatataaaatgacagtccaaaaatagcaaaatattgagatatagagtataaatatttatccaaacaatgcgaaaatagtaccaatcgcccctgttgtcactttataaagtccttaggcagaactccaaactgcttctggaagcattttgtgaagtaagaaggggtattgaatccagtcatgtaacacacttcattgatcttacattctccttcctgcaacagctgtgccgccttcttcagacgttccagacgaatgtaatcattcggggtcaaatccaatatcccttttattttccggttcaggctcgaacggctcatattcagcaggctcgccatatcatcaagacagaattcaggattttgcatattggccacaactacttctttcaatgttttaagaaaggtttcgtctgctttagtcatcgccatactgttagcttgtacaaaaggagaatgagcaaaagaaacccgcaacttctcgcggttactcaacaagttagacacacatactctcaggtattccacagagaacggtttttctatataaacgtccgcaccaagcctcataccttctatttttgcctgaagggtggttttagctgtcaataatataatgggaatatggctataatcgagctccgacttcagatgttcacacagttccaatccatccatctcgggcatcataatatcagaaataaccagattgaccgtatgttctcccaacactttcaacgcttctataccattgacggctgtcagcacctgatattccgatgacaattgtttagtcacaaacaaccgcatctccaaactatcttctacaaccaacagggtataccggcattgtttacgaccggtttccggttctccttctccggatgattcttcattcattaccggttcttttcgttctattgtaacagtttgtacatgcttcaacggaagtgacaacaggaaacaattacattccatggaatcttccatgtataatgcaccttcatgcagttcggcaagcaaacgggctaatgccaacccaataccggtaccggatacagagctcaagactccctccttatactggatgaacggcttaaaaatctcttcacgcatttttgccggaacaacaggaccgtcattacaaaccgaaaacaacagtttatcttcttccacatacagcctaacgcggatataagtttcagaatacttgatggcattggaaagcagattactgataatcttggtcaatccttccttatcgaccgaagcatacaccgtttcgggagagtcaataacaaattccaattctttctgacgtgccgaaagtctaaaacgtttacacgtcttttgcaggatatccgacacatcacattccacaaaattcagttggaatccttgcgtctccgtttttctgaaatcgagcaactgattgaccaaatcgagcagccgatttgtattcaggtccattatctccaaatcatccctgatttcatcggataccgatttggatgacaacacattctcaagcggactctttatgagtgtaagcggcgtacgtatctcatgagctacattcgtgaagaaatctattttagccgtgtacagttccctctccttctcacgctcaaacttctccatggtctgctgatgcttctgttgggtccttctcctaaagtagaaaataacggcaaccagagaacataaagccaatagtacataaacgacataggcccaggtagacaagtaagaaggaggtcgaatacgtattttaagcacacgttgcgcttcattccatttaccgtcgctattagatccctttatacgcaacgtataacttccgtaaggcagattggagtaattgatcatggagttcctgcctaccgtataccattcactgttaaaaccctccagcttatactctaaccgattcatctcgggagcctgataacttaaggcagccacctgaagagaaaaggaattctgattggcatcaagctctatttcatctgaataagtaatgctcttctccataggagaatccggactatccactgataaccgcttgttgaacaagtaaaaatcagtaatgaccaccggaggaagaaaagtgttctctacaaaagtttctgggtcaaaagctataaacccattgatactgcccaggtaaatacgtccttttctgtcacaatatccggactggaaattaaactgattgctcaacaatccgttggccgtggtatagacatgcttgctctctgtctccggattgaagcagacaagaccgttattagttgtaagccagagatttccccgcttatcctccaccatcttatagatagtattacttggaaaacctttcgacatatcatagcgggtgaagttatccgtctccggattataacggcagaagccctcacccaaggtcataaaccacagacattttctgctgtcttcatagatactgatcaccttattgtaagagagcgaagcagagtctttttcattcgacaggtaatttttccacttctgacttcggacattatagcaaaagactccattggagaaagtagcaaaccagagattgccgttgaaatcctccaatatatcataagtgaacatgctcttcagttcagcaatgcgtgtaaagtcgtcagaagagcggttgtatttcagcagaccggccgttgtaccgatccagacatcgcctgtagtggttttgcaaatggtaaaagcatcattagcggacatagagttctgagttttacctctggaataatgcttcacttgcctggtatgcaaattcacccggtttaatccaccggaaaaagtgcccacccatagatcatctccatccagacaaagtgcatgaacatttttgtaaatggcaggatgatcaaaaggcactattttaccgttcgcagggtcataattgaataatcccttatcttcggtacctatccacaacgtaccgtcattactttcgcatatttctcgtacccgacgcccgaagtgcctgagatcatctcttggatagaatttctcaaaataagtccattgatatggataatagttcacaccaccgaaatatgaacctatccacataccattttccttgtcacggcacagtgaataaatggcgttatccgacaatgcataagaatcatcctgatcaggaaccgacagatgtgtcaccttatcatttgccagattgtatatatacagaccagattccgtacctacccacagctcatcatcggatttgaattgcaatacgcgtacataagcgttcaacaatctgcgagttttgccggtggtaaagtttatctcagtcaatccgttaaccgaagctatataaacgcaattgtgcggcccactgacatgccagttaatgatatctcctttaaatatctcattgccatctgcatccttaaaaggttgtagcggactttcaaaattatcctttgtgtagtaaagattgtcagcatacaaagccaaccagcaggtactttcgttaagccagaaacgagctacattggacatgcccgaatcatgcagataattccgtaaccttttttcatggttgtagcaaaacaagccctgattctccaccgatatccaaatattatcgtattcatcgcttccaatcatggttacgaagtctttaatgacagttcctttatcacttgtctgattgaaagctgtgaaagaatcaagcaccggattatagataaagactcccccatccgtccctatccagatattcccttcatggtcttcataaagtgcagtaatgaaattcttgcctaaaccggaattttcctttttgtatacgcggtaagatagaccatcataacggttcagaccgtctttagtcccaaaccacataaagcctttcctgtcctgcaaaatctgatataccgtattttgtgagagaccgttccggatgtccattgtcttaaaatagtaatgaacagcattttgtgcatatgacggcaacgccgtcaatatgcacaaataaaagaaaagctttataatcgttcggttcataacctcctccttcccggaagattactttttcaacgaattacagatacgtgtatttatttctttagcacgcttttcatccagtttaataaccttacggtcataggtcatcaggccattcacttccacttccacgtcagtagtctgtgtataaacagctgcggagaatcctctgtctaccatcttatacagcatatcggcatacttcacatattcatccgtagcttctttggaagaattaaactgaacataaccccagttacggttcggctcccagatatgatccttcagaacaagaccgataccaccgtattcacccaaaacagttgcacgctgagcatcatacaagtacatctcaggtgccggataattatgcaggtcaagcatatcaccacaagtataatgattaccgccacttgctggattcaccaaacgggtcggatcatattgtttcgtccattcagcaatttcaacggtcttaaactgtccccaagcctcattaaatggcacccaggtaccaatgcaaggataagaatacagacagtccattatttctttccattctttgcgataataagcttctgattcggctgaacgcttcatttccgtaccatcaaagtacttccggttctgccattgcgggttgcggtcaccactcggcatgtcttgccacacaataattccaagctggtcgcaatatgtataccaacgggcaggctctactttaatatgtttacggatcatattataaccaaaatcttttgtcttctgaatgtcgtacagtaaagcttcatccgtaggagccgtatacagaccgtcaggccaccaaccttgatcaagcgggccaaactggaacagcgcttcattattcagttccaaacgtacgataccattggcatccctgcgagtggaatatttacgcatggccgcatagctatccaccttatccacaatcttattcccttcttttaaagtaactttcaaagtatagagaaaaggagaatcagggctccacagttttgcattctcaggcattgccacttctacaggttccccattaatactcttaccggcagcaattaattgattaccatcatacacattcacctccacgaagtctgatgtgctgttggtgttcagttcagcttttaccgttaacagatgacggtcaatatcaggagtaatacgaagattctcaatatgtttaccagcaacaggttccagccatacagtttgccagatacctgttacaggagtgtaccagataccttccggtctgctgacttgcttaccacgtggttgagggcctctgtccgtagggtcccaaacctttacaaccagacggttgttacctttagccgacaaggcaggagttatatcaaaggagaatggagtaaatcctccggtatgacttccaaccttaatatcgttcacccatacatcggttttccagtcaacggcaccaaaatgtagcaaaacctgttttcctctccaggctgaaggtatctcaaagctccgttgatagattacttcctgattttcgttcactctttttcctactccggacaaagacgattctacagcaaaaggtacgagaatttggccttcaaaatccgttggaatgcgtccacctttatcaataatagcataatcccacaaaccattcaggtttttccagtcattacgctgcatgatgggccttggatactcgggcaatacatcggaaggattgatctgttctgcccactttgtctttattctatctccggccggtttccattgagccgaactctccaaaataaaaaacgttactaaaaataacgagatgaataattttttcatggtatgtaactctatttaatgtttggaagcaaagttagctacaaatttattttcagaataacgcaattgactcaataaatgcaataatctttccatttattcgctaagatagaaagatacacgagaaaaacataccaatttgtgagatccaatagcaaaaaataaagaagatgggaaattataaaaaacaagaggttaacaccttgcaaagacttaattctcaagaaaagctccttttctatcaggtaatctgtcgtttcaaagcatttgcatatccctcgataatcaattccaacccatccgttaattcttgtggcgaaataacaatctccaattttcccaccgtagcattttctgatatttttttattagggaagctgatctgtagttcatcgtttataacttccaaggcaaattctgccgtcacagtagccttctctattttagaagccgtaacaggtaccaatgtgattaaagggacctgaactgttgtagtagtaactgctccggtatcatccaaagcgggatattcaagttgcactatcttcggaaccaatgcccctttatttttcccctccccgtcaacaggcttttcaaaatacttatccagcaaaccttcattcttatccatcagtgagtcgctggcacttacaatggcatgatggatagcctctacaaacaatttaaagctaatcatatcgatgagttttatgattcgacattatgctattttactttttctgaggtgccatcttcttcaacttttcaaagttgtcgaccgcctcactcactactgagcgactttccgacgccaacccaatcgccgcttgacaattagggcatgagaattgcacaccttgaattagcaaatgcaaatcaatgggtatttgagtcctacataccggacatgggatatattgatctatcatacttctattcttctttttccgactgtttatctatcttttgtatgggctgtatcgattttgtatacaaatcaagtaaagtcaatactcctttaggcaaaggtaatctgcccgcatgtatattcactttaagacggcttgacaaagtactatcatattgttcacgggagtttttcttatattcctgtttggccggagcaattcttccattcagaaccgccttcttctctacaagctgcacatccgcatttacttgcgatttataatcataagaacccaccgatgtgatttccagatcaaagtccacattgatcttatctattgcaagagaatttaaaggcaataagcacagtaaaggaacctgaaaagccattttgttgatagagatgtatcccggatcagtgggttgtttcgtatgatcaacaaccggctgactcagtaccatctctatcataagaggttgtcgcaagtcgcttccctcctcttttgtgaagcaataatcaagcaagaactgagcctgcccggtcagcatcataacattggctttcgaggccgccaccaaaggtgcgccaatgattgattcaatgttaagttctgccccaaattgaggtttgaatgtaccttgctctttttcagacataatcgtttatttcgacttgatattaaactttcctgaccattctatcattcaaactactttcaggatgctggaggagtaggagtagaaggggcaggcgtcaattctataggctgaattgcttgcgtaaatgcttcgataatagtgtttactcctttaggaagtggcaattgacctgcatgtacatttaccgtatacttggcagaattgctcttctcataatgtgtattatggctcgaagaatcttttgaagaataactggccgaacctttaatagttgtacttagcaacccccaacctattttagtttcaaaactaccttcgcctgtagtctcagattcttttgcttgattgtcatcttctgaaaagcttgattttacttccatctcaaagttaatatccacagtttccacagccaatgaattaattggcaggatcgtcaataaaggtagagtaaacttagtactggcctgaggaattcctttagtagtatccataccctgagttataacacttctagttaataccatatcaatcatgataggctcataattataaacaggcggtttttcgctcccactaatattcttttttttgaagcaagtgtccaacataaacatcgtttgcgtaagagccattgcagaattcgccttagcggctgcattcaaaggacctccgattaagctttccattggcagcccggagaattgctgcgacatcgacaataaatttgtatccataataatgcgttttgaagaagttattaaatatgttaactaaaactcagaagtctcttaatccatctttttatgcattctaataagcgagcaaaaaatccttttttcctcttaggcttttccgccggataaaaactaatagtaatgcgttcacccatatgcctttcacatttatcccgattcgtaatgtgacaaagttagtgacataaaagcataaaaagagaatataagtgataacatctaattttcacaattagctatttatcacttacttacaaagagaagtaataacaatcttcaaaaagcaggctaattagcaaccttcaattttatccgatgcctcctttgagccacaatttgcttattgacattcccaaagcaaagagcaatggtaaaatcatctaacccacaaattgagaggcatgaaaatagacaatcatcttccgtatatttaggataggtttggtgcagatactctatatagtccttgtatatctccataatagtagaacgaagtttcttctgctcattttccaataaaatacgtaaatcctgtttgtttttagtcttgtcttgacgactaagccgttctattgttttataaatggatgtctctttaaagatcacattgcataattgcgccttttcatcggccaattttctgatttcattttctttctgagaaagcagtttttgagtttcttcttgtttatccctcaataaagaaatataatactcagtctctatcgcatgtacttccaataaagcctgatcgtatttatgctcctgttcgagaaacttcttccgctgctttgtccgctgaatataccagaccagaaaaagaatcacgagtaaacagaaaacgatcagatagataaatggaaactgcatcttcactttaaaatattcggttatctgacagcaaagaaaataaaaatataaagaaatagcaatatatatttcaaaaaaagctgactcacaaacctacatggttcatttgatccgctacctctttctattctgttacccgcagaagcacaacactcacattatctctaccacctgccgcctttgcagcttctatcagattgattgcagtaggttcttgatgaagaacttcttcaatctgatcatctgtaagcatatcacttaaaccatcggaacaaatcaaaaagagatcttcatccaataattgaccggttaattcggtgaaatcggcaaaagcagatgttccggcacccaaagagttatatattacgttggatggagtagtcatatctccggtcagctcccgcatagaatggtccgacgaaagttgtttcagaataccgccacgataacgatacaggcgactgtctccaatattcaccatatagatgcgctcttcataactgaacatgcctacaaaagtggttcccattccctcgtattgaggaagttcaacgcccttgtttgttatcagagcatgagtttcattcacccaattctttatctcgccggacagtacctcatgggaaagatcggaaggaagatcggtaataaaacggtcgaatgcctgggtagccaactcactggcaaattctccaccttcgtgtccgcccataccatccgctacaaaagccgtaaatcgagcctgaggaatgagttcaaacttctgttcgtatgtttcgtcacgataaagtcctccattgaaaagtatcatgtcttcattattggtacgtatgcaccccatatcactggcaagctgacatttcaataataacataaggcaattttgcgatttaatgattacaacctacgattaaaatgatctctattccatccgaatctattcaaccttaaaatcaagattggctatacgaacgatatctccgatgctaaacaccgcaggtacattcggcgaaagacggttaccgtttacaaacgtaccattggtagaatccagatccactatttcccattgtccggatgcgctcttctgtaagcgggcatgggtaccggaaacatatccctgagaagcgaatgcagatacataatcaccctttctacgcccaatcaccgcaccatttcccaaacctaaacgaatgcctgcggcagaacaaaccaaacgtacaggaagtggaggtacggatactcccggacgcattgttttttcaggctcagagggagccggactcacagaagaagccgaggaattcacggaagaagtcgaaggatgcacaggtgacaccacttgatttgcagcggatactaacggctgaccgcattgcgtgcatcgtttcccctttccaaacacatggcattgagggcaaatatacagttcaacaccacattgatcgcaatagtaactatcactttctatttcaactctgcatttagggcagttgactaatatactcatttctttagtaattaacaattagtgattcaattatcccatatcctcaggcaacaatatactgtaacttgccggatcaaagtcaggacgctccatttcgtgacgaagacgggaactctgattctttttcacccgatcgaaataattattcacttcacgggcattggcaaaattacgttcacgacgattatataaatccgtgaagtaaacacgcatggcattttctgcttcaggagtcagtgtaagcttatccttttttgccttcatcctaaaaatttgcgccaattcatcgggattatagtcctcaaaatgaatcaccttagtgaagcgggattccaaaccggaattcgtatcaatccattggcggatctcacgcggatacccggcagcaatgcaaaccatcttccccttataatcaagcaacatcggcaaaatggtattcgtagcctcctgcccgaagttatcgcccatcagtgaataagcttcgtcaataaagaacacaccgcccaccgcacgcttcacaacccgtgccgttttagtggcagtctgtcccacatagccttctaccaaatccttacgggttacttccaacaaacgattgctgggcaatacacccaatgagtagaaaatatttcccatgatacgtgccacagtagtctttcccgttcccggattaccgacaaagagatagtgatccactacaccctggaatttcttacccatagcttccgccttagcacgctccactttgatataatcggcaatctccttcacttcacgtttcacgctggataatccgatcaattggttcaattcagccatgcactcttcttcatcgatcatctttggcggatcatacggaatatcctccgcctcgatggtcaggtacatttcgcgagtcaaggtctgtcctccggcatgtaattgtgccagccgattggcacggcgggctttggttttctcaaagagtttcaccatttcccctgcatttccaaagttctcatctttcgatgtcaccatttcatcgactaatttaatcagcatctcttctgcatccggtgtcagtatattccctttcttcctgataagagaacgataaatacaaatcaactggtctgccgagtagtcctcgatatgcagaaaattactaaaccggcgccggaagcccggattggcattattgacaaattcctccatttcagcgcgataaccggcacagataaccacaaatttcccggcatccttcaccattcgggtcattagtgcctccacggcttccactccagtctgatccttacttccacccgcactgataggcatcagagcataggcttcatctataaaaagaataccacccattgcttcgtcacaagccttatccacaagtttggccgtctcattctgatacgtacttatcagatgtttacgctccttttccacgactttatcggtaggcagcagaccgatggctttaaagacctctcccaacttacaggcgatggtagtcttacctgtccccggattacccgtcagcacaatgtgtacaggagtcacctcagcgtcagcaatacccatttccatcatttccttgtccatggctatcttgttcgccagcgcacgtatctctgcttttacgctgtccataccgacgaattcattcaattcagcaagtacaacgtccagactcttgatgtttttgctttcttcaccttcaatatcggcacgcgtcagtacatgcaccatagacgcatcataatccggtgtacccttcagttccagcaaccggactccctgattcttgattgcacgatccattgcgttccgtacctcacgggcattaccgaaattgcgtgtacgggtcaggtacatcttcgagaagtaattacggataaatgcctcggcctcttcatccagggtcagatgctctttcttcacctgtcggcggaagatttccgtcaattcatcggctttatagtcgcggaaagtcaccgtttcattgaaacgggaggccatccccgagttggaactcaaaaattctcccatctcttttgtatatccggcagcaatagccacaaactgcccgcgacgatcttctaccagtttcagcaacgtatcaattgcctcctgaccgaactggtcattatcaccttgcttcaatgtataggcttcgtcaatgaacagtactccgcccatagccatatccacatatttttccaccgccaaggccgtctgacctacatatcccgcaaccagctcctttcgcgaaacttccaccaactgaccgatgggcagcacttccagcgaattcaggatatcagcaaagatacgggcaattgttgtctttcccgtccccggattaccaaggaacagaaaatgatctttgacctcccgctttgctccggcacctttccgttcccgttcaaaatctatcttattaatgattttctgcaccgttgccttgatttcatcgataccgacaaactcatccagctctgccatgatctcctcataactcttctgccggaactctttaccgggaatatcctcaggaatggcaaccgatgcattcggatcgcgcttgatagtattggcaaagatatcagccgcctttttcacagccaaatgcccattcccgaaatcatctgatttctgtcgcatctcattcttaaacacacgttccaatttagcatccgcttcctcactcaatgcaatcccataacgttttttgagttcatggatacaaagctgcttcagttcctccatactgaaatctttcagatcgaagtaatactcaaagcgattgcgcacatcaggattggataccagaaactctttaaaggccgatgaaagcccggaaagaatgactatcggatcattgttccacttatccatacagctgaacagcttatcaagcttattgatatcattggctgcacccgaaggcaaaagcttctgcacattttcaatgcaaagaatcccccctttcagatcggcggtattcttttcccactctttggcaaactcctcataatccactgcatccactactttcatggcaggcttcttgataataccactggaatacaatagtttttgcaatactcctgccagtttggttttaccggttccggtatttcccgtaataatcatgtccatgcccagacgaatggaaatgccactacgctgtgcacgcaaagcgagcgactcacaagtatttaccaaatcctgcaactggttcttgacggtttccatccccaccaactcacgcagcggttcggtagctttagtaaccacattggtaccacaccatttgcagaaaacagccttttcacggttcggcttattacatttcggacaattcatagtcatcttcatttatcagttctctacatctgctttcgcttttttgaaactgaagttcacttgttttttggtcgtataattctcataagtaccttcaaaagcatctattccatcgccggtgaacgtaccgttatactgcccgtcgagagtaccgttcttgtatacatcgtcaaaatggatagtattcgtaacggtattcacagtgcccgtcagtgcttcattggtcagattcgtatattgcacatgtatggtagctttcaagccttccgagtttgctgtcgttatgttcagcgtagcattacgcccttcaaacgtaccctcccatgtacctaccagttctttaagctttccatcgttttgcagaaaacgggaggcatccagtccgaatgccggagtatattgcacaaacaaataggccagccaacctaccaccaccatggaaagtacagcacgataagaaaacttacggatacaatctttcagatatttagcatattgcgccgattcaccgccaatagaagactcaaagtgtgtccccacactcgccttaaaagcaaaatgcaatggctccaagcctgtttcctcaaaaccgggattcagcaaatgatcatgcaacctccgctcaaccggaagcttgaaataacagcttttcatcagataataagccagtaggagcaaaagtccagccagtacataatgagcatagggcatgatgagatccagcacaaaatagactgtatagtagataattgcccccacaataaaacctaaaatagcacttccgataagattctcaaaatcagaagttacaaaaataagaataccgaagatgatacccatcgtcacaatggaaccgacagagaaaccggacaacgggttttctgtgaacggaagcccgtagaagcataatgcaaccgcaaaagccaaaataggaatgaaacacagtattcccagcaagacacgcatcaccgtcagcgtcctacaacgtaaacgcactttccgcaggttcttattcacaaaattggtggcaatacggaaattggaaacatctgtatctttactatctattttttcgatgaattcgagatatttcaccgtttcctgctcgtatgcgaatttgggagaaagattcttcaacggattctcctgaaagaaagtagtaagccagtctctcaaatatccactctccagttctgccttaacttctttcgatggaatggacctcaatccgtccaaatcggttatactcttatcactatccttgaagtaataataaggtaaagcacccaatcccttgatcatcttgaaagtagctattatccagttgtaaggacctgctttccggagattatctttggatttcagttcaaagcaataatttatccattcaatcttatcatcatacacacccttagacttcagatagaaatagagccgcgaacctttcagacttgagagcataccgagaatataatcggcatattcatgatccggatcattcttcggtgtattcttgtaaaccatcaactgttgattgatgaattgggctatttgagtatgtgtgaaataataattatttgctgtctcgtccatttgcagggtgaaggaaactttaggactcaaattataaagtacaccgtaagttaccgcagcatccgatgtactaaagcctttcaattgagtacgtatcttccctaccaatcctttatcacggcctgccaaccatatcaggaaagactcttctgccaaatcattccacgagtcggcactcaacatatgattataagcataatgaagaacttcttccggtgtattacaacgccccaaattccccttttcatcgatcaattcataaggacgtgaaggatcaagttcatagatcaaacgccataaagcctccctttggcgaccttttttattaaacaagggagctgcattatccgtaagccgcttcagatcgtgcgcattaaaaaagagaaacaggggatcgttcgcattcgccaaggtagtctggtaagtgttgaaattctcaatgagagattgcgctatttcttcggcggtagtccgcggacgtcccttgacatcataatagggcatatccacattgagcgtataacaggcggcatacagccctgcagtctggtctttcggatagcgcttttccacaatatcttcgatttccgaaaccaattccggccgctgattatcattcagccatttagtaagcttaccggtatagagatatttaatggcaagattctgatcctgtcgcataaaatcagccaattgttcgggtgaatgtgctatctgattctttccggcattaaaaataatactgaaacgacgtttactttcctgcccgacaaaatcactgaatacatcctctccccgagcccaacgaacgatttcggtaaatccacaacgtttttccggctgaggtgcggtcaatgcttttattaattgcagcgttcgtcccgataaatccgcaggaaaaggcaaatcccccgtgcgtttacgcttcatcagttcaaattctctttctttaaactctttctcgcccatccacagacagagcaaaaccataccaagagagtaaaaatcgctcttcgtatcaatctccacccgattctcaccgggaaccgtataatacatttcgggagctgcataaatgcgggtacgagcctggtccgtacgggcaactccattctgatcgcatcttaccgaaataccaaaatcccccagcagtacctgattctgattctcatcggcaaaaaagaaattacccggctttatatcccgatgaataaacccatgcttatggcagaaatcaatggcggcagcagcttgtttagcaatttcacaaagccttctttcgtctcctttcagatttattttatccaaagagcctcctttacagtaagtcattacttcataatgcctcaattcaccggaaacacgcggattatcccactgaccatgatctatgatatccactaataatcccgagcgcggagtttgtcttataatttcaagtatctgatgattaggaggcggctcaataccaacataatagagttttagtacgtactgctttcccttattttccaccagaaagatctgagcttctcccgttccatccgagattacctttataaccctgtaattcagccctttaacaagatattccgtatcatgctggcgagtgatagcctcaatcgccttttgctgttcggcacgtaaggtcgcatcatctgacgaaaccggacgtaacgtcttatcctccattccaccgggatgcagagttttgtcaatgttagctacgccagggcgcaaggtcttcttactatcatcttccgggcgaagagttttttcttcttcaccaggacgaagggttttctcggctttcagggcagggcgcaaagttttatcaccgtccgcactaccgggacgcagtgttttatcactgtctctcaagtcgctcataattctatatagttttaagattagccaatccggcaaggcaccctgaaggatcaatcatcctgatactcaaaggtttttgtaacagtcaccacatcttcatatacccaagtaccccccagttccggctgggcacactcacttgggtgactatggtggcaaccgcagaggttacatatccagcaaacaggcgcttttgttacggatttccgcaaaacaggcaatttccttgccgaatagtaattccgctgcatctgtggcgtcatatctccttccggacgaagtttctccatcagtaacttcatctcttccagtttctctttataagattgctttgcttcgtcaagatctaccttcttcacattcagttgtatcttcggacgagtttgaacaggttcctccactttcggttcaggtctggcaacctgcattccttcaagagaaccgcttcctgaaaagagatctttatattgttgtatcagtttcttatcggcttcactcaattctacagggggcagttccggttcccccaccggaaattcttcagagacagtattcagtatttgttcttccaaatcggcaagttcctgcgccaatgccagcatttcctgaaagacggggtctttcttcgccttctgcatttcctgcattgccatctcattcaggggacgattacattttcggcaaaaactgcggaaattaagggtattgcagtcaggacagataatccctgtgcgaggattaccacaatcaggacagaagaaatcattcgcttccatcgaggcaccgcagaatgagcacaattctgcatgaagcccttgtccgcaatgagggcatatttcccaattaggctgaacaggagagttacaacgcatacatgaagttcctttaagcgccatgccacattcttcacagaatttatcaccactgtgacaaggtgtcccgcaattaggacaacattgcggctgttccgcctgtttctccaaagtcttctgctgcgcctttatctgttgttccgataaagattgatgttgctgttccataaaccgtattcagactataagttgaccatccagattttaagtttccaaatatatcaaattatttgcggaatacgatggcgacagatagaaaaaactcttttttgtattagtaatgagttttcaccacagagtaacacagagtttcacgg

SEQ ID NO: 6418 - DNA, 3344 bp, Unknown
  gut microbiota DNA sequence
tgggtaccgttggatatatagatgcgacgcgtccgatatatagatgcaacatgcacgatatatagatgtaacacgtccgatatataggcgcaacatgcccatagttaacgaacaagaacaatgacactaatatccctatttcacaaacataaagatgtcattatgcgaattccgctaacacacgcttgaattaaaaagactcttccagcacaatgaatcctcattttctttgaaatagaccatctgtttgcctaaaactaatgatgtaattgggcaaaactaactatgtaattggataaaactaataatgtaatggagtaaaactaacgatgtaatttacaagatggctacactattcggtgcaaaaggtgtagtcatcttgctaaaagggtgacaccatccgggaaaaagggtgtagccctcctccaaagccgatttattctgtctatttgaatacgaagccagatcattcggcatcttcctttttgctgcaattacatcaaagatgaagattatttggaataaaatagagcataagaagaacattgcgactccttttctttacaaacaatactcatcgtgcactttcaccaaacgttatccttgcgttttttcttctttctctccggtagggcttgaaagaaaacattctcacgcattaggattatcactttgtcaatctgtcagattgataaagtatggcatcactgagtgatttttggatgattcagctcatacaccggaagtttcagccgtaaagccgtcaaatgaggcgattcgggaaaacctgaaagaactgtaagaagaaaagtagatttatagaaagacaaatcaaagcgcagattcagggggacagtcgccatacccggacattaccgaatacggtttcatagacaaacaacattatatccatactaagtggtcgatataacagattatacagaaaaaatacagcagacattaacagaagtcccactatttataataaaaaattatccaaagggagttctttattaagaaaatttatcctacatttgtaccaagtcttgctgcttatagagataggtgacgcataagactataaaatgtgagtttacgaacgcaagaagcgaaagttattgttcccctctagaatctggaaaattcaaccccggagcaatagcaacagtttcttcacgtctacgttatattatataacataggcgtgagggctgttgttcatccggggcaaggtattccagaaccttagagggagatgaacagaaacagtcctcacgcttttttatatagtaacctccgccggagaggatagacggaagaaacagaaaaacacgctatgacaaacaggaaagtcacaaaatggttgtcgataaaattacttttagtgataagtttgttcttcgctgcaactgctacggaagcacaaaacaaaatccaggtgacttcattcaaccggatggaaacagatgtcaccgcccggatcaccgctcctcaacgggatcagaacggagaagtatgcgcactaatccgcatcgttacaaccgaaaaagacctaatgttcgaaccggatgcacttggaatcgtttcccgtgaaaacaagcccggagaaatctggctgtacattcctcgcggagcacgacgtatttccattatgcacgataagttcggcgtactccgcaattatttctatcctgacattattgagaaagccactgtctatgaaatggaaatacaaataggagacggaacgcagcaaacacccgcaaacacgaatacccaactaattgtgatgcgtcccgatccggcaaccgccaatatttatatcgatgatgaaaaagtacctaccgaaaacggactgttcaccgctaccatgaaaaaaggcacccatacctacagggtggaatcacccatgtacgcccccgaagccggtgttatcgatctgggtagcgagcaaaagatcatgagcgtaacactgaaaccccgtttcggatatctggaaatattctccctgcccgaacaggacgccaaagtttttataaacaatgagcttgccggacagacaccctacaagagtgaccgaatgccattacaagagtaccggatacgcatcgaaaaagattttttcttcccgatggacagtactatcaccattttcgctggcaagacgagcagccttacctttaaaatgaagtccaccatcaagcctaaagagccacgacgcacgctggtaatggcggaagtcggctatcacccttcacagatttcttttggcgccatggtcggcattgtcagtaagaacggagcgtatctacgcttccgcagcgacttcggctcggcatccaccgaactggaatgcgatgatacaggggcattgaccaatggcgcgggcacaccttattataaagaaagcgtcactaccaaagcacgcatgtctatcacggcaggctatttacgtcaaatcatcaaaccgctatatgcctacattggcgcaggatacggcaaccggattctggcatgggaaacgatagacggcgaactggtaaagaacaccgaccactccgccacaggcgtagccgctgaacttggcgccatcggacgactgggacaatttgcggtatccgtgggattccaaaccgtcaacttcaaataccacgaactcagcgcaggcattggcttctttttctaattcttaattctaatatccatttaaacgatgaaaagattacaatatatcatttggtgcagcctgctgctattcgtggcaagctgtgaaaaagacactgaaccgataaacttcgctccggtacccgtcactggtgaaacatccggcatcacccgatttgaagccattttatcaggtacggtaaccccacatcccgattcacctcaaggacagaagcataacatttactttctcgtttcctctatgtcttccaaattattggaagctgtagatacaattcccggcacaaaaaaggcagagaatgaatacactcttacacttaacaatctaaagccgggaacaacttactattatagtatagaatcaagcagtgggcataatgccgtacgtggcgcaatcaaagagttcacgacattatcgacggacatcccatcggttacactcagtcttaccagcaaaacggaaaacagcatttttgtaagtggcacaataacggacgaagggggagccacaatacagaccagaggatttgtatataagctctatacagagggcattaatgcccccacacttaccgacggaacaagcgtagcaggagagaatgacgagaatgacaactttgtgggagtgattaaagaaaatatacttccggaaactgcct

SEQ ID NO: 6419 - DNA, 832 bp, Unknown
  gut microbiota DNA sequence
ctgcctgcgtcaagttagctttggattgctggatatggcatggtacacccgtaccaccccatttgatggtgacgtgaaagcttacgaaaaagaagcatggaagaaagcacagattcttcctgtggtagaagatgcctgtatgagtacacagttctcgcatatctttgccggaggttattctgccggatattacagctataaatgggcggaagttctggatgcagatgccttctcactgtttaaacaaaaaggaatcttcaatccggaagtagccacttccttccgggaaaacattctttccaaaggaggaacagaacatccgatgacactatacaaacgctttcgcggacaagaaccaactattgatgcattattaatcagaaatggaataaagaaatgaaaaagatgaagacctatatacagttactgttagtcactctcttcttacccgcattgagcgcttgtgatcaggaagacgatgtcattgacattttcaccggaaaaacctggtacatgacttacattgcagtggaaggacaaaacaaaatgtacgacttctggcaaaacgatcaagatgccagagaaaaaagttttaagacgattacaggagataattacactttagtgtttgaaggtgctaacgtaaacgatgtagcaatcgggacttttagcgggaaagccaccagtgcctctgtcaatggtgactggagtgcaaatggggataatcgggaattaaagattaccataaaaaacggaggaggcaccgatggagataagtatttaggtaaggcttttatggatggactaaagagtgcattcaaatatggaggag

SEQ ID NO: 6420 - DNA, 678 bp, Unknown
  gut microbiota DNA sequence
ttccttgaatgtattgaaaatagatgcggcatatatggtggcaacagcacaaacaagtcctttggatcaaacacttcgtttcaccctctcgttcgacatggacgggcttaaagaccttctgggaagacgatgaaaacacgtataggtttcggattcgatgtccacaaattggtcgaaggacgggaattatggttaggaggaatacgtatcgagcacaccctcggacttctgggacactccgatgccgatgttcttatccatgccttatgcgatgccctgctcggagcggcgaacatgcgtgacataggatttcacttccccgatacggccaacgaatataaaaacatagacagcaagattttactaaaaaagaccgtggagctcattcgagaaaaaggattttcgataggaaatgccgatataacggtctgcgccgaacgccctaaactcaatcctcatattcctctcatgcaaaaaacactttcagaatgtatgggtatcgatcttgaagatatatccattaaagccactactaccgaaaaattaggctttacaggaagagaggaaggaatttctgcttatgccgtagtacttttggaaaaataacgaagagaaagccgtaaaatcaacagccttctcttctcttttctgcgatttctttaaccaaacaattctcag

SEQ ID NO: 6421 - DNA, 21926 bp, Unknown
  gut microbiota DNA sequence
gggaatcaaaccttaattaaacgatcatctaacttagaaaaacaggtttgcgcaaaatgaagactttcctacgtaaaaggagtacagaaatcgtgtgtacttgcctacatttgtcaatgtgaaagacatcagacttatataactctccgggctaaccaaccggaataatattatgaatcactaaatttgtatcttatgcaatggaaaaagaaccaatctgatttgcaggaaaatgtatctgttcgggtaccttttttatctgtatgttttttgttgctcttggtttgtatgggcgttacggcacaaacaaattacaaaatctcaggtacggtggttgctgctaaagacagtgagccgctgatcggcgtaaatgttcttcaaaaggggacgactaacgggatagttacggatatagatggaaattttactctatctgttcctttgccatgtgaactctctatcacttatgtgggatatttgggacaatctgttaaagtaagctctgccacgactcctttgaaaattgcattagaggaggacagtgaaatgctggatgaagtggtagtggttggttatggagtacagaaaaagaaattagtgacaggagctactgttcaggtaaaaggtgataatatagccaaactgaacacagtgaatgctttgggggctcttcaaagccaaactccaggtgtgaatataacgcagagttcggggatgcccggtgaaggttttaaagtaactatccgtggtttgggaacaacaggttcagcttcacctctttatattatagatggtatgccgggaggagatattaacaacctgaaccctaccgatatagaatctattgatgtgctgaaagatgctgcttcggctgccatttatggttcacgtgctgccaatggcgtgattctggtgactacgaaacaaggacataccggtaaagcggaaatatcttatgatggatattatggtgtgcagaatgtctatcgtatgcctgatgtactgaatgcacaggaatttgcaatgattatgagtgaggcacgtatgatggatggcttacctgattatgattatgcgtcgctggttcctgattgggaagctataaagaatggaacttggaaagggaccaattggttggatgaatcacggaatgagaatgcaccgatacagaatcatgccctgaatattaccggaggtacggaacaatctgtttattctatcggattggcatatactaatcaggaaggtattcttggagcaccgtcacaacctgaatatacccgatatacagcacgtatcaattccgaacataccttgtatcgtaaaggaaaactggatatcattaaggtaggtgaaaatctgacctactcgtattctgaaagaaacggtattgccattgatgatacttggagtaatgacattcgtaatatgttgcatgctaatccttttttaccgaacaaggatgaaaatggtaattatcattatgccattccatgggaaatacgtgaagctaatcccattggacagatgtattatgcaaatgggcagaatataagcaaatctcacgcattacaagggaatatttttctgactattcaaccgataaccggattaaaacttaaatcaaattttggctatacgttttatgcggataacagtcgtaattttacccctgtctataagctggcaagcaatactttcaatgataataatagtgtaagccaagagatgactatgggtggcaaccttatgtgggaaaatacggtaacgtatgatttcaagttggataatcacagtttcggtgtattgataggtcaatctatagaaaagcatggcttgggtgatacgttgggtggaagtaacatcaactctatctttgacgatttcaagcatgcctacctgagtaatactcccactatcactaatcgtaccagcctttatggatatccctggggcaaggaagcgctggcttctttttttggcagagtgaattatgattatgctaacaagtatatggcgactgcggtgttacgtattgatggatcttctaagtttgcccgtggacaccggtggggatatttcccgtccgtatctgctggttgggccatttcggaagaggcgttcatggagtctgccaagtcttggatggattttctgaaaatacgtgccagttggggacagaatggtaatcaggagattgacggctttcaatatctttcaacgattgcgtttgggggcgcggattatactttcggaccggataagtcgattctgacacccggaggctatcctgatattttggctaatccggatgttacctgggagacttccgagcagttggactttgggctggatgcgcgttttctgaataatcgtctgggactgaattttgattattatattaaagatacgaaagactggctacttgttgcaccgatgctggattcttttggcacaggagccccgtttgtgaatggtggtgatgtgcgcaaccaggggtacgaaatatcactgaattggaatgatcatatttcggactttgaatatagtgctactcttaatttggcacacaataaaaatgaggtaacgcgcattgccaatgcggaaggtattattcatggagacccggatgtattgagtaaccagactacagaaatgtatcgtgcgcaagtaggctatcccattggatatttctatggctattctacagatggagtgttccaatcggaagaacagattgctaactataaaggtgctaaattggatgggacaaaaccgggggatgtaatctgggtagaccgcgatcataatggtgtgattgatgatggggatcagggtatgataggcgatcccaatcctgattataatctgggattgagcttgaccgcatcctataaaggttttgatataagtatgaccatgaatggtgtatttggaaatcaaataatgaaatcttatcgttcttatgtagattacacacgccagaactatacatctgatatatttggccgttggcatggtgaaggtacatccaatagattacctcgtctgacgtcgggtactcattctaactggcagtatgtttcggatctctatatggaagatggagattatttccggatgcagaatctgacaataggttatgacttcaagaaattatttaaaaatctgccgttgaaacaacttcgtttgtatgtggcagcacagaacttgtttattataaccggttactcgggtatggatcctgaagtgggttatggtggttatcaaaattgggtgtctgggattgacttaggtttttatccaagtccgcgaacctatatggtaggggcaaatattaaattttaaaagagaagtagtatgaaaaaaatatggatattttcgatagtagcccttttctttatgggctgtgagggttttcttgatactgagaatctgaccaaaaaggacaactccaattttcctaaaacttcgggagatgcagaaactgcattgacaggtatatatgcattacttcgtgaaatgactccgggtgaggatggacaaggtttctttctgacagctgaattactttctgacgatcgcttcggtggtggtggtccggatgacagacgcatgcatgctgtggatcggttgaagaaagttgatgaaaacatgttttctgatgtttggaaacaagattatcgggctatttatcgtagtaatatgttattgaattcattggatggtattagttgggagagccaggaaacccgtaataagattgaggggcaagcacattttttgcgtgcttatttttacttcgatttatgtcggctgtttggtactgttcctttacttacaacttctgaacctgagaatgtgcctcgcgctactgcggaagagttgtatgcacagattgcatttgatttgaaaacagctatagaaaaattaccttctgttaaatatagtgctgccaataattctgagttgggacgggctaccaaatgggcggctgaagcattactggcgcgtgcttatttgttctatacaggttattatcagcaggaaagtatgccattgccggataacagtactttatccagaaccgatgtcatcacgtatttggatgattgcattaacaacagtggacatgacttgataggtgatttcagaaatttgtggccttatagcaatgtttataccaagaaagattataaatatgcacaagataatgatttgcactggataggggaagatggggccaatgtggagactgtttttgctatccgctattcagcaaaggccacttgggataacccttggtataacaatgaggtttgtctttattcatctccccgagagccggcaaatttggatgatatttttccctttggaattggttggggaataggaacggtgaactcaagattatgggaatcatggccttcgaaggatattcgtcgtgaggcatctattttgagtgtggaaaaggaaatgcccgactatggctggggatgtgataagcagatgaatgaaaccggttattggcagaaaaagtatatggctgtcaatgcttataatgaagatggagagagtgtaaactatagccgtattctctatccggaaattgattcggattatcagttgaataatacgcaggatttggtaattatccgttttgctgatgtattgttgatggctgctgaactgaaacgggatgcagctccgatgaatcgtgtgcgtgcgagagtaggattagatcctgttacctattcggatgaagcattacgtgatgaacggcattgggaacttgcttttgagggtttacggtattatgatttgcttcgttggggtattgcggcagaagttttaagtcagcaaaatggagtgaaagtactggataatatggtcgagacccgtatggatatgggagatatagcacaaagacttcaagctaccaagggattgatgccattgcctaagacacagattgacttgtctgccggtatattggaacaaaatccgggctggggaaatgagagtaatatgaattaatgattttaaaattttcggatatgaagaatatagcgataggaattttatcgatatggctgctggcagcatgcgatccggtggttgataataaggaaatgggaggtattgttagtgaaagtgaattgaaactggatgtgcatgctactacagatggtggaaatgagatcatcatgaccaataatacacctggtgtaggtagctattgggatcatattacaggtatatctactcagcagaccgctacggcggcattaccctttctgggcgaacaaactattaagttcattggcttttgtgatggagggcaagtgattgctacccggacagtgactattaaacaaatcgaccatcctgtagctgaagaatggggacttttggccggttccggaactaatggtaaagcgtgggtctggaatttggaagactacgatgcagtatatggtacaggtggttggttgacagaacttgaaccgagttgggacgtaacacctgttgaggagttggaggatttggactgtgaattgattttcgatctgaatggtggtccgaatctgactaagatagatgcagatgggaatatcctggaaaaagggcggtttgcctttgatatgtcggctgttaagaataatccggataatggtgaacaatggtctatcggtcagctaaagttgacaggtgtatcagtgttaagtggacatgccttttatgatgattccaatataattactacatttgagattctggaattgacggatgatacaatggtactgtgttggaatccttctgatgctgaagcatggactgatgccaccttctggtgccttagaaaaaaataactttaacacgcacagtaagacaggtgaaaggcagggaattcccccctttgatgttctctgcctgcctttcttgagtataaattatcggaaatgaaaataggtatagatttaggtggaaccaatatacgtgttggtttagtggaaaatggttctttagttaggaaagaagttgttacttgtccctctaaagcaacgtatgaagaagtattaggtcggttagagggcttgatagatagggtgatgtgtccggaagtagcaggcataggcgtgggtgttccttcggtggtagattcggaagaaggtatcgtatataatgtagcgaatattccttcttggacggaagttccgttaaagagattattgcaggaacgtttctcagtgccggtttatatcaataatgactctaattgctttgcattgggagtaaaactttttggtgaaggacgaaaataccggaatttggtgggtatgactatcggtacaggtgttgggacggggattattataaatggtgaactttacagtgggcagaatactggtgcaggcgaaataggatcattgccttacctttcccatgattttgaacattattgtagtagtggattttttgtcagatattataatctgacagggaaggaagcggcagaaaaagctgcgacgggagatgcgaagactatggaaatttggagtgtgtttgggtctcacataggtgaattgatgaaggctgtgttgtttacgtatgatcctgaggtgattgtgataggtggaggaatctcatccgcatttacttattataagcattccatgtatcaagctatgcaggcttttccttatacggaaacagtgaagcgggtgaaaatttttgttacagaaatagaagatgtagcattgttgggagcatctgctttggtgggaaaacattgaaaataatttagagcaagagcttatgaaaaataatttaattaaatcgttaatattgtccggctgtcttgcaatgacaatagtttcgtgtgaaagaaaagaattatctgcaggtggtttactactttcggatggttggaaagtacaatcttcggctaagatatttttaccgggtgaagaagtttcgaactctcaaataaaagaaaaagagtggtatgatgcagtagtgccttctactgtaatggggacattaatccggaatggaatatatacggatgtattggaaggaacaaattatgagaacattgataaatcacttttcgacactacatggtggtatcgaaaggaatttgaattgccgtctttgacaaaagggcagcatgttgccttaatttttgacggcattagttatgctgctaatatttggctaaatggaaaaaaggtagctactcgtgattctgtatatggtacctttcgtcgacataaattggatataacgaagatcgtccgggaaaaaaacatactggctgtcgaagtttttcgggctcaacccggtgaaccgaatattggttttgtagattggaatccacgcccggctgatgagagtatggggatctttcgtgaagtacgtgtggtgatgaatgatgaggtgagtatggaaaattccgctgttcattctaaagtaaatacggagaccttggatgaggcttggctgacagtggaaactcaactgacaaatgaatccgaacaagcggtgaaaggtcagctgattgggacactggaaggtaagacgtttagtattccggtatcactcgctgccggagaatcaaaaatagtaagggtgacttcaaaggaagctgatgtattgcatttgaagaatccccgtctttggtggtgccataatatgggtaaaccggaaatgtacggcatggacttggctttcgagattgatggtaaggtatcggataaagaaactataaacttcggtgtacgtgaggttagggattatttcacggaagaggggtatcgaggtttcctattgaatggtaagaaagtattggtaagaagtgccggttggacagatgatattttcttgcgggatactcctgcttcaaatgaaatacaggtacagtatgtgcgtgatatgaatctgaactctattcgatttgaaaatatttggggaacttcgcagaatgtgtatgatttgtgtgatcgctacgggttattggtattagtgggatggagctgtcattgggagtgggataattatctcggttcttcatgtgatgagtttggaggcattaagtctgaaaaagatatgactctgatagctcgttcgttaaacgaccaggtactttggttgcgcaatcatccggccattattgcatggtttgtaggaagtgatatgattccccgccctgaactggagaaacggtataaagcttgtctttctcagatagatgatcgcccttatataggtgctgctaaagaactcaccagtacagtaaccggacctacgggtatgaaaatggaaggaccgtatgattatgttgctcctaattattggtattcggaaaaagcaccgggcggagcatttggatttaatacagagacgggaattggtgcacaattacctgtaattgagtccatacggagaatgattccgactgataaactttggccggtgggtaaagaatgggattatcattgcactgtttcagatgcggcaatgaattctttggaagttctgaaagaaaatatggcaactcgttatggcgaggctaaagatttggatgattttctgcggaaagcagattggttgaattatgaaggtacacgtactatgtttgaggcattccgtgtgaatattcctcgtactacaggtattgtacagtggatgcttaattctgcctggccttcattgtattggcagttgtatgactattatctgattccgacagctgcatactattctgtgaagaaatctaatatgccgcaacaattgatataccattacggtaaaaatgcagtttatgcggtgaatgagagcgcaggaacggttcagatgcaaggggttatgtctttgtatgattgtaatagtagagttgtgactcaacaaaccacaacattggaaatagctccttatacagtggtaaaggcctttgatgttccggcagtaaaagagaatacctttttatatttgaaattgaatgatgaaaaaggagcttatgttgtcgataatttctattggctcgctgctgctcctgatgtaaacgattgggcaaatactgattgggtacgcactccgattaagaagtcggctgattttaccggtttagcaaatttatctcaggtaaattgtgaggtgagtgccacagttgaacaagaagaaaatgatgtaatagtagaggttgcacttgagaatgatccgaatgcattagctttttttattcgtttgtctttgaaagatgaaaaagacgaattactttatccagtattttgggaagataattatttatctttgatacccggagaaaaacggactttgaaatgcgttgtaccgcaacaggttgctgaagtagaatctgtgactttgacagtttctggatggaatgtgcctgagaaaaaaataaagctctttttggatggcatgaaataagtgagtaacttgcggctattatgataaggctaattcttttaacagattttactgaagcttttgctcacaatttgttgagggggattttggaatattccaaggaacgggaaccttgggtggtatgccggatgcccccttcttataaacaatctcatggtatacctggagtactgaagtgggctaaaaaatggcaggcagatgctattatcgctcagtttgatgatgatgatgaagtcgaattgttccggaaaaatggaataatagcattggctcaggactttaaatcgcgtttttcggttatccctaacattacgagtgaatataagttgactggacaaatggcagctgatttctttttgcaaaaaggattccgaaactttgcattttatggttatgagaatgttgtttggtcggaggagcgctgcatgggcttccgggatagaataattgagaaaggctttggggacaatttctttgaataccagaaacagcctttggagaatttgtggtattatgaatcagaaccgttagccagttggataaagtcattgccgcacccgttggcattaatggcttgcgatgatacacaagggaataaaataatggaggtttgccgggtattggggatcaagattcctgaagaaattgccgttcttggagtagataatgatgaaattatttgcagcttgtctgatccgcctttatccagcgtaaatctgaatattgtgaagggaggatatgaagcagcccaattaatagaaaggttaatgcgggataaagaagcctcttgtgaggatgttgtcatacatcccacgactatcacaaaccggctttcaacagatatttattctacaggtgatccttatattttggttgcactgaagtatattcatcagaatctggcaactaaaataacagtggaagatgttgtccggcaggttcctttatccagaaggttattagaaatccattttaaacaggttacaggaagttccatttatcagtatatctttaatctacgcatggaacgcttttcacagttgctattggaaagtagcgagcctattgcagatatagctatgtcggtggggttgtccgattataaaaatttagctcgtcagtttaagttatggaaaaaatatacacccgctgaatatcgaaagattcaccgggtgaaatagaagggaaatcacttatttcttctttctcaaatcccttccttcgtatttacagattgcctgaatccattcttcttccaggggtttagattcatgtttttctaaatcaaaagttaccatcacagaggtacatatgcacttgatctcctgtgtttccgtatcaatcacccgctgtgcgagatgaaaacttttggtaccgatttcagtaacggcggtttgtacagcgatatgatccgagccataaatctgtgcaaggaagttcgcttctatgtgtacgacgacaatgccgtctttctcccaatcgacgtccgggcatacggaggcaaaatactcggtttttcccaaatcatagaaagagaaataaaccgtattgtttacgtggccgaacttatcgacatcattaaatcgtagttgtatgggcagggtgtggttaaattgaatttcttccattgttttctcttaaacttttctattaatccgtgcaaaaatagtacttttgcgtgttaatcactgtatttatacaccaagaaatgatagaagatattaaaaaagcctgtcaagtgatgaacgaaggcggagtcattctgtaccccaccgacaccatttggggaataggttgtgacgccaccaacgaagaagctgtgcggcgtgtgtatgagattaagcagcgctcggacagtaaggcgatgcttgtgttggtagattctcctgtaaaggtagacttctatgttcaggatgtgcctgaagtggcatgggatttgattgaagtggcagataaaccattgacaatcatctactccggtgcgcgaaacctggcatctaacctgattgccgaagatggtagcgtgggtatccgggtaacgaatgaagggttctcaaaacggctttgtcaacagtttcgtaaggcgattgtttctacgtcggccaatatcagcgggcaaccttcgccggcaaattacagtgagatcacagaagaacttaagtccatggtcgattacgtagtgggttatcgacgggaagaaatgggacatccgaaaccatccagcatcataaaactggataagggtggtgttataaaaattatccgggaataaaataacggactaaaaaaggtatcgttatttttaatttctgtaagcttgggtatgccctgagtttgtcgaaggattttctctcttatttatatggatacgagagtaaattctttatttcgtttagattggtaaatataggtatatggaaaaagagaagagaagtttgtttcagcgtttccttttatggcgtgaaaagaatattaaggaaaaacagtttatcttgatactcagctttctggtaggtatctttacggctattacggctttgatactgaagatgctgatacactggatacagaatttcctgacgaataatttcaatacaacggaagccaactacctttatctggtttatccggtagtgggtatttttctggctggattgtttgtacgctatgtggtgaaggatgatatcagtcatggggttactaaaattctctatgcgatttcccgccgacaaggacggattaagcggcacaatacatggtcgtctgtgattgccagttccataaccattggttttggtggctcggtaggagcagaggcgcctatcgtattgacaggttccgctattggttccaatctgggaagtgtttttaagatggagcaccgcacactgatgcttttagtaggctgtggtgctgccggtgctattgctggtatcttcaaggcgcctattgcaggactggtattcacactggaagtactgatgatagacctgactatgacttctctgcttccgttgttgatttctgcagtgacggctgctacagtgtcctatattactaccggaacagaagcaatgtttaaattccaccttgatcaggcatttgagatggaacgtattccttacgttatcatgctgggtattttttgcggactggtttcgctttattttacccgtgcaatgaactctgtggaaggtttgtttggcaagttgaaaggcccttaccagaagttggctttgggtggtgtcatgttgagtatcttgatatttctttttccaccgctttacggtgaaggctacgatactattgaactgttgctgaacggtacttccaatgccgattgggatacagtgatgaacaactcttttttctacggacatgggaatttgctattactctatttgatgctcattatcttgttcaaggtatttgcatctagcgcgacaaatggtggtggcggttgtggtggtatctttgcgccttctttgtatttgggatgtatagccggttttgtcttcgctttttttagtaataagtttgatttctcttattacctacccgaaaagaattttgccctgatggggatggcaggtgtgatgagtggtgtcatgcatgccccgttgaccggagtctttctgatagccgaactgacgggcggatatgaccttttcctcccgctgatgattgtagcagccagctcttatctgacaattattgttttcgaacctcatagtatttactccatgcgtttggctaaaaagggagaattgctgactcaccataaagataaagcagtacttactctgatgaaggtggaaaatgtggtggagaaagattttgtagtggttcatccggagatggacttgggtgaattggtgaaagcgatttcagcctcacggcgtaatatattcccggtgacagataagagcggaatactgattggtattgttaccttagacgatatccggaatatcatgttccggcaggagttgtatcatcgttttacggtaggcaagctgatgacggctattccggcacgcctctatgacacggatagtatggaacaggtgatgcgcacgtttgatgatacgaaagcatggaaccttcctgtggtagatgaagaagggcactatctgggatttgtttccaagtcgaagatattcaattcataccgtcaggtactggtgcatttctctgaagattaataaagttgttatatgatgaagaaagaagatttgcgaatagtttatatggggactccggattttgctgtggagtctttgcggtgtttagtagaaggtggatataatgtagtaggtgttatcaccatgcctgataaaccggcagggcggggacataaacttcagttttctccagtgaaacagtatgcgctggaacatagtcttcctttgttgcaaccggaaaagttgaaagatgaagcttttgttgaggctctgcgtgagtggaaggccgatttgcagatagtagttgcttttcgtatgctgcccgaagtggtatggaatatgccacgtttgggaaccttcaatcttcatgcttctcttttgcctcaataccggggagccgctcctattaactgggcagtaattaatggtgatacggaaacaggtatcacaactttcttcctgcgtcatgaaatcgatacgggggaagtgattcagcaagttcgtattcctatcgcagatacggatgatgtgggtattgtgcatgataagctgatgatgcttggtggaaaactggtgactgaaacggtagatgcgatcctgaatgatgcagtgaaacctattccacaggaagaaatggcagttgtaggcgaattgcgtcctgcaccgaagatttttaaagatacctgtcgtatcgattggaatcagccagtgaaacgtatttatgattttattcgcggtctgtctccttatcctgctgcctggtcggaattagttcaacctgatggagagacggtagttatgaagatatttgagacagaaaaaataatccaatctcaccagttgactcccggaactttgctgacggatggtaagacttatatccatgtagccgctgctgatggatttatcggcatacgtgctttgcaacttcccggtaagaaacgcttgaagacagatgaacttttgcgtggattccggttgacggaagaattcagagtgaaatagttacgagctacaagctacaagtactatgcagagtgatagcgtagcaacttgtagcttgtaacttaataattgcttctaatattgtttctttcctgaaaatttcttttctttgcatattattaactaccaaatatagaatgcctatcggaatacattacgctgaaatctaaaaacacacgtaatgaaagtacaaacaaatgctgctgacgaaacgttggtggccctttatgcacaaggcaataacgaggcattcgatattctgttgaaccgttataaagatcgtctttatgcgtacatctattatacggtgcgcaatgaagaactggcggaagacatctttcaggagactttcacaaaagccattgtcaccattcagcagggacgctacaatgaaaacggtaagttcccggcttggttgactcgtatcgcacataatcttataatcgactgtttccgtcaggaaaagcaggaaaacttggtgtcttgtgatgaagaagaacggaatttactgaataatatccgtctgtctgaaggaacggttgaagctgaaatagtgaaccaccagattctttcggatgtacgtcgcctgatgaaacatctgccggacgaacaacgggaagtagtacatatgcgcttttatcaagacctcagtttcaaggagatagcagaaatgacaggagtcagcatcaatacctctttaggacggatgcgttatgctattttgaacctgcgccggatggcggagaagcatggaatcgtgctgacgatggactaaatgatacatcctttaataaaatttttctttttccaaatgcagtatttcacaaataaggccatttaacctaatgtacgtacaaccttaattatgtgattttattatttactagactaaacttattaaagtaatggaaaaagtacattgtttaaagcgtttcgtgtttcttgttatggccttgggcctggtaattactttcacatcttgtgatgatgacgatgaacctaaacctaatgttcccgcattgactgacgtggtaggtaattatgccggaaaaatgcaaactacatctgtgtctcctcttgcagaagagggtgaagaacctcaaggtacggatgtgagcgcagaagtaaccaatgaaaatgtgtcttttgaaaagttcccggtagcggatttgattacagccattatgggggaggcagctcccggaattattgaagccgtaggtgatgtaagttacaaagtgaagtatacacctactttcaatgacgataagacagttattagcatggcgttcactcctgaaccactaattcttgaaatcaatttcccgacagaacctactgaaggtgagggtgaaggagaaggtgaaaccccggacttgaaagtggaggtgacaattgcagcacctgaagcaggtagttttgcctatgctggtgataaattagctttcaagcttcaggtaactagtgtgaaagtgaataatgaacctttcgaacttcccgtgactactttctcatttgacttagccaaagcgaaataaatattttcatctcaaccagatgttggcccaggtatggtgtgttggcactaacctgggctgatttatttacatctctcatgttttttataacttcttgtatactatatctcttcttcttccgttcttagtatataaagtacctcctgcttcttttttgcagcccgtagctttaactaattaattattaattctcagttcaataagcctatggataaaaaaactactccttctttttcttcttcatccgtgaaaccgagaagtgctgataatgcattgccggatggacatccgcagccttccgggaaaactttggattttcttcgtaaccttgcccgtaattatcgtacagtgcctcagcttccgcaaggcttgcagggtataatattaggatgaatgaaatcttttgtctacatttgtacgttatatctgtatataacctgtaaaatgtagtgtattatgaaaccaatcatagctccctctatcctgtccgcagatttcgcttatctggcaaaggacttggaaatggtgaaccgcagtgaagccgactgggtccacattgacgttatggacggtgtgttcgttcctaatatatctttcggtttcccggtattgaagtatgtggcaaaactgtcaaagaagcctttggatgtacatctgatgattgtgcaacccgagaaattcattaatgaggtgaaagcattgggtgcgcacaccatgaatgtgcatttcgaagcttgcccgcatttgcatcgggtggttcaacaaatacgtgaagcgggtatgcagcccgccgttacactgaatccggctacccctgtggcaatgttgaaagatattattcaggatgtatatatggtgttgctgatgagtgtgaatcctggttttggcggacaaaaatttatagaacatacagttgaaaaagtacgggaattgcgtgctttgatagacagtaccggttcgaaagcattgatagaagtggatggtggtgtgaatttggagacaggtgcccgcctgatagctgccggtgcagatgcattggttgcaggtagtgccgtgtttgcagctcctgatcctgaaggtatgatacattcgctgaaggatctctaattcttcctccattgataattaacagcctgcaacgacatccgtttctacgacttctgatgccgtttgcaggcggtattgtatgtggagatgcacatttcttccggcagcgggcggaactttccttaaatattccggcagaggcatcctgtccggtttccaatctttttcctgtttggatttgtctggcaggtttcatgttactgtttctgacttatttcctttctgataaatatcgtattcattggctgtatggagtttccgtctttctctgttgtttcggattaggcgccggtatgacggaagaatatttgcatcgtacggattttcctttttccgatgaggcggcagtctatcaggtgattcttctggaaaaaccggaaatgaaagaacgaagcgtgttatgtcatgcccaattagagggaaaagtgaatgatgaggatttacagaaaagtgaatatggacgtacatttttattctattttccgagaaattccgctactgttgcattaaagaggggagatagattatgggtacatacccgtattacccctcctgtcaataatgggaatcctgacgaatttgattatgtacgttatcttactcgtaaagttggtaccggcacagcgtatatctctgccggacattggcggataataggtcatgatacttctcgttctcttcggcaaatagctttggactatcgagaaaaagtggtggaactatatcatcgtttaggttttcagggagataatcttgcagtactttcggctcttacggtgggagataaggagaatttgagcgaggatatgcgggaaacttattcaattgccggcgccagtcatgtactggcactttcaggacttcatataggcttgctttctactttatttttgtttttcttctcctttttgtggaagcggtgggcggcttttaaacccttgggattttttctggttattctctttttgtgggcattcgcttttcttacgggattatcttcttctgtggtacgatccgtaatcatgttctctctgctggttgtatcccgtttacaatctgagaaattgttatcgttgaatacactggcggctactgcctttttaatgttactttataatccactttggctttttgatgtggggtttcaattgtcttttgtagcggtagtttctattttgttgatacagcccaaactttacagcctgctctctgtcaggcgttgcattcctcgttatgtttggggattgctgacggtttccgttgctgcgcaaattggtacggctcctttagttatattctatttctcccgtttctctactcattttctgctgacaaatctgtgggtgattcctatggtgacgttgattttgtattctgcggttcttatgcttgtcctgactccttttcctttccttcaatctggctgtgctttaggagtcgatgctttgttaagtgctcagaacaaagttctctgctggatagaagaactgccaatgtcctctatagatcggctttggatagatcattgggagattatgctgttttatctttttctattgtttttgtttcggagtttggctatccgaactgctcgcagcatatcctttccgctttgctgcctgttgttgctgatcacttatcatacgatttccgtcagcctgtcttctcctcagcgcggcattgctttttataatgtccgtggctgtcctgccgtccattgcgttgctaatagtggagaatcctggttggcttatgctgatagtgtgccggatactttccgtttgcaccgtgcactcgtaccttattggaatcgtcatcatctctctattcccaatgctttgcctgctgattattctacttccggtctggcttttcataatcacattgtttcctatgcgggcaggcgggtttgcctgctccatgatgcccgctggaaaaataagatttcaaagcaccctttacagatcgattatttatacatttccaaaggctacaatggtcgtattgaagaattgacttctttgttccgcatccgaaccgttgttttggatgtttctctctcagactatcgtagcgatatccttaaaaatgattgttaccgtttagctattccttgtatagctttgaaggagagaggagcgttttgtatccatctgtagaaaatatattattgaagtttactaagtatagtgactattcctttcactatcttgttttgatgattatttttgtaattggtaatgtaagagaaagaaaatgtaatatacaatgagaatactgacaatgttaatggcattaatgctgggattattgactgttcctggtggaaagaatagcagcttagcaaaggaaaatggctatgtgattaatttagatcgtgctgagaagttggagaagatgacttattcttctttattcagcaaggcgggaatcattgtattggaagatacggatgaatcattattaggaaaagttgataagttagaagtctgtgataataatttgtatgtattggaaaaaggcagaggtctttttctgtttaataagcaaggcaaatttataaagatgatagggcgtaaggggaaaggacccggtgaatacattgatccgaatgatataagtatcgacagggaaaataagaaaatatatgtactggactcccaaactcagaatgtattgaagtatagtggtaatggaacttttgaaagttcgtttaaattggaaaataaaggaacaagatctacttttattcaaccttttaagaatgcgctgtatacgaatctgtatacatttgatgaatccgggaaacgatttctcttgagtaaagtagacgttactaatggaaaaagaatctcatttcaatttgaggcttctcagtacaacaagggttggaatgaactattcagtactaatcaacatacttttatctccggtcctaccggaaatcccaaatttatgcagatcttcatggatacaatatttgaaataactcccaaaggaataaaaccgtatattactttgcaaagtaaaaagcttgtgacaaaggaatatttggaaactttgatagcagagaatgatatgtcgaaatctgcaagagtgtcaaaaatatacgatagattgatgaaaagcggtaagatatataatgtatttgattattgggaaaccgctaaatatattcatttcggctatcatgtaggccactatggttattccattctttataagaaagaagagaataaagcttatgttatgtcaggtataactgacgatttgctttatacggataaagcaggtacattgttaattcccaatctttattcatttgatgagaaccgggtatattgcatcggcatgaatgacggtttcaccaaggatatctttttagaaaatatgaagaaaggcggaataaatcctcgtatagaaggggccgataaattgcagaccttgacggaagattcaaatccgattattatatattatgagtttaagaaatgaaactcgtgagacattaattaatttatcagaagatgataatccgatattgttgttgctgagattttgaagtttcccatttataatagattttaatttttcaaatatgtaataaaggcgatttatggataatagaaatgatacatttattggtagccgttggttttatgcaatttgttttgcagggttgtttgtggtcgaaacattaatagccctttttgtgcgtgatgcattcatacgtccctatatgggagatgtattggtggtaatactcatatattgttttgtgcgtatgtttattacccgcccattgcgatggctgccactatggatattcctgtttgcttgttgtattgaaacgttacagtatctgcaattggttactttattgaggttgcaaaattgtacgctggcaagggtagtattgggtacgtcattttcatggtgggatattgtttgctatgctgttgggtgtctgcctttgctttttatcaggcggtaaacggaaaataatttatgtttttatttctttagagaaagaaattagggaaatgtacctataaacttcctgctcaagctcaggttttactgaaagtttatgatcacttttacctacacgcttgcacttatgctctgtatcgccctattcatcggcaataagcagtggtggaagcaagtagaattagcgtgtaggtagagttgcctacactaatacaaaatggggtatgctgttgtaaatctgtttattacatgttttttgtacatgaataaactgtttcagtccccccgcttttcgactttttttcatcataaatacgtcgaatgtggcggataacaatcgttcgtgccatttcgatgggagaattcccgccttgcgatgatgctcagagtatggtttgcttatattaatagcctatgttttttatgttgatgtcctatgtttattctgttgatagccaatgttatagtgctttctacaattgttgatcacgtgctctacaattgtggtactactgcttcacggttgtgaagtacgtgcttcacatttgtggtcatagcaaaataaagaatatgcatataaccaaagtgctatgtaaaagtaaagaaagggcaatgcttttgaaaagaaagagtaagagtctttttt

SEQ ID NO: 6422 - DNA, 14979 bp, Unknown
  gut microbiota DNA sequence
aacaaaagctgtacagtaaagaactcgtaagactggtcgataacaaaacaaacctgcggattacgggtaatcaattctttcagataagctttctctatgaccgtaccggtaggattgttaggattacaaagccatagcatacggatatcaggcggtaagagataattggtttctgctgtcggaagcttatagagtgacgtcacccgatgaccatgcatgcggcaagcgtcagcatactcactgaatgtaggttgaaaaatggctgtattagtaccacgaaaagtttgtgctataagataaatagcttctgtagcaccattcgtcacacaaacagaggcagcagtaaggtgatacttctctgccagacgaccttccagagtataaggttccggttccggataagaagaaataccgctgatacagctacacaaatgagcctgaagtccggataaatctacacgattatacacattggaactgaaattggccgttataggccgctcgaatttataggaatcatctccgtgtccttcaatcatgagttgtcagtattttataaataagtggcagatcaacatgactacgcacatggtcggccagtttattgtattgttcttctttgaattgatgataatcgaaagattttcccgcatcggcaatcttgtcggcaaaaggttccagaaggaagtcgatgaatgagggattgtcaagaataccgtggatataagttcctatacaggtacgatccaggaaataaccgtctgcaccgccatcttccaaaagattcagaggggaaaccggtgcatcataaacaggaacggtggtacccatgtggatttcataaccttccaaattagcctgcattccgtcagtagacaaatggctgttttcccttgcaacaacggaaaggcggaattttatttgccgggtaatcttctctcccgtcatatgtgtactgacaggtaaaagccctaaaccgggtaaacgttctatttctccttccacatggtcaggatcacacacttcctgtcccataatctgatagccgccacaaatgcccataacggtggcgccttcacgatgggcacgtatcacagcttgtgccacaccattacgacgcaattcgtgcaaatcggcaagggtactcttgctgccgggtaataaaatgatatcggctttcgtcaattcatctacattattcgtatagaaaagatgtacccggggatcgcgttccaacacattaaagtcggtaaagttactgagatggcgcagcaatacaaccgctatgtttactttaccctgctctgtctgcacggatttcgtggcaagggccagcgaatcttcttcttcaatataaatatctttataataaggaacaacgcctaccacagggataccacaaagttcttcaagcatctttactccggattcgaacaaacggatatcaccacgaaatttattgattagtatgcccttgatccgctccctttcgtaaggacgcagcaacattaacgaaccatagacactggcaaaaacccctccccggtcaatgtctcctacgaggatcacatctgctccggcatgtaaggccataggtaggttgaccagatccgtatcccgaagatttatctcggaaatacttccggcaccttccatcacaatggggttataacgggtggcaagacggtcgaaagctgaacagacctcgtgacgcaactcttcacgaccttcaacacggaaatactcataggcactacggttaccgatgggacgtccgttaagtaccacttgcgaggtatgatcagaagagggcttcaacaacaacgggttcatatctgtatggcagggaactcctgccgcttcggcctgaacagcctgggcacgacctatttccagcccttcaggtgtagcataggaattaagtgccatattctgtgccttaaatggtgccggatgatagccatcctgacggaaaatacggcagaaagccgcggcaataatgcttttacccacatcactaccggtaccggcaaacataataggatgaagtttctccataagaaaatgttttttagagagggcaaagataatgcaaatcgagtgcagaactttcatgcttgcatgaaaaagttatgctgaggtattggtaataggtattaaacgatctctttaatagatattaaacggtctctttaataggtattaaacggtcttggtaattatccgaacaaaaagaagctttcattttcacgccaccattgaacaatagaaacgaacgagtgtttgagataaacgaacctaaaccaacaacttgacgtatgaaacatattttattgatcgttctgttgggagcaagcctatctgtgacggcgcaaacgaaactctccctcagctacgatgacgccctacaaatgctgcaaaaaggcaatcaaagcctgaagattgcggacaaaggtattgaaacagcccgcacagagcgggataaactgaatgctttgtggtatccgagcctacagggagccggtacgtatgtccacatgtccgaaaagatagaagtgaaacaacccctatcccaattcacagatccggcaaaggattttgtacacgacatcataccggacgataaattcattagcggaatactggatcagataggtagctacactctggcttttcctcttgctccccgtaatttgaccactgtaggcttaactgccgaatgggtggtcttttccggtggaaagcgtatacgggcaggcaaaatcggaaatcggttgattgaccttgcccgggaaaaccgtgcacagacagatgccacacaacgaaccctattggcagaaagctattacggtctcagcctcgccaaagaagttgcagcagtccgccaagacacttataatggtttgaaacagcattatgaaaatgctcttaaacttgaagctgccggaatgattgacaaggccggacgcctctttgcacaagtgaatatggacgaagcctggcgggcactggaagccgcacagaaagaagtaacagtcgtggaaagtgctttacgtactttgctcaatctggaggacacctgcaaaattgaacctacgtctcctctctttatcaattccacactcccggcaaaagaggagtttcagcagactatgcgttcgggaaactatatcctgaaccaattgtcactacaacagagcattgctaaacaacaattacgtatagaccaaagtggttatctgcctgacattgccctgttcggcaaacaaacgctttacgcccacgggatacaaagcaacctcgtgccacgcacgattgtcggagtaggtttcacctggaaccttttcgacggattggcaagggagaaacgtatccgccagtcgaaaattaccgaacaaactcttgctttgggaaaagataaggcacaagatgacctttcagtaggcatagacaaactatacacaggattacaaaaggcacaggataatgtacaggcactcaactcaaccattgccctgagtgaagaacttgtacgaattcgtaagaagtcctttgccgaaggcatggcaaccagtaccgaggtaatagatgctgaaaccatgcttgccaccgttaaagtagcccgcttggcggcttattatgaatatgatgtaacactaatgaacctgttggcactttgtggtacaccggaacaattcagaaactatgctgttaaatgataatttatcggcgagagaatgggtacgcggactacgcggataaggcggacgaacgcggactttaatcttttagacgcggatgacacggatgacgcggatttttaaagctgcgctatacataccggcatatcacaccgaaggaaaaaagaatccgcgtcatccgtgtcatccgtgtctgaaagattacttgcacgccgaaggagaaccttgctccagcgctacgctggtaaattatcatttaactgtacaacaaatatataacaattatggaactatcaaaaaaaagcatcagcatcgcatttgtcatcatattggcaatcactatattagtctctctcttgggaatgttgctcatgagtcatcagccccttgtgctccaaggacagatagaaacaaccgaaatccgtatcagcggtaaacttcccgggcgtgtagattcattccttgtccgcgaaggcgactgggtgcaggcaggtgatacacttgtcgtcatcaatagtccgacgatagaagccaaataccggcaagtaaatgccttggaacaagttgcccaggaacagaataagaaaatcgatgccggtacccgccgacaaatcattgccactgccgggcaactctggaataaaaccaagagtgacttgaccttggcacaaacaacctaccaacgcatcctggcactgtacaaagacagtgttgtcacttcgcaacgaaaggacgaagtagaagccatgtaccgtgctgcacaagccgccgaacgtgccgcctacgaacagtatcagatggcagtagacggtgcacaaagtgaggaccgtgcatcggcacgaagcatggtagatgcagcacgaagcacagtggacgaagtttccgccctccttgtcgattcacgcctgacagcaccggaagacggacagattgcaaccatatttcctaaacgcggagagcttgtggcaccgggtacccctattatgaatcttgtcgtcatgaacgatgcacatgttgtactcaatatacgcgaagatctgatgccccaattcaaaatggacggaacattccgtgcggaagtcccagctatcggcaaaaaagatgtggaattccgtatttattatatcagtccgttgggcagttttgctacctggaaatcaactaaacagacaggaagctatgacatgcagacatttgagatacacgcccgtcctacccaaaaagtagaaggattgcgcccgggaatgtcagtgctattgaccatagatgattaatatgtgtaatcattgaaataactttgtaaatgatgaaacatccattatataacgtactctgtcgcgaacttcaccgcatgacttcccgccgactttatttcggggtatgtctcgtgctgcccctgttctgcctgttcttcatggcaaccattttcggcagcggacaaatggagaatatccctatcggcattgtcgaccaggataacaccgccacatcccggcaaatagtgcgaaacatttccgctgtaccaaccttcaaagtaacccggcacttcaccgatgaaacagccgcccgacaagccgtgcaacggaaagaaatctatggttacttgtccatccccacgggttttacccaacgggctacgacaggaatgaatgccacactctcttattattatcattatgcccttctttccgtaggtagtgaactgatggcagcttttgaaacggcactgacacctgtcgccctctctcccattgctatggaagccgtctctttgggagtcagccaggagcaaatcaccacatttctcctacccgtgcaatccagtatgcaccctctttataaccctgacctcgattactccatttatctgagccagcctttcttctatgtcttgttccagatacttattctattgataacggtttatatcataggtagtgaattgaagttccatacggcacaggaatggctgacaacagcgcgggaaaatatcctcacagcagttgtcgggaagttattgccttatactttcatcttctccgtaatcggtattttggctaactatattctatacggtgtactgcatattcccttccatggaagtctgctgatgatgaaccttatgacaatactctttattattgccacacagacacttgccgtattcatcttctctatttttccacggatagcttatatcatcagcattgtatccatggtcggttcacttggtgccacactctccggagtcactttcccagtgacgagtatgtaccctcctgtacatgccgcatcctacctgtttcctgtccgtcatttcacggaaatagcacaatccatgctctattttgattcgggattcgggtattactggcaatcggcagccatactttggctttttccgttggtggcgctactgatactacctagattgaaacattggattctgaaggataaggaagaacttagtatttgtgagaatgaaacaccgcttccccgcgtacacaacactcctcactactcaatagcaactgtcattttccgcgaatggcgctccatcagcaccaatgcggctatactgttagtactaatgggaggtatcttcgcttacggacttttatataacttgatgtatgctcccaaccttgtgcggaaaacatcggttgccatcgtcgacaattcccattccgccctcagccgcgaatatatccgtctgctcaatgccaccccacaagcatcagtctatgcacttactccgaactatcttgaagcaaaagaatggctgaaacagagtaaagtagatggtattctttacctccccgctgactttgatgcccgcgtcggtcgcggtgaacaatcagtctttaccgtttatgcctccacggatgctttcttgaattttaagaatctacaagaagcttcttcccgtgtaatgcttgccgtaaacgatgcgcatcgtgcagaaggtgctgtattcttacctcctcagggactgctggcagtagcctcatcggcacctgtagacgtatcgggtacagccttatataattataccgaaggatacggttcgtacctcatccccgctgttatgattgtcattatttttcagacattactgatggtgataggaatggtgacaggagaggagtacccgaaggggaagatagtaggtaagcacaaaaaacttacttggcttcaagcattatataacatttccggaagaactttcgtttacgttatgctttacttcatctttgccttattcctgttaggcttgcttcctcactttttcagcattcccaatataggaaatggcagggatattattacgatgatgattccttttctgttagggacaagtttctttgggttggcggcatcacgctacttcactgattcagaagctcccctgctgatgattgccttcttctccgtaggatatattttcctgtccggagtttcctacccgcttgaactgatgccatggtactggcaggcagcacactatgtagttccggcagcccctgccgtgttggcctttgtcaaattgaattcaatgggaggaaccctggcggacattcgtccggaaatgataacgctgtggatacaagttatagtatatttcctgttgagtctgtgggtcttcaaaaagaaggtattctatatttaggcattaaggctgttttctctttctcttataagcaaacgcttgccatcgttcctcgtcccatccttgtcgctgcatctccatgcgtgccatgacaaagaaaaggtcagaaagacgattgataaagcgcaaaatatcttccggtacagagtcttcccgattcaaagtccagagccgtcgctcggcacgacgtgccacggcacgggcaaattgcaattgcgctgaaatctgggttccccccggcaagaggaaataatcattatcttccaactgaagcatcatggcgtccatagcctgttcgcactgcacagtcatttccgctgcatgcagtgggttcggattaccgctccccggacgttcaggatctgcatcccgcaatgcagaaggagtagcaacgtggctcatcactaccattaactcacgttgtatatcatgcaacaatccctgccaaacatcatctatcggcagcaacgacctgacaatacctattacagtgttcaattcatcaatacagccgttagcctctatacggatatcatccttcggaacacgttctccaccgtggatacctgtcattcccttatctcccgttctggtgtaaatctttctcatgatactaaaattttagaataaaaacggatttcccgggaccggttcaaacagtctcatgaatccagtctctccccaatataaatgtgtataacttgcaatcagattcttatagtgatagaccggtgtgttcaccggctgtcccttggcattatatacctgtgctgccgaggttagttcctcatccgattcaatgacctgcgagtaatggaactcatgcccacgtatcttcattcctctaaattcaaagctcctataccccagtgacaaacgcatatcacccttaaatgcggataccttgacgggcagtacacctgccatattgtactccatacgggtatcagtacctgtcatcaaaacagatgtaagatacatcatccccccacactctgccagtgtatatccacctcgctctatatagtctttgatggagttcatcacattcgttgccgcactcagttgcctggcacggttctccggataacctccgggcaggtagagtatatccacatcatccggtagtacgacgctattatcctccggatcaaaataagtaactttccccaagccattcaaccgctccagatgttctgcataaataaatgaaaaactctccttattgcgggcaatccatatattcatattggtaagcgctctctttcttctctccggtttatcaggaacatccacacttcgtcttgtcatctccagcaataactcaatatccagttgacgttccagttctttcatcattgtttgggtgatacttcctttccctttccggctaaagtccagtcccaaatgacgactttcttctttcagcacatcatacttccgcaaacacccgaaacaaagaatattcagatcttcgcagatttcacgcagcatctcttcatgccggtcaccgcccacttggttgaaaatgacacctgccacctccacttgcggatcaaaatccacatatccttttatcattgccgccaatgagtaagccgccgccttagcacttactaccagcaccacaggcagacgaagcacctttgctatctctgccgacgagcctttactacggtcatatccgtcaaacattcccatcatgccttctacaatacaaacatccgcatctactgcatgatgattatataccttacatacatgatgctcggaagccataaaaaggtccagattgtaagacggaattccgcaagctttttcatgatacttcgtgtcgatataatccggcccgcacttatagggctgtacacgtagttttttctgcgtcaataacgtcatcagcaatcggctgacagtggtttttccagtgcccgaagtaggcgccgctatcagaaattggggaatatttcttatcataccgcacagatttatttcccgcaaaggtagtatatattccccaaaactcttaccttagctgcccaaataaaagtaaattactatgattactgaagaactcaagaaattatattgtacgtataccggacacgaaccggaagctattgaagaacttccttcatccggctccaaccgtcgttacttccgccttacgggcacccctacccttatcggtgtcagcgggacttccctcgaagagaatcaggctttcctctatatggcagaccatttccgcaagaaaggactgcccgtgccacaagtcgtagcaaagagtgataacgatgcattttatctgcaagaagacctgggagacactctcctgttcaatgccatcgaaaaaggacgcaagactagtgtttttgatgaagaagaaaagcagcttctgcgcaagacaatgcgcctgttgcctgccatacagttctccggtgcagacggaatggatttctcatattgctacccacagtcggaattcaacagccgtagtatcttatgggacttgaattacttcaaatactgttttctgaaagctaccggaatggagtttcaggaagaccgcctggaagatgatttccagaagatggcggacgtattgatgcgcagcagttcggctacattcatgtatcgtgatttccagagccggaacgttatgattaaagaaggtgagccatggctcatcgacttccaaggcggacgcaagggacccgtttattatgatgtggcttccttcctgtggcaagccaaggccaattatcctgagagccttcgcaaagagcttttaaaggaatatctggactccctgtgtaaataccagcctgtggacgagaaatatttctatgctcaattacgtcatttcgtattgttccgtaccatgcaagtgctgggtgcttatggcttccgtggctatttcgagaagaaaccccatttcatccaaagcgtccccttcgctattgaaaacctgcgacaactattgcaggaaccctatcccgaatatccgtacctctgccatgtgctgaaagaacttaccgagctgaaacaattcactgacgacctccagaagcgccgccttgtagtaaaggtcaccagttttgcatataaaaaaggtatccctgaggattcaagtggcaacggtggtggctttgtattcgactgtcgtgccgtaaacaaccctggtaagtacgaccgttataaacccttcaccggactggatgaacctgttatccgcttcctggaagacgatggagaaataaccacgttcctcgaacatgtatacggtctggtagatgcttccgtgaaacgatatatggaacgtggatttacgaacctttccatttgtttcggatgcactggcggacaacaccgttcggtttattcagcacaacatctggcagaacatctgaaccagaaattcggagtacaggtaaatctgatgcatcgggaacagaacattgaacagacatttaaagcgaaaagctaaaaactatctcctaataacccgctccgtaccaagtccgtacctgctccgtatctatacgaacagcctttatacggagatagtacggagttgaggcataaatctccttctttttcaatccgcttatgaaacttacatttaaaatcttaattcaatttatcagtagctcaagaatttaaaacaatgaaagcaatgatattcgctgcaggcctcggcacccgcctgcgcccactgacagacaatatgcccaaggcacttgtctccgtagcaggcaaaacgatgctggagcgtgtcatcttaaaactaaaagatgccggcttccatgatatcaccataaacatccaccattttggaagtcagattatagacttccttcgtgcaaaccagaacttcggtgtggatattcatatcagtgacgaacggggtgaactgctggataccggtggtggtatcaaaaaagcccgtcctctgctggagagcaacgagccttttcttatacataatgccgatatcctgacagacctggatctcaatgctttctaccaccaccatctggaaagtgatgcagatgccactctactcaccaatcaccggaaaacatcccgctatctattgatgaatcaagataaccgcctttgtggttggacgaatatttctacaggggaagtactccccaaagaactcgattatcccagcgatcattatcagttgcaagcttttggttgcgtccatgttctttctccctctattttccgctatatggaagatgaacgctggacagggaaattttccattattccgttttatgtggatatctgcccgaaagcacgcattcaaggatttcctatagacagcgaaaactggtttgatgtgggcaagccagagacactggcaaaggcagaagcctattatgcgtctttataaaacaggtttcatcttcaccaactgcccctgggcatcaaataagtattcgtaattgaaagaaccgtaaatacgatactcccagcgggcacttttctcaaaacggcgactgtcatccaagatggtcgcctgatagacggtctccagttcatgaatgaactctttagattccgggtccgggtatctataagtggggacaattacacgtatatcgggatattgctctcgcagatttttgatttctgtacggacagcatctttttcattgggctccagaaaaaagagtaaacacacggaatgtccctgccctgcaatgtccgaaaagagcaaactgtctttctctgcatactccacttgtttgaagtcaataaaatgatctcccggcttcagactacgggtagcatccagcatccgtttcagtcctatcaatacagatgtactgtcgcgcatttgtgaaggtgttttctggtacaatgtctccagttcatccggatagatcgctgcccaacgatcaaacaccatccatcctattgcgttccgggcattgtcgaatacaaattgccgcgtagcttccagcggaaaaagatcttcatgccaaagcttccaaagacgtacgttttgtgaatggggattggtactcttgtccgatacaggcattgccggcggaaccacatttgttaacgtcagttcccctctttcgggataaaagaaattcatgctaccgggatgctccattccatagatatgcaacgtatcttcttttccggaaaatgaaacttctccgtttctgataatagcgaagtccaagggagctttcccataatcacggtcacccgtcatacggtcggcaccatatcgccacaggtagaccgtatctccttcgtaagcgcccagtccggtatagtgcacggtaaaagtttgttcttgcgattgacaactgatgagtcctagaaacaaagagtaaaatatccattgattgattttcataaagcccagatagattgagtaaacaaacacattgtacaaaagaacaatcttttcagtaaagatgcaagcaaaaaagacaatatataaaagcaattgttaatgaaatatccatatatttgtgacataacattaaaaagactgactatgaaacgactgagattaggactatgggcatgtttctgcttttgtgcagccaccacccttatgggacaaaacaaggtgaaaacaactgccgaaaaggtaacgctgttcattgacggtgcccaagtgacgcgtaccaaacaagtagatattccggcaggaaattcaacactcatcttcaccggattatccccctatatggatgcacaaagtatgcaggtcagcgcaaagggaaaactcaccgttacggcagtcaaccggcaatacaactatatagacagccttgccgtcagcgaaaaacaacaaagcctgcaaaaggagcttaaaaaaatagagaaacagcaaaaagaacagaatgccgagcttggacttatcaatgccgaatatgaaatgctgaaaacaaattgctccgtcaataataagaataccgctacttctctgcccactatcaaagaagtgaatcaatattactccggacaattgaaaactctgaaaacaaaagaactggccatcaatgaacagatagccgaacttgccatcaaacagggacaacttaactctgaactggcacaactaagcggtaaatctctaacccctatgagtgaaattatggtcaatgtaaatgcgccagcagcttgcaaagctacattcactctgaactattatgtaaaaaatgccggttggttcccttcctatgatgttcgttccggtagcctggccgagcctatctccatcatttacaaagccaacatctttcagaataccaaggaagagtggaagaacgtagaattatccctttcctcctctaatccttccaccggaagcgtagcccccactctgtctacttactggttggattacggacttgcagcaccacgctacaatttgaatctcaatggaaacactgtttcaggggtcgttcttgataataaacgtacgcccgtaataggtgctaccgttaccattccggggactacgataggagccatcaccgacataagcggtaagtattccataactattcccaatggacaaaacaaacttcaattttcatatattggctatcagactcagaccagagatatacaaggaagtattatgaatgttacccttcaggaggatacacaggctttggatgaagtagtggtagtaggttacggcgctgaaaggaaatctcttatggcaggtgctgtctccggtcttaaggtaaaccataaaaaagatattcaatacgaagaagaggccagcatggctctcgacgttgaacaaagccagggacagatgggctacgaatttgaaataaaagtgccctacaccattccctctgataacaaacctgtagttgcagaaatcggtcattacgaattacccgcttcttatacttaccaaagtactccgaagatagataaagatgctttcctgattgcccaggtaaccgattgggaaaagctaaacttacttgaaggcgaagcaaatgtttactttgagaatactttcattggcaagtccattatgaatgtcacccaacagaacgacacactatccttctctttaggtcgtgataaacgtatcatgatacagcgtacgaaagagaacgaatatacctcacgcaagtttatgggttccaatcagacgcaatccattgcatggaaactttctgtccgcaatacgcgtcccgaacctgtcacccttacgctttacgaccaactgcctgtatcacgcaacaataacattaccgtaacagcagaagaaatcagcggcggcaatctggatgaagcgaaaggtatcatcacctggcaaataaccttacagcccggcgaacaacgtgatttagctttacgctataaagtgaagtaccctaaaggacgaaacttaataatagaataacactttttcttataatccaaagacaagttgatagaccatctgctccatacaggcaaatggtctgtgcaacagaaatgtattcaggaaagaaataacataacagtgtattacttataataaatattaattcatataatattaatataggtcacatgcatccttttcattttttgattgtttattct

SEQ ID NO: 6423 - DNA, 104291 bp, Unknown
  gut microbiota DNA sequence
tacaatccaatttctaaatgtaatgtatttagataactttaatcgatggaaacggcaaatagtttctattttttcccaaaaagccattttatgtcctgcccagataacagcatttaaattctgtactaaatatttattgataactgctgtccattccggatgtgactgtgttaaaccatatatctgtgtacaaactgtagtatagccttcaatatttcgcattccaaaacgctgagtcattatggaattatttcgtattcttcttttaaagaaagtttctgaaatgtaccgtgctcgctctgcatgtaaataaatttgtatagagaaaaagtgatcttcgtggataatacctggagggaaacatttgaaaaagctatttaggaaaaggcgattaaccaaacataggcaaacagaacttaaaaatagtttattatcaagttcgtaattcagcaaatctattcctttttgtactgattcttctatgcggccttttctgttataattagggatattactattatccaaagattcataaatgggttctgcatcaaaaaaaataaaatctaaattatctttttcacatatattataacaacattgtagagcatttgtgtctaataggtcatcactatccataaaatatagatatttgccggtagcatatttcatggcttgattacgtgcaactgatagtccttgattaggttgtgtatgagattgtatacgagaatctaacgcttcgtattccttgatgatatttatactatcatctgttgaaccgtcattaaggagaatgatttctatctcctttaggctttggttacgtatactatttatagtatcatgcaaataagcagcagtattgtatatcggtataatgacagatactttaggctgtgaaagatattgttgaatattcttgctcatcttttttttatttttaatgtaatctttttaaccttagaaatgatatcatattcttttgtatattgaatatatattccccaaacaataatactaaaaacagttttgaaaatcaatgatataactatattccattgttctgaaaataaagatatcaaatataatatgctaccgataatagcgctcacaataataggagataatagctgtttgtagaaaaaaagaattttgcgatgtaacatgcaactatataattgccaataacattgaatgaaatttatacaaaaagaaataaagatgcaccaagctattgcttctaatgaactgaaatagaatataccaattataatgctgcttacacttactatagcagaaaatgtgccacttatgaataacccacgggtatcatttccagcttgataaaatgaacctgatgaagatagaattagttggattccaacagtaagagatagtatcttgaaaataggaatagaaggtatccattgcttcccgaacacacataatactaattcttgagcactgaaaaaaagtaatattccaagtggaaatccaatgaaagccaataagcgtgtaatgcgttcatgagaataagccaattttttcatatcattttgatagtcactcagaataggatgcattacaggagtgataacatacgttatattctgcaaaggtagcatcattaagcgataagatttttcataatatcctaatggggtcatccccatatatttaccgataaggagtttgtctaagttgcgggtaaagtaattgacaacattgaatagaaactgatatatagaataattccagattttctttacactttctatgcctactgtccattgaattttttgaggatatttttttaatgaaactcccaaaataagggcactagataaaattggttgtatagttaatgtatataggccagctcctagtagagcagcaatgatagaaagtattccaactgaaaactgaatgaaaaaagttcggtaggctataaatttaaagttcttgtttttataaaataaggtatttggaacaatgaaaacagcagaaaaaaacagactgattgatagcagatgacatatatgaatgagttggttatctctgtaatatgaggcaataccccatgcagagaaaaagaataagatacttagaatgatacccaaccatatggtaaacatatagatattgtttatatctttgggggttagtcttttattctgaataattgcagaggaaaagcctatgttggtaaatatgttgaagaaattgataataactgttgcaatagccatcacaccaaaatcgtctgggcgtaataaacgagctaaaacagccattactatcagagagataataatacctgaatatttggcgattgctgtgtaaaaaacgccggagagcatttgttgctttatacttgtcattaacaattataatttagaatcttcttgaaaaattttatctttacatacctttttcatttgctctttccaggataaatgtttgatagactttctaatttcttctggtggtatagattgtgagtggcaaaagttaataatttgcaagatgtttatgggactttcattagcaggagctttcaatatatagggcatgtaatcaaaatcgtcatccgtttctgaataaatgaaggcaaaaccacgtgctgcatactctctattttttagagtttttatattgaatattccactgcgatgccgtcctaaactaccgatagcaaaatctgcatgattgaaaagttcgtttaactcctcaccatgtttggcaccatgtagaatgacataaggggctattttatatttctgtatggagtttataatctcatctttttccctttttcctgctatattacctacaagatgaaagtaaactttatactcaggattttccttgtagtacaatcctaaaccttggatgagacgatcaaaaccgtgccagaagtgtatctcggcaacacctattaaatgtatctccttacttaaatcatgaatgtcttttctcaatggtatgttcgaaaaatcgatgccattagaaatacgtatagtacgttgcccgaaaattttcgtgtcattggaaaatgtaataatagcatctatatatttacagaaactatacctgaataatttatcaatatagaggtaaatttttcgtgcagaattactgaattcatggtcataaggataagtaggtatctctacaactattttaatcccgttttcctttaatttttttactaagtgtatggtaaagggattggcattatggtaatatcgtatatatacccaatctattttattctctatagcgtatcttttgatggcagtaaaatcaatacgtttttttattttagcttgtattccagttcctaaatcagcaattatttcatcattaattaaccattgtctatgtccttcagaagatacatcataatgacaagtactcacatccataccacactcttttagggcacgtatttgatatctgatttttttgctgattccattatattcttggaatccgtgaaagataataaatagcactttcatacttttatccattgtttttgttccagatcatatctttttattactttagctggattacctactgcaatactataatcaggaatgttttttgtaacgacacttcctgcacctatttgacagcgttttcctatatgtactcctgctacaacaacagcattagctccaatatgtgtgtcttcgtcaattatgacttctcttttatcgagttgctgttctgaagagtttttagtgccatcctgatagcaatgattgaatcctgaaataaacacgtgttggcctaatccgcaaccatcttttatgattactggaccaataacaacactacctatcccaattcgtactttgttacctaaaataacatctcctgcaccattattaattgtggtaaaatcttcgatggtacatttttggcctatctcaaatcgcttccatggaaatacatctatgcgtgatcttttccagcgaataatactacctttgccctttttatgtacaaatggattaaagaaaagcttaacccaaagacgtggtttaggattatcgggaggactgattagccagctactaaatttcaacagcttttcgttctgctttatattccgttttaacttttctatcatcatttcttatcgtattattttatacccccatcgttcattgtcggattcaacaataattaaataaactcctttaggatattctccaatactaatatatgattcttcctgagtgaggagaatttgttttagcacattgccatttagagaaataatctttaagttttttccgttcaaacattgaacgaaaatttgttcgtctgaacttttgtataccactgggcgtttagagttgattatatcggtaatattgctcactaatggaaaatcttctgtgtagtctatcccattgtgtatggaatattgattcatagatttaaaactcggagttgtgaaagtatacaatgttagcccaccgtcaggataacgtccaaatgaggttgttttatcatgggaagcatagcagacagaatctactaatatcacttcattagtttcatctattttagaaagatatacactaccacctgttttgctcaacttaaagttagtatgtagtatacctcgctcaggctttttagaacaccatattatactatatccgccagctggaatagtcgtctttttactgtcagtatctgcaaattgaaacattgtaggattgttcttctcatttgaaatgtaatatttagaaaaatctattgattcacttgatgaattgtagagttctatccagtcttcatatttatagttatcatctacataagaagcgttatctgcagatatttcattgatgaaaataccattacgacgtaccattccacttgactcatatattgcggtcacctgcatatctttttctacggataattctattgatgtttcagtttgttttcttatattgttatccgaatctataatattccaatatgcaaacttttcaccttgatcgtaaagcggtgcttgtaaatgtaaggatttgttttcaaaccatttaccatcataaggtaatactggaatttgtcgtttgttgaataaaattggagttcctgtatgtgttgagttgatatttagagaatgaatttctcctaaagaaaaattagtctttaagtgatcgaaaatttgagaacaagcaagtgcctcatattttattgtattctgagttgtcttttccaattcgctttttccttgagttggccatttttcttggtaataagggtattcagttttaatagcttttttcatttctgttaaacgtgttttaaaacgttcaggggcatatacagagcttgctacgagagactgtactgtgatatattcatctttaaatttttcattattaagaaggtatacaataagtttggttgaaagtagagtggaggtactctctattagagcttgtaatttattaataggacttccacctacaacccattgatccaaatcttgtaatatccatttccattttcctccttttgcatggggacagaaaaccagctgattattattaggccaatccatatttttccccataatttggatagacatataataaagaaaattatctatatccattaattcgcatattttttcataatcttcatttttgctgaaattagaagaacgtactatattttcaaatttattccagttttctttgcttccattagatactactggtccccaagcaaattctatcatatcaaaatctgtttcggataacccataatatgaatatatcatatctttgttttttcgttcacggaggttataaattccccaatattccccgtttaaatagactactgcgggaattgcagcttggtaattaagaggggtaacgtctgcaagactttgtatgcaagcatcatgtactaactgtacagtagtcgaaaattgccctccacttctgagtaagaagcttttatagcgtaagccttcgcgtgttggaaataagggtacatcaaatctttttttaccatgttttgtttttccttttattttgaaagatttttgatcatatcctcttgaagcatttccactaatagctaaacctattggttggctaatgcttacctcgcgtttctcatcttggaactcaatatagccccaacgtgtccagtcacggttataatttgccttaggattgtttgctgtaagaataatgccatttgttcctatacaataaatacctatcatgtcatcgtataagttttctggggcagtagttagaaaaatgattgggagattttctggtttacgcttattaatcatataagtattagtggcaattaatccatctaaacatccgtctttaaaagctcttgcacgtaatactgttgttgaggggatggttatttcattcgtataaagtgtactctcaagagttggttctgaggcatcagtagtataataaatttgggccccctctgttccacaggtaattttgactttaacggcactttcataaaatccactttttgtagaaattttcggtgtttttatgacttctgtagctgttacagccttgttattggtgttaccaaaagtgttccttataaaataaactaatggagaagttgtatcaccatcaactgggcgtccataactaatattggggtattgttgaccataattcatggtatcatatatatttccattcttatccgctacagataggaaaccaccatcatcggcatcagtatctaaagaatagcctgttttgctatttattaattcgtcatttagccatacaactgcatatccttgggctggtaaaatacgatcatctgagattttgtattttaaaggttgttcagaatcatcagagaagtacagattttttatgtttatgtcagtatttgagcaattgtataattcaatccatcctgaataatcataatttggatctagttccttgtttacattacagatggagatttcattaatgaaaatctgggcatgcagaatgttaggtacggagaataagataaaaaaaactccaaataagaatgctatgatgttgtgtgtcgttttcataatatcatcattttatataacaataatgtttgctttatagtaatgcgttttgatagatgctcgttaattgattagctgtttgcttccaagaaaactgctttacccgttctaatccataattttgttgttgttggtacaacacattgtctgtttccaaacataataatgcattagcaatctcttctggtttataaggatcgatagttagtgcccctggacctgctacttcaggcatagatgaagtatttcctgtaataataggtgtaccacatgccatagcttctaacattggaattccaaaactttctcgtagtgacggataaaggaaagcaaatgctgcattgtaaagagttgctaaatcatgattgcttatatagcctggataataaagatgagattttatatcaataatattttcttgttgcaatagggtattgatatattcttctttcaggtcagcaatgagtaatggacgtttaatcgtagaccgatgtagatagatactatatgcttttaaagtacgagcagcgttctttttaggatctgtattaccgaggaaaaatagaaaatctttttcagggatgtatttatgaacaatattcacatctgcttcttgttggtagaagtgagtactatatccattgtagacagctgtaatgcgatctgaaggaatatttagagcttgacgaatacgattacattcgaaatgtgatacagtaataatccttttacacttctctagaatacgtggaaccactaaacgacgataataccatcccatttcttgataaagtgatggactccgatgttgacgaggttctaaataaatgatatcatgcaatgtcagaactaagggtaccggacatcttataggggctgtgttagatgtacaatgtaataactcaactcctaattgcttaacaattcgcggaagccccacttgttcccaaagaggataagtcggatatttcagttcaataattgaaaggttggcactgttttctatgcagcggtcctcacctggtgcgacaatgacataatattcattaccatcatttcgtctctgcaattcacgtatggtttctaacgcaacaaaatccattccatgtttattgagacgaaagatacgttgggcttcgattgctattttcatatttcttttttctgtcttctttctgttttcttctttcttttaccacctccaaataatcttgttatgtggctgaagattgatgcaaatactaaaataggaagagcccatatggcttttttgaagcgcttattgacttcgccatctggcagagccatcaaaaatgtaatgccaatgacgccaagtaatatgtaccatttgaagctgagagtccaatcaagtaatgtgattccaatagcgcataatccaataagggcaattaaaaggaaacgggatggcatcaaccattggaatagtttaagagcataatcccattcacctcttaataaggttattggtaattttttcagtgcaaaaatagtactgctatattgtgaacgaagccaactaatacgttgcgcttcatatccattagcactttcttctttcttactgtaacatacaacttcttctaaatattctgtgtatatattttgttgtaatagagctgtttccatagctttacttaaatctgctcctttcagagtaggggctatctcgtgaaacattgtaaaatcaaatgccattgctgaacctatgagtgcggatgaaaatcccatacgagtatgagctttacggaagatattattattgatttcttcactagtggcattcaatacagcaatactggttgtgagattttctgtcatgcgatgcgcctgtattgcatcgcaaccagaatagtatgcattattgaaataattcagggcactaggtacaatgcggttgtctgaattaaatataacgaccatatcatattcttcaggagaatatcgttccataacttgctggatagcatatactttggtgcattgttctttgtctgggacaacaatgtttactggcatttgtagcaaggtgacaaggtcttcttcaggtaactgggttgctgcaactgcaatgtcgtacttttcacgtgggtataactgggtatccaaaaagtgattaatggaattaataacttctttaccattgcgtaatactgtaaataacacaagaaaacgatactgagtttttgccagcgggtaggggtttttgtatttgcctaatgaaaaaagagcacatacaaaaaggtataataccggaatagctaatagcagatataatacagcatcggctatttgtaaggcattgttgttttcgtctacccaccaatcgggattgaatatggaaaagatatcgctcataataaaattgtattacttgtttttttatttgaattctggttacatttactgatctgcttatctatatatgcgccattcattataaatgctaaagatgcaactagtacgaagtttgtaggaggctgtcccattccctctcctacatatccattgagccacattccaaatgtaccgcatgttaaagcggctaatgtgtgcatcaactctcgattttggatacgaaacatgactatataacagcaccgtaataatataatgccatatattatgagttggagaactaaacctacaatgccggtttgtatccatatacttacataatatgaatcaggtgggagattaccttctatgtaactaccatcttttgcaggccacaatttaggaatatcttcctctaatcctacacccaatggaagagttttcagatattcagcaatctgttttctattctctatgcgaacattatatgaggcatcctgcgttggttggaatgctgttcgcatacggcgtataaatgaattcccatttcctatgttagtaaaagaaaagaatgcaaataaaaacagtccagtaatagcagatatcatcattacttttacacttttacaaagtagacaatataaggctattcctccaaggggaactattatcgcaccacgtgttcccgacatcaataatcctattaatcccatcaaggctatacttctataaaaccaggctaaccatttttggcgagtgtgaaagcctacaatcgaatagacaatagtaatgattcccatgtgtggaccaaagttacctgcatcagaaaaaaatgaaaaatagcggataccactatttaaaatatgagttacagctccaccattaataagccatatcttttctgcataatcgaagccaacatatctttgatataatagttttaaaaaggctgtaatagtgaagatcccccagacgattaatcctctttttaacattttggggctatctaataatagacaggaaatgagatataatacgagggtgcctactatccagttacgaattcccgcagtaataccttcagaatggatacccgggttgactaattgaactaagatgaataatatccaaacaatataagtaacagttaatacatttattgcattggatagttttatatcagatttcttacgaatagaaataaataagattgatatgaatatatagaccaagagtatatctaagcccacacttaaaccttctttacggctataacgcatgatgaccataaaataatatgcataagttgcatatagcaaatatccaaagcgaggagtttgaagtccgtatataagtataatacttgctaaaggaaaacaaatgactgctattgctgcaattaagttttgagtaataatggcataggcaagagctgccaatcccgcaacaagcaaaaagtgaaataatgctttagggggcaattcacggatagaatgttgattattatatgccatttttatctatatctaaatgatttgtttattttactgctgctttttgagaagtcagccctagttgtgccaagcgactaaagaatgaatgaattggcattttaggcggtaactcacctgtaaatgattcaacaacatcacgatcagcattatttaagtacagcaggaatggagttgtttgcaaggcttcttttatgggatcaagggtggcatcgtcactgtttcgccataaacgacaagcatttgctattaataaatttgcatcagccttttgaagcaccggtaatggtatagatgcatctttgattgcaggatattctactaaaataatgtcaggtatctgctcaacttcattgagttgccaaaaatcagataactgttctgcttgtacgtatcttttgtcttcggtttcaaaatctaagtcatgccgtactaaacgtacatgaagtccttctgatttccaatattccatgaagtacttaattaagaacgatttgccttctcgaggattaatacttaacaaactgattatggtcgtttgtcctggtttcatatatttatttaattgacggcaactataagctgcagcaatacgattgcaggctttaagaaaaccacggtatttcaggttactgataccattgaaggctgcaatgacgggtaatcccgtgagacgcttgctgcggtaaggatcacgtaacgtacggtcaagcaattctataagaaggaaataagtaataatgaacactatagtacctacaaatgcaatgaggatgtaaagtaaacgttttcgcccattatctgttaatggataatctggaggagctactgtctgtaagttacttgtgctcatttcaatatttttgagacggagatttgcatctgccagccccttgagttgtgtacgatagttgtcttcagcaatatcaatagcacgctgtttgcgatttacttgcgtaccgataggggacatgtgactgtattggctaaatatatcttcttgacgttttaacaggacttgcaattctgctttagcttttgcttcattgacacatgcagtcagccactcatttaccatactttcaataccgacaccttctttagtaaaattgtattcattaagattgtcagaaatatggctaatattgtcttcagcttttttaagagcttctttttctttgcgtaatttgctatcagtttgctgatgtttatcagtggtaaagatttcttgctccataatgctttggttcagtgtgctgactttatttaattcttgcaacaaatttgtgttgctacgaattatttgagcgcgtacatccattctttcatcaagcatatcgcgcaaagctacagcaccttgatagatgcgctcggcttcttctagacgatcttcgacttcatagcgggtaaatgctaatgctttagtttcctccggatagtttataacacgctcttgcacattataattcatcaaatcgtcttcttccttatttaatgctattttagcaagccgtacttgttcttgaaaataagcgattacatcatttgttgatttgaaacgaagtatttcgtatgcttttattaattcatcaattaaaatactaactgttttttgagtgatgcctggatcggcagaagtatatgttatttcaagtatatcactatttcctgcacgtttaatatttatactctctaaggcggctgcactataaaatgcaactggacgattaaaaattgaatatacgaaattattactgctctctttccggtatgcagtaagattggctaatgttttctcaacatctttccgatctactaaagctaatacttcttttggagccatttgtaataactgccgataatgtttagcttggatatattgattgtctttccattcttcaccgtaggtaagcgagttagctaatagacgaatagaaaccttttctaatgtgcctcgtgattttgctatatttataaggttgtcgaaagtactggttactactccaaaattaatagcagaaccatcaagagaagtagaagtagtaataccagcatataagctacttttcacggtatagctatatggaagaaactgagtgaagtagataactagacttgtaacaaaaatagttccccacaatagccaatagcgaatgcggtaaagaaattgtgatatgaatcgcattatatccataaggtatttacttttctttgatgatttttacatttgtcagcatctctagtaacacaatagaattgtgtagagctacacgactttgttcgtaagttgtaaccgcaccagtacgtcgggcgcgctccaatgaaagtgaaatgatatttatttttccttgtataaagtcattttctgatattttcatttgtgcattatataatgcggctgtttctgctttggctttgatagtagctaattgttcagttacagcattgtaggcttctaatactttcaacttacgctcttccattacttcatcttgagtatattgtagctgttctatattgtaacgataatttttgagctttaacggacgattaaataaatcacctaaaccgatactgacactggcccctaaattgaaggtatgacgtgtaccagtacttgtagattggtaccaatctacaagtgtttcactactttcacttaaagtattaaaacggccaaatgcatagttgccatttaaccggaaatagttccaccaactacgtttttcaatacgatattcgtttttttgttgttctacctgtgactgtgctcgttttactgtggcattttcagatacagcatccaaaaaaacagataatggaggtaattctaacttttcaatttcaagaggtacttcttttcctgtttgcattactgtcacagtttcccatcgtgcatcttccatctttagaagttctaaagcttttatacgttcttcacgagtcatagtctgttcttgggcactaacttccacagggatagtaaacaatccccaaagggttacgctacagtaaatgagtgtaatatacctttttatcattttcttatttgctgtatgattaatattgtaattatacattttctttttgtacaaatgctgtcaacgtcttaaaaataattttcatatctaaccaaaatgaaaagtctctagcatatttgatatccaactgttttcgttcctctgcagacattttacctgcaccacctcgtttttctacttgccataatccggttaggccggaaggagccataaagcgatctatataggcgtcactggttagtaattctgcttcataaagtggaagaggacgatttcccacaatactcatgtcacctttcaaaatattaaatagttgtggtaattcgtcaatactatatttgcgaatgatacgtcctactcgtgttatgcgtgggtcgttttcaagtttaacaaatgtattctgttgaattttctctttcttcttgataaaatcttcttcagaaatcacgaaatcgtctgaaattaaaaggttttcttcttcatcaggtgttcctgaaagatcatcaaaacgaatttcaggcccttcatcagaattttcaacttcctcaatttgatattgattgagagcattcagttctttcaaacgcttatctgcattagtatacatagaacgaaatttcagaaaatcaaaaatctggtagttagaaccaacacgttgcgatttgtagataatttttcccttactttccaaacgaatggcagcagctgttcctattaatattggagaaagaataattacagcggtacctgcgaagagtatatcaaacgtacgtttccataaaggaaggcgaaacgtattcaatatcttgcgatgggtttcactaaattctttcagcttgctttctttccgtgctttaagataaacggtcatacgttgaatactatcttcttcagcatggggcggaagtgtgttattaactccggcttgtaggtaattttttcggtcttcagcttttaatgcttcagtaataagggtgatatagagtcgaggataacgtttacgtagatagctaatttcgatataatcagcttcacgtaagtcggtttgttcgtaaagaatggatatgttataccgatcacgaataccatcaataacttttgccgctttctgtgaagaagatacggcaacgaacataccccctgtaactttgctcaggtgatcaattataatccggttatttccgatatagatatagtataacatgtgcctttacgtgtttttgttgttaatcagatgaatttcttgaggcgcactttcaactccataggattgaaaggcttcagtatgtagtccacagctccttcttcaagcaaacggatacgttcagtagtactttcttcactagaaagcatcataacgggaatgtgcttaaataactcattacttttaaggtaatggaggaattccgaacctgtcattttcggcatacgtatgtcggatatgatcaagtctggttcattaccttcgtgtaaccaatcgatagcttttaaaggatcttcacagtacacaaaatcatactcttttcccaaatacatagaaagtactttgcctatggaggctttatcatccactaataatatctgtttcattattataatttataattgttctctacctgttatttattatctataaacttttccttcattagggtacttataccaatcttggctaacgttacggttgcgagcccagtctaaaaacttaggataagcacagtcgttgttatctttttgattactgatattgatgctttcgttggggtaacggaaattaggaacacagattgcccatgtgttattaccagctaattcaagattggtctcttgaacagtacccgcattagtagcaccgtatttccagaattcatagaggtggacttccacacgcttttccatgcttttatatttgtacgcaatgaaaaagtctaaattatctttggtgatgattggatcttcctgttgataggcattgttttgctctattttaactttgcaagtgtagactggggctgtcgcctttcctgtatttaccattgttccggaagataccccaaatactctgtgtgcatttccaaaaagtgggattgtcatatcgttctcaatacctgtactgaacatggaattaagcaaagttgcttggaattgatctttatctccactaaaactgatattgccaatagctgatttttctattccaacaatccgtaatccggcaccaatagttttggtagccccggcagctgctaaagcgacattaagataggtggacgtgattttattgtctgctccacgatcgtattcaatggttacatccaatacgatgtcattaaagtcgtagtctcctacaagaggataattgtcttcgaatacataagtataaggcattgggtcagaaggaatttcacttccttctcctggattgttaccttcaccggtacagtctcctttagggatgatgacaggggattctccccatttggagaagtaagtcagttggcctatgtatctccaagtatcattgctccaattactattaaaactgttaaactcaaaataaatatttccttgggcagtgttaggattaagttgaatatctgctaatgtccctactttaataagtgagggttgcgaactacctgtaaatattgtctgcataaaagacgctttatttatggtaatcatgcagttgtcacccagagttattttcttccctccccaagttgcagggtattcattgataatggcggcacaattatcaccaagagttaaatctccccggaattcgccggctatatctaagtaacacccattttcaatataagtattgttagtggttgaggtgatttttgcatgtccttggttaattagctttccgccactggttatatctaatgttcctatttgaagagtaccattattatataaaataccttgggtgtctataccaacataagatacctgaagtgtgccggcattataattatatcgcttgtaagatccgttggaataataaatcttgtttccgtttactattccgcctttatatatcattaaacggctattttctataaatgacaatgtttgagaatccgggattgtgatttctcctccattcattacatagaagtctattccacgttgtatatttaatcccatagtgggatgccatttacctaagatgatgataatggcaggattatcataagataaaccatttttattgataacacctgtatatacgtttcctgctgatatcttatatacttttccattcaataaatctgtttgggacgtaatctcttccgcctcttttagcattgtattgatgtcggtttctgaatattcaggggtgtatgtttcaattgaaacagatcgtgtcatagaacgtgtatgggtagcattgccgaatgttgtgctcacttctccattaactatagatacatagcggaccacgttacggttatgcgcatcagtacggcatacaaacacatctgttaatgtgataggacagtccattgtagtaatgaaagaaacattattgctcatagttccttctgctaataatttagctgtggaattcgctattaaaggattactgtcgtaaatgcgaatgatgtagtctgtttcagagtcttcgtatacacttatgttaacttttacttgtctggtcattttccaatccatctgcgggtcgatgtctttgacagggaacttatcctcataagttgctttaaccttttcggggctaaagacatctttttcgcagctactaagaacacataaagtgactaatagggctgacaaaaatagacttattctaagtttcttttccatgaccttgtttgttttgcttgattaataacaaaaatacgtacaattaagataataacaatttttataaggtttaaaaagattgtttattagtgatttttaactatatgatgaggtattctgaataatacttctccttattgctgaaaaagccgatgaataaagagattcatcggcttttctcatcaaggaatttttgaattattctttaaatacttgaccattgtgaactgtgtaccaatctttatattctttgccaccactggttacccagctaacaaagtttgtgtacacatttttgatattcttatattccaaaggccatgcaaattctgttggaataacaatcccccatgctaagttttcagaactcagataataacattttgcttctgcagatgatttatcatttccttgtccaaatagtttggtgttccctaggtcagtaggagcatacccagctacatgtatttctgtacgtttgattttagaacttgcctcttttgatataataaatacatcaagctggttgatattgagatccttgggttgcactgcaccttttctgaattctatggatatttcaaatttagcgccgttcttattgttactgttatttgcaagggtattgacataactcctgtcattttctgaattgcctatgaagcggtgcgcatcattgcaaatgatgattacaggattgctttgattggcttcaaaacccaatggagtggaattgcttgtgacaccttctacgatacctttcagctctacgacattggaagctgcaaatcccaggaactgaatgcctaaaccgagtttcttgctggcacctacagcttgtaaggttccgttgagtgtgtatgttcctacagagccgtcttcatgctgggcaaaagttactttatcgatagtggctacaatgtcattcaaatcaaagtcaccgtaagtgggccaattgtcttcgaatgcaaaagtatagttggttgcatcttcaacgatgatcgggaattccggatcacttgggtcgccaccttcgttgccaccgttgattataccgctacaagattcgatggaatgtttggattcatcgtaaccggtggcagcacatgtaacgtcaagctgtcgatattcgtttgtatcttccctctcaaacactaaattgccactaatactggtttttccgttgttttttagtgtgagctgacgaatttttatcatggatatttcaccttgttcgccaacgatgttgttgggtgcattgcctaaaatgaaattatcagcttttatgattgagctgtttctcattttgacatcaaccttttgattacaggtgatggtcggaacaggtagccattcgtttgctgtttgactccaatcacttgtaatagatccattatccaaaattaaattaacgaaagtaaattcatttctgatgataaatgcacagctattatatatctcacctactgctgtgttatagaaatcagtaagttgaacaaggccatcgttataaactgaagcgccattgttccatgttgatcctgccaaagtggcttggtaatgattgatgaaacttgccgtacctgtattgttattggttgcaagtgttccattgaatttcacatcaccatagttgaatatctgactaccgttgatcaggatatcttcgcaattttctatatatgatttatttagtacggtagtttttataaattcaagtttacccgcgcttaatacaccgtagttaaatacttgagcactattgaaatagcctgtttctgtagctttaatacttccgttttcaccaatgtatatttcaggtgtgccaatatttacctttacgtttgttgcattaatggagccgtagattttggctggacatcctaaatagaagatgccgccttgggattcaacacttcctccactttgaatagtaagagtgttttgggcatcgattgtgatgtcttttgaaccaattatcttaccgccattcatcacataaatatcaagtctggaggctagttttttacctgatgcagacaaatcccatactccttgaacaaatacagttgctctgccgctgctttcgtgaactcgtatattgtctttgaaagggacgtcatctgtgtattccgttccgataatgaatttagctccggcgttcaaagctcccggattatactgaacataaccgtctgaaaccgcgggtacttcaggtattatttttgtttcatcatagagaggcttggtatcttcgctgtccttatggcttggttctatgaagcctgctcgtttggcggcttcgaatgctgaacctgtatttcctgtagctcttgtgtcaactccggtatagtacaacttgaaattcattgagccaccattctcgggaactgtacgtgcgtacacttctttccgttgcttcgggtcggtctgacgaatgtatagtttctcaatggctgtaggcacattgatttctgtgatgtaacttgtgttcccgtttgttacacctgctgcaattggcgttgcatttttatcatgcaatggattggtggtgaatacttcaatcaagtacttgtactgaccattgaagtcgtcctttacctcaatattgagctttactggggtaatcatagtccaaccaaagccatccggggctgcaaagccttccccgaaaggattttctgctggaggtgcctgcggttccttactgggatcgtacacgtcacccgcgcaactggctaaaaatatggtgcttaccacagtagccattactgataatcggttaattagtctcatacttgatagaataatatatatgaattatagcttattttttattaattaactgtcgaaaatgtgcatatcttgcatattctcgccacaaagataacgataaatttgatataataacaaaaaagttgtttttttgtttcagtaagatgctttatttattaaaaatgagtatgatatatataaatggagaacttgtaaattttatccagtgattttttgagatatgcaaaataaagcgggttatagtcaataaaaaatgttttattgactataacccgttgattttagactgaatattttttatctgctatttagtgatttctcccgcaaggtcagagttcatccggtaacggatttcggcttgattgagaccatggccaaggaggaacataagtttggttactgcacattcgggagtactgtcgtatccgctgatgacgcctgcttgcagcaatttcagtccggtttcgtagcgtcccatttcgactacgccacgttggcattgagtgatgttaacaataatgatgccacgttctgtggcgtccttcagttggcggatgaaccattccttctgaggagcatttccggaaccgaatgttttgagtacaaccgctttcagccctgggacatggagaacagaattgatgatgctttcctggataccgggaaaaagagtgagcataaccacattggtatcgaacaggtaatgaggcttcatgggacgcgtcggatcaggacggcggatgatgtgggcgtcatatttgatgtggatgcctgcatgggccaatgagggatagttgaatgaacggaatgcgttgaagttttcggcattgatctttgtggtgcgattaccgcgcatcaattcattttcaaaaaagatacacacttcgggaacgatgggggtaccatcggggttctttgccgcagctatttctatagaggtaataagattttcttttccatctgtacgcagagtgccgatagggagctgagagccggtgagaataacgggtttagccagattctcaagcatgaaactgagagcagaagccgtataagacatggtatcggttccatgaagaatgacaaagccgtcgaagtaatcataattatagttgataatctttacgattttagcccaaagcgaaggctccatgtcagaagagtcaataggaggatcaaactgataggaagagatgcggtaattgaaacgtttcagttcgggaacatgtttgagaagatgatcgaagttgaaattttcaagcgcacctgtctctgggttctctatcatgccgatggttccaccggtataaattagcaacacggatgggtagtcagtcttcataaacataaccgggttacttcaagtcatttattattttaataatcaccttatataattgtggaatatcttctttacaaatgcagacactgtcaagcttcatcattccactatcacttaacaggaaatcatctacagagtaaatatcagaacatcttttctctattagttcaagagaatcacgaattaatttcagggtatgaaaagctattaatttatcaaacataaataccctcctttaatatcttttcacgtaggagtgcatccatcttatcacgtagacgcacaatatcaaccggacagcctaataattcttccaattctttttttatgccggataaagcaaagaaaccatgtagttgcccttcaatatatatatcgacgtcgcttgtttctgtttgttcgttccgagcaacagaaccgaatatgcccatccgggaaataccatatttaccggcatttttttgcatataatcacgcaataatgaaatatattcggtaacagttttcatcacatttcggttttactagtgcaaaggtaagaaaaaaacagtgattagcggtaaatgattagtgataagtgtcattttgttgttattgcaccatctgcttatcactaatcactcctttccaatcatttcttcagcccttctttcaactgtgtgatcgccttttccgcatctccttcagcttcattcagcagggtgacgaatcggctaccgatgatagcaccggaagagttggcacaagcggcatcaaatgtctgtttgttactgatgccgaagccaaccatgcggggattgcgcaggtgcatatcctgtatctttttgaaataagcttgcttctggctatcgaaatctttctgggcaccggtagtagcagcgctggataccatatagatgaagccgtcggtatgttcgtcgatttcacggacacgagcctcgctggtttcgggggtgatgagcatgatgacacggatgtcgtaacggtcggcaataggtttatacgtttcttcgtaatctttgaagggaagatcgggaataataacgccgtcgatgccacattctacacatttctgacagaaagcctcgaacccgaatttcatgatagggttgagatagcccatcagaatgagggggatacggacatcgctacggatatcgcggagctgctcaaacaaaatacgcagcgacataccgttgcgaagagcacgcgtggcagcttcctggataacaatgccgtcagccattgggtcactgaagggaataccgatttcaatcgaatggaccccattgcgttcgagggtgcggatgacgtcggtagtaccttccagagttggacaaccggcacagaagtagatggacagcaagtttttagggctgtcctgaaaaagttgatttatacgattcatgatgttattctaaatttaattcgttcttaattctttgagaaaacgttcgattcgttccacatccttgatgcccggagatgtctcgaagcgactgttgatatcgataccggcaaggcggggatggtggaattctttcagagctttgacactgtaagaattgataccgccgctaagcaggaagggggtactgccagtgtaacgttgcagaatgctccagtcgaattgctgtccggaaccaccgtagtggacggtacgtgtatcgaatagatagtagtcgcagaaaccttcataattgaaaacggcaagaagatccttgggcaaggcgatggaaaacgctttgatgatccggataccctgtgaatgaagggtgcggcaatattcgggtgattcatcaccgtgcagctggacgtagttcaggccgaaacggtcgacatatataaggatgttttctttggtttcgttgacaaaaacaccgacacgtttggcaagcgtaggcaggtacctgggtatctggtacaggtatctgggggatttggggtagaagataaaaccgatcatatctacacctaatacttctacatcgcggatattgtctgcatcggtcattccgcatactttgatcattgtattcatgggcttatgtaccttaaaaatcacgaatatatgacattatgtgtgaatttccaaatttatataccgtgaatgagttcttccaatgtgctcccgggatcgtctgtacgcatgaatgtctctcccataaggaaaccacggaagcctgccgagcgtagctcacggatggtttcagggtgcgaaataccactttcggaaacgagcagcggaggcgtctgaaaatcaatttcagcaacagcattttttaactcttctgcaatgcggaaagagttttctatgttggtgacgaagctgcccagattacggttgttgacgccgaccatatccgtctccttatatatataggagagttcggaggtactgtgtacttcgagcagaacttcaagcccaagttcgtgtgcctgcatggtgagtgtgtggcactcgtcaggtgtgaggcaggcggcaatgagcagcactgcatcggcacctacaatgcgtgcttgcagaagctgatacttgtcgatgatgaagtctttacgcaggatcgggatgttgaccagagggcgtgctgtacggatgtcacgcagagttccgccgaagaacttttcatccgtgaggatggagagggcggaagctccggctgcttcataagcaggtggaatgagatcggcctgtgcgctttccttgatccagcccttggaaggggaacggcgtttgaactcggcaatgatgccggatgaagagtttgcgagtgcacgcttcatgctgcggacgggcgttgtgccggaagctccggttccgacagtttcctgcatcatggcagcagcttgctcttgcaattgactgagggagactgcttgcttttgctgctctatctcaatccgcttgtgggcgatgatttcggataaaatatctttcattgtttttgtttttttgagttgacgagaggggggagaagttgacgagttgacgaggggggaagggctgcgctgtacttgtgagcgaattcgcccagccatcatgccgaaaggccttgtccccttgttaactagttcccttgtcaactattaatcattataaacttcttcaacgtctccagcgcccgtccactttccagcgattggcgagcgatggcaatgcattcttcgatttccttttcaggttccatcacctggatggcgaaggcggcgttgacaatgacacattgcgtttgggcacgtgtggcacggttattaaggatgttatcaaagatgcgggcggcatcctctttgcaggctccgccgaagagctcttcgggttgcgcggcattgaaacccagcgcttgcggacggtaaatccgttcgtaattgcgcgtcataactttgaattcgtccgtgagggagatttcgtcgtagctatcgagactgttgactaccgcaaaatcgataccgagtttgtaaaaaacatttgtgtagagtcgcatctgtgcaagatcggccacaccgagcaactggtaagtaggcttgcaaggattgacaagcgggccaagaaggttgaacagtgtacgtactcccaatgccttgcgcacagggccgacgaacttcattgccggattgaaaagttgggcgtgcaggtaggcgatgttacactcgtccatgctgcgtttcaacttgtcgggatcattggtgaagcggatgccgtgttgctccatgacattgcttgccccactgacggaagtggcaccataattgccgtgtttggcaactttgtaaccggctccggccaccacaaaacaggcacaagtggaaatgttgaacgtgttctttccatcacctcccgtacctacgatatcgataggtcgataaggcgcgaagtcgatagggatacgagtctccataagggcttcgcgaaagccgattagttcatctactgtgatgctacgcatctgaaatacagtgagtaatgcggaaatctgtgcttcggggtaagcttcccgggtgatgttcaggagaatttgcttggtttcttccgaagtaagctcttcgtggttgaagagacgggttaatatatctttcattttcttatttacgattagacgatttacaatttacgattgaaaattctgttgtgttcggaatgcctcactttagtgtttgaaatgtggcatttcagacgcctttcagccagttgcctacaatctgttttccatcgggagtcagtaccgattccgggtgaaattggatgccgtgaacatcgtattcccgatgtttcagtgccatgatttgaccttcggagctgatggcagtgataaccaattcttcgggaaatccgtccgtatccactacccaggagtgataacggccgactggtatttcagtaggaagaccggagaaaatgtaatctttattctttatttttacattcgtttgtatgccgtgaaagacttcactcagattggtgagtttcccgccgaatgcttgtccgatggcctgttcacccaggcagacgccaagtatgggtttccgtcctgcgtaagtgcggatgacctctaataataagcctgcctcctcgggaatgccggggccgggtgaaaggatgatcttatcatatttctccaattcctcaagctcaaatttatcattgcgtagcacatctacttctgcgccgagttcttttaccagatgggcaaggttgtaggtgaaagagtcgtagttgtctatgattactgttttcatgatttcatttacaatttacaatttacaaagtacaatttttttagtacaatttacaaagtacaatttggctgcgctatgtacgccgcatggcaaattgtactttgtacattgtacattgtacatgaatttacattttctccgccattacgattgcctttttcagtgctcccagtttgttgttcacctcttgcaactcgtattcttcattactcttggctacgatgccgccgcctgcctgaaaccaaagtacaccgttgcgactgacgaaagtacggatggtaatggcctggttcagtgaaccgttcagcccgatgaagccgatgcaaccgccgtaagcgccgcgattgtgcggttccagttcgctgatgagttgcatggcgcgtaccttgggtgcaccgctcagagtgcctgccgggaaggtgtcgatgaatgctttgatggggagggcatcttcgttcagcgtaccgctgacgcggcttaccaggtggataacatgactgtaatattgcatttccttgtagaaatccacttttacatcgtggcagttgcgggaaagatcgttacgggcgagatcgaccagcatgacatgctctgcattctctttgggatcatcatgcaggtattgggcgttcagcgcatcctgttcgggatctccggtgcgcttggtagtaccggcgatggggtcgatgtaggcgtggcggccttcgatgcggcagtgcgtctcgggtgatgaaccgaagatgcggaaacctccgaaatcgaaatagaacagataaggagaggggttgatgctgcgcaaggcacgataaagtttgaagtcatcgcctacgaaacgttgttcgaaacggcgggagagaacaatctggaaaacatccccacgcaggcagtgggcaattccctgacggatatttgctttatgctgttcgtcggtcagtggggaagtggtttcgccaacggcacggaaatcataggcggtgtaattgcggttattgatggctttctgcaccgtatccagttcactttcttcaccgggggcaagcatttcaagaagtaccatttcgttcttaaagtcgttgaagacaatgaggtattgatacaagatgtagagcatatccggtgcgtcgttggtggcttcgcggctatcttttacgggaatattttcaaaatagcgtacggcattgaaagaggtgtagccataaagaccgcagtaattggcatattcgccttccacatggaagcagccgaggaaatcctctaaagctttttctacaggatattccggtgtgataggacgttcttcgcgagtgccgtcgggcaggcggaagatggctgttccgtggtcgatgctgacgcttgccaatggacagagtccgataaatgaacggttattttcactgccgtgatagtcggagctttccatgagtgcactttggggaaagacgtcgcggactttaagataggtacttacaggagtgtgcaagtcgccgagaatagtacggctatgtgtttgataattatatgtattcattttctttagtgattagtttttaatgattaatgattagtggcaccgatgatcttagtgttaatcactaatcactcaacactaaacgttaaataagtttctatatccttgtctccacgtcccgaaacagtcagtacaacaacatcatcgggtttgaagttcagcttttcgagggcaccgagggcgtgggcactttccagggcggggatgataccttccagtttcgtcagttcgtaggcggcgcggatggcttcatcatcattaacagcaagtacgatggcacgtttttgtgcagccagattggcatgcatggggccgatacccgggtaatccagtccggcagagatagagtagggctcttcgatctgcccgtcttcgttctggatgacgtaagtgcgtgcaccgtgaatgattcccatctgtccgagggcgatggtagcggcagtcatacctgtatctattcctttaccaccggcttcagcgaggacgatctgcacgcggctatcgtcgatgtaatggtaaatggttccggcggcattgctaccaccacctacacaagcgataagatagtcggggcagtcacggccttctttctcaatgagttgctttttgatttcctcgctgatgacggattgcaggcgagccaccatgtcgggataaggatggggaccgactgtggaaccgatgatgtagtaggtatcggcaggatgacaacaccagtcgcggattgcctcgttggtagcatctttcagcgtcatatttccggaagtgacggggatgacggttgcacccagcatcttcattttttctacattgacatgctggcgttctacatccgtttttcccatgtagacgatacattccatgttcatcagggcacatacggtggcagtagctacgccgtgttgtccggcaccggtttcggcgatgatgcgatgcttgcccatgcggcgtgccagaagaatctgtccgatagtgttgttaatcttgtgagctcctgtatggttcaggtcttcacgtttgaggtagagcttgcagccatacttttcggaaagccggcgggcatagtagagtggggaaggacgtcctacgtagtcacgcagcagttggtcgaactcttgtttgaaatcttcgctttgcagtactttgagataggtgttctgcaactcttccacacacttgtggagtatttcgggaacatatgctccaccgaattctccgtaataaccatcttgatttactaaaaaactcataatcctattttttatttaattgtttacgatttactgtttatctcaaaaccggataaaagaaaagagccctgtcgcaggttgcgacagggctctttcttaatctatattatgttcacatatatacatacgagcgctgctcccttacgactgtcggagttgtaacgggcgccaccaccaatatgtatttatgagcattgttttcattgtctttttgttttagctgggggcaaatgtaagcactttgttttaattaccaaagaatttcttgctttttttctttcaaagaacatttttcttataaagttgttctataggggtattcagaacaactattattcacaataaaaaagaaaggatgaactatgaagcgaaaacatttagttgccattggcgtatcgattgctattctcttgttactttattggctattggtggccgaagatatgaatgcttggctaaacgttaattgatttttcgtgactttcttgcggagttgtgcggataaaaatgtatcttcgcaaaaaatcataagctcatgaaaggaataagtaactcatttttgcgtacgatatgtgcgctgataatcggtttggtattggtgatgtttcccaatgaggccggagactattttgtaataacgatcggtgttgtgtttctgataccggcattattaagtatcatcgggtattttgccatgagtgccgaagagagacgtcgccttcctatcgaaggaatcgggagtttgctgtttgggctgtggctgatcattatgcccggtttctttgcagacttactgacgtttgtactgggatttatccttgtactgggcggtgtgcaacagattgcgtcgctttctgccgcccgtcgctggatgccggttcgtgtgggattttatatcattccggtgctcattctgatagcagggctggttgccttgttcaatccgacgggggtacgttccacggcatttatcattatcggtatcaccagcatagtatatgcagtttccgaattgataaattggtttacatttactcgcaaacggccgaaggcaccgggtacgccgggagcttcttcaaaggctgtagacaatattgaggatgcggaaattatagaataaaaaaacagatcgtctgttgagctaaaacagacgatctgtcgagtagaaacggatggtctgttcacacccaacggaccatccgttttttattatttcaaccattcgtttattaactccataacttttgccttttcggcttcgggcaatgtgctgatacgtgccagatggctgccattcggttggataaatacatgaatattcttcttgtttttcagccaggtgacgcctgcggctgtccatgggtcgttctgaccgtaaatgaagatcatcttcgggtcctgtttctttagaaactttgttattttcttacttaaagttttgtcgaaaggcatatctttcaactcttcgggaagcatcagacggtgcagatagccctcactggactggatggagagatactgcttgaacggttggacgtcataaccatagtatcccaattcacgggcagcttgtacaaagaaagaagcattggggctgtcggcggtgaaatatcccggttcactgatggcaagcagatgagagaaaatttcatcatcagaggctgtagtagcgggtatggagctgataggagtaccccactgccacaaagcgaaagaatattccaataccgaataatcgtaaatttcttcaatcggtgcacggaatgaataattcttttcagtgcaatacttttcaaaacggggaagtaaagttgctttccgtttcaatgcttccaattggaaatcttcaattatcttgcggttttccggagttgaaactttatgcaggaaaggctcatgacgtccatcttctactccataacaaagcggagctacgtagggaacggaaatatctacatcatccggatagaaagtgcggtaaagaagggtagtctgtcctcctttgctgatgccggtggtgatccatttgcccggatagatgtttttgaatgcggtggtgatggcatgtaagtcgtctgcagagttctcggctgtcaggtattgccaatctttgggttcgggggtagactcaaggaagtagcgatattccacgaatatcatgttggcattgagaagttttgaaagctcttcacgatattggggacggagggcgtaagcggcgccatagccttcggtaacgatcactgtggggcggtcgaagccgacatgagaaacgataacgcgttggcgaaagctgcctttctccggatggcggtgatccagcggctgaataaaataggtcacatatttctctgaaaactcagaagtttccagtgggcggatttctttaatggcggaaatcgcgttgattttttgctccagaacggtctgtgcgaaagaagaggccgatgctgacagcaaaacaaagagtaggagtgctgcatagcgaatgtgcatgttcttcataatgaatcgtttttaatttatcatctggttttgtaaatattgacaaaggtacgaaaaagtgatatgttggaaaataaattacgatgatattttagttttcaaaaaaagagagagaactacctcccggcacctctccccctgcaaacttaaaacaaccaacaaaagaaatagaatgattttattagttaatcacttctcttcacttatcttataaacaagagttctctgtattttggcagtgtccacatctggttgtcgacaatcagttccagcttgtcgatatgataacggatctcttccattgccggtacgatggtgtcgtggtaggcaatggctttctcacgttcactttcgatcttgttggccactttgcgggcttcgatcatggcatctacatgctctttgatgaaggcggtgcggtcggcaatctcttcgatgagttccaggttcttggcagacagttttgcagctttgtcgcttgggaacagctccttcatcttgtaaacgttatcaatgagatccgtttgatactgcgtggctaccgggatgatgtggttcatggccaaatcacctaatacacgagcctcaatttgaattttcttagtgtaagtttcccatttcacttcgttgcgggcttccagttctttctgagtcagtacaccggtattttcgaacatgcggatactttccggcttcagatagctgtcgaagatgagaggcacactggtttcgcaatccagaccgcgtttcttggcctcttctttccattcgtcactgtagccgttgccatcgaaatggatgggcttacaaatcttgatgtatttgcggataacctcaaggatagccgaaatcttaggttcgcctctctcgatgagttcgtccacatcttttttgaattctaccagttgctcggctacggcagcgttcagggcaatcatggcacaggcacagtttgcttccgaacctacggcacggaactcaaaacggtttccggtgaaggcgaacggactggtgcggttacggtcggtattgtcaatcaacaattccggaatctgcggaatatccagtttcatgccttgcttgccgctgaggcttacgagatcatccttggtgctctcttcaatgtgttccaatacctgtgacaactgtttgcccaggaagctggaaatgattgcgggaggtgcttcgttggcacccaggcggtgtgcgttcgtggcactggaaatagcggctttcaatagcccattgtgcttgtagactgccatcagggtgttcactacgaaagtgatgaagcgcaggttttcttcgggtaatttacccggtcccatcagtccgatgcctgtatccgtacccaacgaccagttgttgtgcttaccgctaccgttgacgcctttgaaaggcttttcgtgcagtagtacgcggaagccgtggttacgggctactttacgcatcagtgccatgacgagcatgttatggtctacagccaggttacattcttcgaagatgggagccagctcgaactggttgggggctacctcattgtgacgcgttttaacggggataccgagtttcaatgcttcgatttccaattccttcatgaaagctgccacgcgggtagggatggcaccgaaataatggtcttccaactgttggttcttggcactgtcgtgtcccatcagcgtgcggcctgtcatcagcaagtcgggacgggcggcatacagaccttcgtcgatcaggaaatattcctgttcccaacccagataggcaactaccttcttcacttccggattgaagtaacggcatacgtctacggcagctttgtctacggcacgcagggctttcagcaacggagctttgtagtccagtgactcaccggtgtatgctatgaaaatggtcggtatgcagagcgtatcatcgacgatgaaagccggagaagaggggtcccatgcactgtaaccgcgtgcctcgaacgtattgcggataccaccgttagggaagctggatgcatccggttcctgctgaacgagcagtttgcctgtgaattcttccatcacaccgcctttgccgtcgtgctcgatgaaagcgtcatgcttctcggctgtaccctcagtcaatgggtggaaccagtgggtatagtgggtaacacccatttcgagtgcccatttcttcataccggctgccacttcatcagcaatgctgcgatccagcggagcaccattgtcgatcacgtcaatcagtttggcatataccttgctcggcagatacctgaacatcttttccttgttgaacacatacttggcataatattccgacggacgttccgcgggggctgccactgcaacgggtttctttttaaacgccgtttctactactctgaatctcaatttagacataatactttataattgttggttcgtaaattagtgattagggtttgggtgattagtgattagtggctgcgctgcatgcggcattttgcttatcactaatcactaaccgttgatcgttatctagttgtatgctgattcaccatgttcgtagatatccagtccttcttcttctacacgtctgctgactcggatacctatccatgaatctactaccttataaaggatgaaagtgattattgcactgaacacgatggatacgagagttgcgaaaatctgtatccacaactgatgccagtctccgtaaagtgcaccttgctgaccaccttctccggtgatgtattgggtagcgaagacaccggtcaggatggaacctacaataccaccgatgccgtgcacgccgaatgcatccagagcatcatcatatttgaatttcggtttcaccactgcaaccatgaagaaacagacgataggcgtaatcaatccgataaagaacgcacccagtaaatctaccgtaccggctgcgggagttattgctaccaatccggcaacggcacccgtgcaagcacctactgtggttggctttttgttgcaaatccagtcgattgccatccaggttacggctgccacggcggttgcgatatgtgttaccatgaatgcgttggctgcaaggccgtctgctgcaagtccactaccagcgttgaagccgaaccagcccagccacaggaaagaagtacccagaaatacgaatgtgatgttgtgcggagtgatcgggtgacctattctgtaatcttctctctgtcccaacatgatagccatcacaagtgcggagattccggcattgatatgtactactgttccgccagcgaagtcaatggctcccatttcctgaaggaaaccaccgccccatacccagtgtgccatcgggaagtaggccaggataacccaaaggatgatgaataccatatagccggagaacttaattctttcggcgaatgcacctaagataagggcgggagtgataatggcaaacatgcactggaacatgacgaaggtcagttcggggatgttgcccgaagtcagtgtgtcgatggtgataccgtgcaggaatgctttgtcgaaaccgccaatcacagctcccagcggactgcccgattccataaaatctgtgccgaatgcccaactgtaaccgaaagcgacccataggatgctgacgacacctacaatgaacaaggtctgcatgatgatactcaatacgtttttctgacggaccagaccaccgtagaaaagggcgataccggggatgctcattagtaataccagaatggtggctgtaatgatccatgctgtgttaccgctatccaataccggttcttctactattacagccgcactttctacagctttggtaacggcatcttgtgcatatatttttgttgtaaagcacgttgccataaggacagcaagggctatccacagcctggcagtgctgcgtttactatatttatccataagttttttgctattagttgtacttgtattctttgttattttgagtgtatcgctctctcactatcgagcgtgtcactctctccgtggtttagtgctgcctggattatctttcctgttcggcattgtagagggcgatgtcgccacgttcggcggtgcggatgcggatagcgtcttctatggggatgatgaagatacgcccgtcgccgatttctccggtttgtgcggacctgatgatggcttgcacggtcttttcggcattcttgtcgcgtaccacgatagagattaggatacgctcaatggaactggtgtcgtacattacaccgcggtagatgcgtgcctgacgggattttcctattccccggacgtcgtagtaggagaaccattcgatgtccgcttcgagcaatgcgtcctttacatcctcgaattttgtcttgcggataattgcttcaatctttttcataccttaatacatttacgattttttttagttgacgaggttttttagttgacgagttgacaaggacctttcggggtgtccgtttcttatccttgtctccttgttccctcgtcccctcgttccctatttttactctctctcaaaaactaactccgaatacgaagtatgcaccctgcgtgtgtggattgaacgtcacttgtgcaaaggtgggcagcgaaaaagaatttgtgaatttgatttctttttctgctttcagtgtgaggttggttacgttgaacttgttggcatacgcaccttcccatggggtaagaccgacttctgccgaccagtccaggccaccgagtttaaagggtgcgctgatgcctacatacgtggaataagctctgtcaccgttctcctttgtataatcatctccggcaaagtaagtgttccaactcagtgccagcggaccgaaatcatatcccagagtggcttcgaagatgtgtaccgtgctatgtgcgccatacttgaaataatctcccgtatatccgccatcctctttgtggtaggagaaccagtaatctgtaacggatacgctgaaaccgcctgtattgtaacccagtgtgaggtcgatctctctggcatcctccttgtcgatgcctaccgagccccaagctgtcagtgacaagcccttgtagctgactcccatgctgggctggatgcttacaccaccgcagtctgttccacgccagatgtagttgcttacaaaatctgcaccgactgaggcctccactttatcctgtgcctttgccgtgaaaggcattgttgctgataatagcgcgatggctatcattcggaattttacgcttttcattttcatacctattttaccttttaagtttagacaaattgcggatgatcagtccggtgaaactatagttttattttagttgttatctttttcattttcataccagccattttttgattctcctcatggcttccacacaatcttcatgatttccgaaagcggtcaggcggatgtaaccttctccgctggggccgaaacctacaccgggtgttcctactacattggcttcgtacagcatctgttcgaagaagcgccaggaaccgatgccattcggtgctttcagccagatgtaaggagcattcacgccgccgtacactttcagtccggctgcttccagactctctttcatggttcgggcgttgttcatatagtagtcgatgttttcctttatctgctgcttgcctgccggggtgtagatggcttcggcagcccgttgggtgatgtagctggtaccgttgaatttggtgcattgacggcggttccaaagacggttcaacggaatgcgttcaccggtcagggtggcggctgtcagctctttcgggactacggtgtatccgcaacggactccggtgaatccggctgtcttcgagaagctgcggaactctatggcacatttcttggcaccttttatttcgtaaatggagtggggaacgtcttcttcctgtataaatgcctcataagcggcatcgaacagaatcagagtgtcgttggcgagtgcgtagtccacccattttttcagttgtgatttggtcagcgttgttcccgtcggattgttcgggtagcaaaggtagacgatgtcaatccgtttgtccggtatttcgggaacaaagttgttttcggcggtacagggcatgtaggtcacgttgctccatttgccgtcttcttccaatactccggcacggccacacattacgttgctgtctatatataccgggtaaatggggtctgtcactcctacgctgttgtcgtggcggaggatatcgcctatgttgcccgtatcgcttttggctccatcgtttacgaatatttccgtagggctaaaatgaatgcctctcggagcataatcatgtttgatgatcgcttcaatcaaaaagtcatatccctgttcgggaccgtatccgtggaaggtactggcatttgtcatctcatccactgccctgtgcatcgcttcgatgcaagccggtggcagtggccgggtaacgtctccgatacccaggcggatgacctcttgtttagggtgcgttatcctgaaagtattcacctttttagctatgtctgaaaataagtaacttcccggtagtttcaaaaaatgttcgtttactaatgccatactttcttgttgttttaagcgttatttaggttagtgattaacgtttagtgattagtgattaactctattcagcatccagtgtaatcactaattactaaccattaatcactaattatcttttctccgtcgaacacccggactgctcctcccgtcatccatacgtgatccgttttttcgtcccattcgatggtaagtgagcctccatccatgatgatgtctgtttttcttccggattttccggtcagtgcggcagctactgcggtggcacaggctccggttccgcaagcttgggtgatgcccgaacctctttcccaaactctcatcctgattttcccatgctccaacacctgggcaaactctacattgatgcggtcgggaaacaacggatgattttccagtttcggaccgatgctttcgaggttgatatctttaatatcttctacaaagattaccaggtgaggatttcccattgatagggtggttccagtgaatttctgtccgttggcttcaatgggttgttctttcatatcggcgggacgtcccatatccacggttacggtgttcacttttccgtcttctacatggagtttcagtattttgatgcccgacagggtgtcgagggtaacggctgtttgggaagtcaggccgtattcatataagtatttaccgatgcaacgactggcgttgccgcacattttggcttcggaaccatctgcattgaagatgcgcatactgaaatctgccttgtccgaactgccgatgagtaccaggccgtcgcttccaattcctgtatgcggggcgctccattcaaccgaaagtttttcagggctttcgatgggatatttcagggtgtttacataaatgtaatcgttgcctgctccgtgcatcttagtgaattttataactcttgtcattttgtactctgttggtggattaatctttctttttgttttatcacactgcaaagatacgacgttttgctaaattatttgtagaatacatatcttatttctattgtttttattcattctttcagtcgctgcaaatatacggtattcaagtttcaaattaaaagtttgcgggtgcatatttgtataaattgttatttgtggaattatttccgcatattcattctatataggtagtggcgtaaatacgtgttttaagtgaaaaaatggagtttatggggtgaaaatgaagatttgtatatgacagaatgaaatcgttttcttctttttgctgactaaatgatcttttgtataatgccacactattacaagccaaatgccacactttagcttccgcaatgccattcatttgagccatcgaagtgtggcgtttgaattgttgaggtgtggcattgggggagttaaagtggggcattggtacagattggaaaagtaatgaatgaatagatacgcggacgacacggataaggcggacgaacgcggactttaatttatcatttataatagtatagcgcagctttttaaatccgcgttcgtccgccttatccgtatcgtccgcgtacccatttaattcataaccgaaaataaagaactaaatttaactaccgatctgcattacttctttttcaatatctcctgcaataatactggttcgttagtggtgatgaaatccactccctgactgatgagccattccatatctttggcatcatttactgtccaggcgttaaccttcatgccaaggtcgtgacattctttgatccactcgggatgttttttgaagacggagaaatggtaatcaggaccggcacaacccatgtctttcagttcctgcggattgaggtcaccttccagataatatacgggagtacctttaggagccaggcgaatgaattctttggtcgcatggcgtgagaaagtgatgtattcggtacgctcttccagtcccatctccttgatcattttcactatttgctctacagcaagcgtttcccgttcgggagtcttgtgcgctttgagttccagaataaggcgggttttcaatcctttggctttatcgaggtattgctgaagggtagggaggctttcaccgttgtcgagggtgatagaggtacattctttctcggtggatgtttccatgcggacacctttgaatacaccgtcgtggtctacgataagtttattgtcggcagtgagccagatatcgaactcggagccgtagcaatggatggagtcagctttcaccagggcggcaatactattctgggcagaaccgtcggtcttccagaaaccacggtgggcgatgacttgagtgttttgggcttgtaggatgccgcatgcggcaagagacatagcggaggcaaataaaagttttttcagtttcatagttccttatttataattctgccgcaaggtacaaaatatgtctgaaaagtgatgtttcatttatgttattaatgcgaatcaggagataaaggtgttatctcctttacctcctattacctgcgtatacggcgtctgcgcctgtggtgacgtttcttctgcttataaatgctaatccgtttccagacaatccacacaaacagtatcccgaagactgcaaagatgagaagcacgatacccgtattcaggttatcgcctttgacgcggctccacatttcgagaacaagctctgtgcggtcaccgaaatcacggatcatggcgcaacgctccacgactttacggtcagggtattgtatcggattgatttgaacgctgtctgcacctggaccgaagaaataactgaggtcggagaactgttcaagagtagtgtcgatctttgcctccataatctcgggcgttgctacggcactgacgtagccgatggcatccatattgcgcagagcaatatctggctggcaaagataattgatgaagtagctggcggcttttacgttgcgggcatacttggggatggcccagccatcgtaccagatgttgctgccttcacggggaaccacatagtccaggtccacgcctacagcttccgcttcgtcaatggcccagacggcgtcgccactccaggtaagattgagccatgctttgtttttggtcatcatttctttgccgaagtcggcttcccatccggcaatgttgggcttcagatctttcaggtattgctctgcaagggcaatggcttcaggggaattgtcgttcatcagttgctccacggtgatggtgctgtcggcaagttgccgggcatgggcatagatgatggcagtgccgtaggcatcgcggtaactgtctttcatcagaatcttaccacggttgacggcatcccaaaggcatccccaggagctgacttcttcaagggtcttgaacttcttgttatagagtattccggcggtaccccacatgtagggaacaacgtaatcattggtgtggcgaccgggctggctgatcttctccaactctttctgaatatacggggagatgttggggatatagtccggagtcttaccaaaattgcggttgatagggaggaggagatctttcttcaacattcgttcgatgatgtattccgaagggcatacaaggtcgaaatcttcctgtccgcgctctatcttagtgagcatgatttcgttgatatcgaatacctggtagatgatgcggatatcttcgcctgtctgctctttataccaggcaggaaattcggcgaggacttcttcgtcaatgtaatctgcccagttgtatactttcagtacatggctgcgcttctcgctggcaccggtacaggaggtaaggagaaggatgcagagaaggagggggatgtatttcttcattgtttatagggttatattagtgattagcgtttagtgataagtgattagtaggctgcgctatcattccgcatggcactaatcacttatcactaaacgctaatcactattcttgtttctttctgctctcttattaatcacaatcagcaatactaacaccgttacaaaaatgattgttgacagtgggcgcagttcaggagtcagtccacccttacgtgcgtctgcatagatgtatgtcgacaacgtttccaatccttcatttccgatagtgaagatcgttactgcgaagtcatcaatggaaagcgtgaaagcgaggatgaaaccgctgatcattcccggcagaatttccgggaagatgactttgcgaagcgcctggaaaggagtagctccgaggtcgagagctgcttcgtatacattctgattcattttcttcagacggggcatcacgctaagtaccacataaggggtacaaaaagtgatgtgtgccaataccaccgtagtaaatccctgcgaaatgccaaagctgacaaacagtaggaacagggatacacccgtaatgatatccgcattcatcatcggaatagcattggtgaaattcatcacctgacgtgctcgggagcgcaagttaaagatgccgatagctgccaggcttcccagcagggtagaggctgtggcagcaatcgtagcaatcgcgaatgtgttccaaatggcattcatcagtgagtggtgcatgccgcctgtaaatagtgaactgtataacttggtggagaaccctgtccagttacccagtaccttggcttcagtgaaagagaagatcataatgatcaggatgggcgaatagagcagggcaagcagaaaccaaagatagcctttcgccagaatacgtgtcatcatatcacacctccgctttcattttgtgcactgtcgtcctcgttggtaaagagggcggtgacgccaatcagcaacagcatgatgagcgacaaggcagcgccatagttccacattccgttatatatattctcttgtacggtagtaccgaacagtttgatgttgttcattgtcagcaactcggcaatggcaaaggtggagaccgtgggcatgaaaaccatcaccacaccactcatgatgccgggcatcgaaagagggaggatcactttaccgaatacctgtacaggcgtagctcccaagtcttgggctgcttctatcagactgccatccatcttttgcaacgtattgtagatagggtatatcatgaacggcaggaagttgtagaccataccgaataccaaagctccttcgcccagcggcagattgaggaaatcaaacaatgccaccgtggcaagtgtacgtatcaggatgttcacccacataggcaggatgaacagtacaaccatggtctgggaggtgttgaagcgcttctgactgagaatataagcagccggataaccgagcaggaggcataccagagtcgtgatgacagctattccgatagagtagacgaatgtgttgatagattcgggatgcatcatgaatttgcggaagttggcaaacgtgaatgcgccttcagcatcggtgaaggcataaaccacaatgagcaacagaggcatcacaacgaagatgatgagaaacaatgcgtagggaactgtccagttccggcggcgcatgaagaaacgggatatattactgagcacttcctttcttattagcagattcgacaatagggatagaaccggtggtctgtgccggtgcaacaattcgtatattttcgggtgcgatggtgatgccgacacggtcaccgtcgtcccagacgtcagtggtgtctacaaagatatcctcgtcccaatcggtaaacacggtgagatggtaatggtttcctttataaaggatgaatttcacttcacctgtcagatgaccgtcttcttcgttgtcttcgaggatgacgttccggaaatctatttctacgaggacggaactgcccggttcgatgtcctgcacttcggcacactcaaaggtgtaaccgaggaattcgacgtgtgtggcgtctatgagcttgccttcgaaggtgttgcaggtgcgttctttcttcattacgtgaatgtcgaaaggtttcacgagcagaccgacttcccgtccggcttcgaaactgtgatagtcctgcaccatgaattcgtagccctcgttagtctgtaccatcatttcgtaatgcacgcctttgaagatgcaggaggtgacagtacccatcagttgggcagcggcagaaggctcgaatatatagatgtcttcgggacggatgactacatcgacgggagtgttttcgccaaagcccttgtcgacacattcaaattcgtgtccggcaaaggatacggctttgtcctgaagcatgaggccgttcaggatgttactttctccgatgaaatcggcaacgaaagagttgatgggttcgttgtagatgtctgttggcgtacctatctgctggatgcggccttcgctcatcacgacgatggtgtcgctcagagtaagggcttcttcctggtcgtgggtgacgtagacgaaggtgattccaagcttctggtgcatctctttcaactccatctgcatgtctttacgcattttgaggtcgagggcggcaaggggctcgtccagtaacagcacttcgggttcgttgacgatggcacgggcaatggcaacacgttgttgctgtccgccggagagggagtcgacgtcacggtcttcgtaatccgtcatacctaccatgcggagggcttgtttcactttcttgccaatggtggcttcgggcatctttttgagcttcagtccgaaagcgatgttgttgtacacgttgaggtgggggaaaagggcatacttctgaaagacggtattcaccggacgttggtgtggcggtgtttgcgtgatgtcttttccggcgatggtgatgataccttccgaggcggtctggaaaccggctatcaggcgcaacaaagtagtcttgccgcagccggaggggcccaatatcgttacaaattcgcccttacggacagagaggtttacatcattcagtacggctttgtctccgaagtatttcgatacgtgctctacaccgatgatgcagtcagacttttgcataagcgttattaagtgtttaacctaaaactaatagaacgaattctgcctttctaaaaaagcgggtacaaaggtagggaataaattgggaaaatgaaagtgctgccttcgatttgcattatctttgaagaagataagctgcacctcggcataaaaaaatgaacgagttcattttatactgttctcggtttacattatctttgtagcattaatgaatactattatagtagaaggaggcaaggacatgggtaacagaatatatcctatcgggatacaaaacttcgagaagattcgtaaagaaggatacgtttatgtggataaaactgcattgatgtataagttggtgaagagtggcagttactttttcctttcccgcccccgccgttttgggaagagtttgctgatttccacgctcgaagcctattttgaagcgaaacgggacttatttgaaggcttggcggtggaaactttggaaaaagactgggtgaagcgtcctgtgttccatctggacttgaatatcgggaaatatgatacgccggatagtctggacaagatactgaatgaaacgcttgattactgggagtcactttatggaacgcgttctgccgaaacgacccttgccttgcgctttgcaggagttgtgggacgggcctatgagcaaagtggtgagcgtgtagccattctcatcgacgaatatgacaaacccttgctccaggctatcggcaacgaggaactgcaacgcgaattccgcaacactctgaaacctttctatggcgtactgaaaaccatggacggctgcatcaagtttgccttgctgacgggagtgaccaagttcggtaaagtcagtgtgttcagtgacctgaacaatctgaatgacatctccatggacgagccgtttatttctatctgtggaatcactgaaaaggagatacatcttaattttgaagaagacctgcacgaattggcagccgcacagaaaatgacgtatcaggaagtgtgcaatgaactgaaagcgtgctatgacggttatcactttacagaaaatacggacggcatctacaatcctttcagtttgctgaatacattctttaagatgaaattcggcaactattggtttgaaaccggaacgcctacttaccttgtggagttgctgagacgcaatcattacaatttggagcgcatggcgcatgaagaaacggatgctgatgtgctgaactgtatttatggcgacaacgaacccataccggttattttccaaagcggttatctcacgataaagggatatgataaggaattcggtctataccgtctcggtttccctaaccgggaagtggaagagggctttatcagatttctgatgccgttttatacccgcttcaatcagttagaagcaccgtttgagatacaaagatttgttcgtgagatacgttccggccaacctaacgctttctttaagaggctgcaaagcttttttgccgacacaccttatgaattggtgaaagacttggaattacattaccaaaatgtgctgtttattgtcttcaaactggtgggtttctacacacaggcggagtatcacacttcggaagggagggtggatctggtagtgaagactgccgattacatttacatcatggaattcaaactggaaggtactgcagaagaagctttgcagcaaatagaagaaaaacagtatgctcttccttttgaggcagacccgaggaaattattcaaaataggtgtgaacttcagtaataaaacaaggaatatagagaagtggattattgaatgacagatttgtgtaattcgcgttcttttattccgttttgacactatcttagtgtggattggagtggagagtccttttatatttcatctttgttgtgtgttaagttaacgtaagttcctaatttctaattctcaaaattagaaaaatggtatcggacaaaaacaaaatggaagaattaaaaaataaaaaaaagaaaagtcggaaaaaccggccagaatacttgacttcacctttcggatgtcgtatctttgcagggtagttgataatagagaattcatacgacttgttttctaagataataacagacaaaaaacaagaaaggcgataatttcaataggaagttatcgccttttttgttgatatttatcggattcgggcttaaaagaggctttttacgtttttaataaacgttgagcacattctttaaaaacgttcctgttattctttaaaaacgaataacaagaagcttaataaagcagagaaatgcctgtgatttgtctatatttgagactgtgataagaatgctcagcattctattgatggatctcgcttggtaaattgtttacacagtagactctgcttataacaggctttatcagcccacgttcccggctgcctcgtgcacatctgccacagcccgtccgctcggatcatttttcccttgcaacgtggcatcccaggcgagtgcttcagcagtagagcaagccacgctcggcacactgggcacgcttcgggcagccgactgactggggaagtgttcttcgaaaatgctacgatagtaatattcctccttattctgtggtggattgatgggaaaccgttcggcggcatgttccatctgatggtcggtgacggcggcagaagtaatggctttcaatgtatcaatccaattgtaaccgacgccatcggaaaattgctctttttgtcgccaggcaacactctgaggcagcatatcctgaaaagcttcgcgcacaatgcgcttttccacttctttgcccggacacatcttgacggcagggctgaggttcattgccacatccagaaactctttatcgaggaagggaacacgaccttccacaccccaggcagaaaggctcttattggcacgtagacagtcgtacaggtgcaatttggagagcttacggatcgtttcttcgtggaaagcctgcggtgtgggggctttgtggaagtagagataaccaccgaaaacctcatcggcaccttcaccactaagcaccatcttgatgcccatagacttgatgacacgtgccaacaggtacatcggtgtggaggcacgaacagtggtaacgtcgtatgtttcgataaagtagatgacatcacgcaaggcatcgagcccttcctgaatggtataattgatttcatggtgaacagtgccgatgtattccgccacttcacgggctttaatcaagtccggtgcaccgcgcaggccgacggcgaaggagtggagttgaggccaccaggcttcgctttggttatcagtttcaatgcgcttgcgggcatatttcttggcaatggcggagatgacggaagagtcgaggccaccactgagcagaacaccgtaaggaacatcggacattaactggcgttgcacggcagcttcaagggcgagttttacactgttgatttctggttgggtagcccggcgggcgttggtgtcattggctttgacggcggcataatcggtccaggggcgttgataccaacgatgcattttcccttcacgtccccagaagtaatgtccgggcagaaaaggctcgtaggtatcacagaaaccttcgagagctttcagttcgctaccgacgtagatatgtccctggtcgtcacgaccgatataaagagggattaccccgatagggtcacgggcaatcagataatcgtctgcttcctcatcgtaaagggcaaaggcgaagataccgttcaattcttcgaggaaatgaatgcctttatccttatataatgcgaggatgacttcacagtccgatcctgtacggaaagcatacttgccggcatagcgggaacggatttcccgatgattatagatctcaccgttgacggcaaggatttgcttgccatccggagaatacaatggttgtccgccactttccggatcgacgatggaaagacgttcgtgagccaggatggcactgccgcctacataaataccactccagtccggtccgcgatgacggattttctgcgccattcgaagcgctttgtttctcaattcctgggattgagatttgatattgaagatacctacgattccacacatgatatttagtgattaggggttagttactcaaatacttgtctatccgttctgccactctccgtccatccgccagtgcatgcaccacaaggctggcaccacgtgccgcatcacctgctacgaacacattttccggaaattcaggctgttccggtttcaggaagcccatggccagaagtaccatatcggcgtctatcacttccttctttccggtaggtttcatggtagggcgtcctccatcctgagccggaatccattccacttcttccacctctacaccgcagacttttccattcttgccaataaactgattggatgccagcgaccagcggcgcgtgcaaccttcttcgtgacttgaagtcgtcttcagcacaatgggccattgtggccaaggagtagcgtcattgtgacctacgggaggctgtggcatgatttcaatctgtgtcacactcacggctccctggcggatgctcgtaccgatacaatccgatcctgtatcaccgccgccgatgacgagaacccgtttgcccttggcatttaccagacgttctttcgggaacgtttctccatcgaggatatgattttgctgggacagcatttcgagggcaagataaatacctttcagttcgcgtccggggatgttgaggtcacgtgcctgcggcgtcccggtacagatgcagtaggcatcaaagccgacagggagtttctgtacatctaccgttacacccatttcgaacttgataccttcggcttcaagcactcccatccggcggtcgattactgccttatcgagtttaaaattaggaataccatagcgcagtaatccgccgggcatgggtttgctgtcaaaaagagtcacttcatagcctttagcattcagccggcaggcagcggagagtcccgcaggacctgcgccgatgatggcaacccgctgtccattacgttggggctgaatgggcatgatatacccttcacgaaaagccgcttcggcaatagccgcctcgttttcacgaatggtgacaggtgcatcacacgaaagcttcagtacacatgacttttcgcaaagtgccggacagatgcgtccggtaaattcggggaagtcgtttgtggcggcgagcacttcatatgcttcgcgccatttacctttataaagtgcatcttgaaattcaggttgtttattgcccaacgggcatgcccagtgacagaagggtacaccgcaatccatgcaacgtgatgcctggagtttgcgttcgtgactgtttaaagtttgctccacctgactgaagtcggtgatacgttcgtggacaggacggtatcccgcttcctgtcgtggtatgtttaagaatgcttttggatctgccatttttagatttataatttataatttatgtttagatttacgatttcggatttatgatctctgcttaggcttacgctatggcatgcccttatgatacagtccggcaagtcataaaatcataaatctgaaatcataaatctcttaataatctctctgcatctctgcaatcttctgttgcagtttccgcatttgctcttcttgcagtaccttcttgtactcgatggggactatctggataaactcatccacatatcggttccagtcatcaagcatagtgcgtgccaggttggagcctgtatagaggtagtgctgacggatgagttcgtgcaactctttacgataggaggcttcttcgatgaggcttagttccaccatttccatgttacagaaataatcgaagtttccatccttattccatacataagctacaccgcccgacataccggctgcgaagttgcgccctgttgaaccgaggactaccacacgaccgcccgtcatgtactcgcaacaatgatcgcctacaccctctaccacggcaatggcaccggaattgcggacagcaaaacgttcgcctacgcgcccattgatgtaaacttcaccgctggttgcgccatagagcaaggtgtttcctgcaatcgtattcttctcggcttggaagttagagcgtaccggaggcaatacggcaatccgtccgcccgaaaggcctttgccaaggtaatcgttcgcttcaccttccagcttgaagttgacacccggtacaaggaaggcaccgaaactttgtcctgcagaacctttgaactttacgttcaacgtatgttccggcagtcccgcttcaccgtacttcgcggcaatggtgcccgaaagcatggctccgcaagcacgatccgtattggcaatcgtatattccagtgagatttctttctggttttccagagcttcggcagcggcatgcagcatttcaacgtcttttacgtggtcgatgccgtgttgctggtcgatggtgtggcggatggctgcaccattatcgatgcgtgccagtattttgtcgaaactaatcagggattgcttgggtgattcgttttctgacctgcggataataagatccgtgcgtccgatgatgtcatccagacgttccacaccgatttcagcgagatactcccgcacttcctgcgccaggaaagtgaagaagttcaccagatattcgctgcgtccgtggaagcgccggcgaagttcctcgttttgcgttgccacacccacggggcaggtgttctgatggcatttgcgcatcatgacgcagcccagtacaatcaaagcgctggttgcaaaaccgaactcttcggcacccagcatcgccatcagtacgatgtcacgaccggttttcagttgcccgtccacttgcagcatcacttgcccgcgcagaccgttcagtacaagagtctgttgcgtctcgcttagtcccagttcaggagagataccggcatagcggatactggaggcaggagaggcgcccgtaccaccttccgcaccggagatgacgataaggtctgcttttgctttggccactccggcggcaatggttcctacaccgctttcggctaccagtttcacactgatcttggcacgaggatttacattcttcaggtcgaagatcaactgtgccaggtcttcgatggaataaatgtcgtgatggggcgggggagaaatcaatgaaatgccgggaatggaatggcgcgttttcgcaatcacctggtctactttaaagcccggcaactgaccgccttcacccggtttggccccttgtgccactttgatttgtatttcatcggcgttcaccagatactccgttgttacgccgaaacgtcccgaagctacctgcttgatggcgctacgcagactggttccgtcttcgcggggcgtgaagcgtgcactgtcttcgccgccctcacctgtgttgctgcgtccgtgaatccggttcatggcaatagccattgcctcatgtgcttctttgctgatagacccgtaactcatggcacccgtcacaaagcggtgcataatgctttctaccggttcaaccttatctatagaaatgggggcacggcggaaatccagaaagtcgcgcaggaagataggcgcttcttttctgtctaccagactggtgaattctttgaatttcttatagctgcccaggcgtgtggcaagttgcaaggtagaaatggtttccgggttccaggcatgtttttctccatctttacggaaagcgtacaaaccgttgttggggagtaatccgtctacttgtgcggcaaaacctgcatcgtggaatgcgattgcatcgcgtgccacttcatccagccggataccgcctattgtggatcttaacccgccgaaataagcattgctgagctcttcactcaaacctacggcttcgaatattttcgctccccgatacgagcggatggtactgatacccatcttactcatgatcttgaacaatcccttgcagatggatttgatatatttcttttcggctgtggcataatccaattggatttctttcttcgccaccagcttgtcgatcacggcgaatgccatgtaagggttcagggcgctggcgccaaatcccagtaacagggctgcgtgcatcacctcgcgtatttcaccgctttccacgaccaatgccgtctgtacgcgttttcctaccgaaatcaggtggtggtgtactgcgcttactgccagtagggaggggatagccgcatgagtggcatccacatcacggtcgctcagtacaatgtagttcaccccttcgctgacggactcttccgcttgcttgcaaagtgctgtgagtgcttcctgcaatccggcacgaccctttgctacttcaaacagcaagggcagtttcaccgttttgaaacctttgtagcggatgttgcaaagaatatccagttgtgcattgctcaggatgggatggttgaggcgcaccatcttacaatggctttcgctgggtgtcaggatgttcatgcccacggcgccgatatattccgtcagtgacattaccagttcctcgcgtatcgggtcgataggcggattggtgacttgtgcaaactgttgtcggaagtaattgtacagtagttgcggcttatccgaaagcacggcaagcggcgtatcattccccattgagtggataggctcggcacccgtggtacacatcgggacgatgagccgctccacatcttccttggtgtagccgaaggtgcgcagcatcctctcgtaattctctacgctatgggggactttgcgcccgcttttcagctcattcagttcgatgcggttcgttgctagccaactgcggtaaggcttggcttcggccaactgttttttcaattctccgtcgtagtagatttcgcctttttcggtatctaccagtagtatcttacccggttgcaggcgtcccttttctttgatgtctcccggttcgaaatccatcacgcccacttcgctggccactaccatcatatcgttgtgcgtaatcagatagcgtgcaggacgcaatccgttacggtcgagcataccgcctgcaaaacgtccgtcgctgaacagcaaggcggcagggccgtcccacggttccatcaggatggagtggtattcatagaatgctttcaggtcttcgctgatgggattcttttcattgaaagattccggcaccagcatggccatggcgtgcggcaggctgaggcctgacataacgaggaattccaaaacattgtccagtgaggcactgtcgctcattcccggctgaatgatggggcgtatctccctgatgtcgcccaggatgggagaggagagcacactttcacgggcttccatccaaccccggttgccgcggatggtgttgatttcgccgttgtgagccaggaggcggaacggttgtgccagtccccaggtagggaaggtgttggtgctgaagcgggagtgcaccagtgctatgccgctggtgaagtaggggtttgtcagatcggggaagtagcctcgcagttgcagtgaagagagcatacctttgtagatgatgttcttcgtggatagggagacaacgtagaaatcttcgtgcgtggcaatatcggatttgcgtactttgttttctattctttttcttatgagatagagtttacggtcggctgtctcgctttccgtaaatccggtgatgaaaatttgtttgatatccggttcgttggcaagtgccgattctcccagaatttctggacaagtgggcacattgcgcaggtgcatcaatgtcaatccttctttttcaatctcttcgatgataatacttaagatagcaccctggtctttctcatctttcggcagaaagagaagacctgtaccgtatttccctttctcgggaacaggaataccctgcaaaagaataaactcgtgcgggatttgcagcaggatgccggcaccgtctccggttttgttatccgcaccttcggcgccccggtgacgcatgttctccaacaccttcaatgcagactctaccagttcgtgtgacttgcctccgtggatgttcactaacataccgacaccacaagcgtcatgctcgttctctacatcatacaagcccaactgcctgggctgtcgttgatatacaggatgttggctttcttcccttcccttttgtccggcttttctctttgtttcgttgttaaaaagttcttctttcatctttttaagtttactttattttgtagtaatacctattattgctatcaaaatgtttggcaaaagtattaatttaatttcaaattggtataataatgcgggtttttgtgacttgcaaaatatctgttcattggagtcgtgttttgaattgaaataaaatgcatgcttttgtgttttaaattgaagtaaaatgtgagatttatattctgtattgtaagtgtgcctttccctcgtttgagaaattgccatattgccataatgccaaatagccaaaagggaagtgcatgacattttttttgtttcatccttatccggatataaccaagtccgtaccaactccgtgtcaagtccataccaactccgtaccaagtccattcctatagacacggagatggtacggacttgatacagtgttgatatgggattgacatggatttagtctctttacccgttggcagaattgatttctttctttagggtatgaataaaatgagtatctctacattaagtaaatagagtatctcaattcccctcctccgtcggaggaggggtgcccagagggcagggtggtaggtaaagcaagaaataccgatgaatcatatcaataaggaattcttttctcacctaccacctccccctacgggtactcctcctccgacggaggaggagaattgagatagtactgtttcattacttttattcattactttttcattatgaattaattccaccaacagtttttctttatcttattggccttttcctttggccttggcaatttggctttttggcaatttggcaaccttgaaaaacgacactccttatcggattggaagatttttccgctatctcctttcaatataaaactaaaattccattgcttactttgaatttataaaattattccttttgctttaataagtttgttttctttaactttttgacaagaaaataacttttttctattcttttgataaataaataggcaaaatattaactttatgttctcaggtttttatatctttgcagcgcaaaatcaaatattaattagtatgtgtggaatagtaggctatattggtcaaaagaaagcctaccccattcttatcaaaggattgaagcgattagagtatcgcggatatgatagtgcaggggtagcattaatcagtgataaccgacagttgaacgtttacaaaacgaaaggtaaggtttcggaactggaaactttcgttactcaaaaagatatttccggtaacatcggaattgcccatacccgttgggctacgcacggggaaccttgctccgctaacgcccatcctcattattcctcttccgaacatctcgctctcatccacaacggcatcatcgaaaactacgccgtccttaaagaaaaactccaggccaaaggctattcattcaaaagcagtacggacaccgaagtactggtgcaactgatagaattcattcagaaatccaaaaatacagatctgctgactgctgtgcaattagcgttgcgtgaagtaatcggcgcttatgccattgccgtgctggataaggacaatccggatgagattattgcagcccgcaagagtagtccgttggtggtaggtatcggtgaagatgagtttttcctggcttcggatgctacgccgattgtggaatatacagataaagtcgtatatttggaagatgaagagatcgccgtcatccgccgcggagagaaactgaaggtggtgaacctgaaaaatgtggaatgtccgcacgaagtgaagacggtggcgctgaatctgggacagttggaaaagggtggttatccgcacttcatgctgaaagagatttttgaacagcccgattgcattcatgactgtatgcgcggacgtatcaatgtagaaagtacaaatgtggtgctttccgcagtgattgataacaaagaccgcctgctggcagccaaacgtttcatcatcgtggcgtgcggtacttcctggcatgcggcgcttatcggaaagcatctgatagaaagtctatgccgcattccggtggaagtggagtatgcttcggaattccgttaccgtgatccggtgatagacaataaggatgtggtgattgcgatttcgcaaagtggcgagacggcggatacactggcagctgtggaactggcgcggagtcatggggcatttatctatggcatctgtaatgcgattggttcgtctattccgagggctacgcatacgggttcttatatccacgtaggccctgaaatcggagtggcttccaccaaagcgtttacgggacaggtgacggtgctcaccatgctggcgctgacgcttgccaaggagaagaatacgatagatgaggggcaattccttgccattgtgcaagagctgaaccgcattcctgataagatgaaagaagtgctgaagctgaatggcagcattgcagagctttccaaaattttcacgtatgcgcataactttatctatctgggacgcggatattcgtatcccgtagccctggaaggtgcgttgaagctgaaagaaatctcttatatccatgccgagggttatccggctgctgaaatgaagcacgggcctatcgcactggtagatgctgaaatgccggtggtagtgattgctacacagaacgggctttatgagaaagtattgagtaacatacaggaaatcaaggcgcgtaagggcaaagtgattgccctggtgacaaaaggggatacggttatcagcaagattgccgatacttgtatcgagttgccggaaacaatcgagtgcctcgacccgttaattactacagtaccgttgcagttactggcctatcatatcgcagtatgcaaagggatggatgtggatcagccgagaaacttggcgaagagcgtcacagtggaataaagcgggtaatacgaaataaatagtaaacgataaattgtactttgtacattgtaaattgtaaatgaactgatggaagaactgaagcatgaatgtggcgttgccatgatacgcctgctgaaacctctggaatactatgaacagaagtacggcacatggatgtacggtttgaacaaactctatcttctgatggagaaacagcacaaccgcggacaagaaggcgccggtatggcttgcgtaaagctggaagcaaatcccggtgaggagtatatgttccgtgagcgtgcactcggttcgggtgccattaccgagatattcggtacggtgcaaagcaactttaaggatctgacaaaagagcagcttcatgatgcggattacgctaagaaatacctcccttttgcgggcgaggcttacatggggcacttgcgctattccactaccggaaagagcggcatttcctatgtgcaccctttcctgaggcgtaacaactggcgggctaagaatctcgctctttgcggcaatttcaacatgacgaacgtggatgagatttttgcacgtatcactgctatcggccagcatccacggaagtatgccgatacgtacatcatgctggaacaagtgggacaccgtctcgaccgtgaagtggagcgcctcttcaatcttgccgaagcggaaggattgacaggcatgggcgtgactcactatatagaagatcatatggacctggcaaacgtgctgcgtacttcgagcaaggagtgggacggaggctatgtgatatgcggactgacgggaagcggtgaatcgtttgccgtgcgcgatccgtggggaatccgccccgcattctggtatcaggatgatgaagtggcagtgcttgccagcgaacgtcctgtgatacaaaccgctttcaatgtgccggcagccagtattaaggaattgatgcccggacaagccttgctgattaacaagacaggcaagctgcgtaccacccaaatcaataaagtacgcgaggtgaaaccctgttctttcgaacgtatttatttctcacgaggtagtgatgtggatatttacagggaacgtaaactattgggtgagaaactgatacctaacatcttgaaagccatcaataaagaccttgaccatactgtgttttcctttattccgaatacagcggaagttgctttctacggcatgttgcagggactggatgattatctgaatgaagagaaagtgcaacagatcgcttccttgggacatagtcccagtctggaagagctggaacagatactttcccgccgtatccgtagcgaaaaggtagccatcaaggatatcaaactgcgcacgtttattgcagaaggaaacagccgcaatgacttggctgcgcacgtgtatgatatcacctatggcagtctggtgccgggtgtggacaatcttgtcattatcgacgactccattgtacgcggaaccactctgaaacagagtattatcggtattctcgaccgtctgggccccaagaagattgtgattgtttcttcttccccgcaggtacgttatcctgattattacggcatcgacatggcaaagatgagtgaattcattgcttttaaagcggccatcgagttgctgaaagaccgggatatgaaagatgtgattgccgctgcctaccgcaaatcgaaagaccaggtagggttgccgaaggagcaaatggtgaactatgtgaaggatatctatgcacctttcactgacgaggaaatctccgccaagatggtggaactgctgacacctgccggaacaaaggcgaaggtggaaatcgtataccaaccgttggaggggctgcatgaggcttgtcccaatcatcggggagactggtatttcagcggtgattatcctacaccgggcggggtgaagatgctgaataatgcctttattgactatatagaacaagtatatcaattttaacgaaatagtgtttagtgataagtgattaacgttaatcacttatcactaaacactaatcactaactaacatgagaaatgtaactcttatcctcgacgacgggagccgcttccacggcaagtcgtttggctacgaaaagccggtagcgggagaggtggttttcaacacagctatgacggggtatcccgagagcttgactgacccctcgtatgccggacagttgatgacgctcacttatccgttggtgggcaattatggtgtgccgcctttcactatcgaaccgaatggactggctacctttatggaaagcgaacgtatccatgcggaagccatcattgtaagtgattatagtgaagactttagccattggaacgctgtggaaagccttgctgattggctgaagcgcgaacaggtgccgggcatcacaggtatcgatacgcgtgaactgacaaaggtgctccgcgaacatggcgtgatgatggggaagattgtttttgatgatgaaccggagaatgtgcccgatgccgtgtatgcgggggtgaactatgtggataaggtgagttgcaaggagataatccggtacaacgaaggtgcgggtaagaagaaagtagtcctggtggattgtggagtgaagactaatattcttcgctgtctgctgaagcgtgatgtggaagtcatccgtgtgccttgggattatgattataatgaactggagttcgatggacttttcatcagtaacggtccgggtgatccggatacctgtgatgctgcggtgcagaatatccgccgggcaatgaagaatgaaaaattacctatcttcggtatctgcatgggaaatcagttgctgagtaaggcaggaggagcaaagatatacaagctgaaatatggtcatcgcagtcacaaccagccggtgcgtatggtgggcacggagcgttgcttcatcacttcgcagaatcatggttatgcagtggacaacactacgctgacggaagattgggaaccgctgttcatcaatatgaacgacgggtctaatgagggcattaaacataaacggaatccctggttctctgcacaattccatccggaagctgccagcgggccgacggatacggagtttttgtttgatgagttcgtgaaactgctgtaatcacctataaacgtacaacaaatgaaagaaaacaatataaagaaagtcctgctactcggttccggtgcactgaaaatcggcgaggcaggtgagttcgactactccggcagccaggcactcaaagccttgaaagaagaaggtatctacaccgttcttatcaacccgaatatcgctactgtgcagacttcggaaggcgttgccgatcagatttatttcctgcctgtcactccttattttgtagagaaagtcatcgaaaaagaacgtccggacggcgttatgctcgcctttggtggacaaacggcattgaactgcggtgttgccctctacaaagatggagtttttgagaaatatggtgtaaaagttctcggtactcccgtacaagccattatcgatacggaagaccgtgagattttcgtgcataagctgaatgaaatcgatgtaaagactatcaaaagcgaagccgtagaaaatgccattgatgcccgtcgtgctgctgccgaattggggtatccggtgattgtccgcgctgcatacgcgcttggcggactgggttccggcttctgtgacaatgaagaagaactggatgtgttggttgagaaagctttctccttctccccgcaggtgcttgtggaaaaatccttgcgtggatggaaagaagtggagtatgaggtggtgcgcgaccgctttgacaactgtatcaccgtttgtaacatggagaacttcgacccgctgggcatccatacgggagagtccattgttatcgctccgtctcagacgctcagtaactccgattatcataagctgcgcgaacttgctatccgtatcattcgccatatcggtattgtaggagaatgtaatgtgcagtatgcttatgatcctgaaagtgaagattatagagtgattgaagtaaatgcccgcttgagccgttcttctgctctggcttctaaagctacggggtatccgcttgctttcgttgctgcaaaactcggtcttggctacggattgttcgacttgaagaattctgtaacgaaaaccacaagtgctttctttgaacctgcattggattatgtggtctgcaaaataccccgttgggacttgggtaagttccatggtgtagacaaggaactgggttccagcatgaagtcagtaggcgaggtgatggctatcggccgtacttttgaagaagccattcagaaaggtctgcgtatgataggacaggggatgcatggtttcgtggaaaataaggaacttgttatttctgatatagacaaggcgctccgtgaaccgacggacaagcgtatcttcgttatatccaaagctttccgtgccggatataccgttgatcagatgcacgaactgacgaagatcgataagtggtttctggagaagctgatgaacatcatgaacaccagcaaagagttggaacagtggagcaagaaccacaaacagatagccgatctgcctttggaattgctgaaaaaagccaaggtacaaggtttctccgatttccagatagcccgtgccatcggttatgaaggagacatggaagacggtatcctctatgtgcgcaatcatcgtaagagcgtcggcattgttcctgtggtgaagcaaatagacactcttgctgccgaatatcctgcacagactaattacctgtatctgacgtatagtggcatcgctaatgatgttcattatctcggcgaccgtaaatccatcgttgtacttggctccggtgcgtatcgtatcgggtcttccgtagagtttgactggtgtggtgtacaggcactgaataccatccgtaaagaagggtatcgcagcgttatgatcaactataatcctgaaaccgtatctacggactatgatatgtgcgaccgcctctacttcgacgaacttaccttcgaacgggtaatggatattcttgaactggaaaatccgcatggggtgattgtttctaccggtggtcagataccgaataaccttgccctgcgtctggatgcgcagaaggtgcctatactcggtacttccgccaaaagcattgataatgccgaagaccgtgagaagttctctgccatgctggaccgtatcggcgtagaccagcctcgctggcgcgagcttacgagcatggacgacatcaacgagtttgtggaagaagtaggtttcccggtacttgtgcgtccgtcatacgtgctttcaggtgctgcaatgaacgtttgttccaatcaggaagaactggaacgcttcctgcaacttgcggccaatgtatcaaagaagcatccggtggttgtcagccaattcatcgaacatgccaaggaggtggagatggatgcggtggcacagaatggagaaattgtggcatacgctatctctgaacatattgagtttgccggagtgcattcgggcgatgctacgattcaatttccgcctcagaagctttatgtggagacggtacgtcgcattaagcgtatcagtcgtgagattgcacgcgaactgaatatctccggtccgttcaatatccagtatctggcccgtgagaatgacatcaaggtgattgaatgtaacctgcgcgcatcccgtagtttcccgttcgtcagcaaggtgctgaagattaatcttatcgaactggctacgaaggtgatgttagggcttccggtagaaaagccgaataagaatctctttgaactggactatgtaggcatcaaggccagccagttctctttcaatcgcttgcaaaaggccgacccggtgttgggggtggatatggcatctacaggtgaggttgggtgtatcggaagtgatacgtcctgtgccgtgctgaaggctatgctttctgtaggctaccgcataccgaagaaaaatatcctgctttctaccggtacaccgaaacagaaggtggaaatgctttccgctgcccgcctgcttcagcaaaaagggtataagctttttgcaacgggaggtaccagtaagttccttacggagaatggggtggagaatacgcaggtgtattggcccagtgagactaaccaacagccgcaagcgttggatatgctgcacaaaaaggatatcgacatggtggtgaatattccgaagaacctcactgcgggtgagttgagcaacggatataagattcgtcgtgccgctatcgacctgaatgttccgctgattacgaatgcccgcctggcaagtgctttcattaatgctttctgtacgatgacgctggatgatctggcaattaaatcgtgggcggagtataaataatctctgtataacaaagtgatagcgccccgttgcattacaaagatgtaacggggcttttgctttttatatgctgcaaaacatatccctatttcttgctgattcagaataaataatctttctttgcaccagcacagttcagcacagtcgtctgtgtcatccttactttgattaaacctgtatacgcaatatgaaaacaattttcgggcaacaaacgacgaaggtaaaacaactggccgatttgattagccaggacatttccatgggacgttacaagacggataccgccctgccttccatcaatcagctgagccacgattataaagtttcccgcgacacggtttttaaagcttttattgatctgaaggagcgggggattatcgactctactcctggtaaaggttactatgtggtgaactgccagaaaaatatcctgctgctgctcgatgaatattcaccctttaaagatacattgtataacagtatcatccgccgcctttccacgcgttataaggtagacctgtggtttcatcagtataacgaagcattgttcaatgctattcttcgcgattccattggccgctataataaatacgtggtaatgaacttcgataatgaaaagatttctccttatctctataagatagactcttcccgcctgttgctgcttgatttcgggcagtttgataagcgggagtattcatatatctgtcaggacttcggtgaagccttttacgcagctatggctcaattgtcagataggttgcagaactatcgcaagcttatcctgtttctggcacgggaaagtaagcatcccaaggagacgtgcgattatttcgggaagtattgtgcagatcatcaattggaatgtgagataatagagactttggacgacagggaagtgcattccggtgaagcctatattgccatccgtcaggtggatgtggtggagattgtgaagaagagccgtgcggcaggtttgacgtgtggcgttgattttggcttgatagcctataatgatacgccggcttatgaagtgattgataagggaataacagtaatgagtgttgattggcaaaagatgggaatcctgacggcagatttcatcttgagtggcaaacccatacaggtttgtctgccgacggaagtaaatttaagaggctctttatagccttttttacaaactgatttcagcacagttcagcatagatgatgttttattaaccaaataaatgatagcatgaaaaagtatccgaaaatcgggattcgtcccactatcgacggccgccagggtggcgtacgtgaaagccttgaagaaaagacaatgaacctggctaaagcagtagccgagttgatcaccagtaacttgaagaatggtgacggaagtccggtggagtgtgtgatttcagacagtaccatcggtcgcgtagccgaaagcgcggcttgtgccgagaagtttgaacgagaaggcgtgggttctactatcacagtgacctcttgctggtgctacggtgccgagactatggacatgaatccgtattatccgaaagctgtttggggatttaacggtacggaacgtccgggagctgtatatctggcagctgtactggcaggacatgcacaaaaaggattacctgcttttggcatttacggacgtgatgtgcaggatctggatgacaattccatccctgccgacgttgcagaaaaactgcttcgttttgcacgtgccgcacaggcagtagcgaccatgcgcggaaaatcttatctgtcgatgggtagtgtatccatgggtattgccggttctattgtgaatccggatttcttccaggaatatctgggcatccgttgcgaatctgtagacctgactgaaattatccgtcgcatgactgaaggtatctatgataaggaagagttcgctaaagccatggtatggacagagaaatattgcaagaagaatgagggcaaggatttcaatctccccgcaaagaccaagacccgtgagcaaaaagacgaagattgggagtttattgtgaaaatgaccctcatcatgcgcgaccttatacaaggtaatccgaaacttcgcgaaatgggatttaaggaagaagcacttggacacaacgccattgccgccggtttccagggacaacgccagtggacggatttttatccgaatggtgactactccgaagctctgctgaatacttcttttgattggaacggtatccgtgaagcatacgtagtagctactgaaaatgatgcctgcaacggtgtagccatgctcttcggtcatttgctgacaaaccgtgcacagatattctctgacgtgcgtacatattggagtcctgaagctgtgaaacgtgttacgggtaaagaattgaccggtttggctgctaatggtattatccatctgattaactccggtgctaccactctggacggtacaggccagcaaacaaatgcacagggcgaacctgtcatgaaacctcattgggaaatctccgaggctgaaatggagaaatgtcttgaagctaccacctggtatcccgctaaccgtgattatttccgtggaggtggtttctcttccaacttcctgtcgaagggtggaatgcctgtaactatgacccgtctgaatctggtaaaaggccttggccctgtgcttcagattgctgagggatggacggtagagattgatccggaagttcacaagctgctggatgaacgtacggaccgtacttggcctactacttggtttgtgccccgtctttgcgataaaccggcatttgaagatgtgtactcggtaatgaataactggggagccaatcatggtgctatcagttacggacatatcggtcaggatttgattacgctggcttccatgcttcgtattcctgtttgcatgcacaatgtggatgagaagaagatattccgtcctgctgcctggaatgcattcggtatggataaagaaggagctgattacagagcctgcacaacgtacggacctatctataaataacaaatagaaatagacatgataacaaacgaacacatagaacaattcatagcccaggcgcatcgggtaggagatgccggattgacaatatgcagtagcggcaatatctcctggcgcattggtgacgaagtcctgctttccggaacaggttcatgggtaccttctctacctaaagaaaaagtagctgtctgccgcctttctacaggagaagtattgaatggagtgaagccttctatggaaagcggtttccatctgggagtacttagtgagcgtcctgatgtgaatgtagttctgcatttccagtcacactatgccacggctgtggcgtgtatgaagaatcgtcctacgaacttcaacgtaacagcggagattccctgccatgtgggaagcgagattccggtagttccttattatcgtccgggatcgaaagaattggcccagggagtgattgatgctttgaaagatcataattccgtcctcttgctgaaacatgggcaggtggtgtgtggcaaggacttcgaccaggcttttgaacgcgctatgttctttgaaatggcatgccgcatcattatccagtccggaggagactacacagtacttactcctgaagagatcgacgatcttgaaacatacattttaggaaagaagactaaatgatgaatacctatctggcagtagattttggaggtggaagcggtcgcgttatggccggttccatctgccagggtacgctgaaactggaagaggtgtaccgctttccaaaccgccaggtgcggatgggaaaccatgtgtactgggattttctggctctgtttgatgagatgaagaacggactccggcaagcggtgcgcaagggatatcatatcaggagcattggcattgatacctggggtgtggactttggattgatagaccgtaacggtaacttgctgggaaacccagtgtgttatcgtgacccccgaacggatggtttgccggaagagtttttcggtgacaaccttgttcggcactattccgaagccggcatacaagtgatgtccatcaatacacttttccagctttacagcatgaagaaaagtggtgatacgcaattggaaattgcagaccgtcttctgtttatgcccgatcttttcagttacttcctcacaggagtggcaaataatgaatactgcattgcatccacctccgaactgcttgatgcacgtagccggacttggaatcagccactcatccatcgtttgggagtacctgcacatctctttggagacattgtgatgcccggtacggtacgtggcaaactgaaacgggagattgccgaagaaattggcctgacggatgaagtggatgtcatagctgtcggttcgcacgatacggcaagtgctgtttatgcgattccttcgacacaggtggataaatcccgttgtgccttcctcagttccggtacgtggtctctgctgggtgttgaactggatgaacctatcctcacggaagaagcttgccgcgccggcttcaccaatgagggcggggtaggcggtaagattcgttttcttcagaatatcaccgggctttggatcttgcaacgtcttatggcacaatggaaagaaagaggagagcgatgtgaatacgattttttactttctgccgccgaatcagcggatattccatccgtcattgacgtagatgataagatattccagaaccctgtggatatggaggatgccattgcggagtattgtgaagcgcacggacagcctataccggaaacttacggtgaggtagtgcgttgtgtactccaatcactcgccctgcgctataagcaaggaatagaccaactgaatcgtctgcttcccgctccgatagaacagctcaatatcatcggtggcggatgccgtaattcactgctgaaccgcctgacagccgaggctttgggtattcccgtctatgccggacctgtagaggcaaccgctatcggtaatatcctggtgcaagccattgccaaaggagagatcggcagccgtgaagaaatcaaagaatttatttaataacttagccggaacgcagataaacactgctttgcgtagataattatcgtatcactttttaatctgctaaaatctgtgtttatttgcgtttcaatattgatttactatggacacatcaatcaaacgttatcccgccaaagagcatcatcagccggtggagcgtatctgccggacactggaactccgtgacgatccgcagttgatagccgaataccgtcgccggcacagccaaggggctatctggcccgaaatacctgtcggtatccgtgaagccggtattctggaaatggaaatatatcttttggacacccgcctgtttatgatagtcgaagtgcctgtagggtttgactgggatgcagctatggagcgcctcgcttccttgccccgacaacaggagtgggaagactatatggccatcttccagcttgtgaaacccggttccacagccgccgagaaatggcaaccgatggagcgtattttccacctttatgactaatcccagccaaagaaataactaccatgaagaataacactaagaaaaacagcattatcagtaaagacggagtaagctacctcattccgttcattcttatcaccagttgctttgccttgtggggctttgccaacgatatcacaaatccgatggtgaaagccttttccaagatcttccgtatgagtgttactgacggggcactggtgcaggtggctttctatggcggatattttgccatggcattccctgcagctatctttatccgtcgcttttcatataaagcaggagtactgttgggactgggattgtatgctatcggtgcattcctgttctatcccgccatgctgacgggtaattactatcccttccttatagcctactttatactgacatgcggactctcgtttctggaaaccagctgtaatccctatatcctttctatgggtgatgaagctacatccacccgccgtctgaaccttgcacagtctttcaatccgatgggctcgttattaggtatgtacgtggcgatgaactttattcagaatcgcttgaacccgatggatacgatggagcgtagccagctttcggatacagaatttgctgcggtacgtgattcagacctgatggtactgattgcgccttatctgattatcgggcttgtcattctggctatgctgatcgtgatccgtatggtgaagatgccgaagaatggcgatcagtctcataacatcaacttcctgcctacattgaaacgcatatttggcatacgccattaccgtgaaggggttatcgcacagttcttctatgtaggtgcgcagattatgtgctggacatttatcattcaatatggtacgcgctatttcatgtcggaaggaatggaagagaaagctgcggaagtgctttcacagcaatataacattgtagctatgattatcttctgtgccagccgcttcatctgtacgtttatcctgcggtatctcagtccgggactgttgctgaaagtactggctattgcagcctgcttcttcacggctggggtgattggtttccaggatatctggggaatgtactgcctcgtaggagtatctgcttgtatgtctctgatgttccccacaatctacggtatagcattgcagggattgggtgatgatgccaaattcggtgctgccggattgattatggcgattctcggaggttcggtattacctccggttcaggcaagcattatagactgtggtacattgatgggtatgcctgctgtgaacctgtcattcatccttccgttcatctgttttgtggtgattgtgatctatggacaccggtcttattgcagggaaaaaatgcgaaagtaattatagatacatctgaatttgatgatggagaaccttttatagaaaaaaaggttctcttttttatttatatagttgtatttcttctttttttgctacttttgtgttgcaaaatgaaacaagcaaatatttcgcataacataaaattcttctggtacagatgaaacaatatcttctacttctgtttttctacctcttgtctgtaaattgggcttttgcacaaaaagatgcgatagagggtaaaagttatatcctttgtataaactcatatacggaatcatctccctggagtagccggcttatttccaacgttacggaattcgttcaaaaagaccctggaatcactctctacgtagagcatctgaatatgctgctggttgaaagtgattccattctggaagaatccaagcgcaatatattcgataaatacaaaggtcgttctccacgcatgctgttattactgggaaattcggcattgttgttgcgggatgaatatagaaaagtttggggagatattcccattgtgctttgcgcgcaggaagattatttagattcctatgaggcttatatccacaggcagccttctacgcctgaagaacgaactcctctttcttatttggttgacccctacaatttagtttatctgtacgctgatttgtatatcccggaaaacattcgcctgatgaaacagatgattcccgggatgaaagagtttatatttataggtgacgggcgcaaagtcaatcaagacaactccgtacttatcgagcaagaactgaatacgaagtatccggatatcaagtataaattttggtctgctgaaaatatgacgaccaatcagctgttggattccctgtatttcgtagacactaaaacaacgggagttctgttcgcctcgtggttctacaaatacgcatttgctggtactagcatgttagccactaattctcataagcttatagctgctacttccgttcctatcttttctttgagtatggtaaatatagcaagtggaaaagaaggtatgctgggtggatatacttacaatcaagattgttatgatgcagcattgattcaaaccatttcggatgtgttgaaagacaaacaggcacgccatattccttgctatatccccacagacggggcgcctgttattaattatgaaatactggtacgtgacgggctttctctttccacgtgtcctgccaatacccgtttcctgaataaaccgcctacgttttgggagcattaccggtattttatcttgggaactcttttctctattttgcttattacactgctcttcctgtatcgtattcgcaacttgaatgcattgaagaaagcacaacagaacgagatagatgcaatggctacttataagatgttagtgaacaatatgcccatactctatatgcaggaagagttggtgaccgataagaacggtaatcccatcgaattgatttatcggaatgtaaattcggaatttgagaaacatttctatcgtaaggaagaggtcataggcagaaaaggaagtgaaatatttccggaatccatgcccgaattcctgcattttacaaagatggcgttgacggagaaaagagccatcacattcccttactactttaaagccatcgatactttttacgatgtggtattgaaaggaacccatcagggaaatatgattgatatcttctgcctgaacagcacagaactgcacaaagcacagcaaaagttgagtgctaccaacagcaaactggcgatggctcttgatgttgccaacatcgtaccctggaagtgggatctgaagagcaaaacaatcctgtgtgatatcaatagaccgattgaactgagtactgacgaacaggaggtagaagattcacaactatctgtgcccgattctcagtatttctcaaaaatcttcaaggaagaccgtgaacgggtgaaacaggcctaccgggacctgatagaaggacgggcggaaaaagtgaaagaagaataccgtatcgtcaatgtgcagaaaaacaacctgcacaaggtggagtgggtggaagcacaggctgccgtagaagctcgtgacgaagatggaaagccattgacactggtaggctcgtcgcttgtcatcaccaaccggaagaaaatggaacaagaacttacgacagcaaaagagcttgccgaagaatccaatcgtttaaagtcggccttcctggctaatatgagtcatgaaattcgtaccccgttgaatgctattgtcggtttctcggggatattggcgtctaccgaggaagaagaggaaaaacaggaatatgtcagcatcatcgaaaacaataataccttgttgctgcaactcatcagtgatattcttgatttgtcgaagattgaggcgggaacgttggagttgaattactctaatatcgaactgaatgagttgatgagggaactggagcgtggtttcttgttgagagtgaagacggatgcggtgaaactggagtttgtggaacctgccgggccatgtatggcttatacggaaaagaaccgtttgtcccaattgatgattaaccttgtgacaaatgccattaagtttaccgaaaaaggcagcattcgttttggctatgaaatgcgggagaatgagttgtatttctatgtagccgataccggatgtggaattccgaaggataagcaacaaaacattttcgggcgtttcgtcaagctgaactcttttgcccagggaacagggttgggactttctatctgtaaaacactgatggatcatatgggtggcagaatcggcgtggaatcggaagagggtaaaggctctactttctggtttacgcttccctacaaaccggctgtgaaggaagacaagaaacagatgcccaaagatattcaacccgtttcgatagaaagaaacaaattgaccatactggttgcagaagataatgcaagcaattataagctttttgaatccatcctgaaatatgactatcatttgattcatgcctgggacggtatggaggctgtggaaatgttccggaaacataatcctcagattgtattgatggatatcaatatgcctgtaatggatgggtacgaggctacccgggagattcgtaagtattctgcaaagattcctattattgccgttacagcctttgcctatgcttcggatgaacagaaagtgatggaaagcggattcgatggatatatgcccaagcctatcaatgccaagttgttgaaagcgcaattggtggatattatgcagaagcgtatcatcttgttataagatgaaagtttctcattttcagttgaatgttttccaatgctgtgtttcagcacccgcaatgccacacttcgtgggtgccgatgccacacttggacgagtgtgaagtgtggagtttgccccgtttaggtgtggcatttgccctgctcaggtgtggcgtttcttttgatattccgccggtgtcatccccgtcattcgtttaaagaatttactgaagaatgacggattgggaaatcccagttcatccgagatttggaataccaacaagtcactgtgcttcagcagcacttttgcttcaagaataacggcttggttaatccactgcattaccgtctgcccgcttacttcacgaataaccgtactcagataatgaggagtcagacacagtttatctgcatagaaactgatgttacgttcacgtttactgtgttcattaaccaacccgatgaagcggcggaatacttcttcctggcgtgagagctgcaatggggcggactcttcgttctttgcatgtatataccttatattatagagtaatgccataatcaagtgttgtaccacttcccggcggaatggcactttgtgcacagcgtcccatatcattgaaaagaaagcatcgatttgcggtaattcttcctctgtgggcaaaatgaaaatgccatgctttgtgtacgaatccgtcagtgcacctccctgtgcgatgggcaaaaagttattatcgggaacaatgacctgaaagtcataatcctcactgatttccacaatttctatcagtgaattgaaagggctgataataatcattggttcctttaccttatattctatcagattgatggaaatccgtgcttcacctttcagtatccggatgattctgctttctttggcgcgatagggcctccctgtgctaaagaggatactatccatttgggcaaagctgatgataacgccgagatcacggctgataaagcgaaaactgttattgtttacgatgtttggattacttagcagctcgccaagcccaagctccataggtttgctcttttccatatccttttcctcctttaatttatctatatctgtggcaaagataagaaaacgtagggttttcctgtcttttaatactggtaatcggataaatagagcatcattgcacacaaatagaatgtatccatatacttttaagctctatctttgcgtcctataaagaaataaacaagaaatgtatatggaaatgaaacgaactattctctctttttcctttgttcttgcggcaatgctggcacatgcgcagctcacgctggagggatgccaacactcggcacagactaattatccgctggtgcggcaatacggtctgatagagaaagcccgggagtataacttggagaatgctggaaaaggctatctgccacaattcaccctttcgggaaaagcaacctatcaaagtgatgttacaaaactgccggtggaccttccgggaatcgatataaaaagtatgcccaaagatcagtatcaggtgatgctggaagtgtcgcagaacatctgggacggtggagatatccgttccaaaaagcaactgacccgggctacttcggagatagaccgtgggaagcaggaagtggatatgtatgcactgaatgatcgtgtgaatcagctatatttcggcatcctgttgctggacgagcagttaaggcagaatcagcttttgcaggaagacttgggacgcacccatcagcaagtatccaactatatagcaaacggcattgccaatcagagcgatctggatgccgtaagcgtggagatattgaacacgaagcagaaacgcattgaactggaatcttcgcgacaggcctatttgagtatgctctctatctttataggaaaggatatcgcttccggaactacattggagaagcctgctgatacttttgaatccacttcattggtgaacaaccgtccggaacttcgctggttcgatgcccaaggcaggcaattgaacgtacaggagtcttcattgaagacgcgcttccgtccccgcttcgggctgttcgtgcagggagcttacggaaatccgggattgaatatgctgaaagatgatttctccgcatactatgtagcgggagtccgtatgtcgtggaacttcggtagcctctacacgttgcgcaatgatcggaggctgatagataacaaccgccgtaagttggagaccagtcgcgatgtgttcctgttcaataccaatctggaatctacccaacaaagctcggccatccagtccatgcgccggcagatggtggatgatgatgagattatccgtttacgtgtcaacatccgcaaggccgccgaggctaaagtggagaatggtacgctgaccgtaaccgatatgcttcgtgaaatcactgccgagaacctggcacgtcaaaccaaggctttgcacgaggtgcagttactgatgaacatctggaatctgaaatatacattgaataattaaaggcataaaaatatagatcattatgaaatcaaggaacttactgggactttgttccctattggccctcttttccgcttgtggaaacggtgccccgaaatatgatgcaacaggaacgtttgagactacggaagtgcttgtatctgccgaagcgtcgggccgcctgctttatttcgatattgaagaaggaatgttgctgaaggccggtgaagaagtcggcgtagtggataccgtacagctctacttgaagaagctacaactggaggcgagtcttaaatccgtcgaagaacagcgtcctgatatcctgaaacaggtagccgccaccaaagaacaaatatctgccgcccaacgtgaacggaatcgtgtggcgaacttactaaaggtaggtgcggcaaaccagaaacaactggatgatgcggaagatcagcttgaagtgctccgcaagcaacttgttgcgcagaactctaccttgtccaacagtcaccagagcctgacatggcaaagttcatccgtcggtattcaggtggcacaggtggaagaccagttgaagaagtgtcacatcacctctccgataaccggcactgtactggcaaagtacgccgaagcgggagaactgacagctatgggcactccgcttttcaaagtggccgatacggagcagatgtaccttcgtgcttacatcacctccgaacaactgtcgcaggtaaagctgggacagaaagtaaccgtcttctccgattacggcactgatgagcacaagcagtatccgggcgtagttacctggatttcggatacctcggaatttaccccgaagactatcctgactaagaatgaacgtgccaacctggtgtatgccgtgaagattgccgtgcacaatgacgggctgttgaagataggcatgtacgggggagtggagtttagtgattaacggttagtgattagtgattaatttatggaacatgcggttgttgtagataacgttaccaagaaatatggggcggtggaggcgctgaagggtgtttccttgacggttccttccggagagttgttcggcattatcgggcctgacggggcggggaagacttctcttttccgtatcctcacgaccttgctgcttcccgatagtggaaatgcttcggtgtgcggtctggatatagcgaaggattataaagaaattcgtcgtcgcgtaggctatatgccgggacgcttctccctctatcaggacttgacggtagaagaaaacctgaacttctttgctactgttttccatactaccattgaggagaattatgaattggtgaaggatatctaccagcagatagagcctttccgaaaacgtcgtgccggagctttgtccggaggtatgaagcagaaactggcgttgagttgtgcgcttatccataaaccggatgtgcttttcctcgacgagccgacaacaggagtcgatcctgtttcccgcaaggagttttgggggatgcttcgccggttgaaggaacagggcatcaccatcatagcctctacgcctattattgatgaggcacgccaatgtgaccgcatcgcctttatcaatgaggggcagatacatgggatagatactccggaacgtattctgaaccagtttgcaagtattctttgtccgccgggactggaacatggcaaggtggaacagaaagatgagtatgtcatcgaagtggataagctcaccaaacgtttcggcaatttcacggcagtggatcatatctctttcaaagtccatcgtggcgagatattcggcttcctgggtgccaatggtgccggaaagactactgccatgcgcatgcttaccggattgagccatcccacaggaggcacggcccgcgtagccggtttcgatgttgccacccggacggaggatgtgaaaaagaatatcggctatatgagccagaagttttctctttacgaagacttgaaagtgtgggagaatatccggctgtttgccgggatttacggcatggcagaagatgaaatagcccgcaagaccgatgaacttttggaacgcatcgggctgagtgccgagcgtgatacgctggtgaaaagtctgccgctgggctggaaacagaaacttgctttctccgtttccatctttcacgaaccgaagatcgtctttctggatgagccgacgggtggggtagatcctgctacccgtcgccagttctgggagcttatttatcaggctgccgaccggggaatcactgtctttgtcactacccacttcatggatgaggccgagtattgcgaccgtatctctatcatggtggatggcgtgattcgtgctctcgatacgcccgatgaactgaaacggcaatttaaggttgctacaatggatgatgttttccagcagttggcacgggaggcggtgcgtacggcggattagccgattcataacataattagtaagaacaatgaaacaatttatagcttttgtccgaaaggaattcttccatatcttccgcgacaggcgaaccatgctgatattgctgggtatgcctgtggtgcagattatccttttcggctttgccataaccacggaagtgaagaatgtccgtgtcgccattctcgacccgtcgaacgatgttgtcacccgacgcattatcgaccgtctggatgcgagtgaatatttctccgtcaccacgaacctgaatactccggacgaggttgagaagtctttcagacggggagacattgacctggcggtcattttcagcgagcaattcgcgaatcatgtttataccggagatgcttgtgtacagttggtggccgatgctaccgaccccaatacggcgaccacacagaccggttatgccgccaacatcatatcctctgccggacgcgaaatgcttccggcgggaatgcaggtttccactattgttcccgaagtgaagctgctctataatccacagatgaagagcgcctacaactttgtgccgggtgtgatgggactgatcctgatgttgatttgtgccatgatgacttccatatccattgttcgggagaaggagacgggaacgatggagatattgttggtttctccggtgaagccattgtttattattcttgccaaggcagttccttactttgtactttcgtttgtcaacctgacaacgattttgctgctctcggtctatgtgctcgatgttcccgtggcaggtagtttgttctggctgattgtagtatcattactctttatcttcgtttccctggctctgggcttgctgatatcctcggtgacgcggacgcaggttgctgccatgcttgcatcgggattgatactgatgatgcctaccatgctgctctccggtatgatattccccatagagagcatgcccttgctgcttcaaggcatttcggccgtacttcctgcccgttggtacattcaggctgtgcggaagctgatgatcgaaggagtggatatctcactggtattgacggaagtcagtattcttgctgtaatggcggttgcgctgattacgattagtttcaagaagtttaagaaccgattagaataggagagtggtggtatgataaagtttctgatagaaaaagaattcaagcagttgctccgtaactcgttcctgccaaagatgattcttatcttcccctgtatgataatgatactgatgccctgggcggcgaatctggagataaagaacatcaacttgaacattgtagataatgaccacagcgtcctttcgcgccgccttgtggataaaatcggcgcatccacctatttccgtacaacggctcttcctgatacctacaatgaaggattgcgctccatcgaaatcggttcggcagatattattctggagattccccgcgattttgagaagaactgggtgacgggcaacagcccccgcctgctggttgccgtcaatgcagtgaacggtacaaagggaggattaggaggctcgtacctgtcttccatcattaatgactatacccgtgagttgcagtcggaatcaccggcaaaggcaatgtctgccgggatgggattgccccggattggcatttcaacgcagaatctgtataacccgaacctgaactataagctctttatggttccggcattgatggtgatgttgctgacaatgatttgcggttttcttccggcgctcaatgtggtaggtgagaaagaagtgggcactatcgagcagatcaatgtaacacctgtctccaaactgacgtttattcttgccaagctgataccttattggctgataggtttcattgtgcttacgatatgtttctttctggcatggctgctctatggcattcttcctgtgggacatttcgtgacgatatacctttttgcagtggtcttcctgttcgtggtctccggattcggtctggtgatttccaatcattccgctacgttgcagcaggccatgttcgtcatgtggttctttatgctgatactgatgctgatgagcggcttgttcactcccgtacacagtatgccggagtgggcacaactgattgctgcgctcaatccgttgaaatactttgtagaggtgatgcgtaccatttacctgcggggtggtgacattgtggagttacttccacagttgggagcattgatggcctttgcagtattttttaatctgtgggcagtgaggagttatagaaagagtagttgagattactctttcataatccttttgatctccgcatccagcgaagctttctccgggatattgagtttcggccttaaccgataacgtatcctggtgacgctggcggaggctatacctaatatccgggctatttcttcggtgctttgattgagcaggatgagcatacacagcaattcttcattcttggtgatattgggacacacatcgcgcaggcggataagtgccgtagaataaatgccggagaaggcgacacggaattcagcttcttctttgggtgtcagcatggtgggagacagagtttccataagcttgttgagttcgctccctgattggttcgaggtttgtatttcagccagttgccgaagcagttcctggttgtgttcatgaagttcatggcgtgattcaagaattcttttcaattccttttcctttttatccaggcggatggaggtgatttcgagttccttttcgtccagttggtgatgtaatttcagagatcggtgtctgttccagaaccaggtagccaggagcaggataaagaggatggatgcaattgtgccgatggtatatgtacggataacactgttgcgcaaggctatacctgccgtgagcagactattttcctgttccaccttctccgtctcgtaacgtatatgcgaggctatggattcacgaatggatttcccatgaattacagagtcgataatcatattatagcgggggagcagttcttttgcagctttcatcctgtcggtacggtggtagctgtcgagcagtaaccggttgttgtgattttcggtttccatatctccgcggactttggataagttgacggctttttcaagcaacgggatggcttcttggtatttttcggctctgtacatggcatttccgtagcccatgtaatagtccagcagcatatagccgggcactttatcttttatttcttcatagtgcgtcaggactttcggcagggagtccggaaactgggctttggcatccagcttttccatctttacacgtatttgtccgcgcggattggtggctctgatgtagaagctgtcggcaaggttgagcgcgaggaaggctgagtcgatgaggcccattcttttataaatcagggctctcctttcgtacaggcttgccgccataccccaggtctcgttatcttcacggaacaggcggagtccttcattgttgtaatgcaaggctctgtcgaaaaagtttagttcggtgtaattgccgcacaggttgattgcggcgagcatcgccccacgcggattctgcaacttattgctttgctccatgacttcctgacagaggctgatgcctttctggaactcattcttccggatgtagatgtttgccaggttggccatggcctgcggatagagtccggtgtcgtcgtatgctccgtttctcatagcttcggcggctcgcagcagggtgggttctgcccgtgtttcggtggagtcgacggccatataggtgattccggcggctatggtgcagaagagttcactggaaggatcatcattctcgtttatactcatggcttggtcgaggagttggcaggcttcggtacggcggccgagggtttgcaacatttgtgcgtcgcataccaaaatctcgcgttggcaatgattggatagtatcgggtggttcattttcctgagccggaggaagtgttcatgtccttcggctattcttcgggaatgattgtatgcgaacattaagtgcctgattgcgtaggacatcagacggcgggcgtcgtcaggtggtaatccgttggggtgttggtcgcttttgacgggtagcaggaaggcggagtcgagtagggaaatagcgctgtcatattctttgtccagccggaactgattggcttttgccagtatggctatactgtctgcatgaaattgcgcaggaggatgggcgctgcctggcggcttgttgcagcttactatgccggatacgagaatgattagcgggaatataaaatacttattcattttgtttagggtacttgtataggtctcaaatataagtaaaatgggtgggttaataaaacgataatttgaaaatgttagaaaactgataataaggacgtttattaccgggagttatcatattcttttctaaactcccggtaatttgatgaatttcctgttatttgggacaggagatttttgggttaatgtgcgctttcatcgtcaatagtgggtgtccaggcaggattgcttccaatccattgggattgttcaccaacactttcgttgcaggaataaacagtactgtttttaagaaggcctatcaaatacccgagtcttacagtttctccggaagtaacactaaaatctgtcgttagattccggttaagatggcattttgctaattcagcaaatccggcaattcctccaacatcaacagaagagagactatgtccggttatggagccttgattgcaacatcccagaatctttccgccaatatctccgccaattccacctaccgatatggcataattcgtatttgaatgttctgtattagaaagtgtaatggaagaagtacttatacaatgtttagtttcatttgtggtagagtagtttcctcccactatccctccaatcataaccatttgacctttacaacttacattgattttccctattgcagaacagtttttgaaagtaccagttgtatatccaatgataccgcctatgtataggtttccatagccaaggcttccgtttgatattttcatttctcccgacattgtgcaattgtgaactgtaattttctgcgtagatccatttccaatgacaccacctacaccaaaatatgaagtgcttgttccttcaggtgatgcaaaggaccatgtaacattagccgctatatggatattttctatcaacatgctacttgtagttgtcaggtaaccaaagaagccgaagtactttaaatcattagaaaaacttccctttaattcgccgcttatggtatgtccgccaccatcaaagtttccactaaaaggcttggcagatgaaatccctattggcgtccatgtatctgccgtgacttttatatcagtcgtcaacttaaagaacttatctgcgtaggcttctcccgcttctacttgttcaattaaatacttcaagtgtccggcactctctattaggtaagggttatctttcgtactacctttattatcactctgatcccaagtgttgcctattacattattatcgaatatagcagcagtcccataaccaccttctattcccccaaaagtaagctccgaattataaaccttgcctgcctcataaggaaaatctccattgaaagaaaccgtgtaactataaaccatcccgtcgtcgcctgtcacggcaagagccagtttctctttcaatgtggatggaagaatggccatgtaagcagtgaatttttcgctactggcaccggatatagccgcagtaagctgtttggcagtagtgatgttgctttcatcgcttgctttctgggaaatggctataccggcatcatcctgtgtgcttagagtgatgtatttaggaacaatgccatcaggaagagttacttcaaacttcagaacagcaattttatgcttaaagcttatttccgaaatctccgtaccagaggcagtagtctgtgcagtcataaagttgtaaccggatagatgggcaaaaggagcgtttgcatcgataacctgccctataacattaaagtggcaatcctcccatcttttctcggcttttgatgcaggaaagaaagcatgctgggcatcctcaaccgcatttcctgtgaaagtagcaatcttgccatcaccatcagtaggtcctgtcgtagtaaagacctcagtcgtagtgccataaagtttaaaggcatcatttgccgtccactttagtatcaggccattagcaccgtcatcttcatggcttatacgggtgatagctccgccttgggtaacggtaacggatattttttcttttcccccgacggaagtatcctcttttataacttcatcctgagtacatcccattaatatcaacaggaatgttgcaaagaaaggtatcacattatttattttcatagttttatttttcaaaggttagtatatcgtttatcaagtcttccaattcgcttatgctacttgaactgtagcgttgggtagatcttcgggaactacgtccaccaggcatacctggattgccaccgggcatattgctcaatgccattacaccctcactttccatttctatgatctctatttgcggagtcacatactttgcttttctctcttctttcatatttccttttttaaagttgatagtcatcttgtattttgatagcaaaactaacgattccactattagagaagccaaatcaggactgtacaattcaatgtacaattgcatggattattccacattttatcctacttttgcatccaaattaattatatctgatatcctaatgaacacgcagacaacttatctcgcctctaagccgcattatgaaatcctggatggattacgtggagtggcagctgttatggtcgtagccttccatcttcttgaagcacattcgggtggcaaccatctcgcacaaatcattaatcacggctatcttgccgtcgacttcttctttatgctttcgggctttgtaatcggttatgcctatgatgaccgctggaaccggatgagtatcggcactttcttcaaacgccgtgtcatccgcctgcatcctatggtaattatgggtagcattatcggtgcccttttctttttcctacagaaatccccctgttttcccaatatggataatgtatcggtaggaacagttctgataatcatgctctatggctgtacgctgcttccccttcctttgaagtgggacattcgcgggtggacggaaatgcacccgttgaacgggccggcatggtcgctctattatgaatatatcggcaatatcctgtacgcactgtttgtccgtaagttcaacaaggttgccttgtccatccttgtttttctggcagcctgtgccaccttgcatctctgtcttacggcgcccaatggtgatatcgtgggcggatgggcattgaattgggaacagcagtatgtgggcttcgttcgtttgctctatccgttctttgcaggtttgctgctttcacgcttaggctggctcatacgggtaaagaaacgcgcattctggtggtgtagcctgatgattgtgatagttctttccgttccccgtattggcggtgaagatggtttctggatgaacggactctacgaggcactttgcattatctttatcttcccggtcattgtttcgatgggagccggtggcaaagtaacgggaaaacgctctgtaggtatctgtaagttcttgggcgatatctcatatcccgtttatatcactcattatccgctgatatacacatatacagcttgggcatgcaataataatgcgaccatcaccgaaggtcttccttatatgatactgacctttgtcggagcttttgttcttgcttatgcctgtctgaagctctatgacgaaccggtacgcaaatggctgaccaatcgttttctgaaaggaacgcgtaaggcgaaataaatacatccggaaatataaaaagaaacgggcagcttctcgtaagagaggttgcccgttctggttaatacatctgttgggttcaccggaaaccttatttcacttcaatagatttcttgtttttctgtttttcttcggctgagaacttcggcagattgatgttcagcacgccattttctacttgtgctgcaatcttttccttgtccacattgtccggcaatatcatggtctgttggaacttagagtatgagaattcgcgacgcagatagcgaccgtctttcttttcctccttgttttcagtcttcttttccatgctgataaccaaattgttgtcttcgtcgatatgaacgttgaagtcatctttggtcattcccggagcagccaattctactttgtactccttttccgtttccagcacgttgatagccggagcggttgcattggctttttccatccattcgttatcaaagaaatcattgaagatacttggtaaccaattttgagttcttctaacaggcatcataattttagtctcctatcctttaagttaaacattcggttagttctgaactcccggtcttggactgctttcgggagccgtttcttaatcactcccatgcggttcctgaaccgtcgttcacaaacataatcgcaaaacgtatgccaattgattttagtttcgttgattaacaaaatgtcactaaagttctgacaaaattacttgttttatgtcgttttgtacatttattatataaaattgctttcgaatactatgaatgtgaaatgtttcgcctccggcttattcgtttccctgatagtcgaaataatcaaagtcagcctgtgcctttgaagaagcggatacggcatacaagcccaatatgataccggtaaatccgccggcagtttcggtactgagatagcgcgtattcatcttggctatttcctggaacttgtttccggtggtggaatagccgaatgaatagaactcattattccctttgacctgaagctgcacttttccttgagggatattgatttccttttctatatgtttcagttctcccaactgatatctcaggacgatagattgttgtcccttagcatcctgccttataaaaaggtcatagtgcgaatgattctccatgaataccgttattccggcttcgtcctgtggttgtcctttctgtaattcaacggatgttgcggctgtgaagtcgatatgttgctgtctgcggccgatgaaagtaggagagtccatactgttcagattgatgggggttgctttcaatcggagtgtcttaccgttcaggatgtagttctcctgtttgggattgcgcagatagatccattccggtcccagtttctcggtgttgaaggtaatgcggggagctttcgagtcaaaaggttgctgtggaagggtggggacatccatctgtaaggctatgcttccatctccatttaccacaggccaggcattcttatcccatcgtacaggtgcgataaacgtttcgcgccccagcagatggtgtgagccggtttgcggacggaatgcgagacataccatccaccacgaaccatcgtgggcttctatcagatcggcatgaccggttccctgtatcggactgttctgtgcgtttttgtttatgtgtgtcaggatggggttggcgggattaccttcatacgggccgtcaatatcccggctacgggcaatggttaccttatgcccatattcagtacctccttcagaaatcagcagataataccaaccatctttcttataaatatgtggcccttccggatggcgtccgcccgtaccgttccagatacgtttggattcgcttaactgttctccggtcatcggattaatttcgcacaggtagatgcctacatccggattactgaccaaatagcactttccatcttcaaaataaagggatggatcaatacctccttgctttatccaaaccggttctgaccattcaccacgtggatcagtggtgtgaaccaggaaattccccttgtccgaaacattggtggtaatcatgtaaaacactccctcattgtatcggatggtaggggcatagattccgccccatgtgccggcattggttaactttacctgtgattcccgtgtcaggcaattccctatctgttcccagttgaccagatccttactatgaaacaggggtactccggggaaataacagaaactgctgttgaccagataatagtcttcgccaacacggcaaacactcgggtccggatggaagcccggaatgattggattttgatatccttgttgggcatgcgagagattttccagtcccatcataataaagatggataagatgatttttttcatatatgtgccttttaaaatgatattattgcagtttgaaacgcattctccatcgtttggcttcttcattccagtcgtggctgatgactttgaaggttcctacttcagaggtgttttttacgtgcgttcccaaacaaagacattcatcataattgcctactttcactatgcgtacagtttccgaagcatcttcaggcagtcgtttcaagtcaaagcgtccttgtgcttcttcctgcgtgatgaattctgtggtaacatccaatccttgcgcaatcactgcatttacatcttcttccagtcgttttacatcttcttcggtaggagcagtttccaaagcatagtccagcttacttttctttctctctatatgtgcggatactgaccgtccacaaccgaaaagattcatcatagtacggttaactatatgctcgcaggtgtgcataggaggatattcctgtttgttgtggtcgttgagttgaatttgttgttccataatagacattcttattttttagacataagaacaaaagtacaaattttttcttatgagttattctttatgtttatattctctgaattttctttttatttcgatacgttcacctccaaagtttattaataagccatgatctgtattagtggcagttaagtaatttactagttgggtttcatgtattggaataagattttgaacagctttaagttcaatgatgattttttttctacaattatatctgctctgaattctcctacaactatattcttataatatacatttataggggcttctgtttctgcatcaattcctttctcttttaactcaattaccaatgctttttggtaaacagcttcaagaaaaccagcggcaaggtgcattcttacattatatgcacactgaataatcgtttttattaagctctctatttccatttctcaaatatttttattcttatgttcttttgtcttaataaaaagataatgtgtctcattggtgtacataagtgggtattcctgcctgtctttatcgtcggtttgaagattttgctccatattttaattacttctgtttatatatctattttcatattaaaagcataattatcagcactattctcagatttatatctggctgtcttattacgaaccaatgtctcgttaacataatgtccaatctcgtgcaatagcaaacgttccagataataccttcttgcgctttcttctgtaaattcaatataccaattgtctttttctttttgaggttcggaagtatatcctttataccatgtcagtagtttatgggtaggtctttcttatttgtttttcgtaaccaaatatgtatcagaccttctacatgttcaggtggaaaaggcgctatcctacttttgagatagcccctttcgaacaaaatttaaacaggctcgtcccaaacaggctcttcattttatctaatgttctattccaaattatccattacgttttctatttgcataagtattactgctggtcgatatcctcgtttttggtgggtggatatcgaccgttttcagcaccatatttaccatagtggcctaatctatatgtttcatgtcaattaaagacgtcgtaatccttaatttaatgaattggaaggacttgacctacttttttatgttaatgcaaaacttaacgaactattgttgattcctaacccaaaaattgaatcatgtttgtaactcatggtagcaaactacttctcaattacatacataaggattcatatttcgtcttataaacataattcttacgggtttttataattatatatgtaagatttcagtatgcgtttaacaccattttcaaagatataaacctccttcagtctctttccagcatcataagcataataggttgtaaggccctgtgggctggttgacgtcatcattcccaccagtgggcgataagtgtatgttgtaatcagggcatttttcaatgaaactgtcaggttgtttatcatagaccaatctgcactggtaggagctatctttgccgagagagcatttaaagtagactcgcttatcaaatcctttacttggttatatgtagcattttttatttcagctattggatattggtttttataactccacaaatacacagtgcttactccagcaatcgaggtatattgcaaaagatttccatcatttccatataaatcgaatgaatgtatctttttgtaagaatcattcatataaaaagttcctgctctatttgttgatgaaaaacctgtaatagctcgtgattgttcaaagtggttcatctcatatgttccataaaggacaggtttgtcgttactgtagatataagtgtttaatacagcgtttgttacataatacttaccatcttttttgaaatatgatattttttcaatcaacttatttgcatattctttatataggcaatgtgtggcaggtacattaggcaattttcctgtaggctcaataataatatcaggatatccatcttcgtactcccaataatagtcccaaacataattatatcgttcacttacacacaacccattactatttgttttatgcaatatagtttgtctcatatgtacgggactatcatattcatatatggtttcacttgttagaggactattgtttttagtatatattttttccgtttttttctttaaaagtattgctgcttgagtttgaagtttgtatttactgaaaaatatagcaactgggcttgtatcataaaaactacgtcctgaaactacaatagaatactttagattgtatattggataagggattcctctttcagacggataataattttgatattcatacgtgttttctttcacaggtacacctgtttgatcgtaacttatttcagaaatcaacaatccccttttccaatcatattccggattaggtggaaatggagaaacattatatccggttctattgctatccattgaaaaattgttatatgatacgaatttggtttgtggcagttcataaaactggtctccagaaaaatctttggtaattccataagttcctggattgctgtaattaaatattgtcttcccgttgtttcctccatttttaatagtaacttggtcataacaaacgaatcctccttgaactttccccaattctacttggctttgattgtgtattaggtaagtccgtttagttgaaagtagaaatgatctgaatgaggcaaaaataggtaaggatattattttacctgtggagtattcataattttgctgtaatgtcggttttgaagatataccatcaaatttctttatagttttaatacgaactcctccgccctcgaatataacgtttttgtacataaatttattcgattcgtattcataatctgtatatccgcttgcagggtattttattctgcttaacatacccaccgtaaccgttccagcatttgcatttctattagcatcgcaatctattttttcttttgttatattatttcccagatcaagaaaagaatattgttctgagcccgataatgttgggtagtaatacatggtaggtatcaggcttttatttgtcttcttgtcattataatatccccatgcatcttgggcacaggtatttctaactggtaaattcctttcgctaatataagagaattcatagtttcctactcctgcatcttttattacatcaagttttaatcgatattcatttgatatggctccattggatatagatacagattcagtactgcccttttggctttgataatagctataaattaaatcataaagttttattgtttctcctgataacttgctttttatggttattttgtctatactttttgcttttgggatatcctttctatagttattctgagaaaaaattatttcttcattctttgttatgattttgttaataacaatattagtgtaaacagtctgattatcagcataaccatttaaagagctgttagaaggatttttaaatattagctttgattccgtctgagaatacttctctgatatataggaaaaatctacagtatctttgtttagtgttattattctagtaatataccatgctgaattatattctctgcgattatggttatatgataattcttcaatgtcgccatgcatagttatatttaatccatcgtaatattcagagtcaatcataatcctttctttatcctgaaggagataagtgttaccctcaaggtcctttaacgtaaaagaatttatatttcctttagtatcataatcatacgatactatgatatcctgatagggcattaaacaaacgaagtgggtttttagtgttattacatcaatggcaaatttccctgagatagtgggcagattcatataaaacagatcagcttctgtatcatttcgaccatgattggagtatcctccataaccatctaataagacaatattttgtatagcatcatctatataagaataatcattagattgatcattgagacttattatagaatatgccttaccagtccaaaaccgacctacctctggaaatgcttcatccaaaatacttaatttatctttgttgtaatcatctggaacacctcttactgctctagttatgcttcctcctgcatttaatgaccaccccaagcctactgacgaagctatttcttctgtatgtataccttttgttgtataattcagagaaatagggagtgtgaaatcttttaatttaatttcatataaaggaatggtaacggggattattccagtactattggaggccggaaaatcaatcagcttggcaaaagcagtggtattaggtgcaactggtatggggaattgatctatttgagcatgcacaataccgatactcattagagatattgtcaataatgtaagtgaatatttatagcttaatgactgctttttatacatggcattttgtatttaaaagattgtttattaattctttatttagtatatggcataaagaataaaaccttgataatcatgcgattatcttcggtttatatgaagaattttagaaatcagtatctaactacttgaataattttgtttttgtcaatttcccagtattatcataatacttccattcaccatattcaacagaaaaatctgattcgggagattcgccttctgaccataagagaattccttcgtcttttatattaccatttggataataagatagagagtaacacttataatcgggaatatattttttgccatccctttcattattaatcgtatatgtgttttttgcaaaatctttaaaagccataatcaaatgtcctgtatttccaaagtaaaaccatgttccgcccttctgtccatttttatattctccaagaattactaatcttccattttgattgtattctttgaaaatgccagataaaacaccatctctataataagtttcttggactctgtgtttggtactatctatccagaagccttctttttgacctctactgcctaatctgttaattttttcagtatactctttttgagcaaacatacaggtatttaaggataaacatataataatcataataaatttctttgctttcatattcttaccattttaaaggattaaaaaaactatgtcttgttccgttcataaaaaagttaaaggcaggtagacgattcacatttactggagttgtcatattacgagaaacagtaacacttatcgtattacttttttgcgcattattattaaagttctctataaaattagtccaattatttatatctatcaaaagacaaccttctgaaattcctcttgtttcatttttactattcttataagtaccggtataattatttcttcctgctttatgtatgtcaatacctatagaataagttcgcccatcggaataagctggattagttgtacccagttctattgtttgcgaagttgcattaatatctctcatttttaacgctgtataactacttgtacttccgttatgtgtcccaactttagcttgataaatattttccggaacagtggcaaagatatctgggtcagaaggattagtcattgcattaaatgttgttgtagtaccatttgctaaatagactgtcgcagttgaggaacctatattgtaattacttgaagtatcaaaagtaccattatcggaaaagaaaatagcttgtgaatataaaccagccaaaaggttaccatttttgtcataagattgttcattaggtatccattcgtaaccgttataagttcgagtgccgttatgatccatatcaaaagttggtcgccaggctctgccatcgaggtctatgaagtttaccggattattcgcacaatatgcatacgggctcatcgaataatacttctctaccatcggatccactgttgtaaatcgtcctaatgttgcatcatacattcttgcactataatcataataatctagtccatgcatcctgtcaagctccttgccattatatttataaggctgaataccggaagtagacgtatttacctcaaatacgccaccaaaaggataataatgattaatttgctcaattgcccccgtttgatttatgactattcggttatttccctgatgatctttcagataatagtgataagtgggtgaatttccatttagggttatataaccttcttctgtctgaattttacttaggattctattttcatagattacattaccacaataatcagtagtttgagtttgggaaatttgactatttgtcaaatcctttatctgacccattggtacagatatattagcaatcgcgatcttatgagtcacaagccgtttaattccatcagcatcatataaataatccacgcgattgccatttataaactgaagtacacttggcaaattcagctgattatattgaacctttgcaactttcttattgtaatcttgctgcaagttaccattcttatcaaagacatattcattccctgtactgtttgacccgtttacaaagttaaatacgccattataaagagggtcggcagcagcatcatttgcatatttcaattgatttccgttataagcaattgtcaaattgtctattattccataagcagtgctgcttgcctttccatagcgttggcaagatgcaatattaccattcctgtcatattctgtaatattctctgaaaaacgtcctgtattatcagatatggtagtaccttcaccatatacggcactctttaaacggttcaaaccatcataagtaaatttataaccacgggttacggattctgttccacatttccagatcatactacttatattcccattataacaaacagtaccattccccgtgttataataaaggttttgactaaacttcgaactcttgattcctgttaaccaatcacgaaggttatattcgtaagttagtttatccgtagaggaaccatggggagatttggttaataaccggccccaatcgtcataagtatttgtaacaagagtaacagtttttccatttaaggcatgttgtgttttggtaacacgttcagcatgatcatatgtataagtatataattccgttagattccctgactgaacaccattattatttatagtatggatatgttgaattgtcaaaggtctacctgtaaaagtataagtagtattcgtagtttcatatccacccaaatgattactggatacagactttgtaactcttcctcttatatcataataattagcggaataaagcttcacaccattttctaaaatagttgtcacactccccgtcagataacctttggcactaatagaggcaacaggaaaataagttgcatttgtaaaaccggttaacgatcgaaaatcataaacatcataataattcacctgatgcacgactggaaaagtaagtccaaaactggatgtatatccgctattccctaaacctgtattactatttgtacgtgtacaagtaataacactagaggatgccgaagatgtatttgtattactacatattcccttcactgtcaatctatggaactgatcataaagataaaatgtccattgggttgctacccgttgattgccatcctgtgagaaaaccaaatgatctgcgaaatcatagacatattttatagcatctgcaccgggtgttattttctctatacagcgattacggtcatcatatttatactgaaaagcgtaaagagagaggttgctattctcttgatacatcggttgaagtacaaaacacaaattcccatagtcattataaacatagtatgtatcatgtgttgttttgtttttcatttgccgagtcagaactgtacgttcaaacttgtcaataaaagtataactaatattactatcttcatcaattactttggtgatacatagttgagcagacgcatagttaccattgttaactaaaccgcctgaactgtttactgtgtagtttatgcaatgaagtggagaagcggtggtatttaccaaatactcgatagccatgggatgtctgctgtaccaatctactcctggcccatattgttgaatgatgcggtttagcggagaagattcataaattgattgatggtagggacgtgagtcgttattataatttccgggcgcactactaatgacattagcagggctaacataatctgatatagaaattaccggtaaccagcttttatccttacgacctgcttcatcatactcttgtaaagaaaccatattttgatgtgaaggagtaatccctttctgaacagtttgaaaagggcgtcccaaaccatcataataaacaatttcatccatataggaactccccgattcgttcagcataactcgggtacatatatagttctgggtggatacctgcgaataaattgagtttccaaaagtaagtaggaatccaaatataaataatagtttgttcatatactgatcaatatacgttaatactatgtttagagagcaatttctttaaaaagaaattcatttccgaattactttcctgaatagtataatttttctccatacactttctttcctactgtaatccgtaacagatattccccccgagagtagctactcatataaagagtttcttcgtagtgtccaatgttctgattagcatggtgaattgttgatatttgacgtccctgaagatcgaacaatatcaatacgactcctcccgcctgtcgcaattcgtaactgatatgtaaataaccactatcatcgagtcgtagctgataactaaaattttcatcttctgtaatacttcctccatctttagtcgtatttttccatttagactcccaaatttctttatccgtcaaatcccgtttcttttgattttctatatcatacggtaaatcatagtattgttcttcaggcaagtagataaaagaagttgtaaaatgttcatgtgcgtggctaaacttataaacagtacttttcaccgtttcaaaaacggggtaacgataaccgtcggcataccaacgccaggtttcagtttccaaatgaatggaatcattggccaacaaataatcaatactatcacgattcaaaacgaaaggaacaatattttcccgtaaagaatccgatatgattatcttaggagccattctttgatggatgagcttatgagcataagtacgtagaaccttacgcaaagtatctccacctggcaatatcaacatacctgatgcatcgaccataactgtatttttaccctgcaaacgaatgtttaattgttcgcagtaattacctatcccatcaaaataatccgtaattatgcgaccttgataaagtggaaaagtaaggagcaactctggcttttgataagtaattaaaatagtagggttttcataccccaaacaaaaaagagaatcaccggaagtatgataataatacattgtgcggtgttctatgccgataacagtgtcaactccttgtttcacatattgcaattcatagttagtatcctgaagttttattccgctaaaatcccagatttgttgtgtaccactctctcccgcttcacaagtagccactacccgcttcattaggcaatcaccacctctcggttggttactatcaggacttagtgtttgtgcttggaaggaaagatatataaagcaccccaatatagaaaatatcaactttttcatatttttcatgtattaatgagaattctatctatcataccccacctatttaaaaatggtgggaaaattaccggtaacttagtatatagctggacttttcattgcatataaattttggatttctaaatatccagcaaagagtgatttgaattattcttttgtgtaatcacaatcaatatatcttcaagaatacgtatgcacaaacagaactatcaaagatcgaaaacaaaacatgtattactcatgtctatttatcagaatataaggagaaataccccttctaatgaaattttattagaaataatctctattatataatctccggcatcctttccgtttaagtcaatggagaagcatgttggattgataaacagttctgaataaactgtttctccggtagtttcattagtaatgttgactgtaacagtagagaatactgtttgaaaatcaaccgttactaccttattatataaggaggcatacacaggttgagaaatactactacgagtttgtggagcatcttctggagttgtatctccactcttaccacctatttctctgtcaccgttcttctgtgtgagaacaatcacagaattttcaaaaataaactgtgcgtttacagaaacgacaaagattaaaaacgagaataaaatgaataatacttttttcatatatatcagacttttgttttatgcggttaaattacaaaagcctacgtaaacagagtgtctcaaaagtgtctcactacctaattttttgcagaatttcttcaaattcacaattcagattagtatcaatccgctttagtaggagatttttcttgcggtagagtgttgctctggagagatgcaataagtattctaaatgggagaatgggaatcctaccaaacttaaacataccagatggagttcttctttagataattgatactttacacaaagttctgttattgcattattccattccatatccatttcggctacaaactcctgccattcctgatcgcttaattctttatcagatgcatctttatcttggaaatctttaatgatagcctgcattttttcataaatcggtgagtgtagaaaagcctcttttgccaaagtctttcgctttaagactattttatccaattctgtttgtagcttttttctttgctcttcattaacctgatgcgaagctaattcttttctcagtttttcaatctccatatccttttgtgttatatcagtttgtaggttggcataatgttgacttaaatcctgatttatcttttctaattgttgcttgtcctttttcaataaattgttctttctttgatatcgtttgtatagataaagagaaatcgcaataataattattgttatcagtatgaagctatacaaatacatctgtaaacgccctttatagtatagcttttgaagtattgtttgaacatcagcttccacttcaattattcttttagcaactggatttctgcgaagttgatataaactgtctttatatgcagaactgttcctttccaattctatggataaagtcgtatttccctgaatcattgctatatctgccagacgcatataaacatccgattttcttccataatctttgcccagtagacttttatttagatagaaagtagcagaatcatattgctttaatttatagtatgcatctcccagaagaagaaaagtctgataaggccatacagtatctttccgtaaagagaaattcaattttgcataatgtaaagccttttctccctgattcattcggctatacaaattacttagtgaagctgaaatattagcttttaggccgtcattttttatcttctccattgtcacaaaagcgtccagcaacttttgctcagcaatagggaaataattttcccctttcattaaatcgatagaagcttgtctggataaggcttctgaccaaagagtcgtatctcttaattctttggcaattacttccattaaccgatagatagaatctgccttttgattgaattcctgtatattatagatatatcctatattattatatatcaaccctaattgtctcttttctttagatttttccgtcaaaggcgcagcaataaaaaattctctgatagcttctgcctgctgattcatatccctatatacacacccccaataataatgtgcctttgcttgcatctttgtatctccaatagaatcataataatgaaccgctatctgtatcaatgaatcatccttctgtacaacgaagtttttatcttgcgcttgcgtcagcagcaatgcatagtatgcattatcagctcgtgtagaaagtttttcaggtgaaatgcttttaagaatattcaaggcactatccggacgcaactgcataagtgaatctgccttaagtaattgctggttgtagtcctgccgaatggtacaagacgatagcaaaaacatagcgaataatataataatgacagtatttttcatattgcttgtcgtattttcaattagatatagtccacttgaagaagtggtatttctttatgctactaaggtacaaaaaatattctgatggaagcatggcaaacattataaagaatgaaatattattcataatagtacaaatcactgaatcattgacaccatttgtcactaccatgtaaagtaagctgttagtaatccgaagaaaagtaaaggctttaaactgtaaacagtaaactcgatgatgtgcagaaaagtgcagctcattatttgcggtgaattacactttctctatatttgcaatattctcaaataccgaatgtgcatataagcaaaaagagcaagagaccgaaaaatgaaaagttaccaatgaaacaagaaatctacaatacgcttgacaggttaggtatcgactacacccgtttagaacacccttccattatgactatggaagaaggtatgacaatagcacagaaactgggtgtttcatcctgtaagaacctgtttttggtcaacaaacagaaagagtactttttgcttctactttcgggaaataaaaaactatcagccaaaagtattgcaaagcaaatagggagttcacacctttcttttgcttctgatgaagatatggaaacactcctttttacaacacccggagctgtaagtattctcggacttatttatgacaaagagaataaggttaagttattaattgataaagatgttatccaggcagattatataggctgtcatccatgtgaaaatacttgtagcctgaaaataaggacaaaagatatattagaagttttacttccagcgattaatcatgctgattttgaagaaataaatacggaactataaatgaatgtaaagaagcaaagagtagctcaataaaaatagttgtttacaacattatcaaacagcacttttgtatatttgtaaatcgctataaatatgtatgcattaaagacattcaaaaagtatggattatataatattctactcattttatagaagaaataccttaaacttatgattattcttattgcaggagatacgcatacgggaaagaccttgctagcacaaaagctattggagaaatataaatatccctacttgtcaatagatcacttgaagatgggagtcattagaagtgggcaatgtaaattgcctgctgatagtaatgatacagaactaacaaactatctgtggccaatcgtcagggagatgataaaaacctgtattgaaaattcccagaatatgattattgaaggatgttatattccttttggctgggaaaaggattttacggatgaatatgtagaacaaataaaatacgtatgccttatattcagtcaggaatatataaagcatagtttccagaatattctggaatatgaaaatgttatagaaaaaaggctgtcaacagatgtaacctttgaggatgtaagtaaaaccaataggtataat

SEQ ID NO: 6424 - DNA, 22091 bp, Unknown
  gut microbiota DNA sequence
ttttcacgtacgctttctatcggataagcagccttttcacgggtataactatgttcccagttgttggccaccacctcatattcagggtgcggagcatttaccagaacattgtcttccttatccgcttttccttctttcacttcctgaatctcttcccagatattgagcatcaccttcacgaagttttccaattcgctgaagctttcactttccgtaggctctatcatcagtgtgccgtggacagggaaggagagggtaggagcatgataaccataatccattaatcgcttggcaatatcattctcactgatgcccgtttcttcgtgaatcttacgacattccaagatcatctcatgacctacgaaacccgtagctccacgatatacaatgccgtaagtatccttcagacaagcagccagataattggcactgaggatagcgattttcgttgcacgggtcagcccttccgtacccatcatgcggatgtatccgtaagtgataggcagaatacctgcactaccgaacggagcggcagacactgtatttacaggattaccgaacaacggatgtcccggtaggaacggaaccagatgttccgctacgcagataggacccacacccggaccaccaccgccatgaggtgaagcaaaggtcttgtgcaggttcagatggcaaacgtcggcgccaataactccggggttcgtcaagcccacctgcgcattcatgtttgcaccgtccatgtatacctgtgcaccgcaatcatggatgatgcggcagatttctacgatttccgtctcaaaaataccgtgggtggaaggataagtgatcatcagtgcagccagatcgtctttgttctcttccgctttggcacgcaaatccgccatatcgacatttccttgctcatcgcatgcacaagtcacggtagtgaaaccggcctggatggcagatgcggggttggtaccatgagcagatgcgggaatcagcactttgttacgatgtccctgtccgatgttctccagataagcgcggatcacacggagaccggtatattcgcccgcagcaccggagttcggttgcagactgacacctgcaaaacctgtaatgactctcagttcttcgctgagattgttaatcagttcacggtatccttctgcctggtcttcgggtacaagcggatgcatacacataaattccggacggctgaggggcaacatttctgccgcagcattcaacttcatggtgcaggagccaagggaaatcatggagtgggcaagggagatatccttacggtcaaggcgcttgatatagcgcatcatctccgtttccgtatgatatttattgaacacttcatgtgtcagataagcgctctggcgtttcagcgtcttattaatagtattgcttacgggaatatcatccactttggtgtagtcttttcctgcggcaatggcaaagatggaaagcaacacattggcagcggatacatcagttgtttcgtcaatactcatacctacgtctccattatcaaagtagcgcagattgacttccttgctcaatgcgatggtacgtacctgttgggcagatacgctgtcgggcaacacaaagcgcagggtgtcgaagtattggtcattcacttgtttgtatcccagtttcttgatacacttttccagatatgcggcgatgctgtggatacgttctgcaatggcgtgaataccttccggaccgtggtacacggcataaaagcccgccatggttgccagcagagcctgtgcggtacagatatttgaagtagccttttcccgtttgatatgttgctcgcgggtttgcagtgccatacggtaacagagttttccgtatttatcttttgaccaaccgatgatacgtcccggaatattacgtttgtattcgtcgcgcgtagcgaagtacccggctgacggtccgccatagaacatcggtgtaccgaggcgttgggtggtaccgaatacaatatcagctccccattctccgggaggggtgagcagggcaagactcaggatatcagcggcaacggctactttgcagttagcggcatgggctttctctacaaaggcacggtaatcttctgcgtttccgctcgcattcggatattgcagtatacaggcaaaaatatccggtgtcagttccagttcggaatattttcccgtgcgtatttgaataccttgcgggatagcacgcgtagtcattacagccagtgtctgtgggaaaatgctctcatccacaaacactacgtttgcaccggacttctgcatatcacgcggacgcagggcgtacatcatgcttacggcttcggcggcagctgtagcttcatccagcagagaacagttggcaagtggcatacctgtcaggtcgcatactgcggtctggaagttcatcaacgcttcgaggcgcccttgcgaaacttctgtctggtagggggtataagaagtgtaccataccggattctcgaatacattccgttgaataacggcgggggtaatggtgttataccagccgaggccgatatacgttgtgtaaagtttgtttttgcacgccagccgggtgatgtgttgtccgaactcatattcagtcataggcacgggcaatgccaacggttctttcagacgaatgtttgcagggatggttttgtctatcaactcatccagactgccgactcctattttccggagcattttctcttcgtctttttcgctgatgccgatgtggcggcaagctaataggtcgtttttcatatctatattttgattaaaagtttatgctttcttttttcaccacagattacacggattatcacagattaataatttcttttactgattgtcggataaagaaatccgtgtgaatctgtgtaatctgtggtggactcttactcttatctgaagaatggattttctgccttttcaataccgatagtagtcggggcgccatgtccgggatagacaatcgtttcattgggcagtatgaacaggcggctgcaaatgtgctctttcagttcgtcgaaattaccaccggtaaggtcggcacgtccgatgctgccctggaaaagtacgtcaccggagaacatgcaatgatctgcggcacagtagtaaacaaggctacccggtgaatgtcccggtacgtggatagcttctaacgtagtgttaccgaagttgatgatatctccgtcatgaagatagtgtcctatcggtgcgggcagttcgttccaatgaaaaccgaacatgcggctttgtttcggagcttcgtcaatccagaattcatcggctttgttggcttccaccggcagaccgaattctttgaccatgaaagcatttccaaagatatggtccagatgcaggtgcgtattaaggaggtgctttacgttcaggccatttttgtgaatgaagttcttcaacgcttgtttttcctcctcatagtagcaaccgggatctatcacggcagcttcaagagtgtcgtcccacagaacataacagtttactgggaacatattaaactcaaacctttttattttcatgataggtatatgttagtcattatttctgtgattaaggcgtcacgtaaaccactttcttcgtttcaaagaattcttcttcgaaatagtctttcagatcatacatcatggtcttattcttgaaaggcatggcttcatttgccagctcaccacctttcaggcagattagtccgtttggcatagcattgtgttgctcggaggcgatgtttttgcggatgattttcagcaagtcggccaacggcatcacggcacggcttacaacgaaatcgaagagttgcttttcctcctcagcacgtgcatggcggaaagtcacgtttttcagtccgatgctgttggctacttctgttgctacacgtactttcttcccgatgctgtcaacaagatggaacttcacttcggggaataagatggcaaggggaatacccggaaaaccaccgcccgttccaaggtccatgatgcgggtgccgggagtaaagcgaatcactttagctatacccaatgaatggagtacgtggtgttcgtacaggttttcaatgtctttacgtgatatgacgtttatttttgcattccagtccgtatagagatcatagagggacgcaaattgctgcttctgcgcctctgtgaggtctgggaagtactttagaatgatttccatgtgaataatttatgaattatgatttataatttatgatttacgatgcgggtggaagtcctaaatcataattagttctcgtttcttatttcgttcaataccatagtatcatcactcagcagatgcgacatgatctcataaggcaaggtaatttctaccggacccatcacataaggagcaatttcataaatgttataatagaaggtgatacctttgggacttaggtagaagttctcagtcggttccaggtctcctgtacttgtatagcccatatcctccacttcctggcgtgtagtaactttattgtctgccatgagctggttccataataaatcggtgagagcttcctgatattctcctacaaaaatatcatccagacgtatcgggctcaaggtgcgcaggtccatattcaggaaagtagacatataaataccatgtgcgcctccggtatattcattgtagttgatgcggtaaaccagcagatgttttttataatactgcacgtggctttcaatacctttataataagaataccaagctaatattgaagcggaatcttccttttcagcttcatctttggcatacattggttccaaatctttcaggtaatccttgatatagttttccttgtaaagctttaccgcctcttcaggcttcagagtcatgtatttatctccgaaacaggctgaaaggaaataggtgttcagactgtctttcagcttttcgtcggacgacttattagcgtatgcaaagttgatgatgatgttgcagccgggcttcgcagtgtctccgaagaggtgggctacctcatttacctgtatactgtcgaactccagcgcacccgcgcttttgttcacagtgttaccgcaagaaaataaaaagccacttgccgcaagtagaatgacaagtaggctgacatattgctttttcatttggactttcttcgttaaattcaacatttcgatatcagttcgttatcgacaaatatagaacatattaacgaatagaacatataaaaaatgaaaaaagataggtatgaatgcttttatctggctatctttgcaccggatatgaagagacttcgttacatattggcagttttattgtccttgacggttgtttatgcaggggcaggagtctctattgtccattattgttgtgcccgctgcgagacagcgcaagcatgttgcaccaatggctgtgccaaatgccataaatctcataaaacttctcataaaccggaaaaatcttgcaaagacgaaggctgtacggctactttttataaagtggatttggtgaaatattcatgtgaaagtcctgttataaccgtacctgtcattcaacttttctgcgaagtattgccggatttccaatactccttgcctacgagggaattgaaagaggcatcgtatgccgtacctccgcatcctgatagttcgaggcagtatttggccttatattctgttctcattatttagaatcaattagtgtgcaggagaagtgttttccttcctgcccggttctatccaaagctatatctgaactgtgtctggtccgtagtttgtccgtatctaagagtacggagatgatacctttgcacgttctcttttaaagaattgatagctggatagtcttgcaaccttgttgcatgaaatatatcctatttttgtacccttaataaatgaattcagatatatgaaatatatatttttattaatttcactttttacttttaattttttgcaggcgcaagtaacaggtgtcgtaaaagatgctgccggagaacctattccgggagcgaatgtgttttggatgaatacaaccaatggagtaactaccaatgaagacggcaacttttcaattcataagcctgctcgcagccacatgcttgtggttagctttattggttttgagaatgacacgatacatgtagacaaaggaaaccaacaacttgatattgttcttcgtgaaggagtggaactgagtgaagtaaatgtagtgacccgcaaattggggactatgaaactgcgcaccagtgtgatgaatgaagatatgatcagtagtgccgaactgacacgtgcggcttgctgtaatctgggagagagctttgtgacgaatccttccgtggatgtcagctactcggatgcagctacgggagccaaacaaattaaactgttaggactttccggtacgtatgtgcagatgatgactgaaaatattcccaatttccggggggctgccgctccttatggtttaggatacgtacccgggccgtggatgcagagtatacaggtcagcaaaggaagttcgtccgtgaagaatggatatgagtccataaccggacagatcaatgtagaattcaagaagcctcaattgccggaagcggattgggtgtcggcaaatctttttgccagtagtacgaaccgctatgaagccaatgcggatgctacggtaaagttgtcgaagcgatggagcacttctttgttggcacattatgagaatgagacgaaatctcatgactctaatgatgatggttttgtagatatacctcgtgtggagcaatataatgtctggaaccgatgggcatatatgggtgaccactatgtattccaggcaggtataaaggcgttgcatgaaactcgaaacagcggtcagattgcacacggaaatactccttcgcatgacctgtatgaaataggtatcaaaacaaatcgttacgaagcgttcacgaagaatgcttatatcttcgacaaagagaaaaatacgaatcttgctttgattttacagggaacgttgcataatcaggatgccaattacgggcgtaaactgtatgatgtggatcagagtaatttttatgcttcgctgctgtttgaaacggagctcagtaagcagcatagtctgtctgccggattaagtttcaactatgatggttacgatcagaactatcggctgacgaatcaggcagaagaagggctgacgaagaaatttgtgaaggagtctgttccgggagcttatgtccaatatacattcaatctgaacgatcagttgatgctgatgggaggtattcggggagattacagtagtgagtacggcttctttgtgacgccgcgtgcccacgtcaaatataatccgaatgaatatctgcatttccgtttgtctgccggcaaaggatatcgtacgaatcatgtattggcggagaataattatcttctggcaagtagccgcaagatgaagattgcttctcatctagaccaggaggaagcgtggaattacggtgcgagtgtttcgacttatatcccccttttcggtaagacgctgaatgtgaatgcagaatattactatacggattttctgaaacaggtagtagtggatatggacagcaatccgcatgaagtggctttttacaatctggatgggcgttcttattcgcatgtattccaggtagaagccaattatccgttgttcaaaggcttcactttgactgcggcttaccgtttgacggacgcgaaaactacctataatggtaaattaatggagaagccacttactggtaaatataaaggcttgttgactgcttcttatcagactcctctgggcttgtggcaattcgatgctaccttgcagttgaatggtggtggaaggatgcccgatccttatgaactgtctgacggaagtctttcgtgggaacgtcgttacggtagtttccagcaactcagtgcgcaggtgacgcgctatttccgtcgctggtctgtttatatcggcggtgagaacctgacgaactttaagcagaagaatccgataatcgatgcttctaacccatggggagagaatttcgatgctaccatggtgtggggaccgatgcacggggcgaaagcatatatcgggttgaggtttaacctggcaagaaactaattactaataactaataactaaattgattatgaaaacaaaaagaatgatggctgccctcgtagtagctttgttgagtgtaacggcagtaatggcaaaagatatccgtacagctgtctttaaagtttcacagatgcattgcgaaaactgtgaacggaaggtgaagaataacattaaatttgagaaaggagtaaaagaattctctacagacttgaaaacgaaaacagtttccattacttatgatgctgaaaagacaactgtggataaactgaaagccggtttcaagaagttcaactacgaagccgaattcgtgaaagaaacgaaacaagaggacaagaagtagtcgaacaaacggcctgtagagattgttttgatataaaacttgaaataaaaacaatatatgggtaatttaaaaaaacagacgtttcccgtgctgaacatgcattgtgcgggatgcgccaataacgtagaaaagacagttcgcaagttggtgggcgttgcagatgcttcggtcaactttgcttccaatacactgtctgtctcctatgagacggacaaactgacacccggagaaattcgtgctgccgtactggctgcgggctatgacctcatcatggaggaagagcatgttgaagaacgtcaggaagaagaacaacagaaacgctatcaccgcttgaaaacgcgggtgataggagcgtggatttttgctgttcccctgttgttgctttccatggtcttcatgcatgtaccttattctaacgagatacagatggtacttgctattcctgtattggtattgttcggtacgccattctataccggtgcctggaaacaagcacgtctgggacgcagcaatatggatacactggtggcactaagtacatccattgctttcctgttcagcgtctttaatactttcttccccgatttctggtataaccgtggattggagcctcatgtctattacgaagctgctgtggttatcatcgccttcgttttgacaggtaaactcatggaggaacgtgcgaagggaaatacttccactgctatccgcaaactgatgggtttgcaacctaagaaagcccgtgtagtacgcgacggtaaagagctggatgtacctttggatcaattgaacatcgatgatctggtgagtgtccgtcccggtgagcaaatccctgtggatggttttctgaccgaaggtgactcttatgtagatgaaagcatgataagcggtgagcctattccggtagaaaagaagattggctcgcatgtgttggccggaaccatcaatcagaaaggatcgttcattatccgtgccgggaaagtaggtggagaaacagtgctggcgcgtatcatccgtatggtgcaggaagcgcaaggcagtaaggctcccgtgcagcgtattgtagataaagtgacgggtatctttgttcctgtcgtactgggtttgtctgtcctgacattctttatctggatgttctttggtggtgtggatatgctttcacatgccatgctgtcggcggtttccgtattggtgattgcttgcccttgtgcattgggactggctactcctacggctttgatggtaggtatcggtaaggctgccgatcatcatattttgataaaagatgctgtggcactggaacagatgcgaaaggtaaatgttgtggtattggataagaccggtacattgactgaagggcatcctaccgttgccggttggttatgggcgcagccgcaggaaggacattataaagacattcttctggctgccgaacttaaatcggagcatccgctggctggtgctattgtcactgccttgcaagaacaagagaacattgctcctgcaactctggatggttttgaaagtattaccggtaagggtattaaagtgacttatcagggtgctgagtattgggcaggcagccacaagttgttgaaagattaccatgccaccctgactgatgttttgggagaaatgctggctcaatacgagtcggacggttgtagcatcgtttactttggtcgcaaggatgaattgcttgcgattgttgctatcaaagatcagataaaggcgacttccgctgaggctgttcgcgaactccgtacccagggtattgaagtttatatgctgacgggagacggtgaacgtactgcttctgctgttgccggacgattaggcaatatccagtatattgccgatgctttgccggatgataaggaagagtttgtacgccagcttcaacttcagagaaagacagtagctatggtgggtgatggtatcaatgattcacaggctttggcttgtgccgatgtaagcattgccatgggtaaaggaacggacattgccatggatgtggcaatggtcactcttatgacttcggatctgttgctgttgccgaaagcattcaatctctcccggcagacggtgcgcttgattcatcagaatctgttctgggcattcatttacaatctgataggtattcctattgctgccggattgctttatccaatcaatggattattgctgaaccccatgttggcaagtgccgctatggcattttccagtgtatcggtagtcttgaacagccttcgtttaagatactaactatttctatattccaacggactcatccccatgtgcctcttaaagtactttccgaagaaagaggcactggggaagttcagtgaataggctatttcctgaatagtcatgtctgtggatttcagccgtgctttgacgtctgtaatcaccacatgcgaaataatttcgagtacattccttcctgttacttgttttacggtagtactgagatgctgcaatgaaattcccagcttgtcggcatagaattgagcacgtctctcagtcatataattttcaataaccagttgtacgaatttttggcaaatttcctctttgcggcttttggcaagaatgctttgcggacgattggcataaagggcattaattccaagcaaaatgctgtggagcacactttgtgccattgcggtactggtggcggtaggatgggagattgatatacgtgtcagtagtgcaaagtaatccacgaagtaggatgctattaagtcgctgacatttacaatcggattatcccatattttggagaaagatcccatcgtagcctgcaatagattaataccgttgacgcagtgactggagaaacctacgaagcaaagccgtactttttctacttgctcattgagctgtaagatagttcccggcatcagaatgatcagatcattcttttttatttcatgttccatcagattgatggatgctgtaatggtcccttcagtgcataatgcaaaaatacatgccttcagacggcatgactggcgatagaaattcagaatatcttctgtaacatctctccatgccagcatttcaaccggcaaatctacttgtgggaagttatgtttcatcttttttcattttgctgtcggcaaatatacgattttatccctaaagtcttaactttgtcggcatgaaactgaatgtaacagactggaatattattccgtatgccgatgcatggacccggcaaacggagtggtttgatgctcttattcgtgccaagcaggcaggggaagagtatgaaaatcacatcattttgtgtgaacatccgcatgtctatactttaggtcgtagcggtaaagaaggaaatatgctgttgagtgaggaacaacttcagaagataggagctacgctctatcatatagatcgtggaggtgatatcacatatcatggtccgggacaactggtatgttatcctatcctgaatctcgaagaattctcgttggggctgaaagagtatgtacatttgttggaagaagcggtcatccgtgtatgtgcctcttatggcattgctgccgggaggttggagaaagcaaccggtgtttggctggagggagatacgccgcgtgcgcgtaaaatatgcgctattggcgtgcgtagcagtcatttcgttaccatgcatggattggcgctgaatgtgaatactgatttacgatatttcagttatatcaacccctgcggctttatagataaaggagtcacttcgctgcaacaggagctgaaacgggaggtgccgatggaagaagtaaaacaacgcttatgctttgaattacaggggtttatgcagaggtaaaaaacagaccatctattcactgcgaatagatggtctgttcgtatcaaatagacggtctgttcatccttaacagatggtctgtttcaggagtcttcaatcgtctgtttttttatttcaaccatttgtccagccattcaaagaatgtgcgttgccagaggataccattctgaggtttcaatacccagtgattttcatccggatatatcagtagctcggcaggaacaccacgcattacggcggcatcaaaagcagccattgcctggttggctagaatacggtagtctttttcgccatgaatgcaaaggataggtgtatcccatttgtctacaaactggtgtggagagttggcaaatgtgcgttgagctaccggattttgtttttcccagtatgcaccacccatatcccagttggcaaaccatttctcttctgtttccagatactgcatttccatgttgaagatgccatcatgtgcaatgaatgctttgaagcgcttgtcatgatgtccggcgagccagtaaacggagaaaccaccgaagctggcacctacacaaccgagacggtctttgtctacaaacgattctttagccatctcgtcgatagctgtgaaataatccttcatgcactgaccaccgtaatcaccactgatggcttcattccattccactccaaagcccggaagtccgcggcggttgggagctacgatgatatagtcgttggcagccataatctggaaattccagcgatagctccagaactggcttacggggctttgcggaccaccttcacagaacaggagggtagggtatttcttattcgggtcaaactgtggcgggtagataacccatgtcagcatctgtttgccgtctgtagtcttcatccagcgagcttcaaccttacccatttccagttggtcgtaaatctgcttgttttcgaaggtcagttgttttgcttctgcaaaagcatccccgttgcgggtggcagatacggcatagatttcatcacccatactcattgagtggcgtaaagcgattactttatctcctgcaagggcgagggaagcataatcatacataccgtctgtcaactgcgtaaccttatcgttggcagcaagatcgatattgtaaatctgtgtttcaccatgccagacaccgatgaaataaatactcttagagtctttattccacaagaaaccatctacgttcgattcgaattccttgctgacgaaacgtttctcacctgtttccagattcatgatgaagaggcggtttaggtcagcttcataaccgtcacgttccatgctctgccaggcaatgtatttaccatcgggagagtactgaggatttgtatcataacctttgttttcttcggtgatattgtctgtcttcttggttacaagatcgtagatataaatatccgagttggtggagatggcataagccagaccggtcttcttacggcaagtatatgccaccttgtctccggcaggactccatgccagttgctcgatgccaccccaaggtctcatcgggctttcgtaaggttctccttccagtatatcctttatattgctgataccgtttccatcaaaatcagctacaaaaggatgcggagcaccggttacccattcatcccagtgtttgtacatcaggtcagtaacgatgatacccgtcgctttagggagatcgggatatttatccgcagtactttgtttagttttcacctgtgcaatgaaaagcaacttcttgccgtcgggagagaaagaataaccttcgatgtcaccatcatattgagttagctgcttacgcccgctgccgtccggattcatttcccacaactggctgctgccaccttcattggaaaggaacgccagtttagtgccacccttaatccagttcacttcgttttcctgccagggagtgtgggtgatttgtttgttgcctgttccatctgtgttcatcacgaagacttcacggttactcttgttctccggtacactgtagtaagctactgtgtaagcaatttgcttttcatcgggggatacggctacaccaccgatacgacccatggcccagagagcttcgggagtcatgcgtttgccttcaatctggatgtccgaccgctcgataagcggtactccggcttgccctgcgtctttagttccgccgcaggcagccaatgtcatagctgctgacataagcaataaatttacttgtttcatgtatgttgttcgttacggttattttgcgacaaatatacaaattatatgcgtttttcttgccatcgtcctcctttaatataccaccagcaaagtaatagtataaaaatggagtataccatttccgatgtccagcacagggctacatcaagtttcaagtaaagaatgatgtatgtgatgtaggcaacatagaagacgagcgttatcagttccatgaccagagccgtgcgcgtgtttcccgttcctgatactgcctggaaatatacattggcaggtacgagaaacagatatgccgagcacattacccaaagtgaatgtatggctgcatcctgtaaatcgggtatatccgtatagattcccagtataagttttgggaacagtgcaaaaaacagtgctagcggcaatgtgaacaggtatgcaatgcgtatatgctgccggatagtgcctgccacgcagtctttgtctcctgcaccgatgagattgctgaccaatgaaccacaggttgaggcaaatgccatcattaccatgaacagaatgccggatatgctccggacaatgttcgtgatggcgagcgaccgttctcccagatgctccacatagaggaagaacaagaaccaggtggacaaggagaagacgttctgtatcatggtccagaaggaaatgttcagcatgcgtttcagtatctccgggcggaacttcggaatacggtccagtccaaacttacggcagtcaatgcggtaacgggtgtagaggataaagaatatcagtgaaaccagctctgcaagtgatgaaccgatggcggcacctgcaatgccgagcgcaggaaagccgaatttaccgaaaatcagtatatagttgaaaactacgttactcaataccatgactatggaattgagtgtcagtgtcttggtctgcgtagttcccaggaagaaagcacggaagatgactgcactgaatgagaagaaggctccgaaaacccgccagttcagataactgatggcagcctcatagatgtgttcggaagaaacgattcgtttcagtatcattggtgaaaggaagtaggagagcaggaacattactgccgccagtcctatctgaaagtaaattccttgatagaaaaggtcgcctatttcccggtattgcttttcaccgttgcgccgggcaatgagtatctgcgctccgatactgaaaccgaaagctgccatgaatattaccatgtagaagacacctgcaatggctgatgctcccagttctacttcgcctacccgtcccaggaaggctgtgtctgtcatacctatcatttgctccatcagtagactgatgaggatcggataggctatcatccaaatctgtttgttggtatatttagttttcattttttttagttaacgaggtgcttagtggacaagttgacgagagtaatagagagaaagaaggccacactatccattttgagtacagtgcagcccttgtatcttgttaactcgttcccttgtcaactcatttcttattctgtctctctttcaacaactgttcctgttgtttctgcattgcctccaggcgggcggcaaagccggttttcttagctttcttcggatctttctttcgggcttccaattgggcaagaagtttctcttcattcgtagtcttacgcagaatgagagtagtcaccacactaatcaatgtcgatatgaagtagtaatagttcagacctgaaggataactgttcaagatgaacaacatcataatcggcatgagatacgtcatccacttcatcgccgccatctgcgggttggctccggtatcctgttgctgcatcatgaatttggagttcaatatattcacaaccgtcatcagcaaacagaacaaactgaggtggctacccaggaacgggatattgaacgggaagttgatgaatgcatcgtacgttgaaaggtcatcagcccacaagaagctttgctgacgcaattcaatagcacttggcacgaacatgaacaatgcaatcagaaccgggaactgtaccagcatcggcagacagccacccatcggactcacaccgtattggctgtacattcccatgacctcctgctgttttttcatcgcatcttcctgtttggggtatttcttattgatctcatcgattttcggtttcaacacacgcatcttggcagaagaaatatacgttttccaggtagcggggaatacgactgcttttacaatcaaggtcatcagtaacaatacaatacccatacttagaccccaaccggacaaccagtcgaagatattgatggtgaaccacttgttgacccagcgtatcaacggccaacccagataaaccaaacggttcagttcccatttctcatcacgtcccttatccagcgcagtcagcgtcttgtaatggttcggaccgaagtagaagaacatttgcgtaggctgtttacctgtcgggtcaaagctcgtgctcatctcggcggagtagtctttgatatatccgctgccttctctttccattttggagactagcttcgttttttcaaagtcagcgtctgcaatgaataccgaggagaagaattgatttttgaaagcaatccagtccagacgttcgggcacttctttttcatcatccttattggctgacaagtagtctgtgccatttcccagcattttataagtcagttcagacaaacggttctcatatacataacctttttcgatctggcgggcgcgttgtgcccattcgatgtctacatagttattgcttgctgccaatttatctgccatacctttagcatcgatgctgaagtctaccaggtaggtattgggatgcaatgcatacttgaagtctatataacttgcactgtcagctgataaacgcattgttacggtgctgtccgtacggttcacagtggtgaagtaatagtccttagtctgtattgtttcctttttattatagaaaaggaaattcatggaaacatcgtttccggtgaatagggttacaggagttttcttgtcctgttccatatactctttcaatacagcggagaatatggaaccgcctttggtgctgagggtcaactcagccacgtcgttctgaatcgtaataagcgaatctgttccttggcgggcattgaagaagagtgaagtggaatccacagtttccacatctttttcattggccaatgctgcatccgctttggctttcagcgcttcttcacgttgctgtaccagcgcaatggaatcataataacgctgctgtgcttccaattgctctttactggggcgactcagaaaactgaagccgactaacaaaattgctattaaaacaagacctgtaatggtgtttttatccatgaataatttctaatttacaattttataattattgaaataatcttatttctttgctttctccttctcctcgaaactttcgacagatgctttgatgaaagccacgaacaacggatggggattcagtaccgtactgctgtattccggatggaactgagttccgacaaaccacttcaacttcggtatttctacgatttccaccaaatcagattccggattgatacctacacatttcatgccggcagcttcgtattccgctttatactggttgttgaattcatagcgatgacggtggcgctcctggatgtgttccgttccataagcttcataagccttgctacctttctgcaagatacattcgtaggctcccagacgcattgttccacccatgtttgtgatggatttctgctcttccataatgtcgatgacattatgcggagtcttttcgttcatttcgcgtgaatctgcatcggtatatcccagcacgttgcgtgcgaattcaatggcgatacactgcattcccaggcaaataccgaaagtcggaatatcatgtgtgcgtgcgtatttgatagccacgaacttaccggaaataccacgttcaccgaatcccggacctatcaatacacctgccatgcctttcagtgcttccgctacattttcttctgtcagcttttcactgttcacaaagtctacggataccttacgatcattgtatgtaccagcttgtgacaaggcttcgcgaatagatttgtaagcatcctgcaagtcatatttgccgactaatgcaatgtgcagtggttctgtattttctgctttatggcgacgttcgaggaaagcacgccatggacccagtcccggtgtgtctcctacgggcagtcccattttcttcaatatcgtttcatccagtttctgagcctgcatcagaataggcacttcgtagatggtaggagcatcgatgctctgtactactgcgttttcatccacattacagaataatgctacttttttacgcaggttggtacccaattcgtgttctgtacgcaataccaatatatccggctgtatacctgcactctgcaattcttttacggagtgttgtgtcggcttggttttcaattcaccggctgccgtgagataaggtacataagtaaggtgcacgcacaaagcatcacgtcccaattcccacttcaactgacggatactttccagatacggcaatgattcgatatcacccaccgtaccaccgatttctgtaattacaaaatcgaatttatatttgttacccagcaacttcacgtttcgtttaatttcgtccgtgatgtgagggataacctgaatggtcttacctaaataatcaccacggcgctctttgtcgataacgcttttatagatacgtccggttgtgatgttattggctttagtagtctggatcccaagaaaacgttcgtaatgacctaagtcgaggtcagcttcatgtccgtctacagtcacataacattctccgtgttcgtaggggtttaaagtgcccgggtcaatattgatatacgggtcaaacttctgaatggttactttgtaacctcttgcttgtagcaatttaccaatggatgaggcgatgatgcctttacctaatgatgaggcaacgccaccggtgacgaaaatatactttgtttctcccacagctatactgttttaatattattgttttgtttggtcgatgtacacatttgtgtacctacctgtctacagatgagacttaaaaagcgcaaaattacaaaaaaaagaggaagtacataaagtttcggcgaaacaattctaaaaaaaagtgatgctgcaatgttattaagtccttatcatctccgtactatctccgtgttatctcagtactatcttcgtatcacctccgtgtcatctccgtatatatatgtttggacttgatacggacttggtacggggctggtacagagttgatatgaacttgttatcctatgtaccggctattgctaatcttttctttactcttttctatgttttctaaacattttaaattacttttgcagtcaaaacatagattttagggcgttatgaagaatagatacttatctttatgggcagttgctgcgcttttttcttcgtcgatagtggcgcagaattcagtaaagactgtcttaaaggccggagaggaaccggctgccgcacaagtggataccttgtcggatgtgatgaagcaatattttgtcttaaagttgaaaccagcgaatgatactctcaagttggatacagtatccatactgcatgagaagtattttggagtattaaactacctgaatgatccgtctactcctgaacgttacattcctgataatcccgattactaccgtctgtttcttaagccatttacatattataattctcctataaagcgtgtttcgacattgaattggaaatttgaaccttttgatacggttgaattgccagtgaaagaacttttgccatttgatgaagcccgctttacctcgaaggaacgcgcgaatgaaacagtggatcgtgctttgctctatctttatgttaatgatgatctgcataagattgtggcatgggaagatgatattatgcaggtgagggtattcaaggataatattgaaaaagaagcatcttcaaaaccttctgtgatgaaattattcactcaggaaagcatggcggaagtgaaagaagacgcggaagtggttatccgtaaacctaactggtgggtaacaggcggaaatggttctttgcagattactcagaattatatttcggataactggtataaaggaggtgagagtacgaattctgtactggccaacttacaactgtttgctaattacaatgaccgtgaaaagattcaatgggaaagtttgttggatgccaaattaggattttcttcagcgccctctgatgaatttcatgattatttggtcaacacggaccagcttcgtctatacagtaagttaggtgttcaggcagcgtctaattggtactatacgatttcgacggaattcaagacacagttctgtcatgggtataaagccaataaagagcctttggtatcggcatttctggctccggcagattggtctgccagtgtcggtatggactataagttgaagaagaaaaagtttaatttgtctgtttttatagctccgttgacgtggactatgcgttatgtgggtaataaggaagtgaatgaagtggactttggtttggagaagggtaagacggtgcgtcataattttggttcgcaggtacaacccactttgttctggcaaatcattccatccattacgttagattctcgtttggactatctgacaagttatgaatgggtgcgtattgaatgggaaaatacattcaactttgtgttgaaccgttatttgtcgaccaaactttatatacatgcccgttttgacgatagtagcaagcctacttcaggtgatagctattttcaggtaaaagaattattgagcttcggtattaattataaatggtaatcacgtaaagctgatataatgtaaaacaagtaaggctgcttttaggagaaaagcagccttacttgtttttaggaggaaaattcatagtatcattttgttatcttatacttatcaatggtgcaaagtgataccttagtctgtgttataaaacaggttttcttgcttgttctgtggaaaaagtgaagaaaaatagttaaaacggggaaaagtacgttggcgtacacataaaaaaagcgggtgaaagccttgcagttcacaaataatgcgtaaatttgccgcaatttgtaatgcacagtttgcaaaatggcagatattataaaacatcaaggtattgtggaaaacataaacagttctcatataaaggtgagaattgtccaaacgtcagcttgtgcggcatgtagtgcgaagggacattgtgcctcggctgataccaaagaaaaaataatcgatgtaactaccggcgatgcgtcttcctatcaggtgggtgaccgggtaatcgtttttggcgaactctctatgggaatgatggcggtgttgtgggcctttataatacctttctgtattctggtgatttctctctttgtatttatggctatctggagtgacgaacttctctctgcactttgttcgttagctcttcttattccttattattatatattgtggctaaataaaacacgtatgggaaagaaattttctttttcaataaggccaattgactaactcttgg

SEQ ID NO: 6425 - DNA, 37054 bp, Unknown
  gut microbiota DNA sequence
gcaccggcggataacatatccgccggaaccggacagctcggatttaaaatcctcatactcctgcaccggcggataacatatccgccggaaccggagaaccggaagaaccgggaaccgggggaaccgccaccgccccctcgatctttgacatactggaacaacgggaaaccggaaactttcactctatttcttccttctgcccttgtgcattaggaaggaatagagtacttttgtccgtaatcaaaaacatgcaccgatatggaagatatcaaacgaataccctacggcatctccagcttcaccgaagtagtggagcagaaccaatattatgtagacaagaccatgtacctgcccctgctggagcagcaacccagcaacctgttcctcgtccgcccccgccgcttcggtaagagcatcttcctgagtatgctgaaggcctattacgacctctcgcagaaggacaagttccaggcacgcttcggcaacctctggataggcagccgccccacacccctgcaaggcgtgtatcaggtgctgcacatggacttctcccgtgtaggcggcggagtgggcgaagaactcgcccgcaacttcaacgactattgctgcggaagcttggacaacttcgcctccatctaccagtcgtgctactatcccggattcgcccaagagatgaaagagcaaaccacctccacccaaaagctgaacttcctgaactggaaagcccagaacagcggagcccgcctctacctcatcatcgatgagtacgacaacttcaccaacaacgtgctcaacgagcaaggccacgagatataccacgccatcacccacgccaccggcttctaccgcgaagtgttcaagaagttcaagggcatgttcgagcgcatcttcatgatcggcgtcagccccgtcaccctcgacgacctcagcagcggcttcaacataggctggaacatctccatcgaaccccggttcaaccagatgctcggcttcagcgagaccgacgtccggggtatcctgcaatactacaaggatgccggccagcacaacggcgacatcgaccgcatgattgccgaaatgaaaccctggtacgacaactactgcttcgccgaagccagtctggaccgtgaccccaagatgttcaactgcgacatggtgttctactatctgcggaactatatcaaccagggccgctcaccaaaagaaatgatagaccccaacacccgcaccgactacgccaagatgaagaagctcatccagctcgatcatctggacggcgaccgccggggcgtgatgcaccgcatcgccgaggaaggacggatcacctccgaactcttcaccaccttccccgccgagcgaatcaccgacgccaaggtgttccccagcctgctcttctactacggcatgctcaccctcaccggcacacgcggagaacgacttgtgttgggcatccccaacaacaatgtgcgcaagcagtactacgaatacatgctcgaagaatatcagaaggctaacgagaagcatctcgacatggacagcttgggaatgatgttctacgatatggcctacgacggccactggcgtcccgccctcgaattcatcgcccaagcctacaaggacaactcctccgtgcgcagccagatagagggtgaacgaaacatccaaggcttcctgcaagcctacctcagcatcaactcctactacctcaccgcacccgagatggaactgaaccacggcttctgcgacctcttcctgatgcccgacctcatgaggtatcccgaagtgcagcacagctacatcctggaactgaaatacctctccgtcaaggactacgaagcccacgccgaagaccaatggcaggacgccgtaaggcaactccgcctctacaccgaagccccccgcgtcaggcagatgatacaggacacccggctgcactgcatcgtaatgcaattcagcggttgggagctggcaaggatggaagaaatataaccccacgcgtttcccgttgttccttacataaccatagtatataactctaattatagaacagatatgtatagaacaattttatccacagtgctcttggcactgaccttcctctgcacccaacccgtgcgaggacaagaaaaccaagaagcgcaagacagtcccaccccgcatccccgctgggcgctgagcaccaatctgctctcctgggccaccctcgccccccacctgcgagccgaactctacctcgcaaaccgctggagcctcgccgccgacgcctcctacggtatgtggaactacagccaccgcacccacgccacccccacttggagcgtcggcggcgagctgcgatactggctgcaaacccctcgatggggcttccgccgcacccacatcggcctcgcagtccgcggcggagagttcgacgacaccttcttcagccgtggctcccaaggagaagccctcctcgccggaattacagccggataccgcttctgcctccgcggacactggtacgtggatgccggcctcggcctgggatacatccacacccgatacgaccgctacctctggaactcacgcttcggcaaatacgaacagaacggaacccgcacccgaaacctcatgggactgacagacctgcacgtgagtatcatctacaatttatgatttataatttatgatttataattacgctatgaagtatttatatagctgcctgcttctgctcatggtccttggcctatgcagttgcgaacgcaaggagctcttcagccacgaagaactatacaccgcccctacgcacatcagcgccgactggcaaggacagtcggccaccgcctccgccctgcaaatacgcatcagcggcacgcatcaggacattcatctcgataccctcttcaccctggagtccgacgctaccgccactctggcactgctggaagccgaatatcacatcaacgcctggcacgacgccgcaaacgtaagcttcgacggctccctcttccacctctccatcggtgaggacgggctgctacgcgaaccctcacacttctgtgccgccgagagcaccgtgcccgtaaatccggaacaggaaaaccgcctctccctcaagatgtatccgcaaacaaggatgctgaaactctcactgaacgtggataaaggaagcccggaattgataaccggcatcgaagcaaccctgtccggagtggccgcagaacgaagcgtctccggaaccacaccccggaacagcaccaccggaaatatccgcctgaactttacacaagacggcaacaccctgtccgccggccaccgcctgctgggcatagcctccggagtcccccaggaactgactctcaccctacactactccgaaggtgaaccgcaaaccgaaacctacaatctgagtccactgctgactaccttcaaccggttcgacgtcagcggcagtacggatatgttcaccctcaccggaaaactctcgctataccaaagcgtggaagaagccggcatcagcggaagcatagaagactggacgccgggaacggaaaccgacatggatgcgaatggatatgcggacgacgcggataaagcggacgaacacgaacctattacacattaataattaataccaaaaagatatgaaaccccaacttcttctcctcgcagccctcgccctgctggcaagctgcaccaacaatgaaaatacccccgaaacagggaatgataccctcgtccccgtcaccctgaacgccggaatcgtacagacccgcgccaccaacaaccagtggaccgccggcgacgccatcggcctctgcctcttcgctaccggcactaacgaaaccgccgagcaagtattcaattaccgctacaacgccaccaccggcggggcaaacaccgccttctctcccgccaccacggcacataccgcctactaccccactaccggcgcccaagtagacctactcgcctactacccctacagcaccgccctctccaccgacggcagtctgtccctcgacgtcagcaaccagaagaaccttcccgccatcgacctgatgagcgccaccaccaccgccgacaagaaccaccccaacgccaccctatccttcacccaccacctgacgcgcctcgtcttcgccctcagcggaaaaggaaacgtcagcacggcacaactcgccggagccacactcaccatcagcggcatgaagacccaagcccgatacaacctgtacaccaacaccctggacgaagcaaccgacccggcaaccacaaccccgaagacagccaccccgcaggacatcaccgtccccctgaacgccgccggtacccagggcaccgccatcgtcctgccccgagaggcagctccgggcgtcagctacatcatcaccctgaaggacggaagccgcttcaccgcccagctcagcgacacccaggaactgaaagcaggaaccagcaacctgttccgcatctccctcaacccccagaatgtaaccatcacagccaccatcaccgactggacggaaatgcccgaaacagacctcgacacctcatccgtagaaataacaaccgccgccgatgccaccacggatttcccggcaggtagccacatcaccctctggcccggagaatccaccggtgacggcatacccttcaccctgaacgccaacgggcaatgggatacggaaacccctctctattgggaacaatacccggccgccaccaccaccttccacgccctgtatacgcccgaaaccaccccggcaggcaaccgcgcccccgatgtgatggccgccaccgcactcaccgagcgtttcgccccggtaagcctcgccttctcgcacctcatggcccaactgaacatagtgctgaaagccggaaaagggatgacacaaaccgaagttgaaaccgcctccgtcgtactgccacaagccatcgccacctacaccctggaaggtatcaccctcaccccgggcaccgaccgcaaagacatcaccctcaccggaagcgccgccgacaggcataccttgctcgtaccgcaaaccatcgacgcaggcaccccactgctcgccctcaccatcggccgacagtcctactccctgaacgccaccgaccggaacggcctgttcgaaagcggcaagagctacaccatcaacgtaaccgtcaatcaaacagaaatcaacgccaccgtcagtatcaatccctggcaggaaggtacgaacagcgaaggagacgcagggatggaaatttgattaggaattaaaaacaccgtacagaagtttatgagccatactatttttatttatgcaagcattgtcttagtagtgcttatcattttaggcgtcgtatttacgattattactatgcgccgtttgcacagtacacaaaaacagttgcaaaaacaggataaagcaagtaccaaggagaaaaaatacgactggtatgggcactaatcatttcatattcatacaagaattacctcctgagcaaaatattgaaactcagggggcattcgattattccagattaaaacctgtataaaaatactgttgtaaaacacctattcccgaagtacaccgaaacacggaaatcgctacattgcgacatgtttaacccccaattaaaattgcaaggttatgattatcggagtacctaaggaaatcaaaaacaacgagaaccgtgtaggaatgacccctgccggagtagccgagttggtgaaaagaggtcatacagtgtatgtacaggcatctgccggtgcaaacagcggttttcctgatgaagagtacattgcagtgggtgcgaaaatgctgccaaccatcgaagctacgtatgccgcagctgaaatgattgtgaaggtgaaagaacctatcgcccccgagtacaaactgattaaaaagggtcaagtggtatttacctatttccactttgccgccgataaaatacttaccgaagccatgatagaaagcggtggtatctgcatcgcttacgaaaccgtagagaaagaagaccactccctcccattgctcacccccatgagtgaagtggccggacgcatggctacacaggaaggtgcccgtttcctggaaaagccgcaaggcggaaaagggaaattactgggtggcgtacccggtgtccgtcctgcacgtgtattaattctgggtggtggtgtagtaggaaccaatgctgcacagatggccgccggaatgggtgcggaagtattaatcaccgatattaatctgacgcgcctgcgctacctcagtgaagtgttaccaaaaaatgtaaaaactctatattcttctatgcataacatcaagatggaattgcccaacatagacctcgtgattggttccgtactgattccgggagataaagcgccacatctgattaccaaagatatgctgaagatgatgaaaccgggaaccgttctcgtagatgttgccatagatcagggcggatgctttgaaacctctcatcctaccacccacagcgaaccgacgtatgtagtggatgacatcgtgcactatgcggtagccaatattccgggagcagtaccattcacttcaactatggcactgacgaactccacactaccttataccgtggcattggcagacaaaggctggcaaaaagcatgtaaagacgatcccgctctggcactgggactgaacgtagtggaaggtaaagttacttataaagctgtagcggatgtattcggactggaatatgaaccgatagaactataacaagtagctataaatacaaagaaaaggagttccataaaaacggaactccttttctttgtataaatgatcaattacaatttatccctgaacagaaaatccgtcttcctcctatacacccatatcaatgcaagtatcgtaatgcaaaggttaaagataaatgggaactcctgcgaacgtacatgaaacaatgattggaagaaatctacgataaacggacaaagcagcacagccaagtagttcattgccatcacaaaagccagtgccagcgtggttttctggggaacagccgtatccaccgttttatcatagatcaacggttggataacaccatagcccaatcctaccagtatgcagcccggtatgatcagccattctttgggagaaatccatatcagtgccaaccccagtgcaatacacagcaggctgtaaaacttcgtcttttccttcagatactttacaacatgccccagaaagaaaccgggtgccatgatagcaaggaagaagagagaaatcatcattcccgagttcccactggaaaagtgatgttcctccatcaggaatggaaggttgaacgtcacgatcaatacaatataagtggtaagcccatagaaaagcatcagtttcagcagatgacggacatgaataccatacttgccggggatagcgggagcagccgtttctgccgatgaagaagtatcggcaggagatttatccgatgaagtgacttgtgcttcaccatccgtattttcgtctttcagatggatggtgagtatgatggctaccaaaggtagtaaatagaccaggaaaggcagatgccagttcacttctgccagatagccggtaacagcggttgccaccaccagcgtaacatttgtaatggcggaactgtatccaaattgcttcacccggtaggttcccgtgaaataacgggaaatcaatccggtagaaagcggaataatcagtcccgcaccaattcccagcagggcgctgacagctattaattgccacatttttgtggaaaacaggtacagcaccccgctcgcggcgaacatccagagccccgcgcgtaacagacggacaaagtcgcgtttctcagccaacttgcccgctaacaaaataaaaggtataatcaataacgacggtaaagaactaagcatctgaatatccagttccgaagcatccggaaaagtagtggaaagctgccccaaaataggagaaacagccaatcccggcaaagaggtcaatgcagaaatagaccagatgccgatcaatgtaataagaggaatggttccccggccggtattgattttcatatacacatatatatttatagggtttgaaatagtgcaagagaaacaattatggttatagaaagttcaaaaaaggaggaaaggataaataatcatttaacggagagagaatgtcagtcgggagtatcttaaactctcctcctcggaggaggaggggaattgagatagtcagaatatcaataactacactcctaaattatcatttaccttccctttaataaacgccaaaagatgtaaaacgtcggaactttcctctgcaaacgccgttgttctgggaaattcgacggggaaaatcctcgccgcctaaacctaaactaaaatattagtaaaatggaagatgtaaatttcagaaaaggtgatgccaaaacagaagtgtttggatcaaacagaatgttgcaaccctctccggtagagaagatccctgatggacctactactcccgagattgcttatcagatggtaaaagacgaaactttcgctcaaactcaaccccgtctgaacctggccactttcgtcaccacttatatggacgattacgccaccaagctgatgaacgaggcgatcaacattaactacattgacgaaacggaatatccccgtatcgccgtgatgaacggaaaatgtatcaacatcgtagcaaacctgtggaactctccagaaaaagatacttggaaaacaggtgcgctggccattggttcaagtgaagcgtgtatgttgggtggcgtagcagcttggctgcgttggcgtaaaaaacgccaggctcaaggcaaacctttcgataaacctaatttcgttatctcaacaggtttccaggtagtatgggaaaagttcgcacagttgtggcagattgaaatgcgtgaagtacctttgacccttgacaagactactcttgatccggaagaagccttaaagatgtgtgatgaaaacaccatttgtatcgtacctattcagggtgtaacatggaccggactgaacgatgacgtagaagcactggacaaagctcttgatgcttacaacgccaagaccggttacgatattcctatccatgtagatgctgccagtggtggtttcatcctgccgttcctctatcctgaaacgaaatgggacttccgtttgaagtgggttctttctatcagtgtcagcggacataaattcggtctcgtttatccgggtctgggttgggtttgctggaaaggtaaagaatatctgcccgaagaaatgtcattcagcgtaaactatctgggtgcaaacattactcaggtgggattgaacttctcccgtcctgctgctcaaatcctgggtcagtactaccaattcattcgcttaggattccagggatacaaagaggtacagtataactcactgaccatcgcgaagtatatccatgatgaaatcgctaagatggaaccgttcgtcaactattcagaagaagtggtgaacccgttgttcatctggtacatgaaaccggaatacgccaagaatgctaaatggacgttgtacgatcttcaggataaactgtcgcaacatggttggatggtaccggcttataccctaccttctaaactggacaactacgtcgtaatgcgtgtggtagtacgccagggcttcagccgcgacatggcagacatgttgctgggcgacatcaagaatgccatcactgaactggaaaaattggattatcctactcctacccgcatggctcaggaaaagaacttgccagtagaagctaaagtgttcaatcacggttgtaaagctcacaaagcagcgaaataattaagggaaccaatcaacaaggggacaagccaactcgtccccttgtcaattctaaaaagaaaacttatggataaaaagatttcaatctctcaactaaaagaggttgcccaggaagcctatgaacaggtgaagggtaacaccgggggaaaaaatgccgattacatcccctaccttgccaacatcgacaagaatctgttcggcatcagcatctgtctgatgaacggacaaaccattaatataggtgacactgactaccgtttcggtatagaatctgtttccaaagtacatacagccatcctcatcctccgtcaatacggagcacagaaggtgctggatatgattggtgcagatgctacaggactacctttcaactcaatcatcgccattttgctggagaatgatcacccttctaccccattggtaaatgcaggtgccatctcagcatgttccatggttgagcctgtgggcaattcagataagaaatgggaagctatcgttcagaatattactgatttgtgcggttcagctccacaattgattgatgagctgtataagtcggaaacggctacgaacttcaacaaccgctctattgcatggttactgaagaactacaaccgtatctacgataatccggatatggcactcgacctgtacactcgtcaatgctcattaggtatcactgccggacaactggcgattgctgccggaaccatcgccaacagtggtgtaaaccctgtcaccaagaaagaagtgtttgaagcttcattagctccgaagattacttccatgatttctaccgtaggtttctacgaacattcaggtgactggatgtacactgccggtatacctgccaagagtggtgtaggtggtggagttatgtctgtactgcccggtgtattcggcgcagctgcatttgcacctcctttggacgaagcaggaaattctgttaaatcacagctcgccatcaagtatatcatgaacaaattaggtttgggcgtgttcaatggtgaccgtgtgactattatagaataagacaatctctctttttcataaataaaaggcgtcgtcagtccggagaggataggcggcgcctgtacttatatatactcaatatacggcttgtaaactatagaagctatcagctaaattaattcatttcttttcggttatgaattcattcaccacagattacacagattcacacagatttattaatctaataatcagtaaaatagaatctgtgtaatctgtggtgagtcttattcattcctataccgatatgcattatatagaagtgaactgaagaatataacttcttgtgtgatagtctacttggtgttccactaagatcagtcgtagtggaacactagttcagtcgtagtggaacactagttcagtcgtagtgggaagtggcttcagtcgtagtgggaagtacgttcagtcctaatgggaatatagctcattaccgcatcaatataaattaatacctccagcacataaccatcgccatagcgcagcactctaccgcgcagccctccggcataggcacaggtgcgtaagcgtaggcactgtcaggcgcaggtaaggggcgatctgtctgagcgaagcgagttcgagccccgtctgcgaatgacagtgtcggagtagcaccggagacgtaaccggggtccctttctttttggtatctttttctttcgggacaagccgaaagaaaaagtacacacacacaacattactttatatcccctccctgcaactccttataatactcttgtttctcctgattcctcttttgcaccagactcgtcacatacaccgtaaatatcggaaacatcatcatccccaatgctgccagcagaactgacagtacacgccccgtcaccgtcacagcaataatattggaaccaaccgtcgttacatccataaacgcccaccacaaagcatccccatagcctgtaactaatgtattcaccccatgctccataacatagaaagccagactggagaaataaaccgtagcaagcaaagtcgtcaggtaagtaacaaacagaccggatgccttattatacgtcaaccaacctaccacaatggccaacgcataaccaccgcgcactaaaggaataaaacgcaataagtaagtgatttcctctgaaaacgtccatccggcccaggaaataatgctttggtaagggatagctaccagaagaaaaacgaagtgagtagcaaaataacgtcctttatgctttgctaaaaaccactccaaaataaagtccagcaaaaacaggatgcacacggcaaactgaaccttcataaataccgtctgagtatagaaaggaatacccttgaatgtatctactgaaatactaaccactaaaaataacgaaagtaacagaatcacaatgtgtaagacaccataaattcccttctctcgtaatgcaaattctgaaagagccattttcataataatacctattatttattctgatttaatatattattgatttctgcccgattgccctaaaacgtcttgcacaagacatttgtttaagtgttaatttaccaactttcactttatccctgaaaacaactccaccgggtcgttgttatagagactgattttaaaacatatttttcacctaaaaccttaacttatggcaaatattaaacaaacagtgaagctgggtgtgttcaccctcgcaatcatgaatgtaacggcagtagtatccctacgtggactacctgccgaggccgtgtacggaatgagttcggccttttactatttatttgcagctatcgtattccttataccgacgtcacttgtcgctgcggaattggctgcgatgttccaggacaaacaaggtggtgtgttccgctgggtaggagaagcctacggtaagcggctcggtttccttgctatctgggtgcaatggattgagagtactatctggtaccctaccgtattgacattcggtgctgtatccatcgccttcatcggaatgaacgacgcacacgatatgtcgttggcaagtaacaagtactacacactcgccgtagtgctcatcatctactggctcgccactttcatctcattgaaaggtatgggatgggtaggtaaggtagccaaagtcggcggtatggttggtaccattatcccggcagccttgctgattatcctggggatcatttatctggctacaggcggacactccaatctggacttccacagcagcttcttccccgatctgacgaacttcgacaacgtcgtactcgccgcaagtatcttcctcttttatgccggtatggaaatgggcggtatccacgttaaggatatagaaaacccctccaagaattatccgaaagcagtatttatcggtgcagctatcacagttatcattttcgtactgggtactttcgcactgggtgttatcattccggccaaagacatcagtctgacacaaagcttgctggttggtttcgacaattacttcaagtacatccatgcttcctggttatcaccgatcatcgctattgctcttgcattcggtgtgctggcaggtgtattgacttgggttgccggtccgtccaaaggtatttttgccgtaggtaaggcaggttacatgcccccgttcttccagaagacaaacaaactgggtgtacagaaaaacatcctgttcgtacaaggtggtgctgtaacagtattgagcctcttgttcgtagtaatgccttccgtacagagtttctatcagatcctgtcacagttgacagtagttctttaccttatcatgtatatgttgatgtttacaggagctatcgtattgcgttacaagatgaagaagttgaaccgtccgttccgtatcggtaagggtggtaatggattgatgtggttcatcggcggactcggtttctgtggttctctgttggcattcatcctgagctttatcccgcccagccagatttcaacgggtagcaatacagtttggttctccgtattgattatcggtgccatcgttgttgtggcagctccgttcatcatttatgcttgcaagaaaccgacttgggttgatccgaatactaacttcgaacccttccattgggaagaacaaccaaaagttgcagcaaacgcagcaacagccactgcaacagcagcaggcacaacaagcacagctacggcaacaccaactgcaaatcctaccgtaaatccaactagtacaacaaataattccggcacacctaaatcatagggatacaaccggaaaacataaaaatgggactgtacagattgacgtacagccccattttttattttggacggtaagaaagtgaaatgactctatttcattccccctattcaaaaaaattcgtcctatgagatgaatctttttgacccacgagacatttatttttgcctcatgatacaaattttttcatctcatgggacgaatttcatcgtctcatatagctaaattcttattcctttagcgcatcccacgctcttctatacccttctgtcagttcctgcatcacctcagcaaccgtctctatctgtttaccataaagtaatgcagaagcctgaccaatctccagttctccttcttccagatctccatagaaaatccctttcttggcacgtccatgagccagaagaatacgaagttcatcttgtgtagcccccacggcttcggctgcctctacagcgtcacggaaattattccgcaccaaacgtaccggagcaagcttcttcaacaataaccgggtatccccctcctgcaaacgcaaacaatattccttgaaatattcatgagctgaactttcctgagtcaatgcaaaacgcgtacctatttgtactccttctgctcccaacacccgtgcagcaagcatagcctcacccgtagcaattcctccagcagcaatcaatggtaaggtagtagcagcacgcacggcaggcatcaggcacaaagtggtagtttcttcccttccgttatgcccaccggcctcgaagccctcagcaacaacagcatccacacccgcctcttcggctttcatcgcaaagcgggaagaactgaccacatgcaccactgtcactccccgctctttcagccatcccgtccatttggcagggcttccggcggaagtgaaaactatattgactccttcctctaccactatctgcatgatttcttcaatctgcggatacatcaatggaatattgactccaaaaggattatgtgtagcagcatggcatttacggatatgctcacgtaacgtttcaggatgcatggaacctgccccaagcaagcccagtccacccgcattacttactgccgacgccaagcgccagccactgcaccaaaccataccaccttggattattggatatcgaattccgaaaagggaagtaattctgttcatagtttttccgtttagggattattaggaagaaacaagaaaaaaggatgaaaggttcggaagaaaaggcgaattgtaataaaaaacacacccggaaatacgaatttacaacatacatatcaccggatgttcaaattatacaaatccttaattcttaatcgtcttgacaggttctttaccccgtaccgttaccgagtctccatatgcacgtaacacttccagcgtacgggcacggcgcttacgccccttgacgttccagaattctttggtaaaaggtgccataaaatcaccggaaaatcctaaaccgccactagcaccctgccagctacctacagccatattattagcccgttctgtcattcggtagcgcatcccggttgcctctatttcatccatacttttacggacacccttttcgaaaggcgtctttgcccaatcggaataaatgcgaagtattttaagttcatagaaaggatcccctcgccacgtgtccttatctattttaatcttcttctgatacaccgggtcccaattgtacttcgtagttgcagtatacgggcgcaaggtaagaacaactttcttcttcggtgtatttggtatttcgggaagtgttgtgttgaaatccagccattgtttctccattgatatctgctgtttacccagaggttcctgtactcccatctctttcagaacttccggattcagcttaatctctccttctccatccagcagacggcgcaatcgcagagagtcctgaggtgtccagttctgagcgcaaacgggaaggactactactaaaagcagtccgattatagtgcaatattttctcatttatttattttcttaccaccacatatatccgcttccacaaagcggttcatcataacaagggtctatggtccacatcgtacgggggtatttgcggttttcccaccagcggcgataacgggcggaagcatccagaacttcatcatccgataagaagtaaatgccttcataattctctgcatccacatgtaccattttgcaccccatcgaagcattctgccctaaacggattgtttctactgtccacaaaatacactcacctaaacgaagcttgccacctgcggaataagaaaccggagccaatgggaaagaaggaattaccgtcaaatcttcggcatacttcaacaagtcccctatgtcatcaacagtaaaccggggaatagtgttcagaccttccggactttcgacagagtattttccagcttttagttgcttgacgaataaatccacgtcaggattattgtagtccaacgtttcttccgtacatgatacaaaagaaagagaaaagaagaatatcaaaatggccattacggcacgtatattagaaattgctttcattgttgcattgtattaaggttaatatgtcatacgaacaccgcaaagtagattaaggttcgttggacgttccgttcgcagcgtttttgtttgcgaatccgtatcaaaatgatgagataccgtaggctctgcaaacagagcaatccggtcgttcaacttataacggactcccagacctgccgcaatggaaagttgtataggctctgctccaaaaccattgtcttcagctccggctatgcatttctcggcagcaccacccaatgtagcgtaaaagtctactttagaattgcttgccagcaccgcattcagttttaccggaacagccagtgtgtgtatcgcatggtctccgtcaagacggttgtattgcaaacctgcctccagagaaaaatgtttgttcaaatgacgctcagcagaaaaccctgcggtgaacggtatcccgaagtccccctttggcaacgctgtacctatacttgctttgaaagcccattttttagcacaaccacccgcattggtaatggggagcgccttatcggaatctgagccaagctctgaatttgtggcagcgggatcagtagccgtggcacgatgattattttcattccttgatgaagctgtttgaccatacattccgttaccttggtggtgattgccatatacgcgttgggaaattgtaatggagacagtgactgatacagtctcttcatcatcaccattcgcagcaagtatgcctccggatgatactggtacaggattcttatgaccaggattttgcgctgtaggtttagtctcatgaatagaggggaacttttcctgcaccacatctccattcaagttaccttccggtgtcagtgtagccaccttggtgaatgcttcctgaatctcatctttcggagagaagtaccagaatgcagcggaagcagctccaagcactaatactacagaagccgccgcagccacccggtagaagcgtggagtgaggacagaacgtttagtagctgcagaagtattggttgcatcggtttcaactcttgacaggtcgcctttcagctcctcccaaaagccatcccgcaccgtcatctctgcaccagagaggcgactgcggaacaaaccggttatttcatcatttcctttcatactctgtatattctttaattctttttgctaacaaattcttggcgcgatgcagttgcgaggtggatgaatgtaccttaatcccaagcatttccgctatctccttgtgtgatttctcttcaaacacatacaagttgaaaacggttcggcatccatcgggtaattctgccacaaatgccatcaactgctgttcggagaggcggctaccgctatcggctatacttgcttcgtcgggtatgtcaggcaattgttcttcgttcaccaccagttgggtgatgcgtttctgctttcgcagataatctattgcctgtgtcaccattactcttgtcacccacgttgccaatgcacattcgccccggaaagtgaaatgggtaaagattttgatgaacccatcgtgcagtacgtcatgcgcggcatcttcatcgcccgtatagcggtagcataccgcaagcatctgcttggaataaagggtatacaattccttacgtgcggaatcctttcctgcccggcagccctctatcagttctatttcattttccaatgtcagtgctattttttacggacgcctcttcgcgtcgtttgttagttagacgcagctttccgtagaatgctgcaatgttatatctaaaaagaagttaaagattggagattatttatacttggctttcaaagtctgtatctgcttgtcaagcatttcatccagttcatcaaattcttcccagtataagaaaccgggtaccattatgacaaaattgacaaattgatcattacttataagaaatgagatttgatccagcaggttattgttagttttcaaagcaaacttaaaattcctggacatggcaagtttcataattacatccgtttttgctgcatagtaatcactgacatctttcttccgccttcccaactcaaaataggtttgcaatacatcctgcaacaaacgcttgtcagaaatatactgcatcaacgaagaacctttcaagacatccaatgcatcggttttataagagagttcactcatattattgaaaagcttgtcatacttacttaaagtatccgccggtattcccgatatatccattttatgctctattagcaaagaactcatgttcctgtctatatccaacaagtgctttatattacgcagttcctttctgttatactccaattcttccgccaccagttgcatcgcggcccgcacctctttttgacgactatgctccgtaaccttatcgcttccccaaaaggtaacgataatacctgccgccacaatactgaactgacggaaatagtctcccaatctccagcctttaatcgtagactttatcttatctatatttcccataagtatttatcttgaaccatatttctgttcaatggtttgaatcatcttatcaatcttttgctctatacgttcttgataaccaggaataaaatatccctgtggaattttcaaaaagtttcgcaacttcctatctgaaagatatatttcccatgcttcccattttccctcattaaccgtatttgtctgttcatcagtcaaagtcaaataaaagggaatagccgcatcttccttcatatcataatacccattcattgatagtttaaatccttctaatgcttcataaacatcaatcaatgaaagcaaaaactctttatcggatattttctgcatcagcatagagttcttaagtatgtccagcgcattccgggtataatagaaactacgaatctgccctatagaataacgaaattgcttcagcgaatcttccggtatcagccgaacattcatatcatgttccaccaacaaagcagaaaggcgctcatctgtgctgaattcagacacaataccttcaaagttcttccgattacttttcagttcatccttaatcagcaacatagtagatttaatatccgcttgttccgaacatctggtgaccagttcactaccaacgaaggttatcagcacaccgatcacaacaatagaagtttgccgtatatactcgccaggcttccaatttctgatagtagcttttaccctattccaatctatcttttccatactttccaagtatctatgaaaaaagcctctcattaagattgcaatatgatggcaaacttatgagaggcttcttgctattttctaaatacagcctttcgcctttgtcaacatgctttaaaactcatatctaatccttttacagaatgggtcagagcacctacagagataaagtctacgccacattcggcataatcgcgcagcgtatcgaaagtgataccacccgaagactcggtttcataacgaccgcctaccatatccacagccttctttgtcatttcaggcgtgaagttatcaaacatgatgcggtctatgccaccaagatcaagcacttgtttcaattcatcgaagttacgtacttcaatctctatcttgaggtctttacctttttccttgcaatattctttagcacgattgatagccttgtcgatgcctccggcaaaatccacatgattgtctttcagcaaaatcatgtcgaacagtccgatacgatgatttacaccaccgccaatctttacagccatcttctcaaggatacgcataccgggagtagtcttacgggtatcgagcacacgcgtattcgtacctttcagtttctcggcatatttatgcgtcatagtagcaatgccactcatgcgttgcataatgttcagcatcaggcgttctgtctgcaacagagactgcaccttgccttccactaccattgctatatcgcccggcttcacctcagctccatcattgatgaagacttctaccttcattgtagggtcgaaacgacggaacacttctttggcaacttcgataccagccagaatacccggctctttaatcaaaagtttggatttacccattgccgtagcgggaatacacgaaagggtggtatgatctccgtcacctatatcttctgcaaaggcgagatctatcagcctgtcaatcagttcttcttccttattcattcgttttatctattcttatttgatgtataacatatttgttctgtacttttctgaagaaacaattcactcgaaagtttccatttgcggttcccaaagtgccgatgatgaaacttgattcatcccgctttccttcgtgattcacattgaagctactgactttgttctcggcaaaaaaattagccatagttccttctgccgtttgcttgtcagcattggtcgtgcgattatggataatcagatccaccttatcacccagatacctgtttagttcctgagagtttcccttcttgaaggccacaaccacccccacaggtacgtcctgagcaaagatcgaggacacccataagaagaggcaggtcaacaataaaactactcgttttttcataatcacaagtattaatgatacgcaaaggtaagcatttattgtaaaatacaataaaaaagcgctaattttgtgcacaaatcagaatgtaagcagcatgaaaacaacattactcgtcgtaggaagaactgtagaacagcactttataactgccattaacgactatgtacagcgtactaaacgctacttatccttcgaaatggaagttatcccggaattgaagaatacgaaaagtctttcaatggaagttcagaaagaaaaagaaggggaattgatatgcaaggcattccagccgggcgacgtgattgtattgctggacgaagggggaaaagaaatgcgctccatagagttcgcggactatatgaagcgcaagatgaacaccgtaaataaacggcttgtatttgttatcggtggaccgtatggtttctcacccaaagtatatcaggcagcacatgagaaaatgtccctttctaaaatgactttctcgcatcagatggtgcggctgatttttgtagagcagttataccgggccatgaatatactcaatggcggtccttaccatcacgaataacgatcttaattaagatcttgacacctggaatcctgttcccgacaacgccatttctacaaatcgtgcgcgagggttcggtacatcctgcgtcagtatctcacggatgcgcaatgcagcctgcggatctttcgccaccatatacaaataacctcccccacctgcacccggcaatttatatcccagtgtgtagtccttaatcttattgataattttttctaccgccggaggattagtaccgcaatccagagcttggttctgcatccacgttttaccaatcaatgcgccataggtttcaaagtcgttcctttgaatggtttctgccatatccaatgcatgcgctttcatattttccaatatagccaaatgcgcagatgagtttaggaacatggagcgcacaatctctgccaggatacctttagcagtacgtgtaattcccgtataatataataggtggcagtcacgatattcaggatgcgtaaagagatgttcaggcaaccagtgtattaacggattctgtacaaacccggtttctgtttgcaacagtttgatgccttgtaacactccgccatactgatcttgccaaccaccgcccgttgttagtaactgttccaaagcaagtgtacgacggcatatttcattcttatcccacatcaagccacagaaatcgctcaaagagcctaaaaccgtagaagctaatatagaactggttcccaagcccgagcctgcaggaatagcagacaataaagtaatctctatacctgtgccgaatgcctgcaactgtttctccaacgaaggataaaccacttctgaaaacgccggaccaaaaccagccaatgtcaacgctgctttcggaatagagaaaggagaacctatcttacagtaatcctgcaattcctcgaaagtattcactacttccatcgctcccatatcaatagaacgcaacacaacgcgatactctttgcaaggtttcacataaacctgcaaaggaggttgtccattcagttcaatcgccagattcactacattcccaccggcaaaaagagaatatggcggagtatccgtccaaccacctgcaacatcaatacgtacgggactgcgcccccaaacaatctgatcgctgtatacattcagatatgggctgcttttcttttcatataaatcagaaagtaatccttcgcgcagtaatccgaaagcctctttttcatcattctgaaagtcttttccgttcagtttatctatctgagcccgaagcatccgattatgaatacgctgcatctgaggtgcatcagccggcaacacatccggtttatctatcttcaaacaatggaaatcctcggcaacatcagccaaatccaactgatagaagacactcttctcataattgcgtgccagcaattcccaattacctttccggaaactctcgcgctgggcatataattgacgtaaatcagctttcgctgaaatttcatcggcagaaagacgttgactgttcagccagatttccttaccttctgtcaattccggctccgaagtcatccagcgaagtactgcgcccatctgctcaacaccttctaccacagggaagattccggcagcctgtaagtcatcttttcttccagttacatcatccggagtcagtccacgctccgctaaccaatcagggaaggaaatccccagatacaaagttttttcatcccggatatctcctttagatacatcatcgaaaccatacggacgaactgcccaatgcttctctgcaagaggcacaatatctatacaaactccatccggtaattctaacgtccagtcattttccggtactcccgtaatgatttgccgggaacctatcttccatgatgtaccaacaaagctattttcaatccaaaggttatcattattggaagaaagagagatacctacttctgcattctgtacaaatattgcaggattgggctttactttccggtgcatgatctgacgctgatcgtacaccctattttgtaaagtaacagttgaggaaagtagttcacgactcgtgccgtagtggtagaattctccaccgggtaatggcaatatagctacagacaacctattcaactcatcatcagtaatgcgtggatgattaccaagggataaaccgaaatctgaatacaagtcatagtactttaaatcagaacccgagccatctttcagcgaacgcttcatcaataactctacagcccgatcactcagtaaccagattcctatatccatcaggaagagatgagtcttggaaagattctccagttcctgcaatgacggtttctgcaacataaaatccaatgcttccggttgtttccggtcagaaacaaacactccatgatgtgtcgctaataccggatctacccaaagtccgtaacataccacatctgcatccggtatttcctgcaaaggtttctcagcacgaatatacacatctccactcgcaatcaaagtacgcagtttttccggtgcccgttccatgattttctcataaagtggaacttgcaaagacaataaattctgtcccaacttctgtccacgtgcccagcgaaatacaggtatcggagttaatattttcccggagggagcgtatccagggaggcggcggctttgtccaccggcatgcagcagaatacgtttctctgttgagtgttctgtttgttggtttctataccattcccgcagaagccaagtggttccaccacccgaccccagtttcatccctatagggtcagatgtacaaaaccattccgtacggtctacattttccaattcatagaatgccgacacaagattaggcggcaaggataataatttttgcatattcaattgctataatgcttaatatattagctgcaaattaaagcaatcttaagcaaaatccacgaaaaattttaatatttttgaagatggagataaaattatctccatcttctatttttccagcaaacccactatttgttgtaagagttcaggcatctcatgagtagtacttttgatcgcaatgatttgttcttttccttctgcagtcaatgaaaaatgcatttggcgcttatccactttaccaataatacgggctattaacttcttttcttcgacagaacgtatcaacttggaagtattagaacaagttaatcccaaggcttctgctatttccccggaagtaagccggggagtattcagaagtgtacagagcaacattccttcattcagcgaaagattgtattgctgcataaattgggtttcaaactcagctatcgcccggtaaacatcacgtattttacataagtcttccatatatttttcttctttatttgttaaataacaaataactatatgaaaaggttgacattggctttatctgcgcgctccatgtaagttgcaacaccaccgatagttacctcatccaacaactcttcacgacagattcccatcatgtccatagacatctgacaggctataaattccactccttgagcaagcgcctgcgaacgaagtgattccaaagaatctacccctttacgcttcattaaaaagcgcatcatgcgacttcccataccgaacatattcatctgagacaatttcagtttcaaagaactggaaggaagcatcataccgaacatcctgccgaaaatatctttctttactttcggtttctgcacttttttcaaaacatttaatccccagaaagtgaaaaataccgtaactttttgcccggttgccgcagccccgtttgccaatacaaaagtagctaaagctttatccaaatcatcactaaaaaggatcaatgtttttcccctacccgctgctacagttccggtggaagaagggcagaccacattcgaattacctttttctataactaccgtatagcgtcctttatcctcatggctccccaccaaacgattccccgtcgtatcacaccaggcagaagcatcacgtgcaaatccggcatcagttgccacaatctccacctgttctcccggttcaagagtatccattgccttcttcacttgcatgataggtcccggacattgtaaaccacaggcattgattttcaatggttctttagatgaacctccagctgataatatagaatcggattgcacaacagttcccgaagtttcagtagagccaaaagttacgcgagcatcaactgaagcagccgctatagaaggtaccggtaccggagcaaccgcagcagaatacagtttgtatcctcccgaaagattacgcacattcttatatccatttcccatcaggatacgctgtgccagatatccacgcaaacctacagcacaaaacaatacaatgggcttgtcagtaggaacttcgagcatacgctctcttaaatcatccaacggaatattaattgctcccggaatagttccaaaagagaattcttcagccgtacgggtatctattaacattacttcattcttatgctgtaccagttctcgccaagttacgacaggcattgcaccactgataatattagaagcaacatatccggcaatagcaataggatcttttgcagaagaaaacggaggagcgtaagtatgctccgtttccatcaagtcatataccgttccaccacgcttgatcaagccggcaatctggtcaatacgtttgtccacaccctcataaccaataccctgcgcgccatataattttcccgtaacaggatgaaatgttaattttaaagtcaagggtaatgcatccggatagtaccctgcatgagaagacgaatgagtaacagaactttgatattccatctcccattgtttcagacgcttagcagcaagtcccgtagaagcaaccgtcatatcaaatacttttgcgatggaagtaccgatagcaccttcgtaagcaaccttattaccaaataccatattatcagccacaatacgtccctgacgattagccggatttgccagataattcaaccacggtttcccggtcaatggatgcggatattcaatagcatcccctacagcataaatatcttttgcagaagtttccagatattcatttacccagataccacctgcttcacctatcttcagtccggcttgtttagccaaagccgttgcagggcgcactccgatagaaagcaataccatatctgccggaatcgtttttccacttttcaaaaagacggtaataccttgttctgtacgctggaaatgagttactccttcttccagatagagcgacacacctttctgtatcaaatgttgatgaacaggcgcagccatcgaaaaatcaataggcgccattacttgattacccatttccacaacagatacagcaactccggcatgatacaaattttctgccatctccagtccaataaagcctgcacctactacaaccgctcgctttacggagttttccgtaagataagactttatatgatcggtatcttcaacattacggagagtgaaaattccttcagaatcgataccttccagtggtggtcgaacaggtgtagcacccggagacaacaaaagtttatcataggtttcttcatattcgcgaccgtctgcagtgcgaacagtaatcgttttatctttaggatgaatagcgataacttcattctccacacgtacatctacacgaaagcgttggccgaaagaagtcggcgtttgcaccagcaatttctcacgctctgcgatgacaccacctatataataaggcaagccgcaatttgcatacgaaatgtatttccctttctcaaataaaagaatatcagatttctcatcaactcttcttaaacgtgctgccgccgtagctcccccggcaacacctccaataattatatacttcatacttctttattttagttttgatagtgcaaagaaaagaatattttctaaaacaaaataatttccaatggaaaataatgttaaatcacaatacaacaacaaaatagcgcacattaagtccattagaaacatactacatattcaaagagagaaagttcatatacccttaatttaggcgcataagaagagacacagacatctggtttgaggctaatttacaggctcaaacaccacacttatatattaaaaagaaaatattaccagcctaatgcggcaaagccagcggatgtataccactcagtagagcgatatgctttatcagtagataaattgactcctggaataaattgagaaaccccataagtatcatccattaaaaacacgccaccttgatctgaaaaatttgtttttgtagtattccaatatacaatagccgcatcataagccgatttccaagtatcaaaaacatcatcatcatttaccaaatgacgcatcataccgaccaaatcataatacataggattagaacgcttgtcataggaaaaaattttattgcgcaaccctacattatctataacctcattaggtaatgattgcttagtaacacttgacaagtgttccaactcagaactttttatgacagaaattgacgctcctgccacccagacatttcctgctttccaaggattacgtgaaccgatcacaaggctttcattataattatcagcataagtactgatatatgcctcacctattgcctgagcaaaaccatcagcgtaaaacatggctggcacaagcttgtcataaggtgcaccgggggccggtatctcagtaggagaagctagaaaataatcagtatatgaccgcaactcataagcaacctcaactgactgcataaaacatgcatcaaaaagcaaaaaatccaaatggggaatttcatccaacacggaagctaatgcagaaatattcattcgtttatcaccgtctcctgtatcctgccctacccaacgggtagacgtaaccggatatggtatccagccttcaccatgcgaccaataaaccaatccataactctctgcaggataagaggtgaaaacatgattcacgacttcggacatgacagctacatctgtagaaacctgttcttcatacgttgcaattatatctttaacaacttctccttttccatttttagtaaaatgataaagtacaggagaagatttatcatctacataaagacaaaggttacatgatgaaatatctacatccttcatccctatcatcatctcttcaacatccacagacgcaaaactatgcagagtattatccgccaccatatacaccaatacagttctatttgcaggtattggcgaaggcgtaggtggttcatcctcgctgcctccacaggcagataaaatgaaaataattcctagcgcaagtaaaatatatacattctttatcatacacgtaaatttactcttccggcttcttgaatcggaaagcttcaggagcaataggcatcaatactatcgttttattcttcttatacttgctcttcacttttgcagcctccttttctaacttcttcttgttttcagaaaagtagatcatacacgtataatcaagagatttcaaatcatattccagataattcttcaactgatacgtataaagatcacgcttaggcaagaagccacccttatccagcttcacactgtccaatacctgaatatcagtaaaatacactactgtgtcgttgaaagaggcagcaacaccaaatgcatacacagctttttctcctttacccttcttgaatgagaatgctgaacataccataaaaactaaagctacagcaaaaagtatacgaacgtatttcataatctgttttttattatatattgttggcgacaaagataatgcaaaccgagagcaaaataaaaagaattcattcattttttatgctgagatacagcttatcttcacttttataataatgataacaaaaaaaccggtgatcagatcatgacctaccggtttttaattccttctatttgtcggaaattgatatttcttacttatcctaaataagacttgagcaatttactacgattactttgtcttaatcttctaattgctttttccttaatctggcgtacacgttcacgggttaaaccgaatttgtcgccgatttcttctaatgtcatttcttgttgtccgataccgaaaaacatctgtatgatttctttttccctatcggttaacgtagaaagtgctctatcaatttccctcgcaagagactcgttcaccaaagagcgatccgccataggagagtcgtcgttcaccaacacatccagcaagctgttgtcttctccttctacaaaaggtgcgtccaccgaaatgtggcgtccggataccttcagcgtatcggagattttatcaacagggatttccagttcatctgccaactcctcgggagacgggcgacgttcattttcctgttcgaacttggagaatgctttgctgattttattcagcgagcctacctgattcaacggaagacgcacgatacgcgactgctctgccaaagcctgcaaaatggactgacgtatccaccatactgcataactgatgaatttgaaaccacgtgtttcatcgaacttttcggcggccttgatcagtcctaaattaccctcgttaatcaagtcgggcaaactcaaaccttggttctggtactgcttggccacagatacaacgaaacgcagattggcacgtgtcaacttctccagtgcgatacggtcacccttgcggatgcgttgagcgagctctacctcctcctcgacagttatgaggtcttcgcgaccgatttcctgcaaatacttgtcaagagaagcgctctctctgttagtgatactttttgtaatcttaagttgtctcattcttctaaaacagatttgggttgcaaagttacgacaaattattttgttacaagcaaacttgccctaacttttttatcttattcactatacaatataaacaaaaagaatgccgacaagttagttgtcgacatcctttttcttctttgttagctaatattacaatcttcttacctaaaaaatataccttttattcttgagtcaaatctaccgcatagttagcacgtttacctgacgggaacatacctgtaataaagagtacttgatccggagacttcgtagcttccttcattactttttccaagtcttctacagttctcatctgcacgccattggcttttaagataatgaaacctttacgaatacctgcggctcccattttaccgctgtttacacctgtcacttcaaggccataaccaagattcaattgcttcttcaattcatcaggtataggacggaaagctgcgccaagaatatccattccagcatcttttactacttttgtagtaccttgctcattcttcaacgtcacttcaacggtcttttccttcttatcacgtatcaatttcacttttaccttatcaccagggcgatgttttgccaaagcttcctgcaaatcggcaaatttgtgaataggtttatcgtcaataccaataagaacatcatcaaccttaatatcagcacctgcagcagaactaccttcaacaatttctcctaccaaaagaccatcaacaacacctgatttttcacgagcttcctttttatattcactcagcttcttaccactcttatctatcgcgcgttgagtatcacccggttcttctacaagtggagtaacagcaacacccaatttcacacgttgaactgtaccgaattgcttcaaatcagcaacaactttcttcatgatactggtaggaatggcaaaaccataacctgtatttgatcccgtcggggagaaaagagcagcattgataccaattaattcaccacgcgcatttactaaagcaccaccgctattaccttgattaattgcagcatcagtttgaatgtacgactcaatgctttccgtaccagtctgctgccccattcctaaagaacgtgctttagcactgacaatccccgctgtcaccgtagaggtaagattaaacggattacctacagcaagcacccattcaccaactttcaatgcatcagagtcacctaccggaatagttggaaaatcatctccttctattttgatcaaggcaagatctgtgacttcatccgtaccaataatacgtcctttaagctgacgattgtcattcaacgtcacactgatttcatctgcacctgcaattacgtgattgttcgttacgatatatccatctttagagatgataacgccggaaccaaagcctgtacgttcaggggtctgtacctgacgtctttgcgtaccgccccgaccaccgaaaaattcaccgaagaaatcagagaacggatctctaacttctacttcctgaactttggaagtctgagtagaacgaatatgcaccacagcgtgaactgaattttctgctgcttgcgtcaaatctactggttgcgcatcaacagcattataagaggccaaacgtacgttcggattttgctggaacatttcattgaatgcactggtactatcagcaggcatatttttttgcagcatcttataggtggttaaacctgctactcctgagctgagaagtacgatagctgcaaccccgagaatgttttttgttgtctgtttcatactaattttctattcttttaattgttaatattcaagttttgtttaacatttcgacgttaaaataacgacaaaaatcgttcacttattccgcttgtcactcttttttgttctcttttaacagtgaacttttggggcttaacagcggttaacgacagaacctgacaattttacatttatgcacgtttactgacgtgaaaataaggcagataggcgttaaaatcaaacaagaccatctatccgtttaaaatagatggtctgttttcagggaaaagtacctctttaattatcgagatattctatatccatgtgataatcccacttcggaaaataaagattacctccctcccattccacttcaccacgctggaaatccaccgtttcactacgaggatattttttctcgggtatcagtggcataccgtaatcgctgttgactatcatacgccaggagtcaatgccacccaagaagaaatattcttcatccgcattacgggcaaaagtagggatgccaaatgattggtctacaggaacccagccaatgccttcaaaatagatttccgcccagtcgtgcaggttccatgctttaggatgcatcataaaaccactctggaaatgggcaggaataccactgatacgacaaagcgtaataaacagcaaactaacctgcccacaatcacctttatgattatctaacacgtattcgggaatattttctatagtagaatattcccgggcagaagcccaaggaaagttatcattcacccaacggaagatgcgtttagctttcaccaaaggattggtttccccagctgtcaatttggcagcaagtttgcgcatacgtggtgagaaaatgacatgcttctcgcgttcagccgtatattccttatatatagaagaagttgtatcatagggctgaatatctttcggtttcaaattatgccattcagcattagctgtatactcaaaactttcagagaatacggttggttgatcttgcactgcacgtttttccatgtagagagtgctatgaaggcaatcctgtggggataaagtatacttggattcgctggcagagatgaattttacatcttgctgacgtgactggtcggtacgtgggtaaggaagccagcaacggacgagctctccggcaggaacggcattactgtctaccgtgagcgtataggtgactcgcattcgtttgggagcagtgataggattaccactctttttcacactcgcaatgatttcgggcaggttctccatatttactttttcactgccactgaaggagacgccatctttggcagcctttatctgatagcagacagagtctacacggaataaattaggtgcggcattacggaaataacgcttctcaccattcagagtcatacactccaatgctttggaggcttcccattggcacatctgctcatcggaaacatcagggatatacttacgaatatactctttcacttcatcttccgtacgagagaaatcagtgagaaggcgttggtgcagatcatcttcccaggtatagggcttgctttccggttttggagtacaggcagttacaaggaaaagcaaggcagcagcatacaatacttttttcataataagctaatttatagatgataattgagaacggaaattgaattacgattcaggatccttacagtttcacaactccgatgccaggcaaatctggtaacgtgatcttgccctttacgacctccattcccttgaaacggtcgttggcaataagcagattgccatccagatcagcaaagtcaaccgcaggagaaaactgggcagcagcagagcaagcacaggatgtttccgtcatacagcccaccatcactttcatacccaaagcacgtgctaatgtcaccatcttccagccttcacgcataccggtacatttcatcaacttgatattgatgccatgaaatgcacctttcagaccggccacatcactcaaacgctgcaaagattcatcagcaaaaataggcaacggactctgttgtgtcacccaggcaatatcatccaactgggttttaggcatcggctgctcaatcatgacaatccctttttctttcagccattgtatcatatcaatggcataatgcttatccgtccaaccttgattggcatcgacggcaataggcagctcggtcaccgaacggattgtttcaatcatctctttatcattctcacgccccagctttactttgagaatattgaattgctcggcacattccttcgttttttctcgtaccacatccggcgtatcgataccaatggtaaaagtggtcgaaggagctttttccttatccaatccccatatcttataccacggagctctcagcaatttgcccacaaggtcgtgcaaagcaatatctacagcagctttagcggcggcatctcccggtgaaagcttatctacataagcgagaatatcctccaattggaaaggatcgggaaactgtccgatgatatcctgaacttttttcaggaaagccagtacactttccatcgtacccagttctttctgtaaataaggcggcatggaagcttcaccataaccgataacaccatcgtattcaatctctacctgtacatcaggagtggtagtgcgtgagtaagtagccactgtaaaaacatgacgtaacttcaactcatatggaaagaagcgcaatttcatcctggcattcacaccacttttattgatattgaacagttttggagcgctttctcctccaaatacatcattgataaccacaccggagcccaatgcggcaaaagcagctgttttcaggaaatctcttctgttttgcataatatttgtttttaagttaggagctactagctacggagccacaagctacaagagctttgcagaatgagagcattgctacttgtagcttgtagttcgtaactttattatttataataaggattcgtttccgtagtattcaaggatgcttccttatttatataaggtagcacgcgcgtagcaaacagaaggcgtccgaggttatattcgtcaaaaagctcatcggcagaatcaaaactactgacgtgtacatcaccttgcgaatgaatgaaacgtttattgccaatatacattcccacatgcaccacacgttcttttcgatctgccgtagctttacgtccaaagaagatcaagtcacccggttgcaggttgctgaaatcaggagcgatatcaatatgctcgcctacatacgcttgctgtgaagcatctcgaggaatgatgatatcatgaatgaaaagaatggtacgcatgaagccactgcaatctatccctttggaagaagtgcctgcccaaagatacggaactcccatcagcgtatgtgccgtgcgaataatgctggcagcatcctgttttaaagcggcacgccatttcttttccggcatggagatagatttggaaatataaccggtccgcccgtcaggatatgcaaccttatagaatgcacctttcgttccctcccacttcaagcgattgcctgcaactacatccgaaacagtctgcgaagactgattgggttcagaatacacaaacccataatgagaagtcaccacaatcttctctgctctgttccagacatgaagttcttctttcgttaccggatgaatacctacacgatgtacccaagcgatataattatccggtgtctgaatgcgataccaaccgtcgcgctgtaatacgcggacaggcattcccatcaatccctgggtcatcatttcggatgagaagtcaggatcaaccctaagattggacaccgatacatttatgataccataagtttttccttccagtgcagcctcatccggcaatacctgtaagcagtccattacttgatagtcagctttcgacagcccgttcagtaatgcagctttcgcctcggccgaagtagtcacaccacgtaacatcacatttttaccggaaaaggaataatctacatcaaagagtgctacccgtttatcaggagcatactgacgcttcaagctgtcggacaactgtgctacatccgcaggaatagtcctgtccccgatttccgaagctaccgaatacaacgaagcaaaaaggaacagggatacgataggaataagtttcttcattagctaaaatgatttgggggttattaagtgttagcaaagttagaaataatttctactttggttatatattttcaggaatattaagaaagtgtttagaaaaggaagctatccggaggttatctaccccgcatccggtccgtatcaggtccgtatctataattacggagaagatacggaaaaagccctcccttacacaaaaactctacaagtttctgtgtccgctggcataaaaatcgtatctttgccggacaaaagcagccggtcggtctgtcgcttacgcttcggcgtatgaggaaagtccgggcaacatagagcatcctacttcctaacagaaagctgtccgcgagggtagagtaacgtagaagaaaataaccgccggtgtccttgggcatgggtaagggtgagaaggtagggtaagagcctaccagtcttgtggtgacacaagggctgtgcgtcttgggagttgtaaggtcatgtaaaccgacgctatgagagttgctcgctccatgtcggagggtagaccgctaaagcctgtatggtgacatgcggctcagataaatgacagacactttgctgaatgaagaatgatgaatgaataatgaagatttcttcctgaaaacagagaacagaacccggcttacagaccgactgcttttttt

SEQ ID NO: 6426 - DNA, 40299 bp, Unknown
  gut microbiota DNA sequence
tgctctttggaaatttcttacatacgacatctggcgtattacagaggatgaagtcaccaaaacgactttttccctctacaatataatcaaaaccatttatttatgtatcaaccgcttcaccaaggacagactagtaaacaatgcctctgcactgacttatagcactttgcttgccattgtccctatacttgccatattatttgccatagcacgtggattcggcttctccaatctgatggagaatcaggtgcgaatgggattcggagggcataaccagaccacagaagtcatcctccaattcgtagactcttatctttctgaaactaaaagcggcatatttatcggagtaggtttaattatgttgctatggacggttatcaacctgatcaccaatattgaaataaccttcaaccgcatctggcaaataaaaaaggcacgaagtatgtaccgtaaaattacggactatttctctatgttcctgctgatgcctatcttgattgtaatttcgggtggtctctccatcttcatgagtacaacgctgaagtacattgaagattttgtactgcttgctcctattctgaaattcctgatccgcctcataccttttgccttgacctggttcatgtttacaggactatacatctatatgcctaatactaaagtaaagttcaagcatgcgctcattgccggggttcttgcaggaacggcacaccaggcattccagtttctatacatcagtggtcagttgtgggtatcgcgttacaatgctatttatggtagtttcgccgcccttcccctattcctgctatggttacaaatatcgtggacaatctgcctgtttggtgcagaactgacgtatgcgggacaaaacatacggaacttcagttttgacaaagacaccaaaaatatcagccggaggtatcgagatttcgtagctatccttatcatgtccctcattgccaaaagatttgaggagaatgcaaaaccatatacagcagaagaaatatccgaagagtgtcagataccaatccggttgacacaccagattctatatgagttacaagaaataaatctattgcatgaagtagtagacgaaaacaatgaagatatcggctatcaaccctccatggatatcaataagatgaacgtcgcactgttgttagacagactggacacgcatggttcggaggatttcaaaatagataaggacaaggagttcagcgaacaatgggaagtattaatgaatgcacgggaagaatattataagagcgcaagccatgtgctactgaaagatctttaatattagaggggtagtgataagtgattagtaccatgggtgtcatagcgtagtctgttaatcacttatcactaaccctttatcactgaatcagtatttattgtaagaaaccaccttttccttcggtttcctcgccttctttctcttctcttttacagagtatccgatggtgataaccaatagcaagcgcttagaagatggaataccggtcagcttcttaatctctttctcatcaaaccagccaagaatacaagaacctaatccctcactctcggcagctaaagtgatatgagcagtggcaatacctatatctatcaaggggaaatacttatccttaatctttgcacccagaaatgaagtgacattcatcgattcttccacaaccagaatatgaacgggggcatccttagcaaatttattcatccccagtccggcagtagctttgcctaccttaacggaaagttccggatcattgattacgacaaacttccacggttgcgcattacaagctgatggggccagacgggcagcttccagtatccgttccagtttctcgggctctacaggacgtgtcatatcataagcgcggtcactctgacgggaggctactaattgtaaaaagtccatttgatatatgtttttattgcaccacagattacacggataaacactgattataaaaggataatatttctgtgctatttgtgcaatctgtggtgaactattatttaaactggagcatccggctgatatatttgccgataatgtcaaattcaatgttcactacgctatcaactttgatatcgtgaaaattagtatattcgaacgtatagggaataatagctacctggaaagtatcgtccgttggattacacaccgtcagactgacaccattcaccgttacagagcctttgtccacagtaatgtatccccgctttgccatctccttatcgaaagcataccggaaagtgaagtaataacttccttcggcatcttctacactgatacaggtggcagtctgatctacatgcccctgcacgatatgtccatcgaggcgaccgttcatcatcatgctgcgctctacattcaccttgtctcctacgttcaacaacccgagattggagcgctccaatgtttccttcatggctgtaaccgtataggtatcctctgtcatgctgactaccgtgaggcatacaccgttatgagatacactttggtctatcttcaattcatttacaaatgagcacttgaacgtgaagtgtacgttctcttgttcttttaccaatgccacaagagtggcacattcttctactattccggaaaacataattcagtttacgatttaatgatttataattccttatttggagaacacaaagataatgcaaattgatcgcagaattttcatgcttgcatgaaaaagttctgccgagatgcagcttatcttctccaaagatacgaaataaggggaatataagtacaaaaaaaatggagcttttcacaaagccccatttttcagttttcaataggtattagtttttttttaaggtaaaaagattgttttcaggataacgctgcaaatatagcggcttttcaggttacttaccaaattaaaaaacatgtcttataacatctttttgaaatttctttggttttattaccacttctatagcctttccacatccgcaatcgttttcaatggacaaatatatagcatttttctaacaaacgctaaattttacctaaaaaagaactcatttcttgcttaaaggataatgttcgtccgtttttccgctatgttttaacactttcgcatcgataaagaagactatttcttcggcaatattggtaatatgatcgccggaacgctccaacttacggaagacacttaccaggttcaggcaaggaagaacactgtccggatgtttagcaatataacctgccagaatcgtagtagcttcagcattaatttcatccaacaaattgtctttagcaaagactgaagttgccagatcctgactctcttcctgaagagcctttttggcaagttccagcatggcaagtacttgcgcctgcatttcttccagacgtaattgcttcaaaaggtccggatcgaggacaggctccttacagttcagcacgaaacgggctataccttcggcaaagtcccccaaccgttccaggtttgtattgatcttcagcatggcaagcacaaaacgtagatcaatggctacgggattgtacagggcaataatatcttctacgtcactgtctattttcaattccaaagcattcacgcgacgttcgcgcaccaacacttgctgcgccagttcgcggtcgaaggtcaggactgcctcccctgcccggtcgagctggttatatactaaggtccacatttcgtctatttcttttttaagtaagacgagttccgattcgataaactttaccataaatttctattttaagattacttatatgattaattagaggaaacctgtcactcttttgagtcttgcagcgagccacctttagtttctctgtgtgaaactcccggtttcatgccgtgaaactcttagtttcatcctttgaaactgttggtttcacaccgagaaactcagagtttcaagcaatgaaacaaatgcctatccaaaacggcccgtaatatagttctgagtctccaccttctcggggttcgtaaatatcttcttggtatcgtcaaattccaccatttgccccaaatagaagaatgctgttttatcactaacgcgcgcagcctgctgcatattgtgtgtaacgataacaattgtatactgttctttcaactcgtgaataagctcctctactttagccgtagaaataggatcgagcgcagaagccggctcgtccatcagcaatacggagggagacacagccatggcgcgggctatgcaaaggcgttgctgttgtccgccggaaagtgcataagcggaaactttcagcttatcctttacttcttcccacaaggcggcacccctcaaggactcttccacacgctggcggataaaactattgtccgtcaccccgttcacccgaaggccataggccacattctcgaaaatacttttaggaaaaggattaggacgctggaacaccatacctactttcttacggagttcatccacctggacatcttttccgtagatatcctttccgtcaatatggatttcacctgtcaggcgggtattgggaatcagatcgttcatacggttgaataaccgcaggaaagtggacttgccgcatcccgaaggaccgataaaggctaccaccgaacgttcttctatcgacatactgatacctttcagagcatgaaagtcaccataccagaagtttacattatttgcttctattttaccaatcatttcatttactgtttattattcccgttagttcatctttactttcttctcaaaatacttccgtaaggcatttgccagaagatttacaaagagaatgattattattaaaaccaaagcagtgccataagccagcggaagctgagcttccatatccgtaccactagtagaaataacatatagatgataaggcaatgccatgcactgatcgaggatacttgtgggcaactgaggaagaaaataagcggcacaagtaaacaggatgggtgcggtctcaccggaaacacgtcccaaagcaagaataagccctgttatcacattcggcatggccattggcagaatcacatgccagatggtttgcaatttggtagctcccaaagcccggcttccttcacgcagagtatcgggaatagctttcagcgcttcttcggtagtacggatcaccaaaggcacgcagagcaatcccaatgtaagagagccggcaaggatactatcgccaaaccccatatagttaacgaacagggccataccgaaaagaccaaagacaatggagggtatcccactcagattattcgtcatcatgcggataaaacggacgatccagcccttcggagcgtattcattcatatagataccactcattactcccaccggaaaggcaaacagggcactgcctatcatcagatagaatgtgccgacgatggcaggccaaataccacctgccgtcatgccgtccttcggcgcggtagtcagaaactcccaactgataactcctatacctttatatataataaagccgagaatggcaaagagtatccctaccaccgtcaggctcagcaaacggaatgtaccgaatgcaatgcgttgcgaaagatgtttcctatctatcatactcattttacttttctctgtaaaacactatcttttccgggccgatacagcttccaccgtgaagttgatcagcaaactgataaagaacaatactactcccagaaggaataaagcttcataatgagctcctccggcaggtgcctctcccagttccgctgcaatcgtagcgggaatggtgcgcaacggctccagaatggtatgcggtataacagccgcattgcctgtcaccatcaataccgccatcgtttctccgatggcgcgtccgatgcccagcactactccggaagtgatgcccgatacagaatagggtatcaccaccttatatatagtttgccattgcgaagctcccaatgccagactggcttcacgcatggcacggggacagttgcgcatggcatcttctgtcacagtaataatcgtgggcaatgccattattgccaatacgatgcttcccgccagaccgctttcgccaaccggcaagtcgaacactttctgtatgagcggcacaatgactatcaatccgaagaagccatataccactgacggaataccactcagcaactcaattatcggcttcaacaaattgcgtaccttaggatttgccacttcggacatatagatagctaccgaaagaccgaacggaagagctattagaatggcaaaaagactcacccataatgtacccgttatcagtggcaaaaagccaaattgcgcggcaggtgtagccgtaggaaaccattcggcaccggcaaagacgtctttcactgaaatcgtattatcgcacaacaagtgtacggagtcttgccggacaataaactgttgcggcacaaaagcaatgatgcccggtgtacgctccaccaactcggtaattcttgctccggcgtgttcataagaaggtcccagttcttcttcggtataatactgggtgatatcctccaaacggaaaagccggataggcatatcctgccctccgacctcattccagtttgttatttcctcgtcgaaaacatcttttatctgagccggtgtcagctcagtaaccttattatctttattcaatgccaatacatatccctcttcaatcacccggctgttgaacaatcccaacgcctcggaaaagagaaacaggatgataagcacaatggtaatgcttgttacgaaaccactgcaagccaatataccttctactattttttcaaaaagtttcttcataaatacctgttgatattctgcatgcaaagaaacggggccgatgttaagagagtgtgactaacatttgaaagaaatgtttcaaacatattacaaaagcgttacaacccgcaaaaacacaagctttgtaatagcatcgtaatacacgattgctttatttgcagagaataaacaaaaagagtagtatgaaggttgttatactatcattagtttactacataaagtaattataaacaatacctattatgaaaagaataagtattatcctactcctgacattagctgcaagtagcatgcaagcacagcgtattaaaggcagcgacaccgtactccccgtagcacaacagaccgctgaaaggtttatggcgctcaatcccgatgcccggattaccgtcacgggtggcggtaccggcgtgggtatttccgctttattggacggaacaacggatatcgccatggcatcccgccccatcaagttcagcgagaaaatgaaagtaaagtccgcaggcaaggaagtagaagaagtaatcgtcgcctacgatgccctcgccgtcgtggtacacccttccaaccccgtgaaacaactgacacgccaacaactggaagatatcttccggggaaaaataacaaactggaagcaagtgggtggagatgatcgtaaaatcgtagtatattcccgtgaaacatcttcgggcacctatgagtttttcaaagaaagcgttctcaaaaataaaaattatatgagcagtagcctttccatgcccgccaccggagccattatccaatccgtcagtcagacgaagggagcaatagggtacgtagggttggcttatctctcccctcgcgtcaagtcactttccgtatcttatgacggtaaacactttgcgccgcccacaatggaaagtgccacagacaagagttaccccatcgtacgacctctgtattattactataatacggaaaacgccggacaagtaaacccactcatcagtttcatcctgtcacctgccggtcaggaaatcattaaaaagagtggatatattcccgtgaaataaggataaacgaaaaaaatgtcttacttttgtagcttgatttttagaatatatacataccattatggcagatattaagagcgaagaagtaggcgaaaaaaagagcctcaacttcattgaacaaattgttgagaaagatttaaaagagggtaaaaacggtggtaaggtgcaaacgcgtttcccgcccgaacccaacggatacctccacatcggtcacgccaaggctatttgccttgattttggtattgcagctgaccacaatggcatctgcaatctgcgtttcgatgataccaatcctaccaaggaagatgtggaatatgtagaagccatcaaagaagatattcaatggctgggttaccaatggggtaatgaatactatgcgtccgattacttccagcaattgtgggactttgccatccgcctcattgaagaaggtaaagcatatattgacgagcagacttccgagcaaatcgcacagcagaaaggtactcctacccaaccgggtgtggaaagtccctaccgcaaccgcccgatagaagaaagtctctccttgttcaagaagatgaatacaggtgaaatagcagaaggtgctatggtgctccgtgccaaaattgacatggcgaatccgaacatgcacttccgcgatcctatcatttatcgtgtagtgaaccatccccaccatcgcacgggcaccacttggaaagcttatccgatgtatgacttcgcacatggacaaagcgactacttcgaaggcgtaacccattctctctgtacgttggaattcgttcctcaccgtccgctctacgatctttttgtagactgggtgaaagaaggacaggatttgaatgataaccgccctcaccagtatgagttcaataaactgaacctcagctatacactgatgagcaaacgtaatctgttgactctggtaaaagagaaactggtgaacggatgggatgatccccgtatgccgaccatctgtggtttccgccgtcgcggatattctcctgagtctatccacaagtttatcgataaaatcggatataccacttatgatgcactcaatgaatttgctttgctggaaagcgccctgcgcgaagaccttaattcccgcgcaattcgtgtatctgccgttgtgaatccggtgaagctggttattaccaactaccccgaaggacaagtggaagaactggaagctatcaataatccggaaaaaccggaagaaggcagtcacttcatcgaattcagccgtgagctgtggatggaacgtgaagacttcatggaggatgctcccaaaaaatatttccgtatgactccgggacaggaagtgcgcctgaagaatgcttatatcgtaaagtgcaccggttgcaagaaaaatgaagccggagaaatagtcgaagtatattgcgaatacgacccgaacaccaagagcggtatgcccgaagcaaaccgtaaggtgaaaggtaccttgcattgggtcagctgcgaccattgtctcgaagccgaagtacgcctctacgaccgtctgtggaaagtggagaacccacgcgacgagcttgccgctattcgcgaagctaaaaactgcgatgccttggaagcgatgaaagaaattatcaacccggattcattgcatatactgccccgttgctacattgagaaatatgccgcaggcatgaaaccgcttacttacttgcagttccagcgcatcggttacttcaatgtagatccggactccacaccggaaaagatggtattcaaccgtactgtagggttgaaagatacctggggcaagattaacaaataaagtaaggattataggagtaaactattaatgagcaataaaaacctgctgtccggcagagataaagaacttcaggaacttgccgaacaatatgaattgacaatgtccgcgaaacaaccattttatctggacgcagacgatttggctgaccttgccgactggtatggcaccaaaaagaattatgataaggctttagaaattgcagaatatggcctaaagctacatcccgacagtacggcattaatgatagaatatgcttacctgcatctggatagcggaaaaagagcaaaggcacgtgaaatcatcgaaaaccttcccgatacctattcgccggaagccaaggtggtacgtgctcacttgctgctgagtgaaggtaagctggatgatgccgaacagttactcgatacgattgaagataaagaggatctggcaaatgtagtcgatgtatcttatatgtacctcgatatgggctatccggacaaggctctggcatggctcaacccggtaaaggaagaatatgccgatgaagaagcttacattgccgtagttgcagactgttattatgggaaaggcatgatagaagaagcaattcctctatataaccaactgatagatcagaatccatattcggctccctactggttcggattggcaagatgccattttgaagatctgaacttcgaccaggcaattgatgcctgcgactatgcattgataggtgatgacgaatttgcagacgcctatgtaatgaaagggcattgtttttaccagttgggtaatgaggatgcagctctggaatgttatcagaaagctgagcagatgcatgggctggctcctgagtttgtctatacctatatcggtttatgcaaggtatccaaaggcgaatgggaagaaggatacgaaaatctggaaaaagcaatccaggctaacgaagcggaagaaactcccgcacctactctacccagcctatatgccaatgcagggctttgcctttccaaaatgaaaaagaagcgcaaagcgcaccagtattgtaagaaagcccaaaagctggaaccaaaagatcctgaagcctacctgattgaaggccgtatgtacgtcgaagaaggtgactacgaaaagggaataaagcaatgggcaaaggccttgaattgtgctcctagcgctgatacctggaatgaaataggtatgcacagcatggaaatcgggtatctggattatgcgaaaatagcttttgaacgtgtttgtgagttagaaccggaatttgaaggtatcaatgaaaagttgaccgttctctacatgacgctgcatgataaggaaaacttcataaagtacaatcagaagtgcacccgcccctttgatctgaaagaactggagaaaatgcaggctatgatggaaaatgaagaccgggaagatctggctgtttatatgcaaaatatcataaaagcattgcaataaaaaaaacagagagtaaagctgatcgctttactctctgtttttttatattgtagagggtatccttatttagcgctacgtgtagaaagcttctccaaaaaatataccaggaagaaaccaacaatcatcaatactacagcttcaacaatatattgattaggaaggatattcgcttcaaccagtggcttcactactccatgactgtctgtgaacgtttcaagcgtttctttccatggccataccttattaagagaccccagcataaagccggtcaataccgccaacgtaatattacgaaagttctttagtgcatatgaaagaactcgtgaaaaagtagttatacctatacaggcgcctgccaagaatactaataaagtcgctatatcaaatgtcttgaccgcttccattatatagaagtatttgcctaacagtaccaaaataaaactacccgatatgcccggcaagatcattgcgcaaatagcaatcgcaccgcaaaggaaaatgaaaaacagattggatggcgtttcagcaggagttgccaccgtaatgtaataagcaactgccactcctatgataaaagccggaattgttttcttattccactcttttatatctttccccacaaaccaggtggaagccagcaccagtccgaaaaagaaagcccaaaccattaccggatgatccgtaagcaaccatgtaataaccttagccaacgaaaatacactgacagcgattccagctacaatggaaattaaaaaattaccattaatagctttccagaacgctccccattttcctgtaaaaaacaactttaaactttttccgttgatgctttttatcgaatctatcaattcatcataaattcccacaataaaagcaattgttcctcccgatactccgggaaccacatcggctgctcccattcccacacctttcagcatgagtaaggcgtagtcttttaaacctcgttccatttttctttgttatctattaatacttgatttcatggtacaaagtaaaacaaaaaaagtcagttactcaccataaagcaaataaaatacacaaaagataatccacaatcaattcacacgccaactcactatataaaaaacaaatagtgcacaatagcctcacgacccttgtgcaccttatcttttttattgctatttaaaaatctgaatttactatttcttcacagcctctattgctttgtcataatccggctcctgagtgatttcgggtaccagttcagtatacatcacttttccatctttaccaatgataactactgcacgtgccagcaaaccgcccaatggtccatctgccatacgtacgccatagctttcatcgaaatccgaaaaacggaaatcagacaaaggaattacattttcaataccttccgtcgtacagaaacgagcgtgagcaaaaggcaagtctttggaaatcgccaataccacggtatcaggcagacttgctgccaacttattaaacttgcgcacagacgttgcacaaacactagtgtccaaactcgggaagatattcaatatcacattctttcctttcatatctttcaaagaaaaagaagaaaggtcagtctttactaactcgaaatcaggagcaactgttcctgtttttataaactcaccgataatcttaaccggttgtcccttgaattttgttgtagccatagttttctttttttatatgtttatataacaaacgaactgttagaaaagttcgctcaaaacttttccaactgtaaattgttactctcacaaacatgattacaataaccatttaaaattcaatttgcatgaaaactttatttgacgaacttcaatgcgaagtaaaaaactggtggctctctctcctgcttggcatactctacgtagtagttgccgtcagcctgatgttcgcaccgttgagcggctacgcagttttaagtatcctgttcagcatatccatgttattcagcggtttgctggagatttcttttgctgtaagcaaccggaaaaatgtatctagttggggctggtatctggccggaggtatcatcgacatgatattcggtttctacctgatagcttatccattactgagtatggaagttattcctttcattattgcattctggctgatgttccggggcttctcatctgtcggctatgctatggatctgaaaagatatggtacaagagactggggctggtatattgctttcggcatattagccgtaatttgttcgctcatcatcttatggcaaccggcaataggcgctctctatgcagtttacatgatttcattcgcattcctgattatcggattcttccgcatcatgttgtcatttgaactgaagagtttgcataaacgtggaaaaagcatgaaagaggaaaacgaagataaagaaattcccgtaggatagttaagaattccactgcccagagaaacgagttgactaaagtgcctggaaacaggaacttgtcaactcgttttctcattagttacacttcaggaaacgatgcatagtagttcgggatactcccatctggcgagccagctccgaacaggaaacacctcgttgagcatcttttatcaaacgtcttttgttctcacgaagtaccctcatagcaggacaggttcctttctttcgtcccaattttaccccctcttgcctgcgcctcgccaatgcttcttttgttcgcatggaaatcagattacgttctatctctgccattaatccgaatgcgaaccccaataccttgctgttcatgtcattttgaaatacatacccctcttttgtgctgtacagaacaatttctttcttgatacaagaattaagaatcgtcatgatttccaacattgtacgacttaatcttgaaatttccgtcacaatcagcgagtcacctctttgcattcggttcaacacccccgatagcttccggtctttgcttctcacactaccactcaccgtttcggtgtaccacttgtcaatctgcaatccattcttctctgcaaaacgcagaagttcttcacgttgattagccagaaattgtttttctgtacttactcttaaataagctactaccataattttgttgtttttataggtttaacgcgccaaagaacagcaataacagcgagaaatcacactccctccaatcaatgatatacaggcgattgcctctatttaggctcttttatttgacaacagatatttctgatactatgagacaaattatgtagaagtacattttcaaggatgaagcaccagtcataaaaagaaacaataaaaaatctcagcataactttttcatgcgagcatgaaagttatgcactcaaattgcattatctttgtagtcagttttataacaagaatataaattcataattaaaaaacaaaggaattatggcaatgcatacatggtttgagtgcaagatccgttacgaaaaagtgatggaaaacggtatgaacaagaaagttacagaaccttatttggtggacgcactcagctttacggaagcggaagcacgcatcattgaagaaatgacaccgtttatttcaggcgaatttacagtatcagacatcaaacgtgccaactatagtgaattattccccagcgaagaagaggctgccgaccgttggttcaagtgtaaactgatctttattactctggacgaaaagagtggagctgaaaagaaaacatccactcaggtattggtacaagctgccgacctgcgcgatgctgttaagaaactggatgaaggtatgaagggtacgatggcggattaccagatcgctttagtatccgaaacaccccttatggatgtatatccgtatagcgcggaacccaatgacaaaccggaagtttaatcttttgagaattgaaagttgaagtgattagcgtaaacacagaatgctttgatcttcaacttttgaatttcatatttcaattttctaatcatgaatattgcagagaatcttcaacaagtgctaagcgaactgcctgatggggtgcgactggtagctgtctccaaatttcaccccaatgaagcgatagaagaagcctatcgtaccggacaacgaatattcggagaaagcaaagtacaggaaatgactgccaagtacgaaagtcttcccaaagacattgaatggcactttatcgggcatctgcaaaccaataaaatcaagtttatcgtgccctacgtggctctgatccacggaattgactcatacaaactccttgtagaagtcaataagcaagctgcaaaagccggaaaagtagtcaactgcctgttgcaactgcacattgcagaagaagaaaccaaatttggttttagttttggcgaatgtcgggaaatgttagcagccggtgaatggaaaactctcagtaacatacaattatgcggtctgatgggtatggcaacaaatacagacgacaatgaacaaatagagaaggaattttgttcattaagtagcttcttcaaagaagtgaaagactcatggtttgccgacacggaggcttttcgggagttgtccatgggaatgtcccacgattatcaccaagctattgctgctggaagtactctgatacgcgtaggaagcaaaatctttggagacagaacgtattaatcattattcattaaacattattaccatggcaacattaaaaactacttttgccgggttagaattaagaaacccgattatcgtcagcagctcaggtttaactgatagtgctgaaaaaaatcagaaattctatgaagccggtgtcggtgccattgttctgaaatctctttttgaagagcagatcatgttggaagctgactggctgggagatccgaatatgtatcctgaaggcagtgattacttggtagaatatgtccgccaacataaactgtcagagtatctggaactgattaaggatactaaaaaagtatgccccattcctgttattgccagcataaactgctatcaggatgctgaatgggtaggatttgcacaacaaatggaagcagcaggagctgatgctatagaaatcaatatcctggctctccaaacagatatgcaatacaattacggttcattcgaacaacgccatatagatattctcagccacatcaaaaagacggtacgtattccgatcatcatgaagctgggtgataacctgactaatccgatagctctgatagatcagctatatgccaacggagcagctgccgtggtattattcaaccgcttctatcagccggatattgatatcgaaaagatgaagcaaatctcaggaaatgtattcagcacaggagctgacctggttaaagccttacgctggatcggtatcgcttccgcagctgtgaataagctggattatgcagcatcaggtggtattcactctcccgaaggcattgtaaaagcaattttggcaggagcttcagctgtagagatttgtagcgcattctatcagaacagttatgcccttgtaggagaatatatccacttcctgaacttatggatggatcgcaaaggcatggaaaacatccctcaattcaagggaatgctgaatgtcagcgacttgaatggagtaaataccttcgaacgtactcagttcatgaaatatttctccagtaaaaaataaacaggaaccgcacaacatatcattataagtaatgccccgtaacatatattgttagcatatctaacatatattgttacggggcattacatatattggcgtttcctttacagaggaactttttctttattcgggtttcttatccaaggcttcaaagcatgaattcttgctgataaactcaggaacaatatccttcatagcagctacaatctgcatctgatcatacgtgtaactaacctctatcaacttctgaatgcgttgcttcacctcatcataatcatattcgcgaactgtagcaatcataatcttctcatgataagtcggctttgtcagttctttcacattcagcaactcttcatacagtttttcaccatgacgcaatccagtgaactcaatcttcacatccgtacgtccggaaaggctgatcatacgcttggcaagatccacaatcttcaccggtttacccatatcaaagatataaatctcaccgccattccccatgctaccggcttcaagtaccagacggcaagcttcgggaatagtcatgaaataacggataatctcaggatgtgtcactgttacaggaccaccacgttgaatctgatcacgaaaacgtggaattaccgagccattagaacctaacacattaccgaaacgtgttgtaatgaattgcgtcacatgcccacctttctcctgaagtttcttagctaaagactgcacataaatctcacagatacgcttggagcatcccattacattggtcggatttacagccttatccgtagagatcattacaaacttctcagcaccgtattttacagccagatcagccagtgtacgcgtaccgaacacattgatctgaatggactcggaaacattatcttccatcatcggcacatgcttataagccgctgcatggaaaatgtattgcggttggtattccttgaagatatcttccatacgcgtagcattggaaatatccgcaataatagtctctgcatcaatgtcacgccaacgatcctgcaattccagacgaatatcatgcaacggagtctccgcctgatctaccagaattagcttataaggattgaaggaagctacctgacgcattatttcgctaccgatagaaccggcggcaccggtaatcattacgcgctttccttcgagatgggaagctaccttatgaatatctatttcaataggatcgcgttgcagaagatcttcaatctgaatttctttcaactgagtacggttcaaagtctgtccgctccactcgctcaaaggaggtgcagtcataagcttgatgttgtgtgccagaagacgatcggccatatcagacttcttcagttcttccattttagccggcgaaataataattgtatgcacatcgcggtcattcaatacatcaatcagagactcgtcattcgggaatacctttacgcccatcatcaccttattaatcagttccggctcatccgctatgaaaccacgcagacgatagtgattacgcaggttgacgcgcaacgctttcgcaatgttcactcccgcttccttagcaccatatataaagacgttggcactatgacttccatcaaaattcagaagttcatagaacatcttcacaactatacgtgagcaagacataatggcaaagctaatgatatacgccataaacagcacactcacaggtgccagacgaatatccagataacttgccaaaagcacactcgaaatcattaacagtgcataagacaccgtcaatgaaacaaaaatgcgcataatgtctataaacgaagaaaagcgcaatacgttggaataggtgcggaacaccctaaagaagactaagttgacaatgaccgtccatacaatcgttttgtcaatggtagaggattccaggaaaatactccggaaatcatatcgaagcgcataagccaataagctggatacgacgattatcaatacatcgatcaacagaatagtccaaatcggcaatacctttgctgaaaggtaccgatgaaaaattttatgtttcatttcgtttgacagttttgttttaggcgaggcaaagatacattattttttatcaaataggacaagaaaaagataaaaatgtgtgataaaattaaatggtggcaaagttacgggtataactttgccaccatatttacgacctataaagctctgttacatcaaattactggctaattcacttaattggctacgttctccttttaacaaatttacgtgagcaaaaaggttctgatctttcatacgatcaatcatgtaaaccaagccattggactgactgtcgagataaggttggtctatctgttggatatcaccggtaaacaccattttcgtaccctcacccgcacgggttatgatggttttgatctcatgcggagtcaagttttgtgcttcatcaataatgcaataagtttcactcaaactacgtccacggatgaaagctaatgcttcaataaccagttgctcacttttctgcatatcttccaaacgttttacctctgttgagttagaagcaaactgacgtttgatcacattcagattatcaaacaagggttgcatgtaaggagctaccttttctttggcatcacccggcaggaaaccgatgtctttattggataaagcaacaatcggacgcgccagcaaaatctgtttatagtcattcatttgactaagggcagctgccagagccaacaatgtttttcctgtaccggctttacctgtcaaagcaaccaatttgatgtttggatcggtcaacacttcaaaagcaaaactttgttcggcattccggggttcaatgccatagttctttgttttattcacccgacaaatggaatgtgtaaaaggattgtaacgggcaagtacactattcctgtcacttttcaagataaaacactcattcggatggatgatatctttgaaatcaaactcactaatatccagtccttctctggaagaataaatccggtctatcaaagcaggatcaattccctcaaacacctcatttgacttttcaaatatatccacatttatcaccttgtcattgatataatcttcgcaaagtaagcctatggaacgtgctttcatccggaggttcacgtcttttgtcaccaggatggttttcatatccttcttttggcgcgtcaaccagtccactacagccagaatcttatgatcgggaatacgctcggggaatgaatcgaacacatccggagcatccaccgaaccggcaattacaaacaaacttcccagtccttcgcccagagaagcacccttattaaaaagattgtcatcggtaactaaatcgagctcgcggagaaattcacgggcattgaagtttatctgttcattccctttcttgaatttgtccaattcttcaagaactacgatgggaagataaatatcgttctcttggaaattcttaagacagttatagtcgtgaaggattacgttcgtatcaatcacaaaatttttctttgctcccatactcttttagatttaaattgttgatattgcctccaaagcgaagattagctgtacttcggcataaaaaatgaacaagttcattttattctgctctcagtttgcattatctttgcagcttctaagataggaattaaaaagagagaatagtttgctttctcgttaaatattttaaaagatggattatcagaacactttattatacttatataacagtgtccctatgtttcaacaggtgggaagttcggcatacaaggaaggtttggagaatacattggcactggatgaacacttcggacacccgcaccggaacttccacagtatccatgtaggaggtacgaatggcaaaggttcatgctcgcacactcttgctgctatcttgcaggaagcggggtaccgggtaggcctctacacatctccgcacctcgtagatttccgcgaacgtatccgaataaacggacagcctatcccggaagaatatgtagtccggtttgtagaaaaagaacgtgatttttttgagcctctgcatccttctttctttgaattgactaccgctatggcattccggtatttcgctgatgaacatgtagatgtagcggttatcgaagtaggacttggcggaagactggattgcaccaatattgtacacccggatctatgtatcatcaccaatattagttttgaccatacccaattcctgggtaatacattagaaaagatagcgggagaaaaagccgggatcattaaaagtggaatacctgtcataatcggagaaacgactcctgaaacaaaacctgtatttgcaaaaaaggctcgcgaaataggtgctcccattctctttgcagaagaagatgaaaaggatgattaccccggattggaatgtgagctgaaaggattatatcaaactaaaaacacccgcacgttactcacagccatcccagaactacggaaagccggatacaatctgagtgagcaggctgttcgaagtggcttcgcccatgtctgtgaactgaccggcctgatgggacgctggcaaaaattgcaggatgcccctaccctgatatgcgataccggacacaatgtaggtggcatcacctatatcacagagcagttgaaacagcaatcttaccggaaactacatatgattataggtatggtaaacgacaaagacatacacggtgtattagcattattaccccaagaagccgaatattacttcacaaaagccagcgtaaggcgtgcattacctgaaagcgaacttgcccaacttgcctctgaggccggattgcaaggaaattgctatccagatgttccctctgccgtgcggactgcacaagaaaaaagcctcccggaagactttatcttcgtaggaggcagtagttttattgttgccgatttgttagcgaaccgcgatgcactcaatctccactaaagcatctttcggcagggctttcactgcaacagccgaacgggcagggaaatcaccatcaaaataggtagcatatactttattcatatctgcaaacaatgacatatcctgtaggaaaacagtagtcttgacgatatttgtcatcgtcaaacctgcttctccaaggatatgcttgatgttctccaatgactgacgtgcctgtgcttcagcaccttctgccatctgtccggtagtcgcatcaataggtaattgaccagatacaaatatcattccatttgcttcgatagcctggctgtaaggaccaatagctcccggagctttctgactgcaaattacttttttcattctaatattattttagtattcaacaatttatgattcattcaagaaaaaaaattggtatcttatgcagtattctgcaacttcatgcatttacttaataggattatacacaaaagaaaaattcacttatacctgttttaaaacctagacttagctaattcttttttgacacgggagtttcccgataaaggctcagcttgtgaaagcagagccttttttataaagatatcatctgcaatactatcacttacagtgtttttctattaaagcatcaacattcggatcacccagttccttagcttttgcgaaactggcacaagcctctttgttttgctttaactgtagctgggcaactcctatcaaacgataagcttcagcatatttagaatcaatttccaaagcatctttcagcaccttgatcgcttcttcatttctccccacacgaatgttcaccaccgcaagttccgaaaaataagtcagctctttcggattaagttcaatagcttttgccaaatcatccaacgcacgctgaaactgctttgcctgaacggccgcctgttcgcgataataatagaacacatcattcacattgccacgaaccgctttatagtattcatcataatcaagcatcgcaccgcgtccttgtccggcattcaggcgcatctgggcacgttccagcagataaggagcagcttcttcactatacggttgcacgaaacgcgccatacaactatccatcaaagccaacacttcttccggagctgcttccatcaattctttcgtcttagcggcactaaagaatgtagccggagaggcaatattggaatcattcaccttctcataactggcaagagcagccgcatagtccttcttggcaaactggatatcaccttccaactgaatataaaccggaagagcttcgattgcaatcgctttacgaacctcatccaaagccctgtcatatgtccaatctttatagtttttttcaggtttatccaactgataaccataaatcagtttggcacgattgaagtatgcatcatctttcttttgtgccacttcaagtgccttatccatatcagcagcaaccttatccattgaacttgcctccttcgactggaagatttgattgtttgcacgacgaagataaccgtcagcactgttgggatactgagatataaactcattcagcaactcggtgtatttctctggtgcaagctgtgaagaagccatatagagataaaccaatgcttgttcttccgtctcaggcaatgctttcttaatgccgatactcaataaagtatgatcattgaaagaaagaggacttatcttttgagccatagcataatcggcacctactgcatagcaaatggtagctgtatcttttccagaagatttctgtgccagaccgaatacttgtccctcagcagtcattaccggacaacttaccattttgtccttcagctgcatatcaagtgtataataatgatattgtccctctaccttagactcttctttcacctgtccggtagtataggaacgatctttctgtgtagaataaggtaacagataaatgcttgcacctacagtcggggccacaggagctaccactaatgcaggtactttttttcctgaaatcgctacacggaacttcacaacatcatacatgtcatttgctcccataataacttccacaggcatttgtgtaccctccgaattaatgacaacggcacgctgcgcacctttaaacaagctataatcagacagagcaattccatcttcggtaacaaaaaatccatttcccgtattaagtatcttatcactctcgtcatacgtgaccaccgagaaaacagcacgcttggctttttccacccatttgggtgcctgagctacactccactgtgccagcaaacagagggcgagcgtcaacaacaagttcttcttcatatcttagttggttctttgtttcacagcttcataaatcaaaatacctgccgcaacagaaacattgagcgactcgatagtacccagcattgggattttcacccactcatcgcaaagagacaggttctcataagaaacacctttatcttcagctcccattatgatacacatcggtcctgtataatcagctttggtataatcatagtcacccttttctgtagctgccacaatgcggaaaccactatctttgagatattgcaatgtaaccttcagattctgctcacggcaaaccggcagaacatgcaatgctccggcagatgttttcattgcatcagcattcaccgtcacgcttcctttagcaggaatgataacagcatctactgctgcacactcacaggtacgagctatagcaccaaagttacgaacatcagtcacaccatccaacatgacgaacagcgggttcttgccttcttcgaaaagaaaaggtaccaagtcttctgtcttctgatacgtaacggatgaaataaaagcaatcaccccttgatgattcttacgggtaatacggttaatgcgttccaccggaacacgttgcaccgaaatcaaagttccttttagcgcagcaaaaagttctttggataaatcgctctgaatgtctttcttcaccagaatcttatcgatttcctttcctgcctgtattgcttctatcacagcgcgaacgccgaaaatcatttcactcttatcaaccatctttgagaaattaaaattagaaattaaaaattaaaggctatcttttgataccaagaagcgcctttgcattattcaaagcagcttctgtcaaagtagccccactgagcatatgggctatttcctctaccctctcctcatctgccagacggcgtatgtggctattggtttcggtttcgttatcttgcttatatactttataatgtgcacatccgcgcgcagcaatttgcggcaaatgggtaatactgattacctgacgatcctgttctcccatttcctgcataatgtccgccatacggtcggcaatctcaccggatactcctgtatctatttcatcaaatacaatagtgggcaatttcaccgcaccggctatcatcgccttaatggacaacatgacacgtgcaatctcaccaccggaagctaccgatgaaatattttgcaatgagccgtttttattggcagaaaagagaaaattgacggtatcttcaccgtgtacaccaggttcttttcttattcccatctccacctgaaaacgcacattaggcatacccaacggcaccaagcgggaagccatctgcttttcaacttcacgagcggcgccggtacgggccttggtaagaacagcagcctgctttctcaccttattatataaagtatcgcaaagagttgtcaactcaccaatacgttcatcataagaagtaatggccgccaactttgctgcatattcttcagcaagtgtcagtaactcctccacagtggttgccctatgtttttgctgtaaagtataaatcagattcaaccgatcgtttacctcttccagacgatcaggattaaactcaacatcctcttcctgagaagaaacttcctgggaaacatctttcaattcaatatatgtactttccaggcgttcagcaagttcagtagccggagaataaactttttgcagaacaagcattgtattcagactttccttcaacccggccagcagaccaccttcatcagaggtcaacaattgtccgacacggaacaaaccagcctttatttcttcagcatgactcaacatatccgtctcctgttccagttcctcctgttcacctgcagacaaatttgcttcttccaactgctccaactggaaacggatatagtcttcatctgccttattctgctcagcacgggctatgaggtctgccagttcctgttgtgcctgcttccattctctatacaaagattgataagctgaaagttgttcatcattatgagacaatatatcgagtacattcaactggaatccttctttattcaacaaaagattctggtgctgagaatgcacgtcaattaactgttcacccaactccttcatttgtacaagcgaagccggagtatcattgataaatgcacgactcttaccagatgcataaacctcacgacgcaagatacactcttcttcatattccagttcattatcttcaaagaaaggctccataccataagctgaaatatcaaaacgggcctcaatcacacacttcgatgcaccctggcgaatggcttttacttcggcacgctgaccaagcaacaagccgatagcacccagtataatagacttaccggcacccgtctcacccgtgataacggagaaacctgcaccaaagctaatatcaagcttttctataagcgcgtaattctgtatgtaaagcgaacgtaacatgacttatttacaattttaatcttactcacttcctaattattgctttatcttttcccactcggtagtcagtgaaggattgatagatgatagtagttcacatatttcttccttttccttcattgcagcacgggaataaagattaatcaattcatctttctttatttcagtaaacaaaccgggcaatgccgacattggcttattctgttgcgcctctttcaaaccgctaagcatagatgttattacagcgcgggcacgggtaacattcacagagagttcatccatacctgtacgatgatatccatacatcagtttgcgcaaaggcgtcatgccatcttccagataatcagaaactaatgcataacgattccgactgctatcgaacgctttccaaccggtttcaccaaggttctgtgcggccgttacaatgtcttcagctgcccgaaaaacctccgtaccaccctgtggcgccatcgtgtccatgtccagtccgataatcatataagcataataagcaattactgccgtcagattactgtcaataacattatccctcagttgcagcggatcgaactcacgatagttgaaagcaacatccgtatctttaaagctaaaaactaccgtctgatacccggattgccagacggggcgtgtagactgtacaatcagctcacacttccaacgtccatccgcctcattatattctttcacggtcaggttcatagaacaacgaatccgttcattcacttcatactgcgcctgcgtccaccgacgggtattaataaactccatcaaggcgttttcaagcgtagtaaaaacctgtgtactcgtaccttgtatctgagaataattcaccgtaaatttacaattcaattcctgggcagtggactttagcgccacagcaaccagaagcagaatcatataaagtgtcttatttctcaatttacttattctccaatacttccaccagacaatctacaatatccgcagctacttccgcctttgatttcaacggaaagtccgtcttgctttcacggtcaatgatactgattttattcgtgtcgtaccggaaacctgctcccttatcattcagagaattcagaacgataaaatccagattcttccgtcgcagcttatcctcagcgttatgctgttcgtcattcgtttccaaagcaaaacctaccaatacctggcgttctttcttcatctgtcccagacaggcggcaatgtctttcgtaggtttcaaacgcaacgtcatttcgccttccttttcccgctttatcttagcatcagcaacctgttccggtgtaaaatcggcaacagcagccgaaagaatagcagcatcagcctctgcaaaaaagctacacgcagcattatacatctgatctgccgattccacaggaaaccaacgtaccggatatttcaattgctgttgtacaggacctgatatcataatgaccttagctccgcgggcagcacattcatctgcaatagcaaaccccatcttaccggaagaatagttcccgataaaacgtaccggatcgatcttctcataagtaggtccggcagtgatcataatggtcttacctcgcaaatcaccttctttcccggcaaaataattcgccagatgttgaataatgacttccggttcttccatacgtcccttgcctaccagatggctggcaagttctcccgtacccggttctataatatgatttccataagaacggagcgtatccagattcttttgtgtagaaggatgggcatacatatcaaggtccatggcaggtgccacaaataccggagccttagccgacaaataagtcgtaatcagcatattatcagccactccatttgccatcttgccaatagttgaagcagttgccggagctataagcatagcatccgcccataaacccagatccacatggctattccatgtgccgtcacgttgggcaaaaaactcactgataaccggcttactcgtcaatgccgaaagcgtaataggagttataaattcttttccggcaggagttatgactacctgtacctcagcaccttgctttataagtccccggataatataacaagctttataagcagcaatacttccggttattcctaatacaattttcttccctttcagtgtattcgccatgatactacttattggttaattcacgtagacggatctttgtcaacatagccttggtattcagtgtaaagtcactgtttaatatccagctataatagcccggatcgcgtttcaacacatctgtcaccgacattcccttgtattttccaaagttaaatacttccacaccattatcatcataaatcatacgtcctgcgaaatccacgtttttgttaaagctggaataatctgccagaaaagcaacatcattctgcaattccgaataacggtccaactgtgccattagcacctcataagttgcttgcgtatcagctgccgccgtatgtgcatcctccagattctttccacaatagaatttataagcagcagaaagtgtacgctgctccaatttatggaaaatgacctgtacatccacaaacttgcggcggctcaggtcaatatctacaccggcgcgaagaaattcttccgccagcacgggaatatcaaaacggttggaattaaatcctgccaaatcacatccttctatatcattggcaatagtacgggccacttctttgaaggtaggacaatctgccacatccttgtcatagatgccatgaacagcagacgcaccttcgggaatatgcatttccggattgatacgaagtgtttttgcttcctcattaccattggggtgtactttgagataacagatttcaacgatacggtctacattgatactcgttccggtcgtctccaaatcaaaaaaaacaatcgggtttttgaggtttaatttcattattcttctattttacagttgacaagggaacgagttgacaagggaacaaggcattcccagcataacagcacagcccttgtctccttgtcaactcgttcctcgttaactctattatttttttaatcatttagcatcatcggcatcagtagcatcaacaactcctcattttcttcttgttcaacgggaatgatgacgcctgcacgtgacggatctgccagttcaattatcacttcatcagcggcgatattattcaaaatatcaatcaggaaagtcgatttaaaaccgatgctcatcgggttaccatcatactggcaagccagtgtttcttcggcagaagtagagaaatcaatatcctgagccgaaataacaatctgattgggctgcatacgcagcttaataagactgcttgcctgtgatgagaaaatagatacacgacgcaatgcacctaccaactgcatacggtccacagtcactttataaggattattctgcggtatcaccgaattataattaggataacgcccttcaatcagacgacacaccatgcggtatttttccaatgtaaacacagcattacgttcatcaaattcaataacaacttgtccttgttctttaggcaacaaattcttaatcaacgaagccggtttttttggcagaataaatgctgcgcgttcattacctttggcagccagtgttttgcaacgcaccaatttgtgaccatcagatgccaccattgtaatatcttctgtggtaatatcaaaatagataccattcatcaccggacgaagttcatcatcagctgtagcaaatacagcgcgattaattccgcccaacaatacggatgcatccatttctacgcgtacggcattgtcacccagcatagccgattgaggaaattcatctgcattctgtcccatcaggctatacttaccgttttgatactgtactgtgatttccaaggaattggtatttacttcaaatgatagcggttgttcggggatttccttcaatgcgtccagaattgttttggcagctacggcaaagcgtccgtcagcatcactttcattcacttcaactgatgtcaccatcgttgtttcactatcagaaacagtaatcgacaatgttccgtctttcagttcaaagaggaaacaatccaaaatgggcaacgcattcttcgaattaatcacacggctgatagcctgtaaatggctggagagcgcagtactcgaaacgataaatttcatatgttctgtgtatttaagttttatattattccctattcgtactataacttcatagtatcggacaaagttacaaaaaaagatcttcccacagcaaagaaaattaagaaaaaacacctggaacttctccggatttccctaaaaaattgtaacttcgccgcatcattaaaaaagaacgcaatggaatttacaggaaaaattatcgctatactccaaccaagaggcggagtggcaaagtcgggcaatgagtggaaagcacaagaatacgtgattgaagaccacggccaatatccccgcaaaatgtgtttcgatgttttcggagcagacaaaatagaacagtttaacatccagatgggcgaagaactgaccgtatcatttgatgtggacgcacgccaatggcaggatcgttggttcaacagtatccgcgcatggaaagtagaacgtgttagtgcaacagcccctgcaggcgcaccgggcgcacctgttccgccaccggcaccgactgccgcaccggaattcctcacaggtgacgcaaaagatgatctgccattctaaactaaaaagaatttaacacaaaaaaagggagaaagtttctccctttttttgtgttaaatcttatattttatctcctttgtataaaaacaccagattcggatataccacctcctccacacaagtgaattgtattgaaagcacgaaatgccggaagaactttgcctggcgaaagaaaaagttcggtatcagacgcacataagtttccggttgctccaccatcttttccatatccaccatcattacaaaactatatgtgggtgaaagactcccaatcccctcttcatacaacggaatatcatccaatacttcctcattctccatggcatctatataagccgtaagactgacaacatccggtgccatcagcagatgcccgcgataaaaacacacatacgtataaagagcagactctgtgatacctgtcaattgagtcagcaaggtattacgaggcaatatataataacgatatcctttcgcctttggataaagatgataatcagggtatgcctgcggaacaggaggcgcatccacttccttcggagaagtataaagcaatgactgcaagcggcgttcagcctgtaacacattcttcaccggaacactcatcaccgcacaaggaatctcatttactgtatctttcgactgaaaaagacaggatatcacctggtctcctgcatacattttcaagaaatccatccattcttcatctctttctttaatataatcggaataagtcgccttggcatattcctgttccgccgtaaagctgcacatggcatccatgtccgaaatggcccaacaatcataaaagaaagtagaaagtggaagccgttctcccggaaacccctctaccggctgctggcgacgcaaagcatttataaaagtatgtgtagtgtccgatccgtgactaatccccgaacaataaatagcattctcattcagcttcaaatcaaattccgcccaacttcccaaataggtctgcgaacgaataccatctgtatttttacccatctccaccgatttaatgcgcacatacaccgtagcttccacgttcgcattcttcccggcatgcatcagtttgaatgaaggcatatctatcaacgattttttggagagccgcgcgtcaatcacctgttctatcaatcgcttctgaaagctgatcgccaggaagtccgatgtgaaatacgctgaaaggaaacgtccgtcaggcatagaataaatgctgatttcctcacctctgtaatcaaagaatttagaagggaatgaactggaacaatatttcctgatgaatgactccaccaactcataatcacctgatcccagactgcaatacaacacttggttcaatggcgtatccggctcatgaaaactgataagcattttgttcatctgcttactaagtccgtgcggagtatcctcaagcaaggtatgcagatagtttttcagataaacaaaaagttcggaagcataaaggaagtgattatctttgctgcaactcaactggttgatgtcatccaccaattctgccatacggtctgtttccagcacagctattgcgctttgaggcactagagtatagagattaaaatctttctgactctccacctcattcaacctaaagaatgaatacaccccgaaccccgtacatagcaacactatggacacaatcatggcaattcttatgataaggcgtaacttcatggtttttcaggcatcaagtttcggcaaaaataagtatttctactaataaaacaaaacaaatgtttcaaaaactttagtagatataaaaaagttttagaatgcccgcctttaaaactctatttccattccatcaaaagtcagatgcacatcaggaggaagctgcttttcgagttcgacatgcaatccggcatgatgactcatgtgaataaaataagtttcgcgcgcaccaatgcgctttgctgtctccaatgcctcggaaatactctgatgcgtaggatgcggcttgacacgcaaggcattcacaaccagaacatccaagtcttgcaattgttcataggactcttcaggcatggtcagcatatctgtaatataagccaaacgtttacctatacgataccccagaataggcagacgcccgtgcatcacctgaaaaggaataatctccgtatgattgataaagaagttttttcccggctccacttcctgcaagaaaatctgaggtacaccgggatatttatgttccaaaaaacaatagggcattcgcgcacgcaagtgagttgccgtatagttatcggaatatatgggaatctcgccgaaacggcagaaaggacgaagatcatccagtcctccaacatggtcatagtgctcatgagtaatcaacactccatctattttttcaaatgaggctaccctcaacatctgttcccggaaatccggtccacaatcaatcagtatcaccgcgtcatccgtatgcaacaaagaagacgcacgcaagcggttatcacgcggatcggcagaagtgcaaacttcgcacttacaacctatttcaggcactcctgtcgatgttccgcttcctaatattcttagtttcactttaattacatattaattatcaatcatcagttcattcaaaagcaacctctgataatcatgattacttcaaataaaattcacttcgggatgtatgtcaatgccaaacttatcgcgaactgacgcccttacagcatccgaaagagctacaatatcagcccccgttgccccaccccggtttaccaacaccaatgcctgcttatcatgcacggcggcaggtcccagcgttttccccttccaaccacactggtctatcatccaaccggcaggaatttttatccggtcagcactcatttcataaaaaggcatctgaggatattgttcccgtaaggcttcaaaaacttcacgcgcaacgacaggattcataaagaagctaccggcattacccaatactttcggatcaggcaatttactttcacgaatatcgataataacctgtcgtaatgtcttcaagtcaactttcgggtatttttcaagttcctgacgaatagtaccatagtctaatgtataagactctttcttactcaaagagaaaccaacatatgtgacaaacacctgcttcatttccggccgtttaaaaacactgctccggtatgaataatcacattcatccgtttggtaaacatgcttcacgccctgtatgttcaccgtttctacgaaagaaatcagatctttcacttccacgccataagcaccaatattttgtacagccgaagcccccacctccccgggaataagagacaggttttcaactccataccaaccccgatccgcacaatagcccacgaaatcatcccacaccacaccggcacctacacgcaccgaaaccttttcttcatcttcagccgttacttcaatgccgccaatacgcgaatgcaatatcaccccctcataatttccggtaaacaacagattgctccctccgccaatatgcagataaggagaagtgatgcgtccggcggcaatcaacttctccaattcttctactgaactgtattccaaaaacacggcagcttctacatcaagtccgaatgtattgggtatttttctcatctcatgctctatcattcgtcatttgtaattcgtaatttcctaaatactcgtatcctcatatttatataactcccactctccacgatgtctgcgaaaatagaaaatattggtatatccgtttccaatcccatttactttcagaattttcgtattagagtaatcgctattcttttgtccgtaattgatattggacagtttgtctacaggcaataccggacggaaagcataccactgattcaagtcgagtgtagtctccaagatagaaaattcatcatccggatctatcgtaatatattctaaaggttcgcgaatatgccggctctgataaacactatcagtcacaaaacgcaaataaaacgcaacgaagtcttcattctccccctgctctatctgccggagattaatagcttccagcatccagacacccttggtacgttcgaaatagtatttcttcaccatacggtttttcagcaaaatccattccacctgtacggatgtcaaggcagtatctcccaccaattccaagtcatcttcatcatcgaagagcaatgtgtaatagttctgctgggtaaacagataatcatgttcccactcccccctctctattttagaaggtttatcaacgtcgtaaaaaggcaatggaaacttagtccgctgccgttgcaaagcgtcatccgaagcgtaactatagacgaaatcatcaaacgattcatccgcttctattggcttagggtcattatcaacttcagcctgtggtacagtatcagctttgtgtgcagctgaatccaccaaattggtgattgtcgcaaaaggatccatcttcgtcttcttgttgccgcacgacaccaagaaaacgagaagaaagaaccccaatcctatttttctcattctttaccggcccctgaaggtcacttatttagtttagctcttaacttctcaagcatgtccaccgtcatggactctaaatcatattgcggtttccaatcccactcttcacgagcacaactgtcatccaagctgtcgggccaactgtcggcaatggattgcttcaatggatcaatctcatataccatttcaaaatcgggcacatgcttttttatctcccggcagatttcctccggatcaaaactcatggcagcgatattgaaagcattccgatgtttcagacgtgttggaattgcttccatcaacgaaatggctgcattcagcgcatcaggcatatacatcatatccatataagtaccgggtttcaaaggacatacgaacttttcacctttcactgcggagtaaaaaatatcgaccgcatagtctgtagtcccccctcctggaggagttacattggaaatgatgcccggaaaacgaaccgcacgagtatctactccatatttagtataataataatcgctcaacaattcagtagttactttggttaccccatacatcgtacgaggacgctgaatcgtatcttgcggcgtctttacatgaggtgtagcttctccaaacgaaccgatagaactcggagtaaacactgcgcagccatattcacgtgccacttccagtacattccataatccgtctataccaattttccaagccatggccgggcggctttcggcaaccaccgaaagcaaagctgccagattataaatcgtatcaatcttgaattggcgcgccaccacttcaatagactgacggtcggttacgtcggcaatagcagaaggccccgatgctttcaattctcctttaggcatagcactcggaatgtatccggctataacatggtcatctccataacgtttacgcaattccaatgtgagttccgaacctatctgtccggttgctccaattaccaaaatattcttcatacgacttatttataaggtgctccatccttagagacgtgcaaatatacatacttttttttcattattctatcattttgctattgtttatttgaagaaaaatcgtgtcctttgtatcgtttagtaataagatgacaaacttttaatttataaagctatgtacgggaaaatgaaagaacacctcagcaatacgcttgctgaaattaaagaggccggactctacaaagaagagcgcctgatcgagagtgcgcaacaagccgccatcaccgtaaaagggaaggaagtgctgaatttctgcgccaacaattacctgggtttgtccaaccatccgcgactgattgccgctgcccaaaagatgatggatcaccgtggctacggcatgtcttccgtacgtttcatctgcggaacacaagacatccacaaagaactggaagctgctatctccgactatttcaaaaccgaagacaccatcctctatgctgcttgtttcgatgccaacggcggagtattcgaacctctattcagcgagaaagatgctatcatctccgattccctgaaccacgcctccatcattgacggtgtacgcctgtgcaaggccaaacgctaccgctatgccaatgccgacatggccgaactggagaagtgtctgcaagaagcacaggcccagcgtttccgcattgttgtaacagacggtgtattctccatggatggcaatgtagctccgatggatcaaatctgtgatctggcagaaaagtatgatgctttagtcatggtagacgagtctcactctgccggcgtagtaggtccaacaggccacggtgtaagcgagctattcaaaacttacggacgtgtggatatttacaccggtacactgggtaaggcttttggcggagccatgggcggattcaccaccggacgcaaagagattatcgacctgctgcgccaacgcagtcgcccatatctgttctccaattctgttgctcctgccgtgatcggtgcaagtatcgaagtcttcaatatgctgagagaaagcaatgccctgcatgacaaattagtagaaaacgttaattacttccgcgagaaaatgactgccgccgggtttgacatcaagcctacacaaagtgctatctgcgccgtgatgctatatgatgccaaactttcgcagatttacgccgctcgtatgcaagaagaaggcatttacgtcaccggattctattatcccgtggttccgaaagaccaggcacgcatccgtgtacagatctctgccggacacgaaagagaacatcttgacaaatgtatagatgcattcatcaaggtaggaaaagaacttggagtattatcgcgctaaagcgcgataagctacgggctacaaatgacgagttacaagttgctgcgctgtattcgtaagcgaataattgttcgccagactaccacaccgaaaggaacttacaactcgtcacttgtagcttgtagcttttaccaccggcagcaccaccgtaaacctgcttcctttccctggttccgaccacagttcgattttgccccgcaatttttctgcaatcacctgacagatagaaagtcccaagccggctccttgcgaaaactcatcctgtttatagaaacggctaaagatcattttctgttccgagagttcaatgcctcttccggtatcttccacgtagatagccactcggtccgattcagaaagataacggtatcccaacttgatatatccggttttagtaaacttagaagcattattcaggaaattagtgatcacctgtgtcaagcgccccttatcaaccatcacttccacctgcaccgcatccaactctttgatgaattccaattgttcggaaatcagcatctgatgagtcatatatatactgtcaaccaattctgaaacgaaacacttctcgtattcaaatgacatgtatccggattcgatgcgcgaaagttccagaatatcattgattagtttcaacaataaatcactgtttttattaatactgccgatatattccagacgctcctccggactcacaccatcatcaagtgccaatatattggagaagcccacaattgcattcagcggcgtacgaatctcatggctcatatttgccaggaaagactgctttaattcagccttttcagccagtagtcttgcttcttccaattcctgttcacggtctttaatcgcctgtatattcagcaacagaccggcagctttatatcctccaccgggaagcagtatcgttttatagcgaaactcccaccactgatagcctttttcattaaagtcacaacgcacctgagaaaccactttgcctgccttagaaatgtttttccagtaccctctcacctcatcccaatgatcgggatgcataaacaacaatagttcctcaaagccaagtgatttagcactcattttctgtgatatccagaattccttttcaaatacaaaatggtcattttccagcttccaggcaaaagtgtcgctaccttcaatagccaacgccaatgtttccttttcactttccagttcataaagggcacgtctcttccgcccttgttcgcggcgataaaggaagaagagccagacaaacaacgtggaaagcagaatgataatcaacacaacaccgattccccatactaccggatattcttcctggaaaggaatatttataatcgtacattccgccggaatactctctttggaaataccccgttgctgcatcacgttccagtctaccacatatttcttacggctctccctgacaggtatacccgaaggcttctcaccatgcaaaatacgtatggcagcactcacttcctcttcggccagaatcgggaatgtcgtaatatatccaccaagcaatttttcgttatagccgaatgcctcattaattgcagtaagactggggcttgcacatatatttccaatattaaccgatgtatagtcgcgtttcatctggaggtagcacattcctatggaatacttacttaaagtccagataaagttggccgtttcctgtttctttccaattcgtaccgacagactggaaaaacgggcatatccctctttatggggataatacagcctcttttcacgaggagttcccgagtagccgaccatacaggttactttttcatctttcagttgattttctatatccgcccgtatctgccggtcaatatacgtagaatcaagtactgtaaacagctccacatcttcaccaaataactttgctcccaggcgtatattcttcatcagatctatccggtcatggaaccccgtcacattaggatactctttcaataattcccaattaggatagttcactccaccaaaaaccaccggaatttcttttactaaaggatgacaacacttgaacagtgaataggcagcctgatcatcattcaccagaattacttcaggttcccagccgtcggaaaccgaatcgagcagatgatacatatacttcaattccggttcttcctgaaaagcctcacaatccagatatacgatacgaatatctgcattcaccccgtttcttctgaattctttatctatcaagcgattgaaatcaggatagccgacatagctttcctcataagaatgcacgattaaaattcgccgttcttcccgatccgaacagctgttcaaaacgaaaaaaaacagaaaaatccat

SEQ ID NO: 6427 - DNA, 57232 bp, Unknown
  gut microbiota DNA sequence
tctgaaaaaaaatcagacagcttccctacttagcaattctatatcaaaagattattaacgttcgcccaatttcacatctacaaagaagatacccgttgcaccggctttcttaatcatatcaacaatgcccgcagcagttgcctcttcttccacctgttcgcgtacaaatccccacaggaagtcctgtgttgctttatctttttcggcagcagccacatccaccaacttatcgatcatttcggatacacggcactcgtgtttgtaaacctgttcaaatacttccagcggagtaccgaaatcgttgggaactacatccagcttatcaactttggctttaccaccacgcttgattacgtaatcggccattgcacaggcatgctcgttttcttctgcccactgtttcttcaaccagtgtgccataccgctaaaaccttctttctccatataaaaagacatagccaaatacatgttagccgaccacatttcagccgtgatctgctcgttaattgcattctgtaatttttcagtaatcataatcgtattttttaaattaatttgaaatcattacaaaagtaacaatgatacacagacattgttcatttaataacattttttatataaaacaacccggattggcaggcttttcccgcagaattgcagcagcatcgaaacacgaacactgtctgatccattcttccggttctatttcacataaccattcaagtcagcgctgaggtcacgatgccccaccagccggaaatccggataatcttttagcagcaacttggcaagcagcagagggaatgtttctgaaagtcggttcccgtatcggcaaagtatccgctcacatccagtccaccttcatagcacacgccgattgagcgagcgttgtggctccgggcgtgcgcaccgttttttaaaaccggacgaagacttttgatatctccgttcttccttaatataataatgataacctacaccatatataacgcaaggtccataccgccttcatctttctcaaatctttctgtattcataacttagttgcacactacaaaataactcctgaaaacagaaatcaaaggcgtaatgtctatgaacacaaagtaaagaaagtgaggataggaaataaaaatgaaagcgtacaatcatcaaaaggatgatgtgcacgctcatacatatagtttatacttttaggagttcttacatattgttttacaatgtccgtaaaatcggaccacccatatcaaaacttataacaaacaagtttattcttttaatgttatgacaataaagatagctttttcctctaatcttcaacctaatgggctgagtcatgaaaagattaaatctttataccaactcgtccgaagtatacccttgtggcaactcacgacagttatagctcgaagccattatctcaccataagcacctgcagaacgtaatgcaatcaaatctccacgcttcaccttattcaagtctattgcttttccgaaaacatccgacgattcacagataggccctactacatcgtacgcctcaactgcatcctcagaagtgatattctctatcttatggtaagcctgatacaatgcaggacgaatcaaatccgtcataccggcatcaaggatagcaaattttttattcgctccctgttttacataaagcacctgtgagataagtgaaccgcactgccccgttatggcacgccccagttcaaaatggagtgtttgataagagcgtagtttcagatgttcggcataagtagagaaataatctttgaaatcaggtattgcctgacggttgggatgcttataatcaatccccagtccaccacctacattgatatgctcgatgcggatgcgatgtgcttccagtttgtcttgcaactcattcacacgattgcacagggcaacgaaatcgcccatatccagtatctgcgaaccaatgtggaagtgcaatccgatgaacttcacattcttcatctccaaagccacttctatcacatgatccatgtcttgcatactaatgccaaacttgttttccgccagtccggtagtgatattggcatgagtatgagctcctacattcggattgatacggaaagcgacattagccactttacctttagctgcagccagttcattgataatctccaactcgggaatagactctacattaaaacagaaaatattgtagtccaagctcaggtttatttcccaatcagacttgcccactccggcaaaaacaatcttatttgtaggaaaaccagccttgatggcagcacgcacttctcccccactcacacaatcggcacccagtccgttctcacggataatggtaagcaccttcggattagcatttgctttcacagcataatgcacctcaaaattgccatatttagcggcttctgcacgcacgcaggaaagagtgtcgcgcaacaccttcgtatcataataataaaaaggggtacgcagctcacggaatttatctatgggaaatgttcctttcatacttcaaaactttgtttataaagaaaagaacgcaaattacgcgaattacacaagagcctttatcagcgagttgtgcaatttgtgtagtttgcgttccatattattttatatctgtactttctatttctcttattcttcgttgaacagtgcatcactaagcgactgcaatgccttattcttgtcgcactcacggatgaggaaagaaatattgtagttactaccaccgaatgagatcattcgtaccggtatgtcgcgcatggcatccagtgccttcgcttcgaaaccgacattctcccattccaaatcacctaccacgcagacaatacacatatccttatccaccgtaacggttccgtacttcttcaggtcgtccagaatctcgttgagatgcttcgtattatcaacagatacagatactcctacctcagaagtacaaatcatatcgatagaagtctgatagctctcgaagatttcgaataccttgcgcaagaaaccgtgagcaagcaacatacggctggatttaatcttgatagctgtaatgttatcttttgctgcaactgccttaatcttgcccttctcggtatcattggaaatcatagtaccgggagcagtcgggtccatcgtattcagcagacgcaccgggatattggcatacttggcaggctgtatacaagtggggtgaagaatcttcgcaccaaaataagccagctcggcagcttcttcaaaatgaagatgacgtacaggagcagtcttatcaacgatacgcgggtcattattgtgcataccgtcgatatcggtccatatctggatttcggaagcattgatagctgcaccgatcaaagaagcggtatagtcgcttccaccacgttgcagattgtctatttctccgtaagcgttgcggcaaatgtatccttgtgtgatgtaaatctcagcaccgggatgcaattccaactgcatctgaagtttctccttaatatatacaggatcgggctccgcattcttatcggtacgcatatattccaaagccggaagcaaaatggacttcacaccacactcttgcaggtaatagttcatcatggcagtagagatcagttctccctgtgccagaaccactttctcctcaaacagtgtgaaaaggtctttggtataagaacggatgtagtcaaaatgagatttaatcagttcctgacctttctgtttatactcgggagtggaatacaactcattcacatgctgtttatatttagcctccagcttgttaatgatctcgttggcaccctccggatttttcttgtacagatagtccgaaatttccaccaatgtattagttgtgcccgacatagccgagagtacaactatcttctgttcaccatcagtgatcaatttggctacttcctttatccgctgtgcagaacctacggaagtacctccaaactttaaaactttcattttcgttcctgtattaaatgattatatattattatttgtttcttctacagtcggcatcattcccgaatactcggacgttacatctgttatctgatgacctgcacagcgatatacctgtcccggaaactcgtgaagcagatggaggttgtgcgtagtcatcaataccagcgagccacccgtgcggctgatgttatgtaacagtcctacaatagcacgtcccgtttccgcatccagattaccggtcggttcatcagccaggataatctccggagagttgagcatagcacgggcaataacaatgcgttgctgttcgcctcccgaaagttcgttagggaacttgtatcctttattacccattcctacctgcatcagcacttcagcaatacgatcttttatttccgatttgtttttccagcccgtagccttcaatacaaaagcaagattatcgttcaccgtgcggtccgtcaacaattggaaatcctgaaacacaatgcccagcttacgacgcaactgcggaatatgcttgcgcttaatgcggctcatatcataccccagtaccattgcttcaccggcagtgatatccagttctccgtagagtgtctttagcaaactggtcttacccgaacctaccttaccgatcaggtacacaaactctcccttctgcagctcgaggtttacctcattcagcacgcacaagtcctgttggtgtacttccacatctttatatcgtatcagcggttcagccattcccgtttaattattaatttttaattattaattatttagtgtttcttccacgaagcgctatgacgttcctgcaattctcgtgccaaatcttccagactgtatcctttggatgttagcagcacgatgaggtggtatatcaaatcggctccttcatagatcaaccgttcgtcagttccgttgcaagcttcgatcactgtttccacagcttcttcacccactttctgtgccattttattcacacctgactcaaacagactggttgtataagaaccttccggcatctcttcatggcgcttagtaataaaatcctgaagatgcttcaagaacattacaggctgttcattcttctcaccccagcatgtatccgtgcctgtatggcaaacaggtcccacagggtgtacctgaatcagcaatgtatcctgatcacagtcttccttgatagaaacgacattcagaaaattaccactctcctcacctttcgtccaaagacggttcttggtgcggctgaaaaaagtcactttaccggtttctaccgttttgtcgtaagcctctttattcatgaagcccaacattaacaccttagcggtgtctgcgtcttgtatgattgccggaataagtccgttcattttatcaaaatccatttaggtaattattaattatgagctataaattattaattgctatgcagcgtgatgcggtaatattctgtcatctttatcgccttatcactttgccactctatcacttttacatcacccgcatcgagattccctgggcgcaaagatacgattttaaatcgggaattttaatttctccgaaatgaaaaacactggctgccaacgctgcatctgcttttccttgcaaaaatacatcacgaaaatgttcttttgctcctgctccgcccgatgcaatcaccggaatagagaggttgtcagacatttcagcaagcgcttcattggcgtatccggtctttacgccatcatgattcatgctggtgaaaagtatttctccggcaccacgttcctgggcttctttggtccaagtaaacagctccttatctgtttctacacggcctccattcagataacaccaccagcctttttcagtttgtttggcatctaccgccaacacacatacctgcgaaccgaagttcttagctatttcatcaatcagttcaggacggcgaattgcagaagagttgatagaaattttatctgcaccggcattcagtaggcggtctacatcactcaattcgttgataccgccacctaccgtaaacggaatactaatattggcagcaatgcgcttcaccaactctgcaaatgtcttgcgaccttcaaaactggctgttatatccagaaaaaccaattcatcagcaccttgctcactatacgcgcgtgccagttccaccggatcgcccgcttgacgcaaattgacgaaattggttcctttcactgtttgtccgtctttgatatcgagacaggggataattcttttcgctaacacttttgttttgttttaacgatttatattcatgaggatatataatctaaatctaactcaattgagaatgattcgtcaataatcctgcatcattctttcaatttccttcaaagtaatacgcccttcatacagagccttaccaaaaataacagccggtaccccagccgtctccaatgcacgtatatcttccatactgctgacaccgccacttgctatcaggtaaaggtcgggatgtttttccagcattgccttatacagttcaatagaaggcccctgcaacataccgtcacaactaatatccgtgcaaattactttctgaatacctttctctacatattctttcaggaaaggaaacaattcacaggcactttcatccttccagccattcacagctatcttccggtctttcacgtccgcaccaagaattatcttctcactgccgtaaacttccagccaatggcagaacaattcaggatttttcaccgcaatactgccgcctgtaaccatctgtgccccattctcgaaagcgatcttcaaatcttcgtcacttttcacaccaccaccgaaatcaactatcagggaagtctgtgaagtgattctattcaaaacattataattgactacatgatgagaagccgctccgtccaggtctaccacatgaagccggcgaataccgtgcgcctccatctctttggccacttctaccggattttcgttatacaccttcttactgtcatagtcaccttgcgaaaggcgtacacactttccgtcgataatatctattgcaggaataagctctatcatatattcatctacttaattataattctaaaaaattgcgcaggatacgttctcccacacctccactcttctccggatggaattgggtagcgtaataattatccttatgcaaggcagcgctaaacggttgtatatagtccgtcacagcagctgtatattcattgaccggaacgtagaagctatgcacaaaatagacaaactcttcttttgtaaagcctttgaataagccactgttcgtctctgtgagcgtattccaacccatgtgaggcactttatcctcatgcttctgtggaacgaaacgcttcacttccgtatcaaaaatacccagacagtccacatctcccccttcttcagaatggcgacacatcacttgcatacccagacatatccctaaaagaggctgcctaagttcctttatcaatgcatccatgccactggcacgcagaaacttcatggttgtttccgcctcgcccacacctggaaagatcactttgtccgccgcacgcaattcatctttatccgccgttaccacagcctccacgcccaaacgcttcagcgcataatccaccgaatagatattgcccgcattatatttgataatcgctactttcatgaatataccttaactaaatatcactgttttattcttatatgccagtaccttgcgctcaatatgcttctgcacggcacgtgagagaacaatcttttccaggtctttccccttatttacaagatcttctacagtatctttatgagtgatacgaaccacatcttgttcaatgatcggtcctgcatccaattctgttgttacataatgactggtagcgccaatgatcttcacaccacgctcaaatgctgcatgataaggttttgctcccacaaatgcaggaaggaaagagtgatgaatattgataatccgattgggatacgcatcaatcatccgctctgaaatcacctgcatataacgcgccagtacaataaagttcaccttatgttttgccagcaattccatttcttttttctcctgttcttcttttgtctcctttgtaatagggaacaaatagaaaggtattccgaaacgttcagcaacatgttgcaagtcgggatggttgcttataataagaggaatctcgacattccactctcctgccgtatagcgtgccagtaaatcgaacaggcaatgtgacatcttagacacaaatattgccatacgtggtttcgtatccgagaaatagagacggaaaaacatttcatatttctgtgcgtacagcgtagcaaaataatcttcaattttctcttgcggtatcaggaagttcttcaattcccactcgatacgcatgaaaaagatattctccacatgatcgacatattggtccagatagataatatttcccttgtttaccgttataaagtctgtcacttctgccaaaattcccggtttgtcgggacagtgaagtaacagtttggccgttttcatcatcctaaattatcgtttttatcgttttcaaattacaattttctcgatttgagtttgcaaaaataacgatttattgtaaaataacgaagttttcgagcaagaagtttaaatcgagcaacagaaagcttcgttttcattacaaaaccatcccaatcccctttcacaaaaagctctgcaagaacttattttttttcatattccaatgttctcaaaatgaggatataaaaggaaaagtgataaaatcaagcaaaaaaatttcatcgtagctattgcaggtttcaaagaaatgcctacctttgcaaccgcaatcgagagagaaagcaattaaagaaatgaaattatggtgcgttagttcagttggttagaatacatgcctgtcacgcatggggtcacgggttcgagtcccgtacgcaccgcaaaagcaaatagcaaattaaggcaaagctctgaaattcaaggatttcagagctttttctttttctccgcttaggcaaaaaacagcggtttcaggcagttctcacgtggcttattcgtgggactttttgaaagccgtttttgctcccacgaattgacgcatttgtctttgattgtcagctttttgcgtagctggtttttgagtatggaaaactaattttgtaccacttaaaaatcaaagaattatgggagcagtgaaaagaaacacattgagcgtattgttcatcatcaagaaatcgaaacttctgaaaaacggtgaagctcctatctgcatgcgtatcaccgtgaacaagcgagtagccgaagttatgattaaacggagtattcccgtagatttatggaatcagaaaaaggaatgttccaaagggaaagaccgtgtagctaccgaactgaaccactatatcaatacggttcgtgccaaaatattgcagatacaccgtgaactggaaatagacaacaaaacgataacagccgatataataaaggattgtttttatggacgtgacaaggcacagcgcagcttgctggaagtttatgcggaacataacgagaaatgctgtgccctgattggcaaggaatatacggaaagcaccgtaacaaagtttgatacttccataaaccgcctgaaagagtatatccgcagtcgctaccaccgtgatgatatgatgctggcagaactggacgggcaatttatccgtgattttgatttttggctgaaaacggataagcactgccaaaacaattccgcattgaagcatttgaagaacttgaaaaaggttgtccgcatagctttggctaacggttggataaagaaagacccgttttacggcatccgtttcaagcaggaggaagtaaacgtagagttcctctcacgtgaggaactggatattctgatgaacaaggaatttgctatcaaacggttggagcaggtaagggatatttttgtcttttgctgtttcaccgcacttgctttcgttgatgtgcagcagttaagccgtgagcacctgataaaagacaataacggtgctttatggatacgcaaggcacggcagaaaaccaatcagatgtgcaacattcccgttttatccattccccaaaggatattggggaaatatgaagataatgcggagtgtataaagaaaggtgtgcttttacccgtaatcagtaatcagcgcatgaatgcctacttgaaagaaatcgcagatttatgcggcattgccaaacgcttaactacacatgttgcccgccatactgcggctaccgtagtttttctcgccaatgatgtatcaatggaaaatgtctctaagattttgggacattccaatatcagaatgacacagcattatgcacgggtattggatagttccattatgcgtgacatggcaaatgtggaaaatgcttttattcttttcaagaaaaattaaaaataactttttacgctaatatttttttgctatttttgcataaattacacatagtaaaaagttattgtcatgagtagaagcaaaaatatagtaaaaatattgaatgcatgtgagaaacatgaatttgataaagtagtaaaaacttatctcagagaaatatatggttataaacgcattgttttaacagatggtaaagatgatactggccttgatttgaaagtttttgattttggtgaaagtactcatcaatttcagatgacaattcaaaaatctgaaactactagtgaactttcttcttttaaaaagaaattatttggagatataataaaagctaaagagaatatggattcatatggatattctaacaatctatttttcttttactcatatgaactgacaaataaggtaaagagagagctaaaaaaagattcattagaattatatggaattaatttatctattatcgatgcaaagcaaatagcagaggaatcagaagaatttattgaattgcaaaatgttatttatgagactagtggattcggtgaatttcaattgaaaaaaacatatttgaagatgagagccaaaatctaatttatgacctaataggctttggtaaaagtgcagatgtaaagctacaaatagtagaagcttttgttttgcaattgctttttactcaagcaactgttagcaaagatgatataatcaataaatgtcgaatgaaatttagttcaaatgaaaatcttcaattttatgagaaattgataagaaagttagttacttcaaaacaacttcttttaaagaaagaaaatggcgaatattgtttgactgataatgagtatgagcgaattactcgtcttaatgaaaaaaatcaatctgatgaaaaaatatttattacagaaatcagcgttatacttttaaaatatcatcaagaagataaaattgaagaatatatatatcaattaaaattgatatattctaaaaacttcaatactgatttattaagtggtattgctgatagagaatgcgatttgtttaaaatatcaagagaatttacacaatttatagagaaaaatctatcaaaagaatattctccaaaagaattggcaattgaattatttacagtatgtaatgataataaatatctccaaaagaattgtgcaagtaaagtttttagcgagcaaaccaatttacagcgtttagagaactatgtaaatacaaagaagaaaatatttgttgatacaacattgccactatatctactttgttactattttaaacctaagaatcaatataatacttatatgtatagggttgctgtaagtttctatgaattctgtaaaaaaagaaatttgcctttgtatattgtagaaaattatttatgggaagtgcaaaatcatgtaagggaggctctgaatttaataccttttacatctttacctaactttcatttattaggaaaatcaagaaatgttttttacaacttttacttacatttaaagaataatgaaggatttatagaaaattttgagacatttcttgctgaatttggttttattcaacatgcaagttataaacaacacaacaattatattgaaaagcatttaggtcaaatcggttttttcaaatatgaatttaaaaagaagtatgatatagaagatactaaacgactcatacaagaacaattaatagcagacaataaagttaaaacaaattttggattaaataatgatgctattatgtttgagtttttaggggataatgatattgatacacattctttacaaccaatttttgtaacttgggataaaaccttagctaaaacacaaagcaaatatttcaaaaacaatccaaattctcaacgttggatacaatttaccccaagtcaaattatagattattatagtatactgaatttttcaattgattcagatgcaataacatctgacattattgctgtattatccgatgatataatacaaaatacacattcattattagattcattagcagttatattgaatcctgaaaacgaagtagggttagcttatacaaatagattagctcaacttcgagataatgaaatttataaggtaaggcaaacttcttctcctcaaattcaaacagaagatatagaaaatgaacttgttattgatgatattgtgtatcagttaactaatcattatagagataatactaaagaatatgaagtatttaaaatgatatttactcaaaaagaatatatagattcagttgtatcaacaataaatgatgctattgatttttattataaagagcattatttggctaatgatatattgtttagtaatttcgataaatacatcgaagaaattaaaatatttaagataaaaaatagtaaggaataattatattgtaaataaaatattaacaaagataagctccgtattccgtccgttcaagcccaagccctacgggttttaaagaaaatctccacacctcacgatgttcgggtagtattttctttaaaaggcttgcacagacggactactacactggcaaagttaatgttcttagtcagtttcgggaaaaatgtattcgggggacggtaggttattcctgccgttcttcattatagcatgattgcagaagtctgtctatatcgctttggcggtagataacctttccccgtatctgaatataggggatgatacccgtatctctccattcctgcaatgtgcgtatgctaactttcaacaacttagacacctctctgttgctcaaaaagctatccccgccaaatgatggtttattctcctttgccagtcggttgataccgtccagcaagcattccaaagattggaagaactcttttactggttcactgtttccgtttatcaattccatattgaaatattgttttatcggtagtttggaacatatcagtcacgtaaatagctgccataataagaaatggaaagtatatctttcacttcgtcataaccgatatagagccgcttgaagccctctacaatgaaatagcggttcttctctttctgtatctcgtaggtggctggtctggcttgcccgttatccgagacacggagcatggagagaaggtatttccgtctgcttggatatatcataatggcaggatgaagattcaggctttcccatgtgcctgcaatagccgacagcctgaaagaacaatttgtttctgtttcttttttcatagaacaatacttatttatggtttgacttcttgtttccggtatatgctgtaaccaatctttcaatatcggcagccttatagtacatcttgttccctatttgggaatagcccagtttcccgctatcccggtaattctgcaaacttcgcaggctgataccgagcagcgcacacacttcacggctggaaagccattcttccgattttcgggaactttccatacagatacctttcacctgactggcaaaagtggagaaacgcctgcacaccagttgaaaggtctgttcttcgacagccactactttcatgcctgatttccttttggcgggttgatgatacctttgtcggcttcttcccgatagagggaggaaatgacttctttatagttgttcaggtgatgttccaatacattgtctataaagttgcctatgcttacccgcttgcccgcaatgacacccaccattcgggcaatacgtccgtgtatctctccactgacatacacactttgacgggtgcagactgtccgttttttgaggaacaatgatttataaccatcctgttccctgctttccattccttgcaagggttgttgttttactttttccatatattcactttttaaaggttgatagataattcttcattcctattgaaagaaaaaagacatccgtacagatggctatatctttggacagctttcaaacaagacataaagacatatttacatcttgtttgattgtcttgtgtattgccttatttcaatcaatccgtaacaaagaaaatggtaaaaacagacgctttataaaaagcggttgttttgtcttcccttgtcatggattgtcacgtcagaccgtatttcagcagcaaacggttgtctgtaattttgtagtggataaacggacggggaaagaagcctgaccgcttgcttcggcaatccgagggaacgaggattcttgctttcaaacgaaagcagcaagttgtgttttcaggtcctcagatgcttctgagtgcctgaaaaccttgcacctttgcaggtgggcggtttctctccgaagtcgagaaacttgtaaaaatatcagcttatggaacagaaaaagaaacgcttcaacaagggagggcgaaagcccttgttaaacccgaaagtgcaccgctattcgtttaatctggacgatgtggagaacgccaaattcctgtcgttctttgacaggtcggggtatgcggtaaaggcacatttcatcaagaattgtattttcggcaaatcattcaaggttgtggtaagggacaaaagtaaggtggactattatatccagctaacacaattctattcccagttcaggaagatagccaacaattacaatcaggcggtgaaagaactgcattccaatttttcggaaaagaaagcacttgcgctgctttacagactggaacaatgcaccgttgaactgataaagaccaatgaaatgatagtcctgctctgcaagcggtttgagcaatcctatcagagagagggtataatatcggcggatgaatgacgggaatctgccaaaaaagaaatatcccgaaactgcccacgtgccacaatttcgggataacttccttactgcttattctctccgtgttccttctcgaactttcggagcgtacccacatcgaaccgctccctgatgaactccctgacatcggaagcccgataataggctttgccgctaatcatcatgaaagggagctttttcttggctctcaatctttgcagtgtacgggtgctgcccctgaacagcaggcacaaatcctgattgtccaacagcttgtcacccggcattacttcggggttgttctgcaaagaccttacacctttgcccacttcttccaacttgtcgagcagtttttgcatccactctttaaactcatagttttctatatacatattcgcttcatttttcaagttatacataaatgattaccaaccgattgatgaagcaaagttcggaaaatgggagcaaaagaattaaagggtagcatacgctaccccgtataaattggtgctaagtgattgattatctatatcctttatttatgtgttcttttcggataaggtttgccaactcattaagaaactccgttaatttggcaggtttccgtttgatgacatccatatacttttggtgataatctcctaatttgatattaaaaagccattcaaaggctttgcctaagtctgtcaaatgaacagaagtgccattttgatatattatccgttgagaaaggaataaaccgtcaacaatttccatgatattgataaggcttgttttgtctgccaaatggagaggggaaagatataggttatttgcgtgttgctggaattgttcagggtatttgatacgcaagttcacaatacgcacttctgtcttgattagttctattgcttcatcaatcaagtacagatagggtgtttttttcttgctcaaaccgcatacggtacgatttaagtctgtgcagtccaaaagaaaaatagcgaagcaaaacactataattctgttcgttggtactaaaattggctaagtgaatagccaattcttcaatagcttctacaagttcagaggcagaaactttgtgctgcgagtattccgataataatcggaaaaatctctgttgggataattgaatcataaccaatctatttaagattataatctaaatttgaaagagttttttctacttacattttttacaatatctttagataaactaccgtcatagccgttatattgggcatttttgtaaagttctacaagtttgcgactataatcaagaatcatattgtgggatttctgtgataaatttgctgctaaaattccacttcccaaaacaccgggattacatgaaacggtattttctttaattgatttcattataagctccacacaagtgtagtttttgatattttcttgttgcaaacttctaattacatattgatttatacgtcctttgtcttggttggtcataaagccataccaaagtaagcatttcattcccgattgggtcgcttttacaaaaatatcaagataggttaagtccgatgctcctttcttgtctatttcatatgggtctatatgaataaaagtagatttaggaagagtaggtaataaatcaatcattccgtttaaagagtccgtgttaagaagccgtacatctgaatgaatttttatttgtccggcataggatgatacgttatccaaagcacttttttctgtatcgaaaaagatgaaatcgtttactccttttagaacattcatcgctaaccccggtgaacctaaataattccctttcagcatttctgatttttccaacttataatacatagaatctttcagcccgttttcatcatttgcccgttccaaaaaatgataaatgccatattgctgttcaagagtatgttccatttgataaatggcacatgcagaattagtttctacataggtcgagggtttttcattctgaagaatttcacataagaccaaatgttttaagacatcgggttgcttgccaaaatgtttataggtgctcatactatatttattaaaaaattgtggcagcaatattagggcatataaaacaaaaaagccttgaccaaagtcaagacctctattttaatagtatcttttttcgtattcggctaagagtttcgggcgttattcccaagaagtgggctatttcctttaaagataattttccttgtaaatcaggacagcgtttcatcaaggcttgatagcgttgttcaggagtgtcgcaatagaaacctaacaatctctgatatatttctgcaaacatcgtttctgcaatccgtctgcccaaacgttgagtattcatatcggtttcccaaaattgatttagtcggttcaaagaaagaagatacacctcgcaatcggttgatgcttgtatattcacggtagctcccattttgtttataaaagaggggtagtcacaaacaaaatcatttttaaaactatatccaattatccactcattgccattaacgtctattcttgataaacggaaaatgccagatacaacaaagcctatttgatttgtcatttcattctgacgaatcaaatactcatttctttttattgttgtaaatatgccctctcttagaaaaagtctttctaattcagaggtatctaatatttctttccctacattaaacttatccatgctaaaatattcagtttcagaacaaaaatacaaatattggggaaataatagtactttacgctttcatttattctcataaaagcgttatatttgcaccaactcaaacaaccatcgcaacgccaagcaattaagcgaattgcacacgtggggttatcagtgggagaaagaataaaagagcttgctaagatattgagtacgtgaagaatagaagaaaagttcatcttccgtacgcaccgcttaaagctctgaaatcgaatgatttcagagcttttttgttcaatataccagatgttccacctaataacaattacattccaaaccttgatgtatccacctctttcagattctttttcttataccctccgaagcgataactgagattcagagtaaaagcccgcgaatggaaagcgctgttcatatctaagtcttgtcccttaaaacgaactttagtcttaggcatccctgtattaagaatatcattacaacgagcggaaaggctcatcctgtcgtttgcaaaactccatttcaatccggcagtaagattaaagatggattcaatatcaaatgttccttgtataaccggtgtttgtacattccccatcaattcaaaagccagatttttattcactttaaaagtattatccagcatagcactgaacacccacttttttcgattgaaaggtatatcaaagaaatcatcacaacgttgcctcatctgcataccggctacagtcaatcgagaatccaaccaatttcctgttttgaaaggtaatatgatgtttgctccccacaactgcatatagttccagtttgtatttttataaattagcgccagtctgtcggtagattgataaggagtttgtataaagtaatctggagtatgcataaagaacaggttaaaaatatatttttgcttcaagatataactcccgttcaaattgtaattagtcataggtttcaatcccggcgttccccacagttcagtgtacccgttgagataactaaccgacgattgcatatcccaatagcccggatacgtcttatctgtagataaggagaattggaatgtatgctttggcgttttaaagtaagtcagcgatgcctgtggataaaccgcccatttatgataattgccgatagtataatattctcccgtagccgatactgagaacgaaactcctgtctcgtagtttttactgagtgacacataaaaattagtagtctgttctttcagatcagagtacatattctgagtatgaatatcccccactaccttatcataagtctgaaaatcacgatcttttgcaaaccgataggataccccatatcctaaactccatcctttagataatgaatgtttttgatctgcataaatagaatagcgatctattctttgtccgccaaccattgaaaaactgctttgcctgccatcctgatagtcggcataaagactttgatgattgtcggatttataatgcgtataatcaccacctatttcaagtccaaatcctgaatgatactgcaatgtgacattattcatccgcgcatcaagatatttatccacattactggtttgataattccctgtcgtttcgctgctattatactgatcggggctatagctacctgtatatatcacattaatcgtatgattgtcattgaaattatactcaaacgcagttctgaaattgtgattccaatacttactgcgtaattgctcattctggctgatatcgtaccgttcattcttcagtgcatgcctggaatcgaggtctatatattccatattcttcacatcattcgctccatacatcacatcaaaagccattttgggtgtcgataaacggaaattccctttcatgccaccgctattaaaatattgattcttataatcagcacttacttctccttgaaaagaatagtcattcgagcgttttaaaacaacattgataaccgctccccgtacatgatattcagggggtgcactatacattacttccactttctccaccctgtttaccggagtattacgcaaaagagtttcaagctgcccgacatccattgtggtaggttttccattcaggattacagtcagatttcctgcaccgaccagagtcaatgcccccttactttcttgcactcccggtaacctcatcaatgcttcataggcattattcactacttgcttttcagataaaacagcgagattataacctaaacgtccattctccacttttacaaatgggcgttctgcctttaccaccacttcatccaaggcataatcctgaggctgcaactgaatagtcccggcatttttcccattgccggttacttgcttcgtatgaaataaaagatgttggataatcaagcggtatttttcttgttggccattcaaagtgaatataccgtcagcgtttgatatcgacgcatctatataaatagagtctaccgtttgcaatacaatggttgccccctctatggggcgctgttcactgtctattatcttgccgctaatggtttgtccccatacgactgtttgaaaaccgcctactacaatatagctgattacagataagattactttattcaatcgcatcattctatgtcatttacagatactaatgccaccattagctcggattacagaaatttcatgttttgatttctctgtttatagacgaagcgaaaaaatcatatttggtttataaagaagaaaaacatttaatattcttaaatataagattcacccacaactcttgatgcatccgctaatatactctcgctgccttaccaggtacggagcgggtacggaccagatacggttcaggtatgttttaaatattattttagagtttattcagcaaatgtgcctgtagacataaagactaccgaatacataaaataatcctcaccctctgtttgcggttgttcaaacagttgcttataaataggctccggctcaggtccgaaaagtaaatctgcatccggagtgtaaataccacaataccatacaggagccgctttcatattaaaacgcggaatgccttctattacaaatttataaaacccaaccttatcgccatcttttacgactcttgtcagccctccgtaattggtacccatattatatctcaacccttttaaaggaatatatccatcttcaatcaagttaccctctgcaaatttcttcgctttacaggtaaaaggtatttcatattcaccaccttcgggagacaggataaaaggattaggaccatctacttttatagtgtattcatactctacttttgccttcgatattacatctatcaatttgtagacaatgctactcccatcagcaggaggatcaaccaaagttcttttctcaacccataaagcatactcatagcctttttcgtaaacgaaatcagtaataccttgaaaatccagcgttttgtagtcgctttcactttcttctttcaccagcatacaatcaatgggagaatcacttccccaaggctgataagtacctgttttgtcagaaataagcatttttacagtttttactttgtcttgcggttcatcatcactacaagcaacaaagccagtgattgacaggattaatagcaataatcctaataagcgttttgtcttcataatgttttctttaagtctagttttttaattatgcaaagatatacaaaatctctttaagcttattataaacaaagccttttatttcttttctcagaagaagcttgaatagaattttaaaggagataggctatatgaagatataaaagcgtaccttcgtcaacagaatgagatatcgaagaataacaaccaccggacaaatccgggaaaaaaagaaagagcgcaggcaatctatatatgtctggctgatagtaattgtgatcctggcaatacttgtcggagtgggttatctggccactcccagtactgtattgctccagcaaacagcatttcggggtatcagttatcgcccactcatggcattcgtgatgcttttcaccgccatttttatcattgttattggcatactactggcagataaatacacaaaagtcggatattacctgaaaaccatcgcctttggcattgttataggaatgctttttcacggtatgggtgtcaatctgttactgaatatgaatcattggttggcaagtaggactcccgtacgcaaagaatacagagtaacagaaatccgttttctaaagcccaacaaattggctcgttatcggaccatattgcctgaatgcagaattctgaaagctgtcgaccaggataatcctgacgactgtctttacttccatgtccccataaatgcacaagtagctatgggatgtatattgcatgttacaataaaaaacggtatctttggatggaaagcagtggatgaattagagttttacaacccataaaagaggccgtatcaacaaaggattatcatccattctgatacggccttttcttcatttagattttctttccgatatagaatacataaccataaaagtctttatacttatagtataattgttgctcatggcgctgattggcaatcagttcttcagccgcctggttacccgcatattttcgtagaaagttttcttgggcttcaacctgtggcatatagaaatgctcgatccagcaattttccggtatacagaaacaggctacaggaatatatccggccttctgcatctgtgccagcttattgggaatcgtatttatttcaggataagcatccatccagaaatcattgatctcagccggacgttcgtcagtgaaccatgatacctctgatacggcaatataaccacctttcttcaaaaacgaacgccatagattcaacccgtattcaaaaccaatattatagatggctccttccgaccagataagatctaattcttcattccggaacgggagttcatccattgatccaataatacctttcactctatcctgcaggttaaagtgctcggcattactattgaattggttgataaaatcaggaaacaaatcaatgcctgtaatttgccccggagtatgttgcgccagcgtaatcgtttggccacctgtgccacaacccagatcagcaatcagagatttatccgtaagcccctcaacaaagctaagagccttgattgttgtttcagcacttcccggtccctgacgttctacacttgaaaagtattcgcagattaaactaaaatcgaattcgtgaatagatttattttcgttactcatgatgcccacagttatttacttaccgaatccttcttaactttaaacattcaacatttttttatatctccacaaagataggcagactttttattcctgcaaattatcggaagagaaaaaagaacaccacccttgcgacctgttcctttcgccataactgtaatttaagttgttactatattttccttattttctgacactcaggacaatagtaaaccgaccctccaagataggcttctttcacaatcacactgccacagcgcggacagggattcttccatgttttggaagaaagaatcgttttataccctccctcatttccataaaggtctgtctgggtatcacggcctcttccggaagtcatagccattaaggtatccttcagagatttaaaaagtgcccctttctttccatccgacaagtcaatcactttctgtttcgggtgaatcccggcattgaacagaatatcctgcgttaccccattgcctacacccggaatacgttgttcggtagccagcagagctttagccgtcaatgtctttttggctgaagcaaataatttctcaaattccgcttccgtataagcatcactcaacggagaaatactttcacgacttatcgtataatatttattgtcgataacgccatcgggataggcactgataaaaccatacatggcaaccgtgaatacaagaaacgattcatcttcaaaagtcagcagcaactggtaattagcaggaactttatcacccggattatagtaacgtgcgctcaccccatcaccgatattcattatcacattgcccgacaggtaaaaatcaacaaacattccatatcccttagacgacagaaccgtttttccgacgagcaacttcccatactccagtggatcgccactatagaacgtgaacttatgaggcttggtagcattgaacacttgcgtaatcgttttaccacttaaaacatcattggcttgcttactcagtgtaagtacttctggcaattctaacatactcttatatcatttagttatttatcaataggaatataaatctccgtcagcaattcctcaaccggcgtttcatccggtgcattaagatacacctcaaacgtcaacggacgtttctgatgatacatactgtaaggaaaccattgattatagatcgtcttataaaattctggtaaatcagaataactgcctttatacctgaaaacagcgtacatccctccgggaatttcccgaagtaataatttcccttcggaattgacacgcccttcaacaagaaccccgatatagaaccgccgttgttccatcggtgtaacccaaggattatcctgacttatactcacaaaacgattaccgggaccattctgcaaatgaactgctttataatgcagtaattgcttccagattgtagtgtaagcatatttatcacgaaaagtatcacctacttctatgcaaacggctttcaaagtattgatacgtttaattttagcctcaggcatactatccggttcttgtttcgcattgacagatttatacttttcgcgataagctgacattgaaatgccgaaatgtttcttaaaagcctttgccagactaaactttgtctgataattagtctgcatacctatctcttcaatactctgtccggtagcgataagcagatgggcaatatattccagccgtaaacgctggatatatgtaccgatattctcaccggtaacatttctgaaaacctttcggaaatggaagaatgaaaggtgaaccatttcagccaactgttcgggatcaagctcatgaaagagattttgatcaatataagtccgaaccccattgacagcttcatagtgaacatgttgtgtcatctctttctgtcgccagcgtttcagggtgggaagacgcttgttcaataaggtttttaattcttgtggagtatagtcggttcccgaataccaattgtacttatccgtgtatttcacccatatatccaccatttcattcatagagatgtccaccgtatagttcccatctttcagacaatagtaacaatactcgtcactgcaggagtgatcggcattggtacctaaatactcttctacatcgaaacggaggggcatcccacaactttggcagtactgtttgtccactgtttgattcatggcacaaatatacgatgcctattccggatatgattatccaaaataggcatcttttattatttgctcctgtttttcagagtaattgtcttgatttcatctccaaatatttgtttatcacatcaatcgagagattttcaggtgtagtcaataacgaatagataccattctgtttcagtgtagatacaatcagacgcttctcaaaagcaaacttctctgcaatgacatggcggtaatatccctccgtatccttcgcaggagaggcaatatacgttttcatatcagcatcttcaaagaaaacaacaagcaagcgatgctgacgattcagttgctgcaaataagccaattggcgattcatacttcccatactggagaagttggtatataaaaccaggaaactgcgtttactgacatgtttattgaaatgcacgcagagagaggaaaagtccgtttcaccaaaggtagtctgctggctatagagattctcaagcagagtttgcatctgaccgggagcctttgaggccggaacaaacgaatcgaaatgttcattgaaagtcacgatccctgccttgtcctctttccgcatggcaacgtacgaaagaactaaggaagcattgattgcataatccagtaaagtcattccgcgaaatgcctgctgcataacccttcccttgtctatcacactgtaaatctgctgtgaacgttcatcctgatatacattcaccataagttcatgccggcgggcactggctttccaattgattgtacggtagtcatcccccttgacgtactcttttatctgttcgaattcagtatgatgccccacacgacgaatacgcttgattcccagctccgtcagattatcactcattgccagcaattcatagcgatgcagcatcagataagaaggatacactttaatatcctgctcctctccgcatgtataacgccgggagagcaaacctatccgaccggttacgaatacgcgaatctgtccgaaaccataaatcccccggcttgtcggacgtaaatgataacagatttgttttccttcattcgcctgaagctgtacccgaaaactaatatttctctgctgaaaaatgaaaggtacttcatcgataacctccgtaaagacgggatacggatagcagctttccacccgaagattcaccgcattttcgtccccattggaaaaacgagcggagcattgacggaatgcccgaatcccacgaatccggtaaagcatatatccgtctgccagcaccgacagcaagaggagaaaaagcaccccctgcccgatggtaaacaacggagcaaaagcatacccactacccatcaacaggataatcaggatgagaaccatataaaaccgacgggtaagaatcatttcggaacttctaccttatcaatcaggcgttgcgttactttcactggtgagtagccctccatttcagcttccgccgtcaggatgagacgatgctgaagtacgtatggagccacaaacttgatatcctccggtgtcacaaaatcacgtccctgcaaaagcgcataagctttcgaagtctgcaacattgccacggacgcacgcggagaagcccccagatatacagctttacttgtacgcgtctgctgtacaatcaaggcgatgtactgaagcaatgtacggtctataaacacctgcttcatcagattacgaagcgacaaaagctcctctttagtaatagccggggtaatgtcctccagcttcacaaatgcagcattcgtatggtgacgctccagaatattcacttcttcatccaatgagggataatccatcgtcagcttcatcagaaaacggtcaagttgtgcttcgggcaatttataagtcccctcctgctccaccggattctgtgtagccagaatcgtataaagttctcccatcggataggtcgctccatcaatgctgatctgacgctcttccataacctcgaacaaggcagcctgtgttttggcaggagcacgatttatttcatctaccagtacaatatcagcaaagatcggaccgcgatggaaatcaaaatcattggttttcatgttgaataccgttgtacccagcacatcactcggcatcaaatccggagtaaactggatgcggctgaaatctgcatcgaccagacgggcaaccaggcgtgccaacaatgttttcgccactcccggcactccttctatcagcacatgcccatttgccaacacagcggtcagcaccaagtccaccatctgttcctgccctacaatgacggaagcaatccggtctttcaactcttgtatcttctcggaaaagagagttagatccacccgtttttctgtattctcttccataaacttcttctttatatatgatcgattatttcattcattttatcaataaactgcttcatttgctccgcagttatcgtttgccctccataaatcaccggtctgaccgtacggataaacttaccgatttcttccgcactcatgccggtcttctgagcaatcctatcgaaagagcgttcatcatccgccacgtcttccacatccacctggatttctcttctcaactcttcggcaaagtaaatatactttttatgaaccaagtcggcatggtctttcttctgaaaataaagcgtaccgatcagttccgtaaactccatggatttattttccggttcatgaatcacaggtatcacacgttgtcttcttcgcgcagtaaatgtcataaagagcagaatggcaatcattgtcagatacaaagcccagcgaagcggtcgttgcgaaataaaatagcggaaaggagacatctgtacctgtgcagcttcctccagatatccctctgtgcgtattatcggaaactctcccatctgagacagcagacggaaaatataagctgcattctttccgtccagtacaccataattggtaaaaagcagcggagtagaaaccaaaataatttccccttttccccacgaacaagacatggcaaccggaacattgcaaagggtatccacttgcaatgaatcaaacttcaccccaaagtcatatctgaattcatctgatgaaatagatttctccaccaacactttcacagagagcgagtcctgccagaaataagaggaacacaattgcggataaaaacgaaagatccgccggggatagacagtagaatctcctacccaatgcaaactatccttcgacaacaatgaagcggcatactttctcaacacaatcggattaaaataagagtagctactctcaaaccccagtgtatcccgtaagtttcctgtaaatgaattactcaccaacattattttatttccccgctccgcccctttcaacaaggcattcacatctacatctgtcagagccagatgattgttaacaaccaatatcgcccggcgggaaaccgtatcttcctgctccaactgataaaaggttttcccggataccgaatatctcatcggcaatgaagcagagagtaaactatcaaaaacagcacatccgaaaggctgtttatcatagtggctaaaagtaggagtccatacgaatttcttcggcaaccgacattctattgcaaacatcaggaccagaaaggatacgatacagatgataaaccaatggcttcctctcatacagcgcctcctttcttcacctcttcctgcaaagactgcatgacatgaaacaatgcttccgtagcttcaaaatttccataacgcactcgcaggaaatgattggtcaattgtcggaaagcgggcatccgcacttcataaacatattgtgtaggcgttttgtagagctgccagtctatacgcttttcatcactgagttgtttcaacgtctgcaaatacagcaatcgtaccgcttcccggtaatcactacgcgaaagcgcgtcagcaatacctcgcgcaaagtcaactccataaatagtgtcttcttccactgcataaggcaaagcatttttacgggaaatcatgaataactccggtcgcttcttgtaaacgaaccagattatcaaaattaaaagaaggatagcaatgcctatcagaataagctccgagtattcctcagcaaaatgactgccgaatattttttgcagaatctttccaaaccacctgttgaaccattcaaacacattaatatcaggagccatcaactcacggccatagtcatacgccggatcagattgccacacggcaagctgggtagtatcacataccaatgtatcagccggagaagttatcatttatacaattctgtttttagagcttatcaaaattatcgatatcactttccaccatgatattgtccaccttttccgaagcatgcccgtactgatacgccagacctacaagtgaaaagatcatagcaagataggcaccgaatgcctggacaatggccaacagataaagcatgaaattatatcctaccgataccgtagcctcactgcctccactactcattgcaaatatggatttcacaatagtgcctatataccagggcatcattgtcactccctgtaagataccggcaatcaaccccataataagggagatcaggaaaacacctccccacgtagcaaaacccagacgaaaagtcttcttcaaagattccataacggagatatcctcaaagagataaatcggtgcccaaagagcaaatggtacagccaaaataatcacaaacggaatcaccaggaacaggacgggccaaagcaatgccgccatgaatcccataatcacccctaaaagtaccattaagagcaatccgaaaagagtcatcacaaccaatcttttcacattacggagcaacatcggcctcaacatccccaaagttacgccttgcagacgttcgtcacgttcgttgtaggttcggatcaatgcataaatcaaagaagtcagcgcaatcgttcctatcaaaaaaacaaacatgtacagactataataagaaaagaatgacatcattagagatgcatcagaagatacgccgccacctgataaatcagccagcaccgtcatatatcccatcatcccgttcaaactcagcgcttgaataagacaaatcggtaaaagcagatacgtagtaaatttcagcatcagcttccagttttcttttataaaatcaaaagacgcactcagtttctcaccgaaattacgttttacatacattgcgattttaggcttttgtgattccatgtcgttttctattaggtagataaatatagtagaataaaataaatgtcagggatgtaaggatcaggccgagtctcaacatatccggcagttgggtatggcgtgtgagaaaaccctcaataaaacctgccataataaacacagggactgtccccactacaattttcaatcctcttttcgctcctcttttaaaagattccagtcttgaataagttccggggaaaagccatccgttacctaaagccaaaccggcagcgccggctacaatgatagcccagatttcgagcgttccatgcaaccagatggcaagcatagaatcccaaagcaaaccgtgctgataaaagaatgtctggaaagctcccaacatgactccattactgaaaagcatataacctgtaccaaaactggtcagtatccccattgcgaagcagttgaaagaaaccataatattattcaacgtgattcccaaaaacatcggaacctcagatgagctattgtacaccgccatgggttcgccattcgcaatattgtccaacgtcatgtctacataagaattccccataatcaggcggacaaaatccggatcagcggcagcggatataacaccgaccaaggcactcactataaaaatcaggaatgaaaccagcaattcccggcgtgcatcgtgcataacctgaggaatttccttcgtccagaaagtgatgactctcgaccatttctcacgcttgttccgataaattttattgtgtaaagcagaagcgagattattcagatagatagtaatacgggaagtcgggaagtgcgtctgcgcaaatgccagatcggcagtaagatccgtatacacatcggcaagccggtcaggagacgagtttgtggcttgctccaccacgccttcggcttctttccatttttctatattccgacgaataaacgttacttctttcatatttttactgacttcgaatgagttttgtctgaaatcaataacaaaagtaagagaataatgatatatttgcaacgaaatacttagaaatattcaatcagcaatggcagaatctactattcttacagggcaatttgtccgcatcagccagacgcccgccagtattggcgagcgaatcattgctttgattattgattacgttctgattggattctatatattttcaactgtaacggtattatccaagctccgcctgccttcggatttcactatgattttcttcctggcggtaatctatttaccggtgctgttctattcttttctatgtgagatgttcaattacggacaaagccttggaaaacgactgatgaatatccgtgttgtaaaagctgacggttccgttccgagcataagttcctacttactccggtggctcctcttccctatcgatggtccgattaccggaggtctcggactattagtcgctctattaaccaaaaacagtcaacggatgggagaccttgccgcgggtaccatggttatcaaggagaaaaactaccgcaaaatacatgtcagccttgacgaatttgattatctgacccagaactaccagcctacttatccgcaagccgctgacttatcgctggaacagataaacgtaattacccgaaccttacaatccgggaaaaaagaccgcatacggtacattgcacaactgacaaaaaaagttcaggaacttctttctgtgacaccccgtgagaacaatcaggagaaatttctccagaccgttctccgcgactaccagtattatgcattggaagaaatctgatatctcccaagcaatacgtaattacaccacaacaaagctctccgatttaaagttactgtaaaatcttccggaagttgccgtaaacttcagtacacaatagtcgggatcagtagcaccttctttataatacatggtatccccgtcctcccatatcatttctttactggcactgtccgtcaacacctctaccgtgccacgcagcattgctcctctataaaacctcgaatcacagaaatacatacaggcacgattgtttttccggaattgtgcaacacgcaccgatgaagtatttgtcgacagataaatcgtctttatcccttcccgcttccgaggttgcaacatagcttttacatttgggaagccttcttcatccaccgaacccaggaaagcgattttcaatttatcaatcatattcccgattgttttttccgcatctctcattctactattattttaatggttattgaatgaggcaaagataaggacacaacagaaaatcggcataacaaaaacaaagggagaaatagtactttttacggtttatgcatactccggtaaaccaaaggagtctcacccgtacattggcgaaagcatcgcacaaaataagaaacagtagaaaaatgaagttcaaatgcaattatattgtttcgcactcattcccatagctgaatttacaatctcattcaggttattgggagtgatacaaagtttgtctgcataatgccggacagaatggtgctctctcatatctgccccgactaattcaataaatttactgatatgtgtaccacccgcttctttgttcccctcttccatcgaaatcagattctgataggctcggttcagtaacatcagcgcctcgtaaagatatgccctcaacacatgtacatcgtcctgtctgtattggtctatttctaccttaatatcatgcaaaagctggagtatacgcttataaagttcatcgggcaagtgcaatccggatgcagttttttccatcttgaagaatggaagtatcccaattccgcacctcacccggtttggaaaagaaaacatcaccgggaacagcctgatatgtccggttatcaatagaaaaactcccttccccttctgttacaaaagtaatgtcataataagtcaacgtgtgtacggcgctttcagccaggaacctctttacatatttcagttctaccacatctatcagaagttcacttccatacttattcttatagaatgtatatcggggaattgagtttttcatcttatcagtactaaatttatttatttacaagttcaaatatcagttgagattcatccaggaagaaaactttatcacccgtcagtttaaataaaagtgtattcgccaaagagccgttcttctcttcggattgcacaaactgctcattaaaaatgcagaacatacccttctgctcttcactgacagactcccaggcataaggcataagaggattggaaaacagcagcgccggacgatctaccagaatccatttatcagcataatataatttcccaatacccatgattaaagttactttatagaaatcccgatagctgaattgcacagtaccgaaattgcaccggcgggagaagatattgaaatattctttccctttagaataagttgcatccagtttcggatcgcaacgttgtattctcttgtagaattgaggaattgtttcagccattatatcttgcatatctatattagaggacaaagttaaagattctactttaattctatcaaaacaaactaatttactccaccatgccacacaacaaatccttccgtatctatctagtaaatgctatttgagaaatccccaaaaacttctaaaaacatactaaatgtcaacacaaattttctactataacatttaatagtattccacatacatttctatggcatattttagggttctatcaggactctgtggaagaactgcgtaaaatcttcaccaaactgaatctaattctaattggaggtcccgccttgcgttttgcagaccctgaagtattccgagtattacttgaagctacagtagggattgataagagctctcgtatggtagattatgataatgatggaatgctaactgaagaagagttagccgcagttactacgttatctcaccgtagagatgatgtgtattctatgttcgtagaaggatacaatctgggaaatgaactcattgaaacttttgatgaatttcgttatttcactgggcttacctcaataaatggaagtgcttttacatggtgtaaatctttgcgaagaatttctttaccaccaaacattgtagaaattaaatcatctgcttttggcgcaactgctattgaaaaattggtgattaatgaaggatgtaaaatttgcggagatggttttatcagtcttaataaaaaatgtaagttaatagattttccgagtacaatcatatcaattggattacgtcccaccaataatggcggtgataagttagtagtcatctgccgtgctttagtaccacctgtttttgaaggtgcatggtcctatgtagaagcaggtagacctattgcaatatatgtacctgatgcaagcatgttagcatataaatcagctaccggatggagcgaaagcgccaatttaatacaggctttatcaacgtatgaagaacaataatctcgatacccagctttttactacagaaaataaatcatatctgtacgtgcttctgaggcagatttcaggttctatcaggactctatggataagctgagaaatactttcaataaactgactctgataatggatggtgaaccagcaatatatatggctgatccagtatggcgtgaaatcgccgtttctgtttgggatgtagataaagatgggtatattatagaaaatgaagctaatataggtagaaggattgattttagccaatattccaatggtaacaaaattaaaatcttagacttgtcaaatctggtttatgatattaggggctgcaatcttctcactggggtgaaagaagtatattttggcaaatcaatcaattcggatagaatgccctaccaatgctttatgaataacacttccattgaactgttggatatgggagattatctggttcaaacagaaaggatggtatgtgaaggggctactaatctcagaaaagttgtcttgagtaaaaaactcataagaatagatggacgagcatttaaaggttgtatttctcttgaagaagtttcagatattccagacacttgtactggaatttatggagactacaatgtagagtcatttagaaattgcagttcccttaaaaagttggtagttggtgcaggtgttgtaaaaataggtggctcaacctttagagattgtacttcaatggaaaacttttacataaaagctataacaccgcctgcaatgggagataattgctttaccaacaatccgtgcaatatttatgtacctcgtggaagtggtgatgcatacaagactgctacaaactggagtacatacgcagatcggatttacgaatatgacttctaaatatcttccggagcatctatcttttcatagtactccggaaaacatgtttatcaaagctccatataggttgatagaggatatatttttgtagcctgtaaactccatcctgcagctaacttataggcatctacactcacatcagggacatatataacttttggatcgccatcgtatccccatgtcccgaatgttggtggagtaaaggcacgacatatgacagtaacttgattcttcatagcccaaaataaactacctccttctgaaattgaagtgaccgtacttggaaaatcaacaagcctgagattatagcatctttgtaatactaaaggacctatgttttggtaaccttcgggaataattaatttttctattccactacctgcaaataccccattacccatcttggttaatacaggaagagtaatctcctttaatgaactgcaaccttcaaatgagctactgtttataaactctaaccctgtaaaatattggaattcattaaaagtctctattacagtattgtctttgaacattgaatagacattatcatttctatttgacagtgtagttagtgacgataattcttcttccgtaagcataccgtcaccatccttatctactttactaattgcattgtatgctccgaccgttgcattaagtaatactcgtaacacttctgcgtcagcaaatcgtatggcagcttctccatccataataagctccaatctgtcaaagatattcctcaacttatccacagagtcctgatagtactttgaatgtacagttatcttaccattcaataccggtattggatcctcaccagcgagcccctctgcagacaatccttcataggtcccatctgcaagtttggcaagcatatcaagtgcgtcggcagtataatattcctcctcaaatcctatagcacggatatgcttcaatgcatgattgttcccttgttcctgttgtgcctcaataatgtctgaaagtagcttcataggcttcagcagaggacaattctcaatccaaaaatccgtaatgctcaccgcacactgaccgattctcaacccctctgttgtcagaactgggaagttacggaatgatatatatttattgttagccggatactctataacctcaagccctccgccatccggaacctttatttggctgaggtttgtaccatcagcatatacctctcgaatgttaatacaattgctcaaatcgagagtaccctgtaaagtggttatattagacaataatatcgtctgtaagcttccacagccagcgagtgtaagtcctgtaatagagattattacattttcagacttactaccaagcgtaagctcagtcaagcgttttccgcgtactaccatggtaccggaaacattcttcaaatgccaatctccgatactcaatagccagcttgctgcctggatagcattctgttggtcggcagagccacccagatcaataattattttacaaatctctccagctttggtacgactaccctgcacaatagaggtaccattagcaatagccggatacatatcaaatgccggagttatctcgtagtctatcaaatctcctgctgcacggacgataatagtatcagttccatctgccgaaaataacccgtaactgtactttgacataatatacatgatacgctttttcatccaagctgtctccgcagaataaaaatctccatgactctgagttataggatcagtatcgttagtatatgaagcattatcataagctatcttcgcaagttcgtaccgcttagcatcagcgtttacaagtgtggcagggaaatagttctttattcccaggaaatactttctatagaaagcatataccttgtcataaggtgtaccggaagattgtccacataaagcttccatagcattaagcattttacgcataccggcaatgatttctgtactgaaagcaagttcaagcatattccagaaagtagaagtttcgccattccagatcggctgaccattatcataagaatcatgcatttcacaatgatacggtttacggtcctgcccttgattatcaatcggacctatagtatcaaggtcatcctgtctccatttccatttgctatcttcaagacagaaactatacggataagtattttttgcccgattatctgttgctgcaatgaattctgtaaaattatgatggaatacagcatcatcaatatcgaaaagatccgggacttctgtacggaatttagctatacgtgcttttatgaacagggtattggcagcatcactatccactgccgcatccagctgcattcgcatcatatatccaccgtctacaagttgtgtaacaaggttgattgttccatttccaatatcagatggcatgaactttccttctgagacttcataataatacaaattataccgatccgaatctccagctttagctatccaatattcatagccggtaccacgataaactgcaactgtagcattcagttcagcaagtgtaccactgaacggacgaatgcgattattacaaacatagactgcattgtaagcatcaatccatctctgagcagctaatggttctgtcccggctgcattaagttctccggcatcgaaatcccaacaattagtattattgtattgaaaagcttcctcatccgggttataagcccaataagatttattacgattccagggcacacgaaacaaagtaccaagcggagcattatccgaaccctcaacagacaataaagcaggaaaagctttcgtatcatatccgaaacaaaggtcatcccctttatcaggaccaaaagtaaactcacccatacaagtatacacatcctgaccttcttcgttaatggatttagagaatccaatgaacggctcctgataaacagctacacgtatctgtggatcagagatgtttgcttcgttcgacaatcccaattcacgatgtaaatcgttgtatatggccacacagcctgctttgtgatcctgcatagaactggcccagtttttcttggctgtcagtcttcctgacttaggaacaccatcgaacatcagcactttgtttttgtccgtggtaccatcagcatacgtagcaacagagtctattttattgccttctgcatctttcaaccccttcatcttaaatctaatattccattcaagatattttttggatgaagttccctgcccttccaccaatagattggtaagcgtaaagttacgttcgggtttatctttgaagaatacttccagattaccagccacaccggaagggtttaacaggttcgggaacggcttgtcgattacaaatacattatacaacaacttggtagcgttgaaatcaatatttactccctcaccatccagtacctgattaagagccttctctttttgtttttcatcagtagtcaccaattggttgatataattcttttgtacagcttctgaagtcaacgcactgtcataaatgcgaagaccatacagatagagattggcataatcattacccaatgttattttcccattgttcttgaaatagtcattaatcaagtaagcatattgccggtttttcttcccattaatatagatggcaaccaaattaaagtccggattaccataagcgttcggcattactacaacagtcagacgaatacgcactccattatcgataggaacatcctgaatactgctgtcatgcatggattgcgaaaagaaggatacattctcaccggacactttcagcccgacacggctcccgtctgttttgtcctcagcaatgctgataatgtccttactggcatctgaagcattctcaaccttaaaatcgatctcaatagtcttacccttgcgagcagcctccgttataaaaggctggtaatctatcacagccttgctacgggcgaagattttcaaagcccttactccgtcatcgtcagttacccaaccgtcatttccccagttcagattgctccatgtaacaggtatcagagacttgtctacctcattaaccacacttagaaaatttgtctgcgaattactacgggttttcgggttgatatacaataccgcacctgccgtagcagaataaccaagagaattatttacattaaaaacgattggctctatcagatcattttctacgcttgttacatttacaactacatcaaaattactgtcgtcatccgtattgatctccatcggataagtgaaagtattttttgtatttgtagcaatgttatcattttctgaactatacacctctattccatctttcattatgctgaacaccgcatcagtcgcggttgattggctatcataaatagaatagtcaaacacaacgttatcctgccagttagtcagcaaggcggcaacgttgttcacacacatcaacttagctgtttctccgataaacgctatacacattatatcaaccgatacagctttcgtctggatcgtattatccgaattagacagatagaaactcacattatagacacctgccgctccgggatgtaacaaaatataattataaggagtatctgtatagatagccgtaccaagattctgactgtaactctgattataattatcacccataatagtgatatgcaatatcttactaatattcccattgataatcatcggaattgtgatatcccctgtaaaagctgtccaccaggcaaagttcggagcactgataccgagcgaggtaagctgtacggtgtaagtaacaggagcagttgtaatatcagtattctgccccttgacggtaatcttcagattattactacctgacgataaccattcggccacatcctgtttaatggacacattagaagaaacttccatttgctttaccatagtgaaatcaacatacttagaattcttcaccataatagtacacaaacccaactccccagtcggcttataaggctcactcaagtcatcccgatactgggaaacaaacgtaaagtcaagaatgcattcttcgccatattgagcggcaaaaccgagcgaagccatattattccggacatatacgctgtacatagtaccagtacctcccgcaagttcacgaaccagttgttcaagtgctgcaccggcagcaccatcgtaagcggtacctttggtgtttccaagtattagtgaaccgtccaccagttcatttattttgctaactaattcgttcagctcctccgctttcagaacattaccttttataaaagtcttatctaattgttccatatcttcatcctaatatatcattatccaacctgcttgtatccaataagaaatcagtgttcatttctacttttccacccaaagccgatagagcatgcatgatcaagttcagttcataggtgcccacgccagtcatatcgctttccatgcgactgatacggacgtaacaggtattaccagcttcatctgatgtacgctttaagacaaacttaatatatcccatcttgtttctgattaatactcagcctatttataacttctcgtttaactgccgcaataaaaggagactgccgtaccacttcaataatggcattgcagtattgtgagggaatctccacttctccttcggaatagtaaattgcttcagcaagcttttcaaaaccaatatccatcaatacagttgtctgatacttcatcgcattcgctattcttttagcgatatcaaatgtttgaacatctccctcgaaagatattttcgtctcgattttcttaaaattgattttcatacttctttttttaactattcttcatatatccgtaaaaccatatcttatttaaagcatcgtatatatacacatgccatagggtagatgcgaagaaatcgccggtagtcgatatcgtgtcaccggaagccgcaattacattcactcttttaccgttggcagatatcatccagtactcctgaccatcttccgcgcctgcaggcagagtgactgtgatttcttcggtattgatacataccagaacagaatccataagagacaggctttgcgaagtttttacccgacgtaatcgtctacggattccgcatatatctccatgaggtatatacagcgcatgattaccagtagcagtatagtcatcataagctttcgcaccctgtacatccaaatagagtgcagcattggcaccggcatcataacgggctattactctgttgacacatacccgtatcggattaatcatgaagccacccgaagtagccggggtagtgtccgcaccgaaaaaggaacttacatattggtttgtaaaccggagcaggcttggagataacagcatctcatcttcgccggaagttcccgtaagggtgttaaatgtaccacttgtggcaacaatattattcagcgtgatgtcattcagcacagcattattccctgatatattcccagataatgttaagttgtttgccgtgatattgtttagcgtcagattcccattcgtatcaacgataaaattgccattgatgatagttttacccaaaaagttgatttgatcggcactgatgtttactcccgattcaatcgtcccgtcagcattctgtttgataaacgtagttatatccgcctgttttacaatatttttatccttgtccacctgagatgtgaacaaagatgcaaaatcgctctccgcaatcagccccgactttagtgtaccatcttcattaaacttcttagcaacaacttctatcctgtcacccatattcttgatagtagccgttgtaccataatttgcaggcttccaatgctcaatgtcgaaagctattccactagctttccctgtctgacataccagcgtatcattctcgtaaggatcaggttttgcagttggataagtagcattcacccacaagtctcccacatcataagtttgttcatcagttggttgctctacaaatacccgccgtttaccgtcagccgtatcttgggctttagccgcatattccagcgcttttacagtttgctggtcggtaatatcactccacgaataagtaccatcttcatcctgtccgaatctccacgctcttcctccctcgtcaggtacattggaagtattatagaataaatcttggtcgtgcatggctttcagttctcctgtattccattcagatgcaggcaaattattcagtgtaggtatataatcaaagaaccaaatcgtatattccctatccgtctgggctttcactatgtcaaaatcagtttgcaaaccgttaatcatatcatcataacttttaccggtcgcttcagaaataaactgtcctacaaatttattcagagcaggagatataatcgtaacttctttccctgtaagcgtatagttgctgatacctttatattgcttgatactgggcgcatcgtcacctatagtagataggataatggcattctgacgggtaacatcattcctgttacccaacaatacgatctcgtctcctgattcgggagtggaactaacaggatcacaatccattttactcaagtctatgtaatcatctcctacggaaacaaccaacctccaataatacttattggttacatcgtgtgatgtatctgccttaatattgaacgtctggcaacgtacttgatctccagacgcaaactcctgcataatactcttgttgccatcatcctgctgaaagtagcaacggtacacttcttccatatcctccactttcgtacacttcatggaggcaggcgtcaggataatctctccacccacatagcgaagacgcttgatgacgagttctacaaagtaggctactttccgcacaagcagctcgtcaacttccagataagaacggccagtatccggatcatgtttcagaatgaagccgctgcctaggtctccagacacgaagcccggagatataatccgaaaaatattgttcaactcatccagtatcgcgatgacatctcctgattcgttaacgttaatgccatgttctttcttgccaatcagcaaaccgttgatgaaagtaataagtccagctgccgtatcttccacatcttttcgcagaaacttctcatataccggactgttatcatctatatcatgcgctttatctgcatatccagcctttgctttctttattagactttcataaatagttccgtcatcactcacctctaactttttcagatagatataacgatcatcatcagtactaatttcatcaagcgttgctttattggcatgcgtatgaccatcaccagtaaaatcggacgaagaagaaccatctaccgatacaactgtacttgacactccattttcgcttgccctccccagctctctcagtcgtttgctgcgaggctgcgctgtacgcaatattgctcctgatatatacttcttttccataaagtttaatctttatctgatgaatattcgtccggacgaagttctactatctccaatcggctctcatcttctatcacatcttgcttgtccgacaagcaaataaatcgtttaacatcttgacaactttccgaacaaacagccaggtcaccatccagtattccggcagttcctgtcagcaacgtcttccgttctgcatattgactatataatgttccgataagtaactgttctgcttgtgtagtccgtccggcacgagtaagttcttttatctgaataccatcttccgtccggaaaagcactcctttcccagtgggacttgtatcagtcattgttccgcatatcgtatccaagctaattccttctttggcactctcatttatgacacctgtatactctatatcatcattttccgcatcgtcatgaattatatttttacgtaccatatcaagctgtggagctttatacaacaaccagcgtattttctgataccagtcatcaggtgcctcctttatctttcctttggtccattcatatacccatacaccagcataaatacaaacttccaaatatccgttttttttaggataaggtatatactgtccctcttccaacctctggaacgacctatatatatcttctaaagataaccctatattatgccggttctttttccatccctgaatacctgatttttcatgccggtcagccggatcataccattccagccagcaactttgataggatgcagcaccatccagccactctcctttggtcttataagacaaaacccctctcaaatctgtacgtttagcaatatcagcattagaatagtgcatcaaagcattaccgtcatcgtcatacagagttacggttacaggtatctgtacataattaaaccgatagtccaacaattcgtaattacttttttcattatcactactaccttccgtaaaagggttgtaacgagcatccagtagcatatccatacttaaacgtatataatatttttcactatctttttcagataatttgggtatgaaagtacgataagtacgcattatcacttgctctggtttttgccatggcttttgaggaaacttattgggtgttcctccggctatatgtactcctgtagacatcgtaaatgccactccatcagccggctgggcaccaagcaacggaagtatatgaaagtaagtacacaaattcatctcagccaatcccgtccccttcctactatccggaaaaatagcaaatgaaagattttcataatcaacatcattttccacccgccatccataatcaacataaaaagcatagtaatatactcccggaggtgcaccttctccacgtatattaacataatctgcggagtattcacctgtatacttaatttcctgtcccaacaattttccatctgaataaggagagaaagttatttttacattattaattactttgtctacccccattatctggtcatcacttttccagagaattcctttagtgattccatgtaagtaaagcccattcaaatcatatacccatatctttccattcttctgtatcagttttaaagcaagtggttgcaacatcccctctatcacttcataaagcgtacaggcttcaccgtcctcatcataaaagttatcgctccgaacacttattttatctaaagtcgctcttgtgccgccttcttccagataagtactcagataatcctgatttagttctccatattgtattttactcctacggagagcatactgcaatatattctccaatgtacgcgtacccgtcaggtcatatttcagacggtccagaataccaaaatcactgaatgtaagcttcacttcatattcatcgaaggcagagtaaggttcttcgtagaattccggatcaagcgcaccactccagtaaagcagtccgttacgtagcacttccagacgtatgctacccggcaggataatataaagatcctcataagtccggtcgcctggacttacaatggtcagtgaggcggtactaccgcatatcacttcttctttgtcagtatgtgcccactctatcaccaacggactatcagccggaaatcgcagtatacctatcgacgaaaacggttcatccgcttcctgataaatgtcaactttccacactatactctcatgactgaggaattgtcccgaatatcgtaaatactccataattctatcattgaagattcataattgtttgtcaacttctcctaatcagattgttttcccgttccaatattcctaccaaagtgcgaccttctattctgaatacaacttttccgccgtttccaccatctgcaggctgtatcaattgtctcaatctattaagcggagctactacttccggattattaatcgccccggaatattctccgaaaaggcctaaagtggggccataggctataccaccataagcaaacttaggcagattggccaaagcagccaatacactcgctacagccgcaatagccaatataggccccacaataggaatactcgacatactggcagccgcccctgttgcagcgacagttgtgttagccgtagcctgggtggattggatgcctaataatgccaaaacttgcggaatagcttgtcctattgcctgtactgcattggctccccactgtaaccattcacctgctgctccacctatcaggttaccaacatttcccatagcattccccattgctcccatattatccgtcagttcctgattcttttctcttgccaatcccacagcctcattccatctctccataccggttaagggatcttgaatatcaaagtgcatcggttcgagtttcatatctttcaaacctccatctttgacgccaagttttaaagaactagtcgtatcaaatcttccatcaacaggagccgcatctaaatcagtcggtttcaccggatgcgctgcctgaaaattcatcttatttataatagattgggctgaagctatatcagactgcaaattggcaatatctactgagaaagtaacgattgcctcaagaggtgcctttcgctgcctttctcttaaatcagagagcttcgcttctaaagcagccaaacttccttcggcagattctaattctacacgaggttcaatcgttacagtcccattcgttgtatcatttgtatttgtttttgcgttcgatgtagacaatagatcttgccctccaccaaacataacttttgcagtggctagttctttttcataattttctttagctttacgaatatcagaaatactctgataaatatagttcgcgacaaaattatcccgatgcgcaaaaccttcaggatctgtccaaacagtttccaacttagataagatatctctcgcttctttaggaatattcttcccactacgtactgcatgcattatttgccccatagcctttccagcctcctgcgatgatatttttccatctccgaaacctatatttccataaaggcgctcccttatattttttattgtttcagcttcctttcccgtataaacatctgcagcacctgctgttgctgactccatagcacgggcacgagcagaattgattattgcttcactcaatttatcgtacgcttttctcgctgtatccgcattggttatttcaatgcccatcttatcaagataaccactatatttggccacaatgttatccttcgccttctgccattcttcagtgccttcgcgagctttattcaaaggagtaaagagattatccaaggtgaggcgctctgtagcaacttctttattcatagtagccattatgccatttaaacgcccttgggctttagctgcatcatcactttctgaacatagtttatatataccgacagccaaagcggtagcggcagtagcagcaataatccaaggagtggcagcaataataccatttaaaatcttagcgccagtagccgtagaattaacagaagtcagtaaagtttttaaaccttttctcattaatgttattcctgatgcattttctgataaaagagccaaacttgctcccatacctcctgcaagacctagccatttcgttctaaggtcgtctacaggggattgtactgcactaatttgtcgagatacatcagttgccatttcttgagtattctttcttatatcaaccaataatttattgatttcacggagagatactgaaggattatttttcaaattaaatattatatcatatgattttttttccatacttttgtgcattaattaaatatataatcaaattatgggaacatacattatattattaacatttatgattcttggttttataggagcagggggattcatcaaggatatagacaaaatttccaataaaaataattcaaaaaaagacaaacaggagcaagaaaaaataaatgaacttgaagaagaagttcgcatacaacgtgaagaattacagcaacttcgtgaaaaacttgcacgtgagaaagctgaaagagaacaacaaaaagaagaaaagcgtcgcaaaaaagaagagagacaagcaaaacataaataaatattcaaccatccttttttcatcatatcccatactcttttcactaccattttttgaacaaataaaagaactgacataccttgaatattcttctgtatatcaagcaatatattacacatttttcgaagaattcctgaaggggtatttttcaaactaaatactatatcatatgttattttttccatatctttgtaacatgattattaaagattaaacatatgggaccttatattatacttatttgtctcatactcggtgctataggagcatggagtataggtggaatgttatctaaaaatgatacttctaaaaatgagcctccacaactcagcaaatttgaagaaaaaatgaaagcttccgtacagaaaagccgcaaagaaaccctcaagaaacgcgaagagctacaacaacttcgcgaaaggttagcacgtgaaaaagctgaaagagaacgccaagaagcaaaagaaaagcgtcgcatagaagaagaaaagtgggctaaatacaaagaagaagcccttatgactcgtaaagagttacaacaccttcgtgaaaaagatgcaaattcatcggatgaaaacaactcctcaaatgataaagaaaagtaaataacatcccttctttacccccatttctttgctatctcttcgaacctttcttttgtactaacttctttcttggcttcttgttcccgtttcctctcccacgagaatctgcaaacatccgtcggactcaatttctttttactataaggttgcaacatacagcaagccaaaaagcgtgtctgctcccaatcattctgtacatttcgttcatcatgttgcagccaaaaacgataaataaccgaaaactcagcaggggtgcatcggcgaaaatcgtctaaattcatcccaatacaccccattgccaaacccagtaattcctcaatgcctacagcttcctctcctgcccctttttttttgagccatcctcacccccggttgccatactctcctgaaaccgattgaactcgcccaggtcaatgccatcggcaaaacgctcaaagccaagatcaaacgtcacctcatcagcacgacaagcagaacgaacacagcaaaacataaacatcgtcaacaactccatatccgcgccgatttcatttacatccttacccgtctcacgcttaaagtcaatcatggcacccatcgtcacccgattaggatattccttaccatacagtattactttgttcatactcatgctttgggtgtaaccactttaacttccacaggcccgctattctccagcgagatgctgtaagtagcatcatcatctgccgcagacacctcttctaacgaagtaataatgaaattgccctgacgatacttcgtgtcttcttctccacgaagcgcatacttcacaggaacaggattcccgctttcccacatctccaacagtttgtcatagcccatgccatcaccgtaaaaaacaaatccttcggaactgatacttacgctcaatccactcacggatttctctttccatttaccggcagcggcagcctttgccttctcttccaatgtcggtttcactgcacggtcttttgtctcagccgtgttagtaatcgtacacgtcttactgtgtcccagagggttaaaaacatcctctactaaaatgcctaccaagaggtcacttccatgaacataatccgcattctcgttttccataaattagcttttaagtttttaaaaattcatttattgtcacgttatagtttctttcgctttctgtttagttggctatttttgtatatttacggctgtttgtatttcttaggtttcgcaattataggaaattatctaatacaaaacaaataaaatcggagaaaatttcctacttattgcataattttatttaggagggttgttctatgatattacagcggatcaaagaatatattgatttaaagggtatttctatctccgcttttgagaaaagtatcggaatgtcaaatgcttcttttggacgttccctgaaaaacaatggggctattggcaccgataaattagaaaatattctaagaatatatcaagagatcaacccggattggttgcttaccggacaaggcaatatggtacgttccggttcgaagataacacttccgcctccggtaacagaaaaaaaagggattcccctaatttcctaccaaacattaccgacgctatttaccggtaaaaagggaacattctctcaagctacggaacatttctccctacctctattcaatgaggcggactttctgattccggtaaaagacaacagtatggctccacaatataaaggtggtgatatcatagcctgcaaatgcctttccaacgaagggcttttcttccaatggaacaaaatctatctgctgcttaccccgcagggagcactcataaaacgaatacatccgggaaaagacgaagagcatctgacgcttgtctccgaccatactgattatccacctttccaattgcaccgttctttaataggtaatgtagcattggtgctgggaggattatctgcagaatagtctatccaagtctcactaaatgatacatcgtccccctattcgacttcttgcaagggatatccaatttcttcagcgaacggccgaagtgccctattttgctgaccgacagtttatcgcgggttttctgctgtagataattgaatatctccattgcggtcagccattccccttcccgttcttcttccgtcacccggaaataacagtggaaaagctgttcgagcggactgacctgttcaaaatcccggttggtctctttcaggatagcttcgtcctcatcattcagccagtagcgctcacctttataaatggcatccatggcctgagcatacaattgcttgtagttgatggtgacattcgtatcaataggtgcagtcacttcgatacagataaaacggcggctgccgctgggatcggtaagcaggtccatctgattactggtaccaataaacgaggcataacggcgcacttcctgaatggtagaaccgtaaggtttccgcaaatttgccacaggtttctgcaaaagatgtttcagaaaaccctgctggttggagctaatctgatcaaactcatccaggttcaccagcagaaaacgccccagataacgctccgcatcctgtttgctcttaaaatcaagactatccgtatatccaaaacgcagttcaggcggcaaaataatgcgacaataggtagacttacgatacccctgtgccccaaccagtaatggcgacgtactgtttccatgttggcggtcgagcccacgccagtgagccaccatactgagaaaccagcgataaaacaactcccgccaatgcggattattgcatggcacaagattggcaagtgcccggatgcggtcttttccgtcccaacgccccacactgcaaaggtattcttcaacaggattgtacaaagacacatactctgatgtcagataacgctccacgtcacggtcccaggcacgaatcccctctttcagggcattaatcgccaccgtattgcgtaccctccgatccaccggtctgaaatagaaatgaatggaattccgctgacggtattccagatcgttcaacaccgtgttataacgaaactcatagcgtcgttccataaactcttccagacgcaaagcggtatcctgttccggagtcaaaatagttttagagccaaagcccttagactcttggtaaatattatgaaccatagtacgtaccgtttgctgctccgcctgtgcataataatgaataatcgtctgcctcacaacttcctcttccggtatgcccgccttgtagcaatactccgcaaggcggacaagcaacggttggagattatttccccgtcgccagttctccatatcccggagcgccttatcgagggcggtttcaaaaagcatggtgaaggtctgcgatgtttcaaaacccggttccagcctcagtaacggatttttctcagccaactgccgttgccggaaggtctgttctccgggcatggagaatggctgctccagacagaaaggtactgcatgaggattgtatccgggatgttcatcgagtgtcatccggcaactttgcatcagtgagggctctttcaaggcaatgggaaatgggaacaacggttgatagcaactcaccgccaagcgataggcatgggcatgaaacaatgcggcctcctgttcacgcttcggtaagtttccatccggcagggcgaaacacacccatatcttcacactccttccgctggaaccgcaaaaagcagcaaacgtctgaggaagcagcatcgcctgacgtttcaccagttcagcctccgccagtccagccagcttcttcacttcaagctgaaccagaccattgtatcgtttcattcttcgccctccgtctttagtccgggcgcactccacagcaggatagacacgtggaagtttgtcaatatgagagaatgcggattcagtaccttccaactgagggatgacagtccgtaaccccgttacatacccgtctctggtttccgttttcatcttctccatcagcacgtcggcatcataaacggtcatcatctctctgcctgcatctttgtcatgtcttattgaagtgattttcatatcattatctgttttgaattttatttatatagtataattcctttaaagagttacaaagatactgctccaaaaagcgaaagtcaagtatttaagcatattattctgcatttatttcaaaaaagttcagctcatacattttgctgtaaaagcttcaataataattgagaaataaacagggaatcacttgacttagccctgcttattttgtatctttgtagtaagtcctattgggtgttaaccttggtcaacaggccgtgcaatggaggtcaacaagccgagcaaccaacgttgacaagcctgttgaccaaggttaatacccaatcattcctaagggtaaaagggatgttccttaggaggaaacagaatagtccctaatgtaaaacaaattaataccttataattaaaacaagcaactatggcaatcttatttgaatggtacgaaaacccggtggctcccaaccagtcacaagaagaaactaaacttcatgcacgcatcacactgaacggaaaaacaggaaccgacaggttgcgacgcaaaatccaggaacgttgttcactgacggaaactgatgtatcggccgtgctcgacgccctgtctcatgcaatgggtgaagaactggcggaaggcaggcaggtacatctggatggtatcggttacttccaccctaccctgacctgcacggaagaaataaaagaagatacaaaacggaagaatacgaaagtaaggctgaaaggcatcaaattccgggcggatcaggaactgagaagtgaaatcggaaatgtgaaactgaagaatataaaacacaacggacactccaacaaattatcggatgaagaaatagacagccggctaaccatctacttcagtcagcaccacatgatgacaagaagtgacttccaaagggtatgtggcatgatgaaatcgaccgcaatggggcatatccgccgcttacgcggggaaggaaagctaaaaaacatcggattacagaaccaaccgatatatgcgccaaacgtggggtattacggtataacagaagaagttatgatgtagaaatgtaaaaatccggcgtgagagtaagcggcttactctcacgccggttttttactctcacccacacttaatattctaattatcaataagctattttaaaagtgagggtagtgagagtaaaccgagccaactttttattgaatcttgagcaacattaaattattgttaattaccctttcatacatcgaaccatgtttcaaagattatgttgttacaaatgaacagcaaccttaattatgaatttaaaataatgaattatgaagaagaaaattaaatttttaaagaaagaatcgctgttacgttaatgaacgggattcgagaaagagtagattatatgattaaactaactttaaacttaacaaagatcaaagcaaacaagaaatctgcaacctaaccctcccgctttattcctgaaaagagcaaacaaataaactacttcagggcatgttatattttattgtatcaactattaatgcatttcaattatgaaaaaatcaattattttatcagcatttgttttagcagcattggctgcaaatgcccagactaccgtacaaggcagcaaattcacagacaattggtctatagaactaaaaaccggtattataactcctgtaagccacagcgctttcttcaagaatgcccgcccggctttgggaattgagtttacgaagcaacttacccccgttttcggactgggagttcaaggcatgggatatataaacaccgcgaacagtaagacagcttttgatgcttcagaccttagcttattgggtaaagtcaacctgatgaacctgttcgcaggctatacaggtactccgcgcatattcgaagtagaggccgtagccggtgcgggatggctgcactactacatggacggccctggagatgtgaactcctggtccagccgtttcggaatgaatttcaacttcaatctcggagaagctaaagcctggacgataggagtcaaaccggcattggtatatgatatgcaaggcgaccacaaccgtagccgattcaatgtaaacaatgccgcctttgaactaacagcaggtgtagcttaccactttggtggtagcaacggaagccatcactttaccttggctaaactctatgatccggccgagattagcgacctgaacaattctatcaataatcttcgctcacaagtgaatgagaagaacggtcagatcaatattgacgcacagaagatcagcgcactgcaacaagaagtaaacaacttacagaaccgggtaatccctgttgagacggtagtggagaccagccgtattccggaatccatcattactttcagacaaggtagatctacagtcgatgcctctcagttgccaaatgtggaacgtgtggcttcttacatgaagaaatacgcaaatacaacagtggtgattaaaggctacgcttcaccggaaggtagtgccgaagtcaatgcaagaatagctaaagcacgtgccgaagccgtaaagacaatcttggtcaataagtataaaatcaacccgtcacgtattactgccgaaggtcagggagtgggtgacatgttcacagaaccagactggaaccgggttagtatctgttctattattgaagatgccaaataaacaaaattaaaatccccctcgccacagatagttgtagcgagggggattttaagtttatgagagttccgacacaccctcatttcttattctattatttaaagtaccctacaggatgattcaacataggaatctgactatctttcagtttcaatactttcttcaactgagtggcatccatcgaacctcgtggcactgtagccaatttagcattagcacagaataaagagatattctgcgaaacgataccaacatccatagctccaacaacctgattttgtggtttctgagcatcgccaaagagagaaacatcactgaccagtaacaaagataccggagccgcttttacaaaagtctgaccacctgcaacagcatcgcgatgatctccttcagaaaccagatttaactgatgatttttcgcatcgtacacatagctccctgcgggtaatatcacgtatacatctacatcctgcttattcaaagccgatggagctgtccgctttccggactccggacgattgattccgttagcagcccacaataaatccgacaagtcagcaaggctcaatgctttcgaagcatattcacgtgtagactgacgttcagacaatgctttcattaccgtaccggcacgattcaaattgggcttgggtaacttaactaccttatcagcagcagaagcagccactgaaagcactaaacaaactaacaatagttgtacttttctcataactgtggtattttaaaagttaagaggcaaatatacaaaaaagaatggtattgattcaatcctccattacaaacttcaacgtatagacttagcgatttcttccatatgtgtatcatccgttccgcaacagccgccaaatatcctaaaatcatattctgatttcaatttcatcataccttcagccaagtcggcaggagaagaagattgcagatcagcggaaccgtccagttcactataagacaatgcggaagtattggcctgaataccgataaaccgcgtccggacagcctcggtttggttgaagttgtgcacaagagcttcataaacgatgcagggatgtacacagtttgtcatatagcacaccggtttgcgagatacattatcgtcgataaagcggatagcatagtcgatggtatgcccatcaataagtttcccgtctttttgaatggtaaaactaatgatataggggattccggtatcggacatggccctcgccatacccgttgcc

SEQ ID NO: 6428 - DNA, 3111 bp, Unknown
  gut microbiota DNA sequence
tcccataacgacagaaatagtgtttcactacgactgatcatggtggaacaccgaatgtaaggggtttaaatatcatcaacagaagtcgagaatctatcatttttcttcattttgatggttttcaaaggttttatggcggttatcaaaccttcttttgccaaattatggctaaccttgcatcagaaacaaaaggttatcataatcatgagaaagaaatcattcatattactcttgttgttcataagcaatacttccctattcagtcaaaatcctctgacggaggatgccctattagagaagcaaatttatgaaacaggactgatccatgccccgctgcctttgaacacctcccgttctttcgaagagaatgctttgaagaaagaggtgttatccagccagccgcttacggaaactgaaggagcagacgggtggactcattccggagccggaaaaatgtctttctcaaaagagaaaaccacatcgggcaaagggagcatccgtttatcttttcctacttataccggaaaaagagccgctggttctccttccgatcctgactatgcaacttatggaaatagccgtatcacctatcacgtcgatggtaggaactgggaaaagtacaacagaatctacttttctatctatcctgattgcgacggtgcacgcgtagtcaatatgaacctgacttttacaaacgacagttccacacccaaacaaggttataatctccccagcggttcccatctcatcaatctggtaaataagcaatggaaccattgctttctggaaatagacgaatatcagcgggataaggtaatatccatcagctttgacaccgcactgaaagggaaagaccggacaacaggagactctgccatttattatgtggacgatatccggttgcagcaaatcaaaaatccggaaaaagtgagcggatgggaaccggcggagcataccatcatatattctacaacaggctatgccataaatagcccgaaaacagccctcgctcatgccaattcatgcaaacagtggaaacaattccaactgataaactccgtcagcaaagaagtggcatacgaaggtgcgctgaaacaggaacaaaccaccatcggacagttcggagtcatggacttcaccgacttcaaccaaccgggagactaccaactgaaagtaggtaaaaacatcactcctgcctttcggatcggtgaaaagttgtgggataattctctctggaaagtactgaatttcctgttttgccagcgttgcggacatcccgtccccggcaaacatgccgcttgtcatacagatctattctcccggcatgacggaaaaagcatcgcctattcaggcggatggcatgatgcaggcgatttgtcacaacagacgttgcagaccggagatgtgactttctccctactggaaacatacaaccggctcaaaaccagaaatactccgttggcagcccgtctgctggaagaagcggaatgggggatcgagttcatactgaaaaaccgttatggagacggctatcgtgccagcagtatgggactgcttatctggcaagacggcatcctgaatacattggatgacattcattccgtacgcgttcaaaacatggcattcgataatttcctgtacgcaggatacgaagcatacgcggcaatgaccataaatcgtgacccgatgctacaagagcatctgcgaaaggtagcggaggaagactttgcttttgccacagaaaaattcgaaagagagggtttcgacttattcaaacagatgtacgaacatagctacaacacctccgagagccaatatatggcaaccatatcctggtctgccagtatgctctacaagctcacgggcaaggcatattatgccgaaaaggctgccgagaccattcgatatgtacttgcctgccagcgtacgaagcctttacaggatccggaaaaaacctgcggattcttctatcgggatcagtctggaaaatccatcgtacactatatccatcaatcacgcgaacaagtctacatgcaggcaatgacgttgctttgtgaaacacagaaacagcaccctgattatcagaagtgggtgaactccatacaactatacggaaactatctgaaaggtctgatgaaatacacccgaccttatggaatgattccgagtggagtatatcatgcggaagagtacagtgattcagcaagtttctacgcgcttcatctctttccgcccgccaatgcacggcagctatacacggaacaggtgaaacggggagtcaaactcgacaaggaacattacctgaaacgtttccctgtatggttcagtatcttcaatggaaacacagccatacatctctccaccggaaaatccgctgccatttgcggcaacttccttaaagacgaagagttgctgaacatcggtcgggaacagctctactggacagtcggaaagaacccattcggacaatccctgatatacggcgaagggtacaattatccgcagatgaacagtttttcttccggtgagatgacaggcgaaatgcccgtaggcatccgcaccctgggcaatgatgacatcccctactggccacagaccaacaatgcctgttataaagaggtctgggtgacatcggcaggaaagtggctatcactgattgccgaatactaacaaaagaaattattaattacataaaatcaaaaaagctatgaaaactattaagttttatcttgtcctcctatttacagcatgcacccttctggtaaacgctcaaactcccgaaggctatcctgccaattatgcccggggcccccgcttcaaggcattagtctactatacgcagcatgcagaagaagcacattatcagttctccctgcaagccgtagagttcttcaagaaactgaactacggtgacggtttcgttctcgatctcacaatggatttgtcttcctatacttacgaaaagctaaaagagtatagcgtagtggtgatgctcgacggctaccccaatacaaaagccgaacgggatgcttttgagaagtatatggaaaacggtggtggctgggtaggcttccatgtagccgcctacaatgacaagaacacccaatggcc

SEQ ID NO: 6429 - DNA, 9042 bp, Unknown
  gut microbiota DNA sequence
aaaagattatttatcatttaactcataaccgaaaagaaaggaatgaaaccggtcccagcagtcccgccggaagcagtgttttttcctgtctcctatattgggcattcgtccagattccgctgaatggtgcttttccttcatcagctcctttgagagcattcgcccaagtattggtcacctctatttcgagttcatttgtaccctcctttaaagctgccgtaatattagtccggtaaggagcagtccagattgttccacagtccacaccattcacgcggacagttgccaggttgcagacctttcccaaattcagataaacagttgtttccggtttgtctttccaatggaatgcagtcctgtagacggctgttcccgaatagtaccggatcttctcatcctgctcccggctccaatcgaaaagttctttccgatttacggtcctgccattagttatgaaattcactgtatactctcccaattctactgcaacctccgaaaactctttcgcagaataactcccctccttctgttgcttctgtaaactcttctcatcaccgaaacagttcttttctgtcggatatacgataaatacggattcattcggcgccaacgtcagtgtaacttccgttcgattattcttctgttcatacgaaggccggaagtctatttctcctgtcaatggattccaacattcgggctttctgccatagatacgcatacttgcagtgaaagtacgtgtctcttcccgttggttagcaataaaataaatatccccctgttctccccgacgatgtgtccaagcaacatcttccggcacaatcagatcacgttccaatccgtatgccgagaagtcatctccggtataaggaaggtcaggaatcaatatgcccgctttcttcaattcattaatcttcttctccacttcaggagacaactctgcctgttccggattcatcggtcgaggaagcggtacgaccaacactttataactgactccacccggcaatgtcatcctgccatcttccactttcgccaaccggagcaatgcatccttgttgaaactatcataagcataaccacgaagcggattcacccatttctccggatcaaccatattggcagaatgcgtaacgcccacaggacgcacacgcaaaggttgtccttcattcgtccgacgaatacgctcactttccacacgctccgccccgaaaatacccggaagagaaggaaccaatcggtccggcagtactgcacgccttggaatctcttctcctgtgaaaacggcaatatctactaccggatgtccatactgtagcaatgcttgacaacgtgtggcataatcagaaagtgcctttgcccctttattccaccaggtctgatctctctgaaagaaaaggccgatgccatccaatgtcataccgggtttgcgatccagccatggattgtggacatacacatgataaaaaaggcggttaatccccaatgcataattccggtcgagcaacgccttcaacattccgggatgttcatcccatgtaccacgcacctccgtaaatccttctgcctggataatactctttccataaatatgtgccccactgacagcatccagcatatcattcagtttgtcatgggtaggactattcagccagaattctcccatgggaaggtccaccatttggtaatgcaacaacccatcgctcaccatcgtgggagctacacattctgccgagaactgacaatcatattctttagcacaatccgccaatactttataaaagacatcaacaacaagctcggatatagtagtacgaacatccctcagaatctcttcactccgttctacactttccatcggaatacccgccagtaacggtaaataaggcatcaggtcgtatccgcgacgtttccggaattcagctgcaaacgtatcactccaattctgactgccacattcccaactatccacatgcatgtacttcaatacacagcgtgcaacgtctgaatctgtctttagaaatgcctgtgcaaaccagttgtcgaactgtttacgcactgttttcgcactgaacttatcacattccaacccctttccccctccggcagtggcattggtatgtccggtggcagtatgccccatacgcaataatttccattttcccttgggaagagtagttgtcaatatacctgctttacattgatcggtcagattgataatctgtgaaagggaatagcaatctttctttccgacttccgcttctttcgtagccgaggcaacacgccataccagtccagctttcccttcccactgattcaaccgggattctcggtgcagtcgcaactgctttatcttcaaattaggtttccacttggctgcatccatatcctcacttcccggctcactcccttcaggagtccaatagaagcggaaatagcgagcggtagttgcaggaatggcatgcgttgaattctcatccgtattctgccatccctgacgggcaggtaccaactgtttcaccaaatgaaaattcactccgtcatcacttgccatcactttcagtcgatgcgcctgatagttattaccactcagaatcacttcaacgttacgacaggtaaaaggacgctcgtattcatactggatataacaaggatatgaagaacggataacaccggcagcatccatattcaccgctttgggagaatcagcatgctcttccatagctatattgacacatgttattcgggccggcatctcatccggtacttcctttatgggtaaagcaaacagagagatatcttcataaaaaccttcataggcctcgggctgtggcagccggagcgccttatgtttacccccctcaacgattgtgtcactccataccaccttctgcatagattcctccggactgatccaagggccaccggctaatgcaaaaccatcacagatatgcatacccaactttaatcccaaacgattggcttcttccatactgaaacgcaccatctcccaccattcaggtgtcaattgttgtgcttttccattatattgcgctccttcattaattcccttaatcggcatcagatacgtacctcccagcccagcttgcttcatagcctccaaatcggcagtaatcccttcttttgatacggcaccatacatccaataccagaacgtccagggttttgcctcttctgaaggatgaagaaattgttcgtgaagtgaacgtatctgttgagcggaggtagggttggcaacgatccacaacagtaaggatgctatgaatattcggaatttaaacggagttttcattcttatcttaattatttatataagtaaggagtttatttattcatttctgtatggttatgaattaattcaccacagattacacagattgacacagattctattttactgattattagattaataaatctgtgtgaatctgtgtaatctgtggtgagtcttattcattcctataccaaaagacgaaaaaccgcctattttgtactcatcctcctccttccttcaacgattcccccaaagccctttataagtaccatactgcaagcaataacattcttttgacaacaaattcctcaaaatataaaagttatctctatatttgcccactgagattttaataaaggatagaaaacaggagcaaaaagatatatgaaagagaagccaaatattgactgtgagaaatatcgccagattgcgcaaatggctaaaatgggttggtgggaatcggacctgaagaatcgccaatatatttgttcagactttataattgacttactcggacttgaaagcgaccggatcagtttcgaagattttcatgaaagaatacgggaggatcatcggaggcgactcaggaatgaatacttttcgctcacaaacatagaaacctatgagcaaatgttccccatccgggcaaaagatggggatatatgggtgtattctaaaatcagcttcaaacaaccggacgaagagggttacaaaaatatgataggatatctgcaatgtatagacaaacaggctggagaaatgagtgaaagcacagactctcttcaggtaaacagcctgctttatcaacaaaacagcctttcttattcattgctcgcttttcttcaatcggatgatattacacagatcatcaataaaatattggcagatctactcaaacaaaccaaaggagatcgtacctatatattcgaaatagaccgggaacataaagtacaaagttgcatttacgaagcaacagccgaaggaatatcccaggaactggatttcctgcaagatgtaccttgggatgattctctctggtgggatcgccaaatctcagaaaagagatcaatcattctgaatacattggatgatatgcctcccgaagcaaaagtttaccgtgataccctagaggtgcaagacattaaatcggtaatggtggttcctctcctatcgaaagataaggtatggggatatatgggcatcgatatggtcagaacacaccgcagctggagtaacatcgaccatcaatggttttcttctttaggaaacatcatcagcatttgcctccaattacgtaaagcggaacttcaggctaaagaggatcgccgcgcattggatcacagtgagaaaattcttcgtaatatttataagaatctgccggtaggtatcgagctttacgacaaagacgggtatctggtagatatgaatgataaagaacttgaaatattcggcttggcggatatgaaggaagcattgggggtatcactgtttgaaaatcccaatatccccgaagacgtgaaagaaaaattgcgtgccagagaaaatgtggacttctctattaattatgacttttctaaaatcgaccgatacgtcacaagtagaagaaaagatgttatcaatcttcaaaccaaagtggctctgctttacgattcgcagaatcaattcagcaattacctgtttatcaatatagatacaacagaaaccaccagtgcatacaccaaaatacaagagtttgagcatctgttcctcttaataggtgactatgccaaagtagggtttgctcattttaatataatgacaagagacgggtatgcccagaatacatggtacaggaatttgggtgaaaaagaaaatactcccatgcctcaggttatcggagtgtattctcatgttcacccggaagattgcgctgttctgaaacagtttgtaggtcaggttaaagaagggaaagccactagtttaagtaaagaagtacgcatcaacagaggtaacggaaaatattcgtggaccagtataaacgtaatggtcagggattatcgtcctcaggatggagttattgaaatgctgtgtatcaactatgatatcactcccttgaaagagacagaacagaagctgatcattgcccgtgacaaagccgaagaactggaccgcttgaaatctgctttccttgccaatatgagtcatgaaatacgtactccgctcaattctatcgttggtttttccagtctgctggcagaaacagacgacagggaagaacgccaggaatatatcaaaatagtagaaacaaataatgaattgcttctgcaactggtttctgatattctcgatctttcgaagatagagtccggaacattcgacttcgtacgttccgacctggatgtaaacgaaagctgcatgaaaatcatcaaatcgatggagatgaaagtgccggaaactgtggatctggtctttgagaagtatatgcccgattgccatatttatacagacaagaaccgattcatgcaggtcataaccaatttcataaacaatgcattgaagtttacgaaacaaggcactatcgctttaggatatgaacagacggcacctcacgaaataaaattctatgtacgtgatacaggtttcgggattcccaaagagaaaattgatagcatattcgaacggtttgtgaaactcaatacctttgtacagggtaccggtctcggactttccatctgcaaaagtttagtatctcagatgggaggaaaaatcggagtggaatcaaccgaaggagaaggttcatgcttttggtttactcatccgtattaatcattttattttgtacctttgcgcccgatttacattagagacgcaaccatcatgcaacagaatacacaacgcccggtaagctcgatagcttatccgatattgatcgcattaagtatttcccattgtctgaacgacttattgcaatccgtcataaccgccacatatccgcttttcaaagaggacttgacattgagttttgcacaaatcggattgattacgctggtttatcagatgtccgcatcggtattccaacccgcattcggattattttttgataagcgcccgtttgcctggacactaccgatgggtatgttgttcactatgacggggatgttgaatctggccttttccacgaatctttattgggtattgttctcagtattcatcataggtataggttcttccgtacttcacccggaagcatcccgcatcacttcgctcgcctccggaggcagaagaggattggcacaatccctgtttcaggtgggtggaaacctgggaggatcattgggtccgttactggtagctttaattgtagcaccttatggtaggcacaacatcgcattattcgcaattttatcagtgatagcaatcatggtaatgatacctgttggcaaatggtacaaaggatacattacccggatgaaacgtgatcatattgccctgcaacctcatatgcagatgcctttgcctatggggaaaacggttctttccatttctatcctgctgatacttatcttctccaaatatatttatatggcaagtttaagcagctattacaccttctatctgattgataaattcggagtaagtgtgcaggactcccagctttatctctttgtgtttcttgtggctacagccatcggaacactgatgggtggtcctatcggagatcgtatcggaagaaagtacgtcatctggggttccatcctcggtgctgcacctttcagtatgctgatgcctcatgtcggcttgcttgccacaattattatgagtttctgtgtcggcctgattctttcatctgctttccccgccatactgttatatgcgcaggaattattacccagtaaactgggactgatctccggattattcttcggatttgctttcggagtggcaggtattgcctcggctgtattgggaaatatggcggataagttcggcatcgaagctgtttataatgtctgcgcttatatgccgttactcggattggttacctggtttttgcctgatttgaagaaaaaccgtaaataattatatatttccataaggaggtgcttcttcacagactcctatcggataatcttttaaaatatcagtcgtattgtattttcattattgcagtgcattataaaactcttccatttcctcttcactcacgtattccccttcatcaaagcgcttttcggagtcctgcaactgttttcgggcctctttgacacctatctgataaggagcattggtcagatttccacttctctgtataatatcttttattgtatcgagcacctcttggttattgatgttcaacacttctctagctaatgccgctttataagcttccaattctaaagtgttcataatcgatttatttttagtatccatcagcaaagatagataaaacttctatatttcttaatggattatcatttgttttcagtcatacctataagtggttagctacaaagaaacatttcattatttgtgggtatttcataaacccctctgatgccgttactttgcaaccgtacaaattaaaccattttatagtatgaagaaaataggaatattttatggttcctcaaccggaactacacaaggcattgccgaaacaatcgcttctaaacttggtgttcccgcatctgatgtaatcgatgtcagcaaaatgaatgccgacatggtaaaagaatacgaagttcttcttttaggaacttccacctggggtgacggtgaattgcaggatgactggtatgatggcgttaaagtgttgaaagaatcagacctgaaagaaaaaacaattgccctgttcggttgtggtgatgctgagtcttattgcgatacattctgcgatggcatgggtatcatatacgaagatatcaaggattccggttgtaccatcgttggtaaggtatctgcaaaagattattctttctcctcctctattgccgtcatcgacggtatgtttgtcggactcgctcttgatgacatcaacgaaagtgataagacggaagaacgtatcgacgcttgggtgagcgacataaaaaatcacttggcataattttctcttattccatagccttatgacaatatctgacattaacccggtagaattgaaagtattcctgaaccacatctacgaatttaagaaaggagtacgccagatggtactttatactacaaacaagaagtatgaagcttttgccgtgaaacgcctgacagaccaaaagataagctatgttatccagccggtaggaaacggtaggatcaatcttttctttggacgcaaggaatgcatcgaagcaatccgtcttttggtaaggcagccactgaacaagctgtctcccgaagaagatttcatactcggggcaatgttaggttatgatatatgtgcgcaatgcgaacggtactgtgaaagaaaagtccggtgcgcttgattaactttgcatgtgtttagttagttgtttttgtaaaaaatgcctgcggattccgtaggcatttttattatatcatccgaaaatagaaagataatcaggcatagctatgcataccgcccagtagataatttactccgaagtaagtcatcagcaccgtaaggaaagccaacaccatataagcatggaagaaccggggttgccggaagacggcaagcgattgtccgtggaatgccgcaccatagattaaaaaggtgatcaaagcccagacttctttcgggtcccaggcccaat

SEQ ID NO: 6430 - DNA, 26913 bp, Unknown
  gut microbiota DNA sequence
agtttggtaaaacttgtcgttgacattgttttcttaatttaagtaattaatataattagttagctacgagctacaagctacgagtgcctttcggaatcatagcgcagctactcgtagctcgtagcttatagcttgtagctcgtagctgatttacggtctcagccagtggcctgagtagctcccgacatcggtatcatcattcaggtcgtcatagtcgtaatgaatggctatccaactgacgtcggcccatgactggtaggcggcgacgtctatttcctttggcacatctctcaggaagaggatgctgacggggcaatctatgaaagcataatctactgtaggcagagagacttggttctggttgaggtcgtatccgctgaggacgatgctttcgagggaggtgcagctggcgaatgcgacgcttccgatgcttgtcactttcggcaggctaacgctttgcaaggctgtgcagctgttgaatgctgcgtctccgatgcttcccgtcactttcggcaggtcaatgctttttaaggctgtgcacatttcgaatgcgttgctttggatatttcctgccatttccggcaggttgacgctctcaagagctttgcagtttaggaacgccatgtttccgatgtttcctgtcactcccggcaggctgacgcttttgagggctgtgcagacagcgaatgcgccgtctccgatgcttcccgtcactcccggcaggtcaatgcttttgagggctgtgcactcttggaatgcgcctccttcgatatatcctgtcattttcggtagtttgacgtcttgcagagctgcgcatctgaggaatgcgccgtctccgatgcttcccgtcacttccggcaggctgatgctttcgagggctgtgcagttcaagaatgctgcgtttccgatgtttcctgtcaccttcggcaggtcgatgcttttgagggttgtgcagccatagaacgcgttgtattgaatatttcctgctgcttccggcaggctgatgctttcgagagctgtgcatccgtagaacgcatggtattcgatgtctctctttatttttggcagactaatgtcttgcagtgctgtgcagccatagaatgcgcctcctccgatgtttcctgtcacttccggtaaattgacgctttgtagtgatttgcagcctttgaatgcttcgcttccaatgtttcctatcactcccggcagattgatacttttcagggcttcgcagccatggaatgcatcgttatcgaggcttcctgttgctgccggcaggctaatgttttgcaatgctgtgcaaccgtagaatgctttgcttccgatgtctcccgttacttgcggcaggtcgatgctttcgagggctgtgcaaccttcgaatgcgttgtattgaatatttcctgctgctttcggcaggctgatgctttcaagggctgtgcagttccagaatgcgtaacctttgatgcttcctgttatcttcggtagactgacacttttcaaggctgtgcaaccgtagaatgtgctgtttccgatgtctcccgtcatttccggcaggctgatgctttcgagggctgtacatttttggaatgtgagacctgcttcgatgcttgtcactttcggcagactgacatttttcaaggctgtgcatccttcgaaagtgctacccccgagtatcgtcacttccggcaggctgacgctttcgagggctgtgcaggtgctgaatgcgtaaccttcttcgaggcttgtcactttcggcaggttgacacttttcaaggctgtgcagtcagcgaatgagacgttgccgatttctgtcgtttttggcaggttgacgctttcgagggctgtgcaatagtggaatgtgctgttgccgatttttgtcacttccggtaggctgatgctttgtaaagtgttgcagtcagagaatgcggcgtatccgatgcttcctgtcattctcggcatgctgacgctttgcagtgctgtgcatccctcgaatgcttcttctccaatgcttcctgttattcccggcatgctgatgctttcgagggttgtgcagcctttgaacgcttcttttccgaggtcagtcactccggttgccgtgatgtacacctcagtaatattcttgtttttaatggtgtttttcagcgccttcatatcagcattatttatctcccctgtaatcatcagcttggtgccgctgaaactgttcagtgttgcttccaatcctcccgccgtattctctatcactgttacctccgagtcttctccgggttttcctcccgtcgtcacctcatcatcccagctggtagaactcaccgtccatccgcttacccctgtcttacttacggtcagcgtcaggtgcaggcaggttccggctttcagcattagcgcttcggtaggggtgaaactgtagctttcgttaccgatgtttatctctatcatcttctgcgcggcggcatagttctgttccggcagcagtagggcgtagtgcttcagcgaggttgccccgttcttcagcagggtgatggacttgggggtgccgctttgcttctgtagcggctcgtccccttcgaacagtgaaatgctgaactcgcagtcggcattcagcgctttcacggtggcggattgcaactggtccgtttttatctcggtaccgggtgccagttccacgcacagttgcgccatggcgtgctgcaactggcaggagtagggcgagacgggcgccacgttttcttcctgataggtgagtacgtcccaagtgtgccatttggtggcggcatcggcttcgtagctgtcgggcagggtgtagtttccctcccctttgtttgctatccgcacggtgttcttggccgctccgctctgccagtaggcggagtttcttgtggctaaccagatattgccgtcatcatagtggtatctaccccctccttgtaagcttccgctcgtgatacctacgtacagattgtcgcttattcggaagcccggccattgctccaagccgtccacgggggtatcggcacgtgtgtccactccctgctttccgtctttctgctccgctaccgtgacgctgcccaggctcagggcgacgcctgtgcctctgccttcgtcggcatcatcgtcagcgtatggcgtacagcctgccagcagcaggcacagcagtatacccagtgtcagcagtgcggcaagcagggtgcgcatactgctccaggtttcggatgagaatagatgtttcatggggtgtctcctttctttataaatcattatgggggatataggggtgaacggggcttgtctttatgggttggggatgtccattccggcctcgcctttcttgttctctttatcccatgcttctacgttgaagctacccagcgtgacgctcttcttatttagtttcagtgtgaagttgtagctcttgttggcggcgcaggtgatatcgccttcggtatccagcgtgtaagtataggtggtaccgtcattcgtggtgaagcggatgagttctttacccttgctgaatgtctgtccgggcatcactacggcgaaccagtggttgccggttttgcggtaaggcttgatgctcttggctcctgcaactgcggcgtcagccgttacctttccgttgttaggatcgaaggttccacctacagacagtccgctggcgctcagtatctctgcacttgcgatggtaggcatgtctgtgccatttgtattatatccgtcgcccggttccacggtgaagtatatctggctcatgctgtggctcatgccaatttctacggaggttgtagccttcatacttgccttgccgaaaaggatattacactcgttcagcttcgccagggtgctgttgtcaatgcaggtgggagttgcgttattgtcagtggggaggcctatgatcaggtcattactggaacccgtgccgagattggcgctcgttgggtagtaagcgtagaaagtgtgtatatactgtgtgtcctgccagtagatggctttggcgctggaagcaagagcccatgagccattcatttcaaaggtggtggtggctttgtaggtattgtccgtcagcgatacttctccgctttcggtgcctgtcttgctggcgatggtcacacttacctggtcggtggaggcccatttatcggtttggccgtccgcgccgggcgttgccggagtcattctggtttgtgtagtcactgctgcctgtcctatgccgaagtctatttcgatgggcttggtgatgtctactacttggggttcattctcgttgttgctgcaagcgctcatggctgtcattgcggttgtcatcgtcagggcgatgagcaggttctttgttttcatatacattactataaataagtgaataattccttagttttctcttttcattaatagataattcccgggctcttcattccttatatagggaggattggcctcctctctgaaaggaatgtggcgaaggtatgacaagtaattggaaatagtcctaattttatattcgcttgttgtcctgatttgtcgcacccttgtcctgatttgtcgcaccccctctcagaagtgcttctggagggggtgaaatttgtattgtaaggggcctttttctttaaggggagatgaaggaaggatgaaaaagtagatgaaagttggggaggcggtgtcgaaatacaggggaaaaagagctcttttctccttcggaacgctctacctgatacaggggagaaacttcagattgtcttgctttgcatgattgaaatattccaactacttatcgtctttatcccatcttatcctgcaactccctgattacatcgttcacgatatataggtcgcccatcagatatagccccgtttcggggttatgcagacgttcgcaagtgtcggactcgtagaagataccaagggcttgttcggaagaaacgttgaggcgttcgcccaacaacacgatgatgcgtcctattttgttccagagaaggaggtcgcttatcataatttgcctcctttctgtgaaatacccaagggcagacattctttgaagtgtaggcattcgtcgatgaggtgctggttgagcaggcacatttggttattgggctgatgttgcgccaactgttcaagggctatttcggcgggcatagttcccgctatatagctttctaccgtatctactacacggtcgtttgctacacctccttccacaaagtcatattcttgccagggtctcagtcctttgcggctgtgtacaataaagtcgagccaatcacggttgtaagtttcgaaatgcaggcaacgataggtttggcggacacgttccatatccaactcatagatattgaggcagggagtacctcttaataggcgtaagttgacgatttgtgcccagcgttcggtttggctgcgaagggtggtgacgtagaaaccttgcccaaagtcaagatcaggacgcccataggatgtcaggggcgttcttacagtgtcggctgcaccatggtagacaagggtgctcatagcttgcctcctttcattgttttccctgctgtttcccagttgtgcagggtttcgagggtggtatcggtgatgtactcgcggctttgagtgtgcagcaggtcatagtaggggaggatgtactcctctatcataccgatacgtgacatgcggcggtacatttcggtggcggatacgccttcgcgacgggcagcggcttcgatgcacgaggcggcgaagatcattcgcagttgttcatcggtcattcgttgcatacttgtcatatttcttgtctcctttcttatttcttggattgcaaagataagcctttcatgctaataacaagcgggagaagagagccgtaaatgggaaagcgctcgtagagcaaaggaattggtaccgttatttagtgtgaatacctttaatcaaagttattggttcgcggcgggtatcccatagagcagtaatatataatatatctttcttctcatctatgtaatatatcagtttgaagtgttgatgtactacgagcgaacgataagcatgtctccggttttcaagtaatgattctattgctccaaggtgagggtgggatgcaagcataaccagggatatttcttctccatattactaaatacctcttcatgcggcatcccgggtattccggcttcttcctccgcttccgcttcgtccatccatgagttaatctcttccattgtataaggtgtgaggtcttcttttgtctctatttctttcttcttggcttctttagtcctcagtttccttacgtattccagcgttttgcgggtcagttcgtcactgtcgataatattggctatctcttgcagcagtgattgtcttaattccattgttgacataatctgtatctcctgttactttagttctttaaaacaaggcaaatatacgaattgtttccttaaatgtctgtcacttggtgtgttaaacttcttcttcttctttcagcgtttcccgatactgcatcggtgtcatgccgaacacccggctgaaagctgtatagtatgcgctgcggctgttgaaacccgccagtggggctatggcgtcaatgctgtaagcgtccaactgacggagcagcgatatggagtattctacccgcaggcggttgatatacccgctgacgttggtgccggcatattcttgtatgaaggtactcaggcggttcttgctcagtccggaaagccgcatcaaatcatcacggttcagcttgggcgataagaaaagctggtcggcgagcagcgcattctccatactaatgaagcgatggcggtcttcctcgttgagatcttcctgccttttcctgcttacaatgaattcggcttcctcatcttccaggttgtctgtctctttatcctcccgattctttatattatcgtcaactagtcccggtgtctccttgttggctttctctttcccggcataagctcttctcagttcttccctttgaaccagcaactcatctatctgccgggcggcaatgcgattgcgctggcgtgtcttgcgcaggttcgtttgcttctcccatagcagcagggcgaacagaatagccacaaggcaggctgccgcgaagtaaatacgttgacgcgtcaacttggctcccttttcctgtaactgcatgtctttctctttcgtctggtagatgacggcaaattcttgtgcctggctttgcttctcgcgggagtaaatgctatccgtcagtacggtggcgcgcaattggtaagcatcggcaagaacgggtttcttcagtccccggtagatacgggcatagcggtccagcagcaccagatagtcgtatcctacactatctctgcttgcaaagagttgcttccactgattattgcattccagcgctttctcatattgtccggatagaaggaggtaaggcactatttcgtttacccccatcggctgccgcgcaaactgcgtggaccggaacctgttgtaagtttcggtagcctcttgaggtcgtccggctttctgatagtagtaggccaacttggagtaaaggtagccgtattgttggtcaatgtatcccggtggtggcccggacatcccgctcatgcgttggataagggcggtacgtagcttggatatccggatagcttcctcattctgcccgtcttcatcgtaaaaggaagagaggtcaccgtaggaagtggagagacgggccatttcacgcacgtcattcgtctcttccagcagtttgacggaacggagcatatagttgtacccttccgataggttcttcattccccggtgcatgcgtcccaaggtgaagagcagttcgctttccgcaactttcagctttagctgccgtgccagtgcgagggcctcggtggtgacgctaattccttctccgtatttattcagccggtcgagagtggtggcaagccgcacgagtacttgtagtttacgcgatggaactttttgtacggagtcgtattgcagggcacgctgcatgtattgtgccttcagggcgtacattccttggctttcgtataccatgccgcgcagaatgtcgatgcggaacaagggcatatcgggaaggtggcgtgcttcagcttcgttcagtaagtggagggcgctgtcgggtgcggaatagtagattttgaggatttgtttctcggtcaacaagctgtccggcgtggaatctgccgcaattgtccatgcgggaaacagaaacagaacgcacactgagataaggaatagtgtgcggaattcacaagtaatatgcatttttatagttcttttgttccggcaaatataggtaattattgaataataattgctcacatttctttataatctacccggaataatgtacatttgcccgacaaattatttatcgacctatatgaaacatactatattatcccttatacttctggcatggggagtgcaggcttatccgcaaacaacggagaatgtgccttccgatgctgcctttactcctccttttgattttcccattactttctccggaaacttcggtgagatacgtgccaaccactttcatggcggactggatttcaaaaccggaggaaccatcggcaaaccggtacatgccctggccgaaggatatatttcgcgtattcgcgtcactcatggttcgggatatgtgctcgatgtagcttataataacggatataaaaccatcaaccggcatctcagtgcttttgtgggtgatgtggcccgccgtgtggaagacctgcaatatgaaaaggaatcatgggaagtggagattactcccgaaccgggtgaatatccggtgaaggcagggcaggtgatcgctctgagtggtaatactggttattctttcgggccacacctgcatctggatatgtttgaggcggatacggacgattatatcgacccgttgcccttctttaagaagaaagtgaaagacaatacggctccccgtgccgagggcattatgctctttcctcaaccgggcaggggagtagtagacggaaaccagaagcatcaggcgtttccgcttaccccaaaacaacctattactgcttggggattggtaggttccgctatccgtgcctatgattatatggacggggtgagcaatcgttacggagtacatactgttattctggaagtagatagtgtggaagtgtttcgtagtgtggtagaccgtttctcggaatatgaaaaccggatgattaattcgtggacatacggtcaatatatgaagtcgttcatcgagccgggaaatacattacgtatgctgcatgctcccaatggaaaccggggactggttgatattaatgaagagcgtccctaccgcttcgtttatacgctgaaagatgcgctgggaaatacttccaaagtacgttttacgatacatggaaagcgtgcggatataaaacctgtggagcaccgggagaagtacatttttcactggaataaagtaaatatcctgcaagagcccggtttgaatctggttatcccccgaggaatgctctatgatgacgcatatctgaattatgccgtgcgggctgacagtggagacattgcttttacctatcagttgaacgatacccgtatacctttgcatggacgttgcgaattaactatcggattgcgccgccgtccattggaagatatgacgaaatattatgtagcaagtgtgagtaatcgtggaaagaaatatagtataggtggcaagtatgaagacggattcatgaagacgacgatccgtgaactgggcacttatactgttgccattgataccgtaccgccccaaatcactccgctcaatccaaaacaatgggggagcgcgggacgcatcactttcaaggcaaaagatggagaaaccggtatcagtagctaccggggaaccatagacggaaaatatgctttgtttggcaagcccaattccatcagtggaaatctggtttgcgaactcgatccgaaacatgtgaagaaaggggggcggcatgttgtggagatgaccgtaacggatggttgcggtaatcagacgacggagcgatttgagtttgtctggtaatggaatatattaatcgataattaaaataactgaagtatgaaaagtaaaagactgactctttccgtcttatgtatggtggcagccgtagcgcatgcgttggcttgtaccaatcttattgtaggtaaaaatgcctctactgacggttctaccatcgtttcctattctgccgattcctacgggttgttcggtgagttataccattatcctgccggcgtacataagaaaggtactctgatggatgtacacgagtgggataccggtaaatatctgggccagatagagcaggctcgtcagacttacaatgttattggtaacattaacgaattccagctcaccattgccgagaccactttcggtggtcgtccggaattggtagatactaccggtatcatcgattatggcagtctgatttatttgggactgcaacgtgcccgtacggcccgcgaagctatcaaggtgatgactgatcttgtgcaggaatatggttattacagcagtggggaatctttcacgattgccgatcctaacgaaatctggattatggaaatgataggtaaaggtcctggtgtacgtggtgccgtatgggtggccgtacgcattccggatgattgcatctcggctcatgccaaccagtcccgtatccaccagttcgatatgaatgataagaataactgcctctattcttccgatgtgatttctttcgctcgtgaaaaaggctacttcactggtgtgaataaggatttcagctttgctgatgcgtatgctcctctggatttcggtgcgcgtcgctattgcgaagcccgcgtatggagctatttcaatatgtttaccgatcgtggtgaggagtttctgccatacatagaaggtaaaactaatcaacccatgccgctctatttgaaggcaaaccgcaaaatctccgtacaagatgtgaagaatgccatgcgcgaccattacgaaggtactccgctggatatcagcaaggatttcggtgcaggtccttatcacactccctatcgtctttctccgctttcttttaaagtgaatggtcaggaatatttcaacgaacgtcctatttctacccagcagtccggttttgttttcgtatctcagatgcgttctaccatgcccgatgctatcggtggtgtgctctggttcggtacggatgatgctaatatgacagtgttcacacctgtatattgctgtaccgataaagtgcctgtatgctactctcgcgtagatggcgccgactatattactttctcttggaattcttctttctggatcttcaactgggtggcgaatatggtttatccccgttacgatctgatgattggagatgtacgtgcaagccagtcggagatggaaaccactttcaatgatgcacaggaaggaatcgaatcagctgcatccaagctgtattccaaagatcctgcccgggcaaaagagtttctgactaactacacgaatatgactgcacagagtacgctcgatacctggaaacgtctcggcgaattccttatcgtaaaatacaacgatggtgtggtgaaacgtatgaaagacggtaagttcgaacgtaattccatcggtcagccggctggtgtgatacgtcccggatatccgaaagaattccttgaggaatatgtaaaacaaaccggtgatcgctataagatgccggaataatacagtgtaaatctttaatgaaaatgtaggaaatttgaacttattcgcctacatttgtgtcttgtaaataacagatatattttaacctctaaaataacaatgattatatggaaaatcaggaacttatcaaacaggtaactgagaaagcccagagatggctcaccccggcttatgatgccgaaactcaggcggaagtgaaacgcatgttggagaatgaagataaaaccgaattgatagattgcttttataaggatttggagttcggaacgggtggcttgcgcggtataatgggcgcaggaactaaccgtatgaatatttacacggtaggtgcagctacacagggcctttccaactatctgaacaaatgcttcaaggataaagaacagatttctgtagtggtaggttatgactgccgtaacaatagcgacaagtttgcccggatttctgcagatatcttctctgcaaacggtatcaaggtatatctcttcgacgatttgcgtcctacaccggaagtttcttttgctatccgtcactttggttgccagagtggtatcaatatcacagcaagtcataatccgagagaatataatggttataaggcttattgggatgatggtgcacaagtacttgctccgcacgataccgctatcattgacgaagtaaataaggtgactgttgatgatatcaagtttgaaggtaacaaagagttgattcagatcattggtgctgatgtagataaggtttatctggatatggttcattctatttctatagatccggaagttatcaagcgtcagaaagatctcagcattgtttatactcctctgcatggtgcaggtcgtgtgctgattccttcttctctgaaggaatggggatttgagaatgtgaattgtgtacccgagcagatggtgaaggatggtaatttcccgacagtggtatctccgaaccctgaaaatgctgaggcgctttctatggctatcgcattggcgaagaagatcgatgctgatattgtaatggccagtgacccggatgctgaccgtgtaggtatggcttgcaaagatgataaaggtgagtgggtgcttatcaatggtaatcagacttgtctgatcttcttatattacattatcaagaatcgtattgcaatgggtaagatgcagccgaatgactttattgtgaagaccattgtaactactgaactgattaaggctgtcgctgataagaataagattgaaatgcgtgattgctacaccggtttcaaatggattgcacgtgaaatccgtttgagcgaaggcaagcagcaatatattggtggcggtgaagaaagctacggcttcctggcagaagactttgttcgtgataaagatgccgtttctgcttgttcattgttggctgagatctgcgcctgggctaaggatcagggcaagacgctgtatgatgtgctgatggatatctatgtagagtatggtttctctaaagaaacgactgtaaacgtagtgaaacccggtaagagcggtgcggatgaaatcaaagccatgatggataacttccgtgctaacccaccgaaggaaatcggaagttcacctgtcaaattgatcaaggattataagacattgaagatgattgatgctcaaggaaatgctgttgatctggatatgccggagacttcaaatgttcttcagtatttcacggaagacggtacaaagatttctgttcgtccgtcgggtacagaaccgaaaatcaagttctatatcgaggtgaagggcgaaatgggttgcccgaaatgctacgccagtgctgatgctgaagcagaagaaaaagtggtggcagtacgtaagtcactcggcatctgagaaagataaactgctgtaaggcagaaggaaaggtgtaatcctgcgaagggttgcaccttttttgttttttatccgttagcgtggacattctttccgttttaaggttcttttgctttctttaagtcaactctgaaatcattctctgttaaatgccgttttatatgcaacgtataaacctaacctaaaccttagtaatatccatcaggatgataaaaggggattttggcaattagtggcgtaagagcgttttcaatagtgaaagcatcggttgagataaattgctactatcctctttttttctgatggatatattttagaattacttgatgaaggtcgaatgaccgggagatgagaaaatatacagattgcggttgcatgctaattggttgatgtgaatgagagtcgtttcattcgtagttgttcgtttgttgaatgcatgtcctccgcaatctgtttttatttgaatgatttccgtcttttaattattgcttagccaccagtctatcatttttcgtgctatgctcagttttcgtggaatttccggcatattttcttttgaatagaatgctccggcactgagctcgtctttctgtaacttgatttccccactttcataatcagcaatgaagcctaccatcagtccgctgggatagggccagggctggttgccgaaataagtgatattcttcactcgtaatccggtttcttccatcacttcgcgttgtacgcattgttccagagtttctcctgcttcgaggaaaccggctaccaaaccatagaatgttccgcggaaattgcgggcatgtaccagcaagatttcttccccgcggcgtattagtacaatgatagctgtagaaataggtggatatatttcgtaagcacacgaagggcactttttcatgataggggtcttatgttccgtaggcataccacacgcgggacaaaaacggctatgctgatcccaatacagtatctgatatgcttttccggcagctttatattcgtccagagtgatgtattcgtaggaaccccggaggttgaccataacccattcttcagtttcagtaacgagctgttcaatggcgaatgcatgtaccatttcatccgtgggcagaaagacttcatggatcgtactacctgagccgggggccaacggtggttctgtaccataaggtacactgtatttaatctctcctttttctgttttctcttttttcagcaacagttggtctttgaaaaagatgaaccactgtgtagggccctgttttttactattcttcattcctgataaaatatctgtttaaaagattatatattagctatattttttcaatacagccattaatttagcccggtctatgggtttaacaagatactcgttgcatcctgcatccatagcagttaggcggtcattctcaaaaacgtgtgcagttaatgctataatgggtaattctgcattgaatttacggatttcagctgtagctgtcagtccgtccataacaggcatcttcatatccatgagtagcagatctatgtgacgtttatgtagtatttctatggcttcctgaccgttggcggcatgcaccagattaaaacgtttccgcaacaaagctgacactaactggtaattgctttgaatatcctcagcaaccaggattgttttacgtccgggagtattgcttgacgaggttccggcaactatatcttttttatctgatgaggttaccctttctgttctttgctgagtaatttcggatggtatttccacttcacaaggtaacagtgcccagaacaatgagcctttaccgtattctgattcaaatcctacattacctcccattgcttccgcaattgctttacaaatagatagtcccaaacctgtaccttgtgcaaattcgtctaatttctcaaaccggtggaatactttgtttttcttttcgtccggtatgccgattcccgaatcttttacataaaaatagattccctcttctctgtattcatagcccatttcaatagttccttccgtggtatatttaatggcgttggttacatagttggtaatgatttgtgcaacgcgattacggtcgagagtaactaaacagtgttggtaaggattgacagctactatttgtattttggggtttgtggccctttgcttcatagaagcaaacatggagttgaaatagtccgtcaggtcgaattcttcatatttcaattctacagagccggcttccagtttggacaaatcaagaatatcgctgatcaatttcagtaacatttcattgttattattaataatctgcatgtaatcctccttctcttcatcgcttgcatacatcatcagtccggagaaaccgacgatggcattcagcggggtacggatttcatgactcatgttagctaagaaagcagatttgagtttgtctgattgttcagcatgcatctttgctatctgcaattccttaatcatctcttcacgttcggtcacatcgtctacacggatgacaatgccatcagctgtaccgtcttcaagaaaaactggagttccatatacttcgacgacgtgtgcattatcaagtttaaatttgatgagttctgtctgacgggattggaaagcacgtgataatatacactcctcgcacggtgaagttcggttgtgggcacttttatagcaaagttcaccttgcttgtaggcttcgaaagacaagctttttgagcaggaggagacattttcccactgtacgcgatagtctcgggtgatgtatgctaagccggaattggtattgttgagtactaattcattcaaggtaaccaatttcttcagttcttctttatttttgagtaatgtcagttctgcttgtttgtgtgcatctatgcagatggtcatgccaaacatatatttatagggagcatcattcagggtacttgtttccagcatgccacgggtttgccaccattgataaactccgtcaccgtttaaatcgagttggtattccaattcccaaataccattatcctgttcaacaacggcttgcagggaatcatggaatttttgtttgtcatcaggatgcacacaactcagaaatttctccaccgaacagatctcagaagcctttttggtaacttcattgaacccttcgccaaaacttatcctgtttttgtccggttcaaagaaccaagtaaaggcattcatagctcccagagtgattgaaagaatctgtgcgcgacgtttaagttcattttgcagactttgatcccaacgggtattcagtagtaaacgttttccatcatcttcgataacgctcttgcgcacgattgtatcataactgcgcccgtctttcaggtttacacgctctagtcccagataaggactaccggtattgaagacctcaagatctgttttttgaatacgtgccacttgttcttcatccatgacatcgtatgttgtcgtatcttcgctcgtaccgaacatacgtttactttcttcattgcagaatatataacggaagttatcttctacatcttttatatggatggagagcggaatattattcaatatcttatccagaagctgcttctttttatggatatctgtattgtttttgcgagtacccacgtatttaagtacctgtctgctttcgctataagagtagggggagccgttgacgaagcaatattgccattcggaagaaccgaataacttgatgcgtccttcgaatgtgaacgagaagtcttcaccgctattcattctctgcatgatgctgaccatttctttacggtcttcaggatgaatcgtttctaaataaagatctattgacaggggacgtgatttgtcatatccgttcagaggctcattgtcactaaaaaatagccgggagttgacatcaaactcccaaagcatgatatctgctgtttttatggctatctctgtcttcagacggctttggcggagcatttcttctttctccaaagactctgtgatgtcttccatgatgataacataacttgccaattccccgtttgggttacgaatgggttgcccattacattccaggtaacgaatgccggtatatacggtagtgatgtaaccgtctacttttccaaaatcatacggaaaggaggtgaatatgggtaatcctgcttttattgcatttttaatttcgtcggtcactaccggactgtcgtatatgtttggatgactttctgccatctcttccatatctgtcccaaatatgcggcagaaacgttcgttgaaatacaatatctttcctttagcgttatagacagctactgctaccggaagtgagttgaggatagtcatgctctggttataaagactatcatattgctgctgtagtttaacatgttcggcaatatcgtttgctagtgagtgcttctgttctttttccatgcgtttgagctgttatttgtctaagttcgtaaatacacacataaagatgcatctatacaagtaaaaaaatactggctaaggattcttaattgagaaaggctatgcatgccgctgcgttagctgcatgaatcattctacaacggataaatccgtcttgtataaacaaatgctgcatgatgacatgctgcatagctgaattggaaagctggctgagacgattttctatcatactctgttgctattacttgaaataatttatttcaaggcgcaaacatatataaaaaaaatcattttcagtctttctctcagcagaaaaaaaacgaagattatcgtgatattttttggtatgcaatcctgggcgttccatttgagacataaaccgtcccacaacggataaattcgtttcgcgcaaggagattttgcatgatgatattgtctttatgtgtgtccgcacgtaagcttggatattgcttggtgcaccaatttaaacagatatcgccaatgcctttgtaacttccgtcggaagcgatacggtgaatcacataatagggatcatcattcagccaggctccatcttcgataatggaataaaaggggtcgggactcggaacaaaacaaaatgttccgacgatttttccgtgttcatcttcgcatgcgtagcaatgtccgtcggtgatttctttggcaatcagttcacgctgcgggtagccgttgatccactggtttccgtttcctacggatgccataaacttgcgggcatgatcgaatatctccatcaggcggtctaagtcagaaagttggctgggacgaatttgtatcatatctgtaaacctgttaagttgcttaattctggaatacaaatgtacattattattttttatattatccttttctttttcctttcattagaaattcttcaaagaatgtatcgcggtagctgttgcctatggcaatctcataattgcctatatagatgtcattgttatcaaatgaatcgatgtgacgggtattgacgatataggacttgtttacacggaggaacagatcctggggcaagagctcggagatgcctttcatattcatacgggttatgatgcgctgctccggtaattgaaggattacatagtctttcaatccttcgatgaagagaatatcggcatagtttactttgaaatatttccgttcggacttgacaaagaaatactcggaagatacattggcttcaatagcctctttctcttctttcatcaataaggaatgataggagagagccttctgtacagctttctggaaacgttctgtttctatcggcttgaccagatagtcgatggcatcgacttcataactatccaatgcatattccgtataagcagtggtgaagatgataagtgttcgtttggagacagtatgtgcgaactctatgccggtgataccgggcatctggatatccagaaagatcaggtcgacagaatgttcttccataaaccgtgcggcggacactgcattgttgaacatgctcagtaagcagagctctttattttcttctaccagcatttccatagcctcgcgtgccaggggttcatcatctattataatacaattcataagttcagctttaaatttactacatatttgtttgctgtttcggacacttccagtaaatagcgaccgatatataagagttcgagccgacgtcggatgtttgttaggccgattccgcctacacggctcttgcctgttgctatggcaggcttggagttttcacacaggaattccaattgattatcatcaactttgaagaaaaggtgaacgtatgacggatgttcactatcgaaattatgcttcactgcattctctacaaaaggaatgaatagcaaagccggcaattgtatgccatcgatattaccttcctctgtaatattgtagtcaaagtggtcacgccgtactttctccagattcagataatcgttcaggaaatggatatcggaacggagaggtacatgttcgcggaagttatcattcatctggtaacgcaataaatcttcaagcttgaataatactttagatgcttctgcgggattttttcgaatgagtacattggcattattcagcatattgaataagaagtgaggatttatctggtttttgagaaacttcaattcagaatgcagagtggcagattggatctcatctacacgctggttatagagtatccagtgacggagcaggagtatggcggacattccagctacggtaaatcccatggctaatactcctgatatggcatttaccacgataggcaacagaccgttatcggatgagggaacagaaatatctatggtgaaaatttggaatatggctacagctataatgactatcagactaactccggatacaccgagggcatatatcaacaggcgatttttcaacaggaagcgagggaatagccaataaagattgatatagaaaactgcatcgatggaaataaaatagatggcccatcccagcaatctttgagggaagctgagtggtcgcatggggacattccaaagtatgtttactgtaatcataaataccacgaattgcagaaacagatgtcttgccgtccgataacgtggagcaagcaggaaattggtaaaacggttattgatcattttccacctcctttcaattcaagctgaatgctttggccggttaattccaaccggtagttctctccgtattgcaaatcaagacgttgccggattttatttaattcctgttccggttccaggcaaggtatggatacctggcagttgaactgaatattctcatcttctgcatgcagatggatgtcaatggatgcaggatgttcttcctgtgtttcgatttgttttacggtgtactgtataaaagggatgaaaagcaatgggaatacaaaagtgcgtcctgtctctcccgatgcgttcatgtggaaatcaaatttgccggagacaagttgttccagttccaaataattggtgaggaatttgatttctgtatttaacagcactttttcccggttacagtcatacaactgataccggagtatctggctcagtttcattaacattttcgaagcctttcccggatttaccaatgcctgctctcctgaatagtggagtacccggaataacatggaaggactaatttgctctttcagatgttctatttcagactgcaacctgattttttccaattgcatcactcgttggttttccagtatccaaagccgcagtaagacagtcatgccaccgcccatgatactgaggagcgttaatgggaaagaggaaagatagtccatcacaaatgccactttagagtatccgacataaatgttaggaactgaaaagatatcggatacaatatactcctgtgtagcttgaaagataaaaactacgattaaagcggttgagagggaaagaatatatgtcagatatctttgtttgagcaagtaacggggtaccagatagagcaaattgaaatagaaaatggaaccatagagcagaaacatattgaagataagaagataggtccacttccctaacatctctatatagccctgacaactgaataataccagattacaggctatgacaagcagtgccacgatgacagtgatatgtctggctacccggaagcgcgaactgacgaggaagcggtatagaaaagaattatcattgcctataataggtattactttcatggaagtatctttcatttgaggtgacgaagatagaataaattcatataaaacactggattatcctaaattaaaactctattttgtagctgatattggtcagacctgttttctgttcacttacctctatctttcctgtttttatattatagaggtgctgaatgaactctttgctgcccgtaaagttgaggcctttcacggagaattcatgagatacacgtcgtttattgatgcggtagcttactgtataattaccaatcaacatcggagaacgttgaatggaatatgcccgcatttcatcatactgtacttctttatcggggtgattcatcgttgcttccacatctatcggagcatagcgttctccgccttgcagagtgagcttcagattgacactgagaatgttttgtttattgcgtcccaacatccattctttgccgattagcccgttcaatacatattttcggttaaagcgtgtgttgtgccagacaccgtcgccaccgcaataacgggaatcgaacagggaggcagttatcatgtagtagaggcctttgttcagtgctcgttcccatgtgaagtctacaccgaagttgcgccctcgtcctttgttcactaaagcattttccacgaaaaactcatctcggttaagcactgaaaaagaactgtcgcgcataacgggcacatcgtataggaactgaatgtaaggttccactttcagacttgtattttctgaaaccttataggcgaatgaaagcatcagatggtgtgctttggtgaaatcgaggtttttgtttactgaccggtcaccggtactttgtgtctttacaaagtaaacgtccattttttccatacggctatacataccataagccaaagcaaaggaagtccgggtatttgtttgccatttcaggctggcacgtggctcaagggtccaacgattatttagtgtgagtagttgtccgtgcaggccgaagttcaggcttagtttatcgtttattccccatgcggaactgttgtaggctgaaatcaaactggtgtttccgtctccttttgagattgtttccaacggttggtcaatgaatggagcaagttctaaattcatgttgtagaacatttgtgtaaaggttaatccggttttattggtaaaacggttatttactttccggttcagtgacgaagtcagtatcaggtttgtgcttctgctgttctgatcgatgttaggtgaaggattaaattctctgtcataagtggtttgtatggcttcttggtcggaataggttccggcaagtgtggttttcagcaacgtgttttcattaaagaagtagcgatgggtaacacctccggctgccatgtactgcgtagaacgtccctgtccggcatcttccagataatcccatttatccggattcttttcgagtgagcttttatatttgtcaagtaatgcagtgccccatacggcgaaagtgcctgcgtggcgggtggggaagtttagtttgaagttcaggtcttgatagtccatctttccacctaagtcaacgttcagtaatcctgtagtggagtagcggtaattgaagatatacgaagccttatgtttcttgcttaacggcccttcggaggcgaaatctattcccatgatacctacctggaatgtgttttcatttcgctggttgtttccgttgcgtagcttcatgtcgaagacaccggaaacagcattgccgtattctgccggaaaagcacctgtgaagaagtcggagtttcctaaaacttgtgcactgagtgaggacagaattccacctcctaaggtggcgatatctgcgaaatggtttggattgggaatttccacatcttccagtcgccactgcaataaatgcggggcattaccgtggatagatataccattgttggaaacgcttggcgttactccggcaaatgaagcaaccagtcgggccggatcatcaaatccacctgcatagcgactcgcttcttccacgctgagcatacgtgctcctgcgacagccattttattcatggcttcgttccggttgtgcgcacggaccactacttcgctcagttcgtttacgctttcctgcaaatctatttccagataaacttccttagcggaagtcactagaatttcccgtacagtcgctgactcatatcccatgaaagaggcttgtacagaatgacggcctaccggaacttttggaagtgcgaaacgtccgagactatcgcacatcatccctaatcccggaatattcgtcaactgtatcgtagcatacggaataggatgtcctgatgcccgatcattgactactcctcgcagtgtttgtacggggcgtccactactttgtgggatattctcattatcagccgatgcttgtccggggatattagaaacttcttttccgaaagagcaaattgaaattagtaatgcaattattactaatactttagttttatccatctttatcgtttttggtttaatgcgacaaagataggtctccgcaatacgctactcttttatttgagacgaaccggatggctttgtagacgaaactcggaaatagcggctaaagcttgctctgctttttcttcaggcacaaaaatgtgatcatggtagtacgcggcaaccacattggcactaatattcttttctgccaatttagttgaaaatgcggctgttaatccaacagcgtccaagcttgaatgtacatttagggaaatgagcttataaacagattcataatttatatttttatcaatagcctcttgttgggtgatgataagcgtcagtccctctttttcatggaaaaagccgatggggttcaattgatgtacatcatcccagtggaattcgggaaaagtacaaaaaacaaaactgcgttcatccagaacaggatcgatactggataataatgtccctaaatctttgatgcctgccataacgtattgatttatattctttttcttttcattgatgaagtgattcttaatatgccttcaattgcaaaaatagtacttttttatgatttaacggaagaacctttatacttacggctccttcttgtcttatctattcatttacgaaagccttaccagttatataactcatacgtgttgagttgtataacccaggctgtataagttgtataactggtaaaccttttcgtagtaagtaagagaaaaaagaagttagtaagctatttgctttctaacttaatccatgatttacagtttatttctttcagaaattccttatcatgtgatatggcgattaccgttcctgtatagtcccggatagttgctgtaatgatctcgatactttcaatatccagattattggtcggttcgtccagtatgaaaacatccggggtgttatctgcaatcatcaggcaacagaaggaaaggcgcatcttttctccaccactaagtaacctgcaagacttgttccatgtagctgctgggaagagataacgattcaatatcgttttcagctcatgctccggcaggtggcgccgattgaaatattccgcttgttccagaatactatattcattatggataagagaatattcctgatccagataaactgtgctgaaatcaatacggtcaagtgttccactgacggcagaaagatctccgcaaagtagtttcaacaatgtggttttgccgctgccattattgccttcaatatagaagcggtcgccactccgtaactgaaagcttaacggtgttgtccacatgggttggggagcatccggatattgaaagttcatttcttttgcagtaaccaataccttaccttcgtgcagagtggaggcattgaaatttgtttttaatttctctacaaggggaagagtactttttatgttttgcatgtcctgctgtaacttttcagctttctcggtatgtacactttttagtttattagtacttacttccgccctgtttttcatagtacccatcataatgcggggaatgcctttcttgatggcagccttttcaccccgtacattctgttttgccttttgttccgccaattcacgggcagttttccgggcaagtcgcagggctttttgcttttcttccagttgctcttgcagggcgttcagttggattcctttttgttccttaaagaaatcgtaattgccgccatagaaagttagtccgttagaggctaattcacaaatggcaggtaactggtttagtagggtacggtcatggctgataacaagtacaatggccggagtgcgccgtacgaaatcatataaccgttgccgtcctgttgcatccagatggtttgttggctcatccagcagaatagcgacaggtgagtgcaattccatgccggcaagaaagatacgtgttttttctcccccgcttaatccgcccatcagacgggagaggggaataccatccattccccaggccgacaaggcagcttgggcacgttcttcaatattccagtcatcattcagtgtggtgaaatgtttttcagatacatctccgtttagaatggcatgtaaggctttcagtttgccatctatccttaaagcctgtgcaatggtccggtcatcatattgcccgaaatgttgaggcacataatagagatgttccgggtggctgaccgttccggttgtagcagataaatcacctgcaataatccgcattaaagtggattttccgcaaccgttgtttccagtcagcgctattttatctcctgggttgataacaaggttcaaatgttggaataagacttctttgtcggaatggacatagctaagatctctgataataatactcatggtaaatactgtgtttaaagaggtgaatacactgtacccaaaaatgctttggatacaataaaatctcgattgtggaggggatagacaaacacagtattggctaaacattcacgtttgtgatgctcagcgttctgaattataaagcatgtaaaaagtgatgtttaccgaaatgtttgtctttacttggaaattctcatcgtagtaattattagttagtgggtgcaaagataggtatttcttttggatattgcaatattactattaaaaggtggatattctgagtatttcgataagccttcgattattagacttttaggtaaaataccgtttttaagaagattttcttaaattgtagaataaaaccatatgtttgccaaataaaaccatatatttgcaaaatatagggtgtatctcgt

SEQ ID NO: 6431 - DNA, 20771 bp, Unknown
  gut microbiota DNA sequence
aaaatgatgtattgatattatgtaaaaacaatctattatgaacaactcaaaaagaattctaggtgaaatcccttgttaatttaagtctaattaaaaaaagtagtttaatgaaaaagaaagaacacaaatcgaaatcgctgttatggcggtttttcctcgttctgtttgcattttctatgagttttaatctatatgctcaggaaataacaacaactggtacggttgtcgatcaaaatggggaacctctaattggagtaacggtttccgttatgaaaggtagtaatgggacaattactgatattgatggtaacttctctattaaatgtaacaaaggtgctacattgaaatttagctatattggatataaggatgcaacgcaggtagcaatgggtactaaaatgaatatagtactaacggaagacgcccaggcattggatgaagttgtagtcataggttacggtacggtaaagaagagagatttgacaggtgctatctccactgtaaatgccaaaacgattgaagaacgtcaaccgactgatatctttcaagcattacagggggaagtgtccggtctgcagatttccaataactcaggtgctcctggggatacaggtactatgctgattcgtggtgcttctactatgggatcaggtgttactccgttatacattgtagacggtgtggcagtagataatatttctactatcaatcctgccgacattgaaagcatggaaattttgaaagatgctgcttcagccgctatttatggttcccgttcggctgctggtgtaattatcatcagtactaaacgtggcaaagaaggtgctcctgccagaatttcagtgaagtacaaccactcaatgaagaagctaggacataagattgatcaggcaaatgcatttgaacgttatttgaaagaaagagccggtaatgcaggaacttctttatggaaaaccagtaatgactctttgcatcccaacttcatggctgataatgactatcaggatttgattacccgtatggctcattccaaccaggttgatattaatatcagtggtgcaaagaataaaatgagttattatacaagtattggctatttgaacgagcaaggtattgtactaaatagttatttgaatcgtgtaacttccagaaccaacgttgatttcgctgtgtcggatcgtttcaaattaatgagccgtttcaatgtggcttatactgataagaataacatcaataccggtggtgtaatcaatcaggcattacgtcgtccgccacaaatggcactttactttcctgatggatcttatgtatataataatggcggtcagttcaatccgatagctgatgcttatgaacgtgttaataaaagtgtttcttactcagtttctttgtatcagggagcggaatttcagcttatgaaaggcttgatctggtctgccaatgtacagggtgaattgaaagttaaccgtaatgaccagttgatccgtggagatttagtttcttcaggcatcagttccggttctaatgatgcaaaaatccctcgcaaattatctgcggaaacttacattaactttgccagagatttcaaagatcattcagtaggcgctatgttcggtaccagtgtcgaggattggcgtgatgaaacatttcacttagaaggtagcgattatgtatcagaatcgatccttacttctaacgctcagcaggtgaaagacctgacaaaaactaagactacttatgaaagtcatgctatggcatcttttttcggtcgtgtaaactatagttataaaggaaaatatatatttacgtcaaatcttcgttatgatggttcttcacgttttgttggtaaccgttggggattattcccgtctgcatctgttgcatggcgtgcttctgatgaattcttctttgactgggcaaaacctgtactgactgatgctaaattcagacttagctggggtacaaatggtaatgaacgtgtaggtaactatgaatcaattaaccaatataatattggttcatattataatggcgtcatcggagttactcaaacggataagttggccaaccttgatttgagttgggaatcgacggaacaaactaatattggtttggatgtaacattacttgacggacgagtttctttagtggcagaatattatatcaagaagactaaagatttgttggccgatgaagttatcccttcagaattaggtgttagtagtatgcgtgtcaatatgggtaatattgagaataaaggtattgagctgacaataaatgcaactcctgttcagcttcgtgatttttcatggcagaccactcttacctatactaaaaacaagaataaagtattaaagctatcggaaggcaagagctttgtggaagatggtaaatacttaattgaagaaggttcgcctttgggacaatggttcggccaaaaagccttgggtatttatgccacagatgaagcaaatgcatatatcaagaatagcgacggttcatttggtgaccgcttgattcctgtgtatcaaagagatccgaataactataataactatatttatggttctaacggtaagcccattttctcacactatgagacaaaaggtggtcagaaatatgcaggtgatgtaggtcaaatgactaccgctggttcggtgagcaaaggtggtgatataatctgggatgatttggatcatgatggtgtaattggcgattcggacagacgtattttgggtaatggtatgcctacatggtatatgggatggactaactatttgaattacaagaatttttcattatccttctcgttctatggaagttttggcaacaagatttataataaacaacgccgtgacctgttacaaaattcatcatcgaatatgactccattagcaagagactgttatcgtttgtggaaatatcaaggacaaataacagaagtttatagtagtgccaaagcaacaactggtgtaaacaatgcacgtgaactttcttctttcttcctggaagatggcgactatattcgccttacaaatactcgtttagcttatagggttgaccgtaatcttatcaaacgattccatatttccgatcttcagttgtatgtatatggaaacaaccttctgacttggacaaaatacaaaggatttgatccgtcaagtatttccaatagcaatgtgttgcgtccgggtattgataacggacgatatcctaccgcaagagaaattggtttcggactaaatgttaacttttaacttgtaacaacttatgaaaagattaaaatatttactgatcgctggtgtcagtctgctgctcacttcttgtgagaatttcttagacagacaacccgaaagttcattgtcgggcgaaactttctggacttcggaacaggatttgaaaacctggaatgcaggtatgtatgacggtctgcaatctaccttacgtacaaactggttctattggggcgaacttcgttccggtgtatatgcagaacgtggtacggcttacgaccgtaacttactatacaatggtttgaattctcagtcgggctcttccagttggagtgatctttataaaacaatttatcgtgcgaatgcggctattaagcatattcccaccagccctataggcagttctgtatctgctccatatttaggtcaggcttatgcaatgcgtgcattgatgtatttttatgctatacgtgtatggggaggtgtacctaaaatcactgaacccatggaagatgtctcttcgcaggaacgatattatggaagaacttctgtagaagaattgaaagcttttattctggaagatatagagaaagcattagaacatattggtgcttctacagatatgtccagtgccagtaagtactatttaaaccgcggagctattatggcattgcgtgtagatgtattgatgtggtataaggaatatgacaaagcgctcgtagctgctaatgacttactgacaaactataaatatagtcttgaaccggcatctacctattccagtatgtttttgaatccatcaagttctaaagaaatgatattcaatcttttctggaactatgaagaagacagcaacggctttggatatgctcaggaacttgcgtcaggttcaaacacgatccgatatcatccgacaaaggcatattataaggaattggtatcccgtaagagagaagataatcgcgtcactatgattatggatacatttgctatcagctatttcattactcctgacgagatgatagacgaatcgtatgaaaaagcaatgaacggtgattatggtaatgccgctaatttccagattaaatgcccgaaattcacagaatacggagcaactgctaatgatggcaggcccggatattcctatgttgctaacggatcatgttctacccatatgccaatttatcgcttagcagatatcttgttgctaaaagctgaagctttagtattaggtacgcataaagattatcaaggtgcgattaatatcgtcaatcaaatacgtgaacgtgcaggttgggaaaatactgcagttttagaggattacccaaccgaaaaagatttgattaagttgattatcgatgaacgtaccattgagctttgggcagaaggtaaacgttggtttgatttggtacgcaatgatatggtaaaagaatatttagatccatatttgcagaatgaagacttgggtgatcagagaattccggaaggttttgttattggtgctgagaaagaagctaatcagattggcggttacggcagaattttgtggcctctgaatcaggatgtattccgtaagaacccatctatgagagggcaacagaataaaccttatgaagaataacaataatgttttaaacaataatgaatatgaaaatctttagatattttataagtctggccttattttgcatttcactgagttcatgcaccttgtttgaccttgattttcaaagcaacgaggaatatgaagcaaaaaaagcggataataaggtaaatatgacaatctgggaatttatccagagccgtcctgatatattcagttctttaattgaaggtattcagtatgcaggaattgaagacttgtataaagaagcaggaaatacgcatatattgctgaccaatagcgctcttagcagtggggataactgtttttggaagaaaaatccggtgatgcttccaggagctacggaagccgcagctgctactgcgtgggagcaatatgacaagaaagtggtaaaagaattgctgacttatcatattgtaagaggagaatggtcatattttaatatagattcttcggaccgttggattgggacttatggagaaggtagcttttcctataacaaagatggtcagacacttcaaggagatactgcagtaatgtgtgtcaaggccggacatgaccgtaacctgccgcttcaattgaataattttgaatggaattttagaggattgttagctgcatcttccggtagttgccgcaccactaacattcatgcacgtgatggttatattcatgtatctgactggtggcaacctcgcccatcgagatattttttgggtcaagaataaattaataatatagaaacgtatgaaaaaactagtattcaatattgctatattaatatgtgtgatcttcacttcttgttcagacgatgacagtgtaaatattgtttcattgaacactttcggcacaaaattttgccgcaatgatgtggtgaaagtatttgtttctgccgaactcagtgatgatacagatgttagttatgaatggggatgcgatggtggaagcatgacaaatcctcaaggactatttgagaatgtatggaaagctccgaatgaagccggaacttatgaaatttggtgcacggtgaaatgtggtggtaagaaagaaacccgtcgttccaaaatgacagtactggacgaactgttttactctaactttgagactccttattataatgaaggctggtctaatgcatctatgacagtagcatttgacgctaataagggaacgaatggtgcagttaaattaacttccactaaagctgatggacgttttgcccgtagctgggataatgtatctgttcctttctccacacaagtggactatgcagtaaatgcttgtccttcagataataattttgcagagatccgtattgaatttgcccgtatcaataatgccacgttttatgtaactaaggcatgctttacgacctatcccaaaacaggagcatggaaagcaacttatacaacaactaatgtgacaacaggaaagacggaagatattacaatagatgaaggtacggatacggcaaactttaagtttaaaaaggatgctttcaaaactattgcggtatcaatcgatgcaaataagaaattcattatttactatgatggcaagaaatattttgagagcagtgcgttagctagtgtacaggatcagtattatgtatcccgttctggcttcggattggacaacaaagtcgttatttttgccgataatctatttgtatttgataacggtacaatctgcacagccgaacctcgtgaaagataaataatcaatttcattcatcgaaaaaggagagaatattggacatacacattgtgtttgaatattctctctttttattaatattataaagatatgaaacatcgtattctgattttattatcagctattctgatttcactggtgggaacagcacaggacaatgtggcaggagttatcttgaatgaaaagggtaaaccggccaaaaagataaaaatgcgggtaaaggggcgcatgaagatactttccacttcatcaaaaggtatatttgaactggataatgtgaaaacaggcgatacactgttggtatatcctaacaggaagttggtggcttatgtgcctatgtcgggaattccaacctataccatacatctagggaagaattcattgcgctatgccacgaatgacaaaacgattacctgcatgtatcaggaaataccggaacaaacctataatagcaatattatcacttatgagagaatccggcaattagacgtcaacaatttaatagatttgctgcgaggtaatattgccggattgcagattaattattcaaacggacaaatgaaggcttcaatacggggaagttcatcttttgccctcagtaccgaaccgcttttcattgtaggcggaaccgaatataattcattggaggaagccaataatgcagtgtcagtagaagatatacgagaagtcgaaattaaaaaagatggctctgaatatggaatgaaaggggcgaacggggttattatcatacggataaaataattttttcaactcttctgccatgaaaaatatcttaaactgattcttctataaaatgaagttattctttgggaaattattatctattgcaataaaattgcaaacttttgagatgtaagtgatattaggttaataaattcattcctttctttgtatcgttgttagtctaaccacattatgaatattccaatactaattttatagttatgtatatttttttatatacatatgctgtggcttatgcaatggaaatcatttaataataaaacgagaaagcgttggaaaaatgctttgtttatttaagtctaatcaaaaaagtagttttaatgaaaaagaaagaacacaagtcaaaatcgctattatggcgtattttgttggtactgttgagcttctcttttagtactatagtacaagctcagaatataacagtaacaggaagcgtagaagaccagaatggtgaaccattaattggagtgacagttgcagaactgaatactactaacggagcaatcactgacattgacggtaacttttctattaaatgtgttaagggttcgactcttaagttcagttacattggttataaggatgtaaccaaagtcgttactgaaagtaaactgaagatagtcttgattgaggattcacaagctttggatgaagtagtggtagtagggtacggtacgcagaaaaaaggaagtgtgacgggtagtgtaactagtgttgatgccaaagctattgaagattttccatcagctaatctgtcttcagcattagcaggacgcctttcaggtgtatatataactcaaggaacaggtaaaccgggaacttcagcctctttcagtgtacgtgctaaaggtactcctaataattctgatccgttgtatgttattgatggtgtggtaagagataagatggcatttgatgcactggatgccagtgaggtggctaatatatcagtattgaaagatggtgcatcggcagcagtttatggtgcccgtgctgctaatggcgttgtattgattactactaagaaaggtggaaacgcgaaaccgactatcaattatactggtacggtaggtatcgatgtagctgctatgattccagagacgcttagtgcttatgaacatgctgtttatttaaatgaccgtgctatacagggttatcttaacaatgccatttggaatccgaatgtagaacagcaagatccgactactaagtcttcctggtatacagatgacgagttggcacatttcaagacaactgattatagttttttggatgatgcatggaaaactccatggtctacgcgtcatgctatcaatattactggtggaaccgaaaaagtacgttattttattggtggctcttatttctataatgtaggttcatttgataatctgaagtattctaaatataatttccgagctagtattgacgctgatgtcagtaagaattttacagttggtttgaatatcagtacagataatcgtaaagataccaaacccaattggaaatccgacggtgaccgtgatcgtatgaatgatttatacaagggattattactccgtaccaagatgatcccaagtatgattgatggaatgccagtaggtaactttatagaatggcatccattaatgcttattagcgaagaatcaggtttacatactaagaaatggcaaaacgttaacgtcaatgcaactgcggaatatcgagttccttttgtaaaggggctgaaactgaaagtacagtataaccgtacactggataatcgattaattaaaaaggtgaacttcccgtatgaaatgtacaatttccagactgccggaacaaacaatcattatattgacccaagcaatgtagtagtatctaccaaaactcgtgatgacggcaactatgtatttaaagaaaaccagttggcagaagaatatcaattaaacttatttgtaacttatgaccgtaagtttggtaaccatgatttgagtgcattatttgtttatgaacaatctgaaggtgatagtgagaaatttgatgcacagcgcaacaaactaatcacttgggaaatgccggagttttttggtgcaagtggtgatgcttctgaatctattgttggggctggttctgtgagcgaaagtggtcgtctttcctatgtaggtcgtttgaactatgcttatgcagacaagtatctactggaagctgcattccgtgtcgatggttctacaaaatttgctcctgatcaacgctggggttttttcccctctgtttcagcaggatggcgtatttccagtgaacctttcttctcagaaaatatcaagtttatcgattacatgaagctgcgcggttctattgctacattaggtaatgatgctattggcggttggcagtggatggctcgttacggaattactacaggtgctgtattcaatggtttatcttatggattggaacctaaggaagttcctaatcctaaattgacttgggagaaatcaacttcttacaatatcggttttgatagccgttggtttagaaataaatttgatttcagttttgaatatttctacagacgtacatacgatattcttgataacctgaatgtaagtgtacctactacatttggtgcatctttgccaaaagaaaactattctgaggttaaatcccgtggtttcgaagtagaattgggatacaatgacagaatcggtaaggtggactattatttaagaggtaactttagttttgcgaacagctggtggtccaagaaagatgaagcagaaaatatccgggcatacaaatctgaaatcggtcagtcattgagccgtgaatggggatttgaatgtattggtatgattcgtaccgaggaacagttacagcaatatatggaagaaaatccgaatatgaccattaagggacaaaaacccggtttaggtatgttgatatacaaagatgtccgtggtcctgagagtgatgaaccggatggtatcattacggatgatgacaaagttgttattattgaaaataaagtggctccaattacttatggtttcacaattggcggtaaatggaaaggattcatgcttgatatattcttccaaggtatggccggtcataagaagttgatggatttccgtggtaatggtatcaatgcccatacaagtacattcaaatattataatgaccactggacaccggagaatacaaatgcttcaatgccaggcgctacacagtacaaaaataatgaagcttcttccttctgggtacgtaatgcttctttcttacgttgcaaaaatatatccatatcttatgacttgccgaagacattcgttcagcggataggcattgataaggcaaggcttttcctgaatggtacaaacctcttcttattacaggataaagtaaaatggatggatcccgaagcaacgagtatttcagactatcctgttatgagaaacttctcatttggtttgaatataacgatctaattatataaaaaacacttgaatattatgaaatcaaaacatataatagctattacagcattggcatttgcaagcttaaccagttgtacttccgtattggataaagacgacttgacagctgtcagcgaaaaggcaacatggaatagtgagattctgtctacagcttttttggataaatgctacaaagataatctgccgtcatttagtggtgattattctaaatatagtgatgagggtaacggaggtggtgattttattcatggtcgactgacggcagtagctaccgctggaggtcctctaggagaacactggccttatgacaagatatatactatcaatgttctgttaaccagtattgatggaggtagtttgtccgaggacatccggaaccgtataaaggcacaagcgcttttcttacgtgcttatcagtattttgagatggtgaaaatttatggaggtgtacctctgattttaactccacaggacagacatagtgacgatttatatgttactcggaatacagcaaaagaatgtattgaccagatagtgaaagatcttgatgatgcagcggcttcattacccagtatttggggggaaaatgattttggacgcatcaccaaaggagcagctatggctttcaaaggacgtgtgttgctgacttatgccagtaaacaatttaatccgaacaatgaccgtacccgttggcaaacagcatacaatgcctgcttagcggcccaaaaggaactgtcagagaatggacaacgtgctttacatcctatttataaggagatatggacaaaagagactacctctgagactgtaattactacccgtttcctcgatccggtacgtacacataacttcatggcagggctgcgtccgttggaattttcggtaggagctaccggtaaccaccatcctacattggatatggcacttgctttcccaatggctgatggtaccactccaggagtagacgtagatggtgatggtgtgaaggaagcttttgatcctactgctactgacgctaccggtatgttttggttgaatcgtgacccccgtttctatgatatcatcgtttacaatggcgctgaatatccattgaacggtatgccggactggttccaaggttgcatgtacacttacaaaggtggcgaagatactcatagtccaactggcacaggattttattcatgcaagttctctatccctgaaaagacagctactgaagccaaggatcacggtgacatggactggattgaaatgcgttatgcagaagtattattgaatcttgctgaatgtgctgcggaagtaggaaataaatctgatgaagtttatactattctgaaagatattcgtaaacgagccggtataacggccaatgcggacgggctctatggtttaaaagcaaatatgagtcaacaagaattgattgatgccgttctttatgaacgccgcattgaattggcttatgaaggcaaacgtttctgggatttgcttcgtcgtaaaatattttctgatatgcaaggatattctcgttacagaattgaaatacaagtgaagaatgaatatgctactatggcacgaagagattttatcactatgataaagagcgatccggaattgatgacgaaaaattatttcaagtacttcaccactcaaacctggagaattgacgaaacttaccaatgggatgtgaaagacaactattacttccagggattagctcgcaaacactttgagcaaaatcctaaactgcaacagactattggttgggaaagtggtgatttcgatccattaaaatagtataccaaaatacataatctcttaattaaagtatttagttaaaccaatattgagcaaacttttactctcagtagtagaagtttgctctttttttacaagcttttgagacaatctatataatggaaatcctttttttccttttcctttgttacaccattaattaactttattgaataagagaaagaatgaagaacatttattatctattatgccttcttttccccttatccgttatggggcaggaaccgacaggcaaaagccagtgggtttattcggatgctaacggaaagttagtgtataaaactactaagagaggtgaccggattatcgacttttcacatgccggatataaaggcggtggtgtaaccttgccatacgttccggcaaaactgaccgtacatcctttaggagaaaatgaagattgcacggattatattcaaaaagccattgatatggtttccgcacttcccaaagatgccgatggctttcggggggcagttctgctggcaccgggacgttacgtatgtaaccgttctcttcagataatgacggatggcgtcgtattacgcggtagcggaagtgatccgagtggaagcgttatcgtcatgaccggagataagcatacggcaatcgtggtgaataacggcatccgccaacgtgcgggtaatcgtttaggcgaagctgctccggatgaaaaaagcataaaggtgactgacaagtacatccctgccggttcatatcgtttgacggtaactgatgtttccgaactttccgtcggcgacaatatagagatacgcaaacccgtaaccgaaaaatggatcaaatatatgaaaatgaatgatttggttcgtgacggaaaacctcagacctggataaaggcaggacggcaactgattgccgaacggaccattgcaggtattgaaggaaatacaattgtgctgagtgtcccgctggtagactcttacgatgcgaaattcaccgatgacaatactacattagtggtggccaataacgtacaacgactccgtcagtgcggtgtggagaatctgcgtatcgagtcgcccgcacaagcggtcaatcacgggaaagcattatattatgcactgagaatcaacggagaagactgttgggcaaaggacatcaatgcattggaaaccatggagagtataggggtaggtgggcgacgcatcactttgcagcagattaatgtaatcagaagggctttgcaccaaggagcttccaagccggcggagtttgcaccaaacggaggacagattctgattgaccgttgttcggtagagggagataatatctggtttgtggcacttggtgcagggcaaacaggaccaattgtattccttaattgtagcttcaaagggaatggccgtatagaaggacatcagcgttggagtacaggtttattgcttgacaattgtaatttgccgggcggaggtattgatttcaagaaccgcggttccatgggttccggtcatggttggggcacagcttggtctgttgcctggaattgcctggcgaagagctatgtaaatcagattcccccgggcacttataattgggtgataggcagtaaaggagaaagtactcctttgcgtcgtcccttcagtcagtccggtcctacgttaccggtaggtattttcgactcgcatgatactccggttgctcctcaaagtctttatctggcgcaattgaaggagcgcttgggcgaatctgcattgcaagccattggatatggacctactgtgcagctaccttctcctgtccgttccgactatacttttcagggaggtatgcaagcctctcgcgagttagtgggaaaagattatagagctatacacgaatatatgcgtgccttgggttgggactattccgagcatcccaatagctcgaaaaacgaccattacgacggtgtgcattgtgaagttctttttgatgctgccctgcagcaatatgttttcaaattcaccaatcatgccaatgccggggctctggacagtgaccggggaagattgctgagtgaccgtcaacgcaatgagatgaaaagccagacaaaccatgactggtatcatctgaacggaaactggaatgagtggcaacggctggaatggaaattccgcatacccaaaggtttccaacccaccaccaagttctgtcatcttcaccaactgaaggcacaggaaggtaataatggcgcaccactcattactatcagtacccgttgtgatgaagacggagggaataagcgtgtacaagtgattcatacaggcgatacacggacgtccggcaagggtgttatcatagacaaccttccgcttgccaactttgaagatgaatggatacaagtggagacagaaatgcattatacccatcatggcacattccgcatcaaactgacccgtatcagcgatgggaaagtgcttgccgaccaatctttcgcagatgtagacttatggaggaagggggcgacaagtatccggaataaattcggtatttatcgcagtctggggcggaagatgcaaagtgcatccgacagacccgataacggatttaaagatgaaagcctacagttggctgatttcaaagtttatgaagcgcataccaatccgaatcctcagccgcacgactaatcgttttttcagaaaataacctttaaaaatcattttgtcagccatgacaaaatgataatcctattgtctcagattcctttctttccgcccaatggtggggaaaaaagaaagaacgcaagcattccctattaaataaatgcggaaagaaagggaaaggggacagaatcataaaaagggacgtaacgactgttatatcttagataaaaatgatagccttcatgtgttctatgcgtaaaaagaacactttccctccggatactttcccgatacaaccaggaaagagtataacccgataagtaaaggactacaccttatatccgggatggtgtcaccctttatgcaacatggctacaccctttcgggcattaggtgtagccttatcacgaaaaagaatgttagttttacccgaaaagatggtatgtttaggtgaaatacatggtttgttgagggtaaacagactgtctgttcctgtcagatagaccatctgtttgggagaaacagatgcttagtctgactaaaagatcgttttctcctcaaagccctgtcagaataatcgcctatagtatgtctttgtgttgatgaaatgctataatctttgtcaccttgaaacagagcaatacaatattgcaaggaaatgagataacactacaaaatgaaaagaagaaatctccctttctttacatatcacaaaaaaataataaatacacatgaaatcacaacttgtatctttatgtatcgggagcttatgttttgtaagcagttattctcttaatgcccaagaaagttggcaatcgcaacttgttattcaagatgaatccggaaacttgacttataagaaagataatgatggttttgttatcccagattttagtcaggccggatacgggaatggaaaagacattcctgtggtcagtttgccggaacgcaccattactatcagtcctttggaggacaaggaggccgataatacgcaacatatacagaaggccattgacgaagtaggaaaatatgctttggacgcagagggtatcagaggagtcgtattgctgaaagccggacgatataatgtagacgggacgttaaatttgacttacgacggagtcattctgcgtggagaaggtaattgcttctcggacaaagactccacggttctctatggtagaaatgctgctgaaaaggctaaacggcttattttaatgggaaattcctccgcgcacaattggggaaatgggaaaggagatgctcaggtaaatattgtaacacaaaaggtgatacccggcgactattcttttcaggtggaagatgcaagcgcctatcaggcgggcgacttgatttgtataaaatatcctactacaacagcttggctggaggctgtctggtatggcggcaatacaaagcgcaacacagatgaaagcaagaaatggaaaactaaggatattgatatttcctatcatcgctacgtcaccaaagtggaaggtaatatgattgaagtggatgctcccatattttatgcgctcaacgtacagtatgcacaggcatatatctacaagatttcaaattcgggaacaatccgccacaatgtaggcattgagaatctgcatatttcttttgaaagaagtccggagaattccacggctaacgttgatcagaattgtatctatatgagttcgttggaaaattcatgggtaaaaggtgtttcaatgtccggttttgttcatgcgggcattaaaacgacttccactacgaggagtacaattgaagattgctatgctattgatccctccggactttgtacaggaggtacgtattataattttgagaattaccatcgttcacaactcatcttattgaaaaactgttatgcccgtaacgggcgtcatcactatatctccaacggctgtgcctctaccagcggcattgttgtgttgaattttcgttcggaactttctcttgcacaagctgagggacaccggttgtggtctcaggggattttgtttgataactgggtggaattgggaactataaaatcaaatgccggaaaaataggtatgtatctgcgtgacaatatgggaagcggccacggatggggaggcaccaacagcgtattctggaattgtgatgtacaggacggtgccatttatctggataaagtgcctacgggacaaaattatgctatcggatgcacagctaaaacaatacggagataccgcaacaatatgagtgaatataccaatggatatatagaagggcagaatcgtaaaggcttgcagcccgcatcactctatgaggctcagagggcggcaagaggcatctctacggggctaatgcctgaaacaggcagagaagatatcccgcatattattgtggaaacaaatcgtgtgagagtaaaatcgcaaaaagatgcatggatatctatttacacgactcatggaagtatggtacagatgctcaaatctttttctgacaattgggtggagagtatgccactgaacgatgatttttacgtagttcgtgtgcacgaagccggtcagaaagcttatagccggaaggttctgataagaactgtcggaaaataacgtaactatgtattatatcaatagtaataaatttcttaatgattatggctaaaagaacttttttctcactcctgtatgcgctgatatgcattgtcagtttcggacaggagttcgtacatcccggaatgttacacacgacctctgatcttgaattcatgaaaatcaagatccttgcaggcgaagaaccttggaaggaagcatggaaccagctcaagtcatcggaaattgcttcgctcaattataaaccgactccttttaagattgtagataacggaccttataataaacccgataatggagggaaagagtttgtacgtgatggtgcggcagcctataccatggctttacaatggtatgtggaaggggataaagcttatgcggaaaaggctatcgaaatattcaatgcttgggctcagactcttgagtcggtcgtaaatcacaaccgtcaattgaaggtgggtacggcgggaatcaagtatctcaatgctgccgagataataaaacatacttataagggctggaatgccaaaaatcgtaaagcttttgaagatatggtcatcaatatctggtatccggtgataaaggattggacgcctcgttataatggcaattgggatgctgccaacggacaaacacttatgtgtataggcattttccttgaccgacgggatatttttgacactgcatgcaagcagcttactgatggtaatacgaatggggctatcaaaaattatttttatgaaagcgggcaatgtcaggagagtggacgtgaccaacaacatgtacagatgggccttgctttccttgcttgtgctgccgaaattgcctggaatcaagatatagacttatatggagtatttgacaatcgcctctacaaaggatttgagtatacggcccgatacatgtctggcgaagaagttcctcatgtgcagtatatcacttggtttggaaagccggtctatggacctgagatctcatccaaacaacgggagaagatctgtccagcctgggaacgggcttaccatcattatcacgaccgcaaaggaatggatatgccatatactcgcaagatgattcaaaaaagtcgtccggaaggaacggacaatcaatcgtttatgccttgggcgtcgctgactagtgtaggtttccctgcccgataaggttattttttatggaatagagttgtgcatgattcgaacaaatctgaatgaaaacaaatttcttgtagctgtttttttataaaaggtgaggctattggggattaccccaatagcctcaaaagttcaacaaggttattctaaaaaagttgctaatacagcaatatccttatctgcctgatgttgcctgtagacgactattaccaggatatattttaatcaaacgaactccatgtggagctatatcagtcgtaaagtctttattcgatgttgcaatatcttgctggcgccataaatcacgtatcttttgttcaccccttatgcctaattgcttccaagtaactgtagctttttcatgtcgctcactacgattgaataaacctatagccatagaaccatcttccataggtttagcataaatcaccacagaagctttctctgcaaccactgttccttgtttaccaagcgggtcttggtttacttcaattacttcattatttgtaagtaagctgattgtgaaatcatctaattgagccatgtcacaacctattaataaaggagcagaaagtaatgcccataaactgatatgtgtatattgttcgtctgcagtcaaacgagtatagtgcaaacgaggcccccagcctaccatacctactactagcatatcaggatcaggccaatgtccgggtccagtataagctgcccatttagtctgattgaatcctaagcgactcatactttcccaagtatctctaatatcaccggtggtacgccaacagttggccattttttcccattgagctgcatctccccaaggggcactgtttgaaagactaaaaaccacatcacgtttgtgagagcgcaatgcttccatcatctcttttacatggtatacgtcattcggattccagtcatacttcaaataatccataccccaatctatccactgctgaacatcattcttcacaaaagaatattttccatgatgataattaatgccgtgtttagttttcttactagaatcaacgtagcggtaatgctcattagcatattctttcacccagtcataagttccgtcagcgttatcgctataggaacccaaatgtcctgcatacgtacctatccatggaccggaataaataccaatcttcaatcccatactatgtatctcgtccgctaaagctttcatatccggaaatttactgtttgtcatgactccctgatgtttccctccgcgtaatccctgccaaccatcatctatgttgatatattgccaaccgtaattaatcaatcctttttccaccattgcttttgctgaactaagtactttttcctgactgactgcattcccccaacaattccaactgttccatcccattggtggggtcaaagccagtttatctcctactacaattttaaagctacgcctcgcttcacctaaagaatttttagcgataaacgttaccacgtattcacccactttctttatgcttccagttatttgtcctgtttccgtgttcactttcagccctttgggcagattttctacagcaaaactcatagggcggataccggtagctggaatcgtataaagaaagggggaaccgggccgaattccgaatatcattgcaccattaatacggggagtatcgggtgctttgggggttaatatatactttgataaagtatcagggacagtaattatttgcccacaagccatattggaagcttccaaaagccccataactacgaataaaataaaggttctttttttcatttcttttt

SEQ ID NO: 6432 - DNA, 16351 bp, Unknown
  gut microbiota DNA sequence
tcttttcctgtaatatagtgtgatagcgcagccattaatccgtgtaatccgcgtaatccgcgcctaaatcattatcagcattagttcattacttttcccttatgagcaacggatatcatccatcttttttttcatcagtttcattagaaacagtttctattttcaattaattgttggtctgatgcgacatttttgcacaaaatgctttcagccgtgcaatattattgtaactttgcgcccgctaacaattaaaaaagatttagatgagaaaattttcgttgattagccttatgttgctaatcgtttcaacttcaacttttgctggaggtctccttacgaatacaaatcagcatgctgcttttcttcgtatgctatcccgtggcgctacaactgaaatagacggtgctttgtccaatccggcaggtctggcgtttttaccgactgacggctttcatatgtctttgagtattcagagtgcttttcaaacaagaaatatcgatgcttcgtgcgaaggtttggggctgaataagtattatgagggtaaggcatctgctcctgtcattcccagtttgtttgccgcttataagacgggtgactggacgctttccggcttcttcggtatcaccggtggcggtggaaaggcttcgtttgatgatggtcttcccatgttcgatgctatggtgataggcggattgggagcccaaaagattccgagcaatgcctattcgctgaaaagctacatggatggcaagcagtacatttactctgtacagttgggcttgacttataaggcaacagactggctttctgtttttgcaggtggtcgcatgaactatttcaccggtggctatcagggtgcattaaatgccagtgccgccactaatttgcctttgcctaccggaggaacgataactaccggaacagaacttatcggcatcgatttggattgcagccagaccggatggggatttactccggttatcggtttggatgccaagttgggcaagctgaacattggcgcaaagtatgagttcatgactaatttgaatattgagaactccactaaagaaaactcgcttcgtatgattggtgccgctgaaagtgaattggcggattacaagcatggtgtgaatactccgaatgatatcccttccatgctatccgtggctgttgcctatgaattcataccggtattgcgcgcatctgtggaatatcacttctttgatgacaagaatgcaggaatggccaatggcaagcagaagtttctgacaaagggaacaaacgagtatctggcaggtattgagtgggatgtaaccaaacagctgacagtgagctgtggtggtcagattacagattacggattgtctaacgattatcagagtgataccagtttctcttgtgattcttatactctgggctttggagccaagttgaagttaagtgaaagagctgccttgaacgttggttatatgtggactacctatgatgactatactaaagtgtctcaaaactataatggtaccggattgagtggtacaaatgtttatagtcgtactaataaggtgttcggccttagtattgattacaggttctgatttcataattacttctaatatgatagaagaagccgtctcgaacattgttttgaggcggcttccctgtttatatatctgattagaaagaatattgtaccaacaaattcattcggttggcatggtgtgttgaattactgaaatctgtacgccagccacggaggtattcggctcctacctgcatgtttggagtgacattccagaatacattggctacgagatactgtccgtagcgataactgcttggttgatcgttgggataaccattctcagaatataatctggacatactatatgtgccggatacgaatattttcggacagatattatactgtgccccggcaaaccagcccagcataggcaatgcctgcatcttgccttctttttcaggattgggaacgatgtccacattcagattgcttatatcattcaaatattgtccgataccttttccgtaagtagcttgcccgaagatttcccatttcttactgagattgaacgaagtagatgcctgtacaccccatccggtaacatcggacgcatgattgctgagcgtgctggtatacgtcatgctgcgcacgataccacccacacgaagatggctgttagctccccatccatattgggcgtaagcggtgaagtccggcatacgttgttgggctacgctgagttcgtcattcgtggcgccatctacgcttggcacttcgatagatgcatggaaacgccagtttttcagacctttgtaagtgtaggcaagttgagtggcacggtagaaagttgcaccattggggccttggaagtcgatagtggaaggcaatgcagccaaatccatgaacccaccataagtataacccaccgttacattacggaacgacatataagcatttcgcaactggaataccttatctccgccacggaagttaccggcagtatatacaacgaaatcgcccagcaatttagtatgccctaccagtttcaggaagatggtggaagtacttgcatccatttggaactggttctttactttgctggcattcggaatgtaggcagggatgaagtccatgttgtccacgatgccgccaaagtcatattcggcagtggcacgcacatatccgccgataccaagggcgaatttcccttttttatccatcaacaggaagcggggagctttaggatcgtggatgtacctgaattgcgattcgttcatgatacggacgatctcatcgcctgccttgtcgatggtaaccatgacgatgccgttaggtgcttcgtcatcaataatcactttttcttgtgctttggctatggacggaatgaaaccgatgccgcacaatagaaacattacttttaagattgtcttcattattaagttaggttttggtgaatgccctttgaacaacttaaattagaaatggttttgcggtcaatggaagaaaatgtatctttgcagccgatttaacgatcttatgatgccgtgaatagcggtcgtgtattctagaacaccacgtaaaaaacaggatttatgaagcaaaaagtatctgtaccctttatgctgctgggtattctatttaatgtttgtctgattgcagctaatcttcttgaaactaaagttatccaggttttcggtattaccgttaccgcagggttgctggttttccctatttcttatattatcaatgattgcattgctgaggtgtggggctttcgtaaagcacgtctcattatctggagtggttttgctatgaatttctttgtggtgatgcttggattgatagccgtagcattaccggctgcaccattttgggagggggaggctcatttcaactttgtttttgggatggcaccgcgtattgtggcggcgagtctgacagcttttctggttggttcgtttctcaacgcttatgtcatgagccgcatgaaagtggcaagtggtggacggcatttctctgcccgtgctatctggtccactgtagtgggggagacggcagactctctaatattctttcctgttgctttcggaggaattattgcctggcctgaattgctggtgatgatgtgtattcagatcgtattgaaatccctgtatgaggtgctgattcttccggttactatccgtgttgtggcggctattaaacgtattgacggtagtgatgtatatgatcaggatatctcttacaatatattgaaaatcaaagatatttgaagtaatgataaatactgtaaatcaggagttaagcgaagcgataacttcctttaactcctgattcgcattaataatgaatagttgtgaataaagaagttgcattagttgtattcagtggtggacaagattctaccacttgcctgttttgggcaaaacgtgagtttaagagagtagttgctttgagcttcctgtacggacagaagcatgagaaagaggtggaactggcacgggaaatagcccgtaaagctgatgtggagtttgaagcaatggatgtgtcttttatcggtaagttggggcacaactcactgacggatacaacgatgcttatggatcaggaaaagccagccggtagttatcccaatacatttgtgccgggacgtaacctcttctttctaagtattgctgctgtatatgcccgtgaacatggtatcaatcatatcgtgacaggagtgtcgcagactgatttcagcggataccctgattgtcgggatgcttttatcaagtcgctcaatgttacattgaacttggctatggacgagcagttcgtaattcatactccattgatgtggatcgacaaagcggaaacctggggattggcagatgaattgggagtgctcgatctgatacggaacgaaacattgacttgctataacgggatacagggtgatggctgcgggcattgtccggcatgtaagttacgtcgtgaaggattagagaaatatttaaagcagttaagtatttaaaggaattatcgcttcgcttaactcctgatttacattaaaaacaaatagttatgaccgaattaaaagatcaactgtcccttttggggagaaaaacagaatataagcaggactatgctcctgaagtgctggaagcttttgataataagcatcccgagaatgattattgggtacgttttaattgtccggaatttaccagcctatgtcctataaccgggcagccggactttgcggaaatccgtattagttatattcctgatataaagatggtggaaagtaaaagcttgaaactttatctgtttagtttccgtaatcatggcgcttttcatgaagactgtgtgaatattataatgaaggatcttattcacctgatgaatcctaaatatattgaggtaacaggactttttactccgcgtggtggcatatccatttatccttatgctaactatggacgcccgggtacgaagtatgagggcatagctgaacaacgattaatgaatagagaataaaaagagataggggtgatttttcggaacaccccttatttatatgaatatcacttcttgattattaccagttcggtagctttcaggatttccccaccttcaatcttttctttgatacatgttacttctacactgtcctccagtaatacaccgggaactttatccggattggcatccatagtgctgatgtttattgtatcaccttttcccgtaatcaaggtgatattattcattgtagcatcgtaaactattccattgagtacttgagggtgattctcttgtttacaagaactgatacttcccgcaaagaaagcaagaacggagagataaattaactttttcatatataatagcttttcgtgataattgttgaatgcaaatataaaactatttctaagagaatattgataatcataaggaaagtctttcttttcatgaactaaatgctgcttttctgtgttttaatacagtcaagttatgcaatcatgagaatactacatattagatatcttttacttattttccttttatctttctctgctctggcgtctgctgatgataagaaagagaattctggtaccgatttgctgattatcagtagttatgtatcgggtgccccatggagtcagactatcatttcacacatcatgcagaaagagtatgaccggaaggatgtgagtatgaatgtggagtacatgaatatcctgacgatagaaactcctgagatactgaaccaatataaagaaaatcttttttcaacttatggtaacaacccgcctaaagctgtgttgatgttgggaaatgctcctttgatattacgtgatgatatgcgtagacactggggagatatacctttgatagtatgtgctgaaagtagatatatagggccggattctacttatatgtacaatcagattattccatataaagatcgtatctacttgaaagatctgcgtaatgaatataatatgacttttcttgctgcacgtgcttttataccggaaagtgtccagttgctgcgtcgtatgattccgaagatgaagagtttattgttaataggtgatcagactgaccgtgacattgattatgaccagcaactctcagagttgattaacactgaatatacagatattaattataagtttttatcggcaggtgcttggagtccggaacagttgttggatacattgcgacaagtagttccggaggaaaccggtattttgttcgcttcatggttccacaaacgaatgtttgcgggcaatatgcttatgatggcaaactcttataaggtgattgccaattctacattgccttgtccattttttgcattatcttcttctatttcaagtattgaagaagatgggactataataggagggtgtgtatatgatatgaacctgtactgtgaggaaattgtgaagatgattaatgctgtagctgatggaaaacaggcacgggatatcccgtattatgatccgaagcctatggttcttttcaactatccttatatggtcgattttggtttgtctcctaaaaattgccctccgggaaccatttacttgaatgctcctcctactttctttgaaaaatatcggtctgccttggtagtaggaagtattgttttattgttggttgttctctttttccaacttcggcgaaataagattttggaacaacttcagttggttgaacagaatcagcgcttcactcactccaaaatggctatggcattggaggttgttgatttactaccctggcaatgggatttacggacggatgaaatcacatatagttcttacaaaccaatagaacagggtaaaaaagaagtttcggaaatgacctatacgactgatattaacgactatctaacttttgtttgtgaagaagatagagaacgtatccgacaggtttttaaggatgtacgcgctaataaagttgatagaataaaggaagaatatcgcgtccatcgtccaggtaaaccatatgattcggaagactggatggaagcacgtgcttttgttgaacaatatgatgaaaagggaaaccccttgatcgtggtgggatcatcattgtttattacagaacgtaaaatagcagaacgcgaactgattgctgccaaagagcgtgcggaagaatccaaccgtctgaaatctgcctttcttgctaatatcagtcatgaaatccgcactccgttgaatgcaattattggcttctccagtatattggctatgactgaagatgaagaagagaagaaggagtatgtcagcatcatagagaagaataatggaatcttgctgcaacttatcaatgatgttctggatttatccaagattgaggctggagttcttgatttgtattattcggaatttggattaaatggagtgttagcaactttgaagggagttgttgagtctcgtttgcaggatggggttgatctgatttttgagccggggatgccggatgattatgttgtttattcagagaaaaacagacttcaacaattggttttgaacttcctgactaatgcttgtaaatttacatcgaccggcagcattcgctatggctatgaagtgcgtgacaaagacatctattattatgtaactgatacgggaactggtattccggaagataaactccatcttatattcgaacgtttcatcaagttggatagttttaaacagggtaccggtttaggtttgcctatttgccagctcattattcagaatatgggaggcgaaatcggagtgaattctaaattgggagaaggttctacattttggtttacgcttcccctcaaaccaaaacagtaagaggggataacgttgcttctatatgacagttttattttcaattaagttcttcaatcgaaccaaggcttcgatataataatagtctgcataaatgatggcggcatctatttctgaattattcggcaagtgtccggtagagtggaggaggaatgccggcttgcttttgccgcattgatacttgtccgaactcaggcttgccaacatttttatagctgcattcttatattcttctccttttttgccgggcaggtaagtggagagttccagtaaagccgatgcggttacacttgcagcggaggcatcacgtgggacattcgggatattggggtcatcaaaatcccagtaaggcacatagtcttccggcaatctttctaaatatacatctgttactttctgtacaaaatccagatatcgtggatctaatgtttccctgtagactactgtatatccatagatagcccacgcctgtccgcgtgcccacatggtattgtctgcatatccctgatgtgtaactccttttatgaagtcgcccgtcaaagtatcatagacagcgacatgataggaagtgtagtcgggacggaactgatatttcatagtcttatcggcgtgcgatacggctatatctgccagatatggatttcctccgttcttggcagcccagaaaagcatttccaggtttatcatattatccatgatcgtattgtgtccaccgaacatttctatattgcgtggccatgaaagtatggtacctacacgaggtctgaacaaagttgccagtgaatctgctgtatccagaatcacttgtttgtattccggattatgtgtcaaccgatatccattgccgtagctgcaaaagatcagaaaacccagatcatggtcgtatgccggaatttgtgacaggaacttcaacggttcggtgaatttctctgcttcttcctttatggttgctttaccggtatattcgtaatcataccataaaactcctggccagaacccactgcaccattcatcctttgttgcttttcggcaatgccaggtgttgaggctgtccatgatgttacggggcatcatcgagtagtcgatagtaccttctgccgcttttagttctgttaaagtgcgttgtacctgggcgtcacagtaatccagcgcctcatatacatccacatccattcctttctcgggcatgttgcaagctgtaaacatgcacaagcatgcaccgaacagtagttcttttgttttcatataatcagtctttttatttatctatgtgaaaccagtcggcatctacccatccccgttccttaccataaggagtggtactgaataatcctactttggcacctatccattttccctggcgggccgtgaaaggcatacctattgctttatatttcttaccatccaggctgtaatagaagtggcagataccgcctttctctatttttacccgtagatagatatctctttcgtagttgggaaacaaacctgcttcgtactttctgctggcaggtaattctgccaggcgagtgactgtttcgggtatcttttgctctgcatccttgcaagtcacttgtttcaatataaacttatcgccctctttctctactccgaggtaacaatagtcccagcccattacaatcaatccggattgctgtccgtccattttggcggaaacttttagtttggtagttgctgtgaactcttctgccatgaatttctgcaataaaaggttcggtacttcccagaaattcacaaaattttcggagagaatatgtccgtaaatacggatgaatcccaagtcggaagtatatccgaatgtatcctgataattggcatgccattcccattgtagtcctaactgacgggtattgaactcgtcactgtccgcaggtgtttctactgggtaattcttgcctacattgggctttttataacgggttacgggttcgccacaaccatcgccgtccttatcttctccaattacaggccagtcgtttacccacttcatcgggttcagatgaacgacacgcccatacatggctttatcctgaaagtgaacgaaccaggattcctctgtttgcgtatcaacccatgcgccttggtggggaccattgatgtcggtagagccttgcgccatgacaatcttcttctcataaggaccgtatatattctgcgaacgcaatactaactgccatccggttgctactccgcctgccggagcaaaaatatagtagtaaccatttcgcttatagagtttgggaccttcaattgtatggttgattccatcattaccatcaaagaccagtaccggatcactgattacttttgttccttctgcattcatctcacaaattgtgataacactgttcagtgcggcacgacttcctgcccatgcgtgtaccagatatacttttccatcttcatcccatagtggagcagggtctatcatgccatggccggcttttaccaatatcggtttctcccattctccagccgggtctttggtctttaccatgaagatgccatgatccggatctccccaatagatataaaactctccattatgatggcggatggatggtgcccaaacaccttttccatgctggggagcattgaagaactcgatgggttctatctgtttcaacgcatagcctacatatttccagttaaccagatctttggaatggagaatgggcaaaccgggagcacatccgaagctggaagccgtcatatagaaatcttcacctgccgcgcagacatccggatcggaataatcggcatgcagcaccggattgatatatgtgccatccttctggtcagatacccaggctttggatacatgttgggcttccgcctgccaacaggcagcgtatagcaatgtagtaagcagaaatatctttttcatctttttagttacctttttaaaatatcctgaaaaacaaagattttacctaaacaaactcttacctttatctactgaaaataatcttaatgtgctatttgcctattaatacgagcgaatctgtttattcactcaatgaaatatcatattttataatctttctcctttgtactttttatacttcttcatttcctgcctgtctataggtaccagtcttatggcagctccaccactgggtttcagctggaacttcatagtttgtgaagcgttgacaagcagataagtacattttacctgtgtacttgtttttatcttttctcccccatccgtatagatgcaggcgaggtaattcttttctttatcgaggaacgtgagaggtatttcttcttcagaaccttcattgttggtcattgctgcaacaaaccattcttggccttttcggcgtgccattgttatgtttttgccgggagtgccatctaatactttcgtatcgtcgaatacagtttgtaagtgctcaaaccattccatttccggttctccgtgatagaacgatggtttgtcataccagaagatagtttgcagagggctgtagaacacgagggatgctgccagttgatgagcatgagtcgttttcagccgtttgtcgaaataacagatcgtatagtcggctgcaccgtttatcatacgagtgaaggggagcgtgacattatgagttgcatcgggaaattcttcgtttccacaaatgccttcctgagttaataaattcggataagtacggctgaagcctgaagggcgatattcatcatgtatattcatcagcagatgattctctgctgccaagcgaaccatgtcgtgcatccaagttgcccagcgatggctggcgtattgtacgaaaccggattttactccgacaatcccccatttgcggagcaatgggaaaagttcacgcatttgcttcatgagtgcatgctggtttacgtacacccagataccaactcctttttcctttccataagctataacacggggcatatccagtttggcaaccacttttgtggcatccccgtcatgtgaagtacagggcatataccattgccagtcgaaaagcatatacgggatattatgtgctgcacagaagtcgatggttgcaatagctccttcggttgtgatagttgtttcgcgcataatcttgcctggttttacccatgcggtggcatcggcaatttcacacggcggattcagattctggatgatatcattgtgttccagcaattcacccggtttgtcggctgccatgactatcttccagggagtggcataataagtcactacatccacggggctatacattacagaagtcagtgtattcttcttgtctgtggaggcaaggtatttggtcagacaccagtcgtcaacatcagcatctgccaatgcggcccatttaccattcgggagttccagcgtaagggcacgttctaccggatgtttgatatcatcaatgttcaggtactcaaagaaagcctgtgcccattgttcggtccatgcttttgtacctgccggtaaggcgtattctgtgagatcacctactactttatgaaagatagcctttgggtgttccgggaagaaatagcggaaagctactccttcattataggcacgcacctcaatgttgagtcggtagccggagttatctttcttggagagataaagggtgccggtccggtaatgatcgcgtacactgctacgttcaccgtaaagtggctgccaggtgatgtctgtttcgggttggtaagtcacagagtccacttccagattgtccatccagcaggcaggctgtttcaggtttcgtgctcccagagccatttcccatatccggttgtccagttccagcccggcacgtgattcattgactacaggttgtgatttgtaatctacccgataacaaagttcgtttgctgcaggtgaaacctgcttctggtaaaatgctatttcatgtgttccgtcaggagatgtcagcttcagttccttgccattgtctgcaaagagggaaggagtgagaactaacataataattgctgagccgatagtcttcatatcttcgtatttattgtttttatataaatacgatttgggatatgaggatactcaatgtattctatctttttagggaaataatgttcgagacagtttgtgaaatgacaggacttccaaaaaatgacgagaatccatcttccttttgtgaacttccctgtacatgggctatgaagaatccatatacccggtcctgtttattgatccatggataggcgccggcccaacccggtgaactgatctgataggcttctcctgttgcttcatcaataagttcccgccattctcccaaaccatatatgccagtatgatattttttcagtgcacgttccacatattcacccggatgaacttctgcatttcccacttggtttgcttgcatttcatgtatggtttcgggtttcagtagttgcttttcttcaaatacgccattgtggtagatcatatcaagaaaacgcatgtagtcgtgcaaagtggtacagagacctccacccaacatgggagcgtgtcctccatctgtattcacgggcgtgaaatgggaatttttcattcctaaaggtcgggctattaattcctgaaataattcctcgaattctttattcatagctttttctgccatccggccggctatctgcatggcaagtccgccatattcaaagcgggtgccgggagtgaaaaccgtgtcaagcggaagaatctccatgattgccgaatccagatgattgtaattgtctacgcgtggttccggcagataagggcggacacccgatgtgtgcgaaagcaactgacgtaaagtaatcattccttttatgtcgtttttaaattcaggaatccatttctttacactgtcattccagtccagttcggtacagtctaccacagctccgattactgcggcggctacccattttccggcagaggctacatagactttagtgtcaggggtaacgtctttgtagtttttctgaaagataacgctatcgtctctgactacacagattgaggctcccggatagtatcctttattcatccatgaggtgataatggagtcaagtggtgtaaaatcataatccgcctgccggttatcggcaggacggcatgatgtgaatgacagataaatacctatgagagaaactataataataatttgtttcatttttacttttctattaaatcccagtatacaacgtaacgttggtgatgtaagtcatacagtggctttaaaacattgccctgtgatgttttaaatatcagttcctcgcctgtacgctgtaaactgtgtccggggtgtttccggtctatttgtaaggtggtattcagctcagccggaatatgataattgtaagtatagtaatcattatataatgccggatcagagaatggtgccggagattgcataccttctgttcccgattcaccggccaataccagcggtccgtatagcagggcccccttttgtggattgtctggcgttgtttccaattgcaggctcatcggataattagcttcaatgcgatcaccgtctttccattggcgggttacggcaatgtatgatcccggtttctgttttaccgatactttttttccattgacgtttactttcacatttttactccatgatgggtagcgcagataaatcgtagtggtgacaggtttgtccgtttggatggtcaatgcagtgttctcttctgcggggaaagctgtttcctggtgcagagttattcctttcgctttccagtttacttctgacgggataaagaggtttacgtagattccctggtcattgtgataatagatagcttctccatatttagcatggttttcgaaaccactgcctacacaacaccagaaggaattctcccgggtactataaactttgtgagagccggagagcaaaggcaagaaataggataccattcctgtttcaggatcttgttgcccaaggatatgattatagagtgcacgttcgtagtagtcagcaactttggcatctcctgtccagcaaaacagatggcggctgagtttcagcatattgtacgtacaacaagtctcaccggtatatccggtcagatgtttggataattgttgtggatcgaaataatgctctttatcactgctgcatcccggtgcaaaggtatgatggtctatcatggtatgccagaaaaaatcagtcagtttccgactgtcattatcctgcgtcagctcgtagttacgtgcttcggcaagaacttttgggataaaggtattcgtgtgcttggttcctaaatcatcgcgttgttctttcagcggatcgataacatcattgtgatagaaaaattcagcaagccattgataacgctcgtcaccggtgatggcataaagattatagaaagattcgttcacaccgccgaattcattccgtatcatccttttccgggtgggttcatccagcggtttaagtttattataagcccagtcgcccatgcgggtaactacttccaatgcttgtttgttatctgtatagaggtattggtcgatcaatccggagaagagcttgtgtaatgtataccagggtgcccatacacttgtcccacgtatgttccgattgatcaattcttccggatatgcactgagatacccgtttcccaaagctgcctgtacttctgccagacctgtaacaagactgtcacctttcagcttgaatatttcacttccggtagatgcgtacatgagcgcataggctgatagtaaatgccctgttgtatgtccgcgcagttcgcagtccagtgattcccagccgcctagtttctttacggtcatatatccaccttcacgtccggcaaatactccggcgttgttgcggaaactgtgtagcaaacgattggttgctatagaagtcatccaaacagaatcacgcatcatattgtcgcgaaaacggcttggtaataaacgcacgtcttttaagtcgaaactctctacctgtatcggcgctgttgtcacttttttcatttttccggcatgttgtccgggataaatggattgagcggaaaggccggttgatagagccgcacagattgtcattaggattaaactcttatttctcataacttttttattaattctttctttatatatacgaagtagagggatatattactcaaaacccgttagaggaatttaaaactgtatagcgagctattttcctattacgactgaggatagttcccactaggactgaaggtatttcccactacgactgaaggcacctcccactaggactgaactcgtgttccactacgactgatcttagtggaacaccaagtgcgttgtcacacagatagttatgctttttgctgcactcctatatagctcatatcgggaaaggaatgaataagattcaccacagattacacagattcacacagatttatcaatctaataatcagcaaaatagaatctgtgtcaatctgtgtaatctgtgtaatctgtggtgaattaattcataaccctgtagaaatgaactagtct

SEQ ID NO: 6433 - DNA, 646 bp, Unknown
  gut microbiota DNA sequence
ccgcctgattctcggagggcagattctgtttgtgggtatgctgatgttgtgtttcatgctttatcttgatttattccggaaagactattatcaacggaagggcagtttgtcgctgctgttcactttgattgtattttacagtatagtcacggctttcatggtcacacacaatatattcaatgtgtatatcatcccctatgcgatgttgccgatcattattcgtgtgttcctcgattcaaggaccgctttcctgacacacgtcatcacgatattaatatgctccatatccctacgcttcccgcatgaatttatcctgacccagttggcggcgggactggttgcgatattcagtttaagggaattatcccaaagatcccagcttttccggacggcgctattagtcatattgacttatgccgccatttactttgccttcgagttaatgacggagaacgggctttccaatgacttctcgaaactgaatttgcggatgtacacctattttataataaatggagttctgctattattcgcttatccgctgttgttcctgttggaaaaaacattcggatttacctccaatgtcactttggtggaactatcgaatatcaataatgacttactgcgccagatgtccgagacggta

SEQ ID NO: 6434 - DNA, 14368 bp, Unknown
  gut microbiota DNA sequence
tatttaattaggtaaataagtgataagctcgcttttgtaggacccagatagtttttactggtatctttcagcttagtgccacacgttgtacatgggtatttttcatactcaattctcgcatatcccagtccgatagaagcctcaagactccaacgcttctttaatatccatgaatgcccgattgaaagcccaccaccatagagacgtccctgatagcgcatgttctgcatattctcgctgattaacggccaatctggccatccacctacattgaagtcggcatagtgtgcatgcaacccgatgaacgtacggttaaagctttcgcagaaccagtatcgaagctccggctgtataccccaatgcttcaaacgggcatcatcaaatttccatggattatagttgaccgggatatccagtgtccacttgcgtgccaaagcaacttccaaaccaagattcatagtagtagtggcatcataaagcaggttactttttacggcaaccttttgagctttactttcaaccgacaataaacccaatatgaatagtatgcagactagtattttcttcatttattccttctttttattttaaaaccattctataaatccaatttcatgccgtgaaactttgatgaagcagagcattctttaaagaaacattttatatctttgcactttccatctattccatgcttcggcatcccgacttcatccccttcaaaccttgaataacaaaccaaaaaaggataaaatctcagattgcaaatatcgtggaaataaagaagactggaaatcgtatcaagttctgttataggcactaaaaaagaggccacacaactaataatgctagtatgcacaataagaatgaccaaaataagaaaaaagagaaaatatcagtttgcatttccattatccgcatatttttattttatttgtttcaatattcgaaactttctaaagaaattaatccaaactatttaatataagaaagagcaagaaataatcattaaatacaataaatacaagataaaatatacaactttactattctcgcccaggctatacacactcctcgccacgattagaaaggaaaagggaggaaatttcatagaagacaattttgtattaattactacattatatgctttatagtcttgcctttattataaaacaaatgagttgtcatctttttcttgcagactgagcgattattcccccagtaaacactacctttgctattatttacttataaacgaatacaactatgagtcccgactttaactacagcgaggtaccggccaccttcctccactgcctcaacaagcagtgcaaacactccgccaaatgtatgcgctacctggtgacagcctatgtcccggacaactacccggtaatcagcaccgtaaatccaaactattttagttcgcacaaagaatcctgcccgtacttcatggcggataaaaagaaacgtttcgcactcggcatcacccacttgttggataatgtaccgcacaaagaagccctcggcatcaaacgagaactgatggcagagcttaatcggactacctactaccgctgttaccgaaaggaacgacttctgaaacccaaagaacaggaatacatccgtcaactgtttctcaaaagaggaataaaggaagaacccgtatatgacgaatacgtggagcaatacgagtggtaagcttctggaaataagcccaatgctttcttctctcggaaggcgatactaatccggtatcaccccattatgaagaaatgtccgtttcactttactggcatttttgtttctcaggcaaggcactcttgtttcttaggtaagaaacttttgttcctcaaggaagaaacttttgttccttaggcaaggcacttttgtttcaacaggaagaaactaaatggaacaaatagagacccggcgaagcgcctatatctccctgactggcaacaagaaagggcgtaatcttgcgactacacccttcctcttgtcaacttaataacgttattacttcaattcaaaaggaacgatccctttgatatccgctgccgaagcggcgataacagcttcaaacttacccggttcggctacccaggcatgttgggcatcgtcaaagtagctcaaagcttctttatctatggtgaaggttatttctttctcttcgcccggagccagtttcactttcttgaaacctttcaactctttgacaggacggggcagagaggatttcttatcactgatatacaattgcacaacttcctgtccttcgcggtcaccggcattcttcacggttacggtaaaactgatctgatcatcggcagacatcactttcttatcagccgcaggtttgccataagcaaacgttgtgtaagacagcccgtgtccgaaggggaacaatggtttcaccttcttctgcttgtccgcccaacgataccccacaaagatgccttcgttgtatttcatatctaccacatccttacttctctgactgatatattcgccaacgctatgagccggaacatcttccagacgggcaggaaaagtgaaaggcagcttgccggaaggattggcatcccccatcaacacggcagcgattgagtttccggcttccgatcccaagaaccaagcttgcaaaacagaaggaacttccgcaatccagggcatagctaccgcattgccggaaacattgatgactacaagattcttgtttgccttcgccaaagctgaaatgacagcatcctgtccgtacggcaattccaagccagcacggtcggtatcttcgcaatcctgattgttactcttgttcagtccaccgatgaagatcacatagtcggcatccgcagccacctttacggcttcggtaatcagctcctcaggcgtacggtcatcctgtagattctgaccggttaccacaccattatattcgccacgggcatcgcctacgtatccacgggcataaacaacttccgccttgtttcctacgcggttcttgatgccatccaacggagaaagttcgcgctgcaccttcagggaggagctaccaccacctacggtcatcattttcacagcattctcaccgataacggcaatcttcttcactttattcaagtcaatgggcaatacgccgcctttgttttgcagcagcacaatgccttcttcaccaatgcggcgggcagcctcgtaatgctcgggagaaaggatagaaccgaaaggacggttcacatccattgtagtgcggaatgccaggcgcaggatgcgacgtactttttcgtccagttccttcgtacctactttgcccgatttgatacgctccagataaggcatagccagataatagttatcataagcgttgctgctgccattggcaagaccatccgtccagcttccgaactccatatcaagaccgtttgtaatagcctgatcagtatcgtgcgtgccgccccagtcggaaacgaccacaccgtcgaagccccattcgcctctcaggatatcgttcaacagatattggttgtggcaggcatgctgacctttatacaggttataagctcccatgatagaccacgctttaccttcctgaacggccgccttgaaagcgggcagatagatttcatacagggcacggtcgtctactatgacattggtggtgtggcggttgatttcctgattgttcagcgcatagtgcttcacgcaggctgccaccccattctgttgtacgccctgcacgtaaggaaccaccatacgggaagccaggtacgggtcttcacccatgtactcaaagttacgtccgttcagcggagtacgataaatattaacaccgggtcccagaagaacggtcttgttacgatagcgtgcttcttcaccaatgcttttgccataaagcatggacatctcggggttccatgtagccgccaaacaggtcaatgccggaaaagctacacaagagtcattggtccatccggcctgattccattcatcccaaagaacttcgggacggattccgtgaggaccgtccgtcatccaaaattccggaatacccagacggggtacacccggactgctgaatttactttgtgcatgcagcatggctaccttttcttccacggtcagccgcttcaacgcatcttctactcttacttccataggtttgctcgcatccagatatacaggtttctgttgcgcaaagagcggaagagcaacagtgaatgcgaaaccgaataatactttcttcatataaataagtggataatggggttagtagttaagtttgtttctttctgacgggttatgaattaattcaccacagattacacagattgacacagattctattttactgattattagattaataaatctgtgtgaatctgtgtaatctgtggtgagtcttattcattcctataccattataaaccaaactcaactactgactcacatgattaaatatttaacaataacttcttacttcattcccaacgattgaatatacccttcctgcaccacacagtttttcagcttgcaagcctcgatgaaatccatcatggctttgcgagccattgcctggtcgggacgagcatcacgaacttctttataagatgcgcggggagcctcggagaagtaaacgatattcgcccaattctccggaggagtgatgccgacgaagctggaaccatccatcttcttatatggccagaaggtatagccgatattattatcacgcatagtctggcagaatgccgcttgccattcatccgtattatgtcctatttcgcccatatacatcggcaggttcactttgtcacggaaatcaataatactctggatagcttctttggtaggatcgcctccgtagcggtggcaggtgtacattatcttatcgtcgaactttgaatccgtaaacggcttgaagttaccgttccattgtgcaccgcccaacaggataatatggttggtgtccacctcgcggatagcggctactcctttcttatagatatcttccagcttaccgttcagttcttccatattcgggaagtacggagcaataggttcgttgaaaagctcataacccagaatcaccggttcatttttataacgctccgcaatcttgcgccagatgtcacaatacaactgctggctggtttcactttcaaacaaccagggataaccgtaactgtcgtcaatgttatctcccgtttgtccgcccggagcatcgtgcatatcaagaatcagataaagatcggcttcacgacaccattccaccacactgtccacccgggcgaaaccatcctgattggcagtcagccccataaagtcctcatctgtgaacaacttatagtgaaacggcagacggattgtattcgcacccgtattcttaatgaactgaacatcttcacgggtgatataattgtccttaaacgctttccagaactcagcggtaaagtcgggtcccaccaactgacagaacatctcgttgatgaaacggggggaattcgtcttactgaacttgaacatatatccttccggattcagccaattacccagattggtacccatgataaagagtttcgtaccgtcgggctttatcagatcttgcccttgaattgttacaaatgcggcaggttcctgtgctttttctgccttttcaccgcaactccctaacatcagagaagctgccaagagggatgtacccactaaaatagatttcaacatggtattctaaatataagattatttcttccagcgataggatgctacagacttggcaggcaccgcacaatccacacagttctttccgtccgttaccgtcaggcgaacttccttcgtaccctcattcaacagcacaaaagccacggttccatcgggattttcgaatgcagagtacatcaatcccttctctgcaacgcctttgctttctatgcggacagcgcccggtttcactacggtagacagatgtccgatgatatagtaatgggaattgtaagtcattgttttatagtcatcacgactgatatccacggctccgtaacaagtcttgcagccaccttcacgccaaggcccacgttcattgtccaacatcagattccagactatgacacctttacaccagttgttcactgtgccaagggctacttcacgcatatcttccatcagacgtttctccaggttacgaccatcattccacatgccgatagaagtttcggtaaagatcagttccttgtcaggacgcttctgtcggatattgttcagttcttcgcgcctgccgccataattgtggtaagcggctccggtcaagaaagcggcggctacttcatcatcatacatcttaacggggtattgttgctggtcggccatgttatcgtagttgtaattatggtcgaaagcataaatcttcgtatccagtccggcagccttgaaagcagggccaagagcgtcacgcacaaaggccagttcttccttccaacccatgaacaaagatgcggaatttcccctattcaacggttcattctgtggagtaacggaataaatatcaataccttcattacgaaatgcctcaatccatttcacgaagtaagtggcataatcctgatagtaatccggattcagttgtccgcttgtccaggaatcgaaggggttcttttcctccaggttattcaccttcatccattttgggcatgtccacggagagcccagtatcttgatggtggaattaatcgccagaatatcttttaagataggtatcacgtattccttctcttccgtctgtaaggcaaagttttcaatgcctttcgtatcgcagcaggtatattcgctcagcgagaaatcggaacagcctatggaaatgcggatatagctgaagcctagtccgtctttatccgaaaaagtttcggtaagaaacttcgcacggtcggcaggtgtcatttgcatcagattgtagcaggtagaaccggttacggcagcaccgaaaccgtccatctcctgaaatttcaccttcgaattcagggtgattacggattcaaacgcaggagttttagagagcttctgagtagtgtgattaaagctttgctgacggtcggcagtcgtgatgtacacatctgctttcttctttcctgccgcattttcgtccaatgaagcggaagtctcggcacaagctgtaatggcagcgaataaacagcatcctaataaaagaggtagtttcaagttcatggtatgttttccaagggttaattaatcttccccaaaggtaggcaagataaagacagtatgcacctccggtttatcaagatgtggataagatgaaagcatgcggaatgataacagactaaataacaagactataagtttgcggtgagaaagtaaaaaagtggatgaacaggaaagaaatggcgtatgtttagcgtatcctcataacacacatttcaaaatcatcccgcgagacgcacgccttatttttcactttagcacggtaattatagattgtattgacggaataacgaagaaactcggcaatctgcgaactatcgtcaatacccagacggatcaaggcaaaaatacgcaattctgtattcagcagttcgcccttgcggagaatgatccgttcttcaggctgcaacagctgattgaacttttctacaaagtcagggaaaagatggaggaaggcagtatcgaagttctcgtacagttccttcagatcagtgtcaagcacatctcttgaacgcaccatcttcagcagttcttccgtttgcccgccggaaagctttttgttgaccatacgtcggtaagcatccagacggtcgatataagtagaacacagtttcaggaaacggccgatatattcctcctttatatgattggacatctgcaactgttcattggcctgttccagatgactgcgggctatggaaagatgcttcatctgccgatatatccagatgacagccataatcagcaacagggacaggatactgatcatacaaagataaaagagcagacggtcgttctgcttctcctgcatagcctgataggtaagatctatgagcgacagaatacctgccgtctgcaaactgcggctacgggcattgtagtggttagtttcatcccacgagaagcgaatgtagcggtaagcacgttcaatgtctccttcttcataaagcagttgtgccaaggtccacaaggaagcatgatcagtaattgccagccggacatctgtcaaagcagacaaagccagataatacttttcctgctgcctgtctcccaaactacggtaaagctgggaacggtggtaagtgaccaacgcatattccggggtatcgggacgtatgcccgccaaacggctatcattcatcttcaaagcctcctccaattgaccggagccggcggctttcatctctttacgttccaggtagagggcggaggcaggagaaagtacctgcatcagagagtctccataagcaacagacaaaccgtaataacggctgcgccggaaggtatcctgcgtatacgcccccaattcattgtataaatgacggtaacattcataataatcgggtaacaaacggggagaaagcttagaggaatttatcttttccagatcttcggaagcttctttatacatacctgccgctgacatcagatgcgccctccggatacgggtttcatctgccgcatcctgctcaccgcgctgttgcgcccagcgcaggttacggctcagatagtaaagggcggagtcacagatgtacgctttgtattcctgatacatctccgcattcagccggaagaattccggggtttctgaaccggcctgtaccaattgctgcctcaacgcctcaatacgggcttcacgcactgccacatattcttcgtgcttaccgatggctacgtccaaagcatcagtccagccatccattgcaggaacatcggccggagccgacattccgtgaatgccaactaaagccagacctagaaatatcagcagttttatcttcataggggacaaatataaaaaatttgtttcctatatttgcagcattaacccccaaatgtattctataatgaaaaacttaacacctcaacgagtggcggcggtcgatgtattccgtgcgcttactatgttccttatgctctttgtgaatgatatccccggtctgaaaaacatcccccactggcttaaacatgccgaaatgaacgaagacatgctgggtttttccgacacaatctttcccgcattcctcttctgtatgggtatgtccgtttcctttgctatccagaaccgctatcgaaagggagacactaccttgcaagtggtcgctcatattttctggcgcacggtggctctgattgccatgggactgttctcactcaactccggcggcatagagggcggcatctcccatcaatggttctgcatactgatggttataggtttctttctggtctgggcggtctatcccaaggccgaaggttcaaaaaagtacctattcatcgcaatgaaggtgctcggtgtggccctgctggcattcctcgtattatataaagacttaaacggaaaacctttccatcagggttggtggggcattctgggacttatcggttggacttatgtcgtatgtgccgggatttatctgtttacccgcgaaagtctacgcaagaatgtaatagcatggctggtagttatgctgcttgcagtaatcagtcattccagtctgataccacaagaatacggtttacgcgtcatactgttgcctttcatccccagcgattggacgctgcacgcattcggtatgtcgggtgtactcacttcgttgctgatgcagaaatatgctgaccgggaacatccgcgtaagtttatcacaattctttgtgtattgggtgttgtcatgcttattgctgcactctgctcgcatcctcactggattatttccaagatacaggctaccccgagttggttgttttattgcctggctgcattcttcccgctgttcggcttgttctattggctgacggatgtgaaaggcaaaacgccctggttcgatattatcaaacctgccggaacagctacactgacatgctatatccttccttacatatggtatgctgtgcagcaattgctgggtttgcattatccagagctattgaatgccggtgctccgggcttattaagatcgcttatattctccctcatcattgtccaattgaccggactgttggtgaaggttaagataaaactgaaagtataaaggatttcaggtgcggattacgcggactatacggattctcaaagaatcggaaaggaataatttccgtgtaattcgcgtaatccgcgcctaaaagaaaaacaaaaaggattatgttgaaaatagaaactccaaacaacgaagacaaagtactgctacattcctgttgcgcaccttgctcttctgctattatcgaatgtctgctcgccaacaacattcgtcccaccgtattttattataaccccaacatctatcctcaggcagaatacgatattcgaaaagccgaagctatccgttatgtaaaagccctcggacttgatttcatcgatggagattacgactatcagctttggcgcagttccatgtcagggatggaagatgagcctgaacgtgggggtcgttgtctgcaatgttttactcttcgcctgtcggaaacagcccgctatgccgcagagcatggtttcacgctattcaccactacccttgcctcttcccgctggaaaagtctcgaccagattaatctggcaggccgtcgcgctgccgctctctatcccggcaccatcttctgggagcaaaactggcggaaaggaggattacaagaccgccgaaatcaacttcttaaagagcatgacttctacaatcaacaatattgcggttgcgagttcagtatgcggagacttgaagagaaagaataaaaacatccgatcacaacttatatttctccatcagtgacttcactgcatcttttttaaagtgatattgaaagagcacgggattatagttcccctcgcattgatttatccccaagctacattgaactcacgggacaacctcgtctaagttcaaatagaatatatcgtcagctttcggccttgttatgtacagcctgtttctcaccgtatccaaaaacattttatcaatgtcataatccgttttcaccttctgcaccaacctaccatgccagtcaaaaacatgaatcgtattaatatatggaatttcagacattccccatctatcctttccccaatacaacgcatatatataattatcgtcagcctgtacttctacataatagttctttatatttgtcttttcccgaagagccgaaatgctttctccgccttccatacgatatcctacaacctgttctgtttcaaagtccagtatattcaattgctgaagatgccccatcacttgcaccgctttagtcccatcaggcttaaaggcgtcggccgaagcaaagtaagcctctgaaataagagacgcttctccttcttttatcgcctgcttataaatagaataattcttcaatgcctcatttgtatccagcgttcgcttttgataaaacagcaaagtggcctcatcatcacttaaaggcacggggtccactctggcaagcagggtgttatcatcctgaagatacatctcattatagcacgctcccctattttcatccctccaggcaaacggaatcactctatccataatcgtagtaccccgtgcgatggattgagttatattccaaacaaataatttttcttcattaggagcgaacagcaaagtcttcagctcattttcccgctcaaaaaattgagaaataggaccaactgcggtggcctcttcagggccacctcccttgttacaaaaagtaccgatctcttctcccgtatttatattgaatatattgtagaagcgatccggcaatttaggattcataaaaaacatgagagaatcatatacggcaatatatccgaaatttgtcccatccagaaaaaccggctttaaggctactttcttcgtttccttgccactgtctttaatcgtttgtatttctccattaaaaaacaggctgtcatcatgcttctcatggcaaccaatgcaaacgttcaacgcccacatcaagcttattaattttccaatttttctcatattgtttcttatgtttgagttcaacttttcatcattttggatctctcgctattttccggctcttcgagtttcatccgcatgacaaaggaaacctttttttattgatttcaggtgatagatcattcgaaatatcccgcgaatagcaatgcaagtacattatatttgctgtatataccggtccaggctatccgtagcagataaagacaatttattctttatgcgctgtttggttttcaataccgactgggaagtaatattgaaaagagctgcaacagccttgttacagagtcgggcacgcaccagataacacaactttaattcctgaggtcctaaacagtaatcaaccaactcttccgacaagcagttcccataaaaccaatcgataacggtaaacagattttgccattcggtatcatccctgacaatgccataagacggatgctgatgaagtcgcaacaactggctcatggccaataataacgaagatgagcaatctgccaatactgatgcttcctgatagtttttcagttgttttgtcagttgcttatttctgaacaataagcaagcattccaattatcactgtaagtttccatatacatctcttgtttttataatattttcctaattacttttccagtttctttgctatttcctctacctccctgcgcatctcctcaatggccgtagaatgaattttaggcgctttcatcagcactattcgtttcatctcctcaaacttctccctattcagaaattccggttcggcatatagcttcgccagcaaatagtaaggataaatccgcccgggcaaacgatgaaccgaagccagaagaagttcctctgcccaatggtagcaacgcagtgcctgataattcttgccaatgacattcagtatcattggatcagcgcaatataccagagccttatccagatatttattagactcattataaaaccccgccttatgaaggctatgcccatattcaaacaagaatgtccctttctctctcagttgcggatagagcttatcataagccgcatttgccgctgcataggctcccgcatgataaagcatacgggcattcacccagccccgacaagcatccttttcccgttgccacttgccatgaaaaccgcctatccatataataagacaagcagataaaacaaccggtttagctattatatcccctatcccacaagccagcaacaagcacacataggctacaatgaaagcaggaagatgcataggataagaagaaaaagaaaaaataagcaaagcgataattgcaccacacacaccgtagcgtctgaactgtgtccccgcccataaacaggcaagagtaatcactatcagcattatacagataacaggtccctgtgtcagaatcaattccagatattcattaaatgcatattccggacttccggccaccctttcttcccactcggcataatctccctgggaaaaataagcttcctgcgcctcaccataagcaaaagcgaatcccttatcacatccccaagggtacttggttatagcctgacaggttattttccataaaaacaaacgtcccagagcagagtccggcttcaagaagaaagctccggcacctcccactatcaacacaaaaaatatccctatcccataagagatatatcgttttttgtaccttctccatagtatattccatttacgcctatcccgatgcatgtatatcacccatacacaacctatcacggcagccacccaggccgaacggctcattgtagccggtaatacgcaaagaatcagtactcccactactcccgccgccactttctccaactttaaagaagcgctcatccacttccatgtcccgaattgcatataatgatgcaggcagacaggtagtaccattgccagatatccggcatacggaccgggattaaaaaaagaaccggtaagtgcataacgaaaatgaccggaagcagaaaagccatacaactgacgtagtccccaaacggcttcaattcctccaagaagtatcagactccatgatacacaagcggaaaaacacgaaaaggacaacatcttcttcctagaagaaccatcgaaaagctgaagcagacaggctgcaacaatacaaccggccgaaaacaatacagcctttccaaaccaaacccactgcccgatagtttctccggcaagaagttcaggtgt

SEQ ID NO: 6435 - DNA, 1061 bp, Unknown
  gut microbiota DNA sequence
agctgcaacgatacaaccggctgaaaacaatacagcctttccaaaccaaacccactgcccgatagtttctccggcaagaagttcaggtgttgttacacagaccaggctcagtggagagcaaacagcaagaaaatgtaacaacacaacggctgtgtcttttattttatgtatccatatctttattctattctcttccatattctatcccatcttatcctatccttctccctatctaccgacttccatatcctaacagccttacccacgattagaggttccggcaatagtccccaatagcgggaatcctgagagttcatcactttatcccctgtaacaaagtaataattctctttaaagcgataagcatatatcacactgtcattcagtaaaacggtatctccacgcaagaagagtttctttctttgttcccactctattgcattcttatagaaagcagcatgttcaggattcatttccacctcatcccctttagccggaagatacaaaggcccgaaattcataatatcccagtttaccaattcattataaggataaccactcatgacaattctccaatccctttctctcccattctctatgatacgcctcaacccatcctgagaatctacgtttcctaacggcatattacaaccgcgcactttataatgcgcctgacttatttcaaatgtatcgcccggcaatgccacacaacgcttcacataataagtcattaaattcaggccaatactgtcccactgggccggataaggaaaattgaaaaccaatacatcgtttctcttaatcttgcctaatctcggaagacgggaaattttcacctccttatcttctgcggcatcccaaatattgaagatacgggcacccatcacccacttattcaccagaatgttatcccccggaagcaaagcaggctccatagagtccgaaggaatcctaaaagtggcaatacaggttacttggagtaatatccacagagccactaatccacaggctatcaaaaacaagtttaacaacttgtcgacaaaccaagagagttttctttt

SEQ ID NO: 6436 - DNA, 12673 bp, Unknown
  gut microbiota DNA sequence
ccgttcaaaggtgaacatagccatacggaagcgcaggttgaaacgatattcttcctttcttcttttgtagcttcttctctaccggctattctttttgtcgcatcggctttccttattttattgcgtgtactgagtgttccagctgtagaacataccaagtgcgtgcgagttcgttgcggcatcagtctgcgtgcaccacctgtagttcattgacaataggaattccccttattaaaatccattaaaaattagaactacatgaaaaaatatatctttttcgtggtgggagtgatgtgtacattgctctcccacaccgcttatgcaattgatttaaataaatctgacgccaatattattggccacgtattagagaaaaaaacaggagaacaccttccttatatgacagtagccctgaaagggaccactatcggaactatgaccgatggtaccggacattattttctgaagaaccttccggaaggtgagttcatactctccgtcagtgccgtaggttataaaccacaagaacgaaaagtaacccttaaacgaggcaagacgctggaagaaaacttcgaactggaagaagatatggtagccttggacggtgtagttgttacagccaatcgtaatgaaaccgctcgccgactggcacctaccttggtaaaagttgttactccgaaactattcgacatgaccaattcgcataccttgtcgcaaggtctcgtcttccagccgggcgtgcgtgtagaaaacgattgccagaattgtggttactcacaggtacgtatcaatggtatggacgggaaatatacacagatactgattgattcccgtcccattttttctgcactggcaggtgtttacggtttggagcagattcccgctaatatgatagagcgtgtggaagtggtacgtggaggcggttcggctcttttcggctcttcggccattgccggaacagtgaatatcattacgaaagaacctctccgcaactcaggttcgtttgcccactctatctccaattttgatggctccggttcgtttgacaataatactacgcttaacctttccctggtatcttcggataacaaaatgggagcttacatctacgggcagaaccgccaccgttcggcatgggattccaacggtgacagtttttccgaattacccaaattgaagaaccagacagtaggcgtgaacgcttattataggctgagcccctattccaagttgaatctggaatatcatcacatggaagaattccgtcgtggcggtaaccgctttgatctgccgcctcacattgccgaagatgccaatctgaatggttccggcgaacccggactggtggagcagattgaacattccatcaatacgggcggcttgaagttcagtgccttctccaaggatcagaagcatgcgttcaatgcatacgcctctgcccagcatatcgtgcgcgacagttattacagtgcctatgggcataccaccgatttcaccggcgtattgggcgctcagtatatctatcattttgataagctcttttttatgccttccgacttgacgggtggggtagaatttaatcatgataatctggacgacaaagcaacggatatgcaaaaatatcgggatgccgctttggcggaagatcccactgcaacaggagaccgtctgcaacagttgattgataaatatacacccgatcccttgaaacagattgtgaacattgcgagtgcctatgtgcagaatgaatggaaaagcgagcagtggagttttctgataggcggacgtctggacaagaatagcattatgagcaaagccattttcagtccccgtgccaatatccgctacaaccctacgcaggacataaatatccgtttcagttatgctgagggtttccgtgctccgcaggctttcgacgaagatttacatataagtaatgtgggaggcgagttgatttccatcgttcgtgctaaggatctgaaagaagaacgttcgcgcagtgtgaacgcttcgatggactggtatcattacttcggtgatttccaggcaaatttgctgatagaaggtttcttcacgaaactctccgatccgtttgtactgacagcaccggtagaagatccgaacggtagtggatatctgatacaaacccgtgtcaacggttccggtgcaaaggtgtatggtggtacattggaaggaaagatcgcttggcgtgataaaatccagttgcaggcgggactgaccgtgcaacgcagtctgtacgattctcccgaggagtggagtgcagacaaggaacatttgtcggatgaagaacgccatagcgaccggatattgcgtacccccgatgtttatggttattttactgccactttcaatcctacaaaagcattgtcagtagccctgaacggtaattataccgggcgaatgtatgtgcctcatctgatgtccgaagtagatggtacggcagacctgttggtgaagagcccggatttcttcgaactgggtgccaaggtagcttatgatatagatttttccggtatgtgcctgcaattcaatgcgggagtacagaatatcttcaactcctatcagaaagattttgataaaggagccacccgcgattccggttacatttatggtccgggagcgcctcgttcctactttgcgggagtcaagcttagtttttagtgcctggcgggtttgccttgtattgcctttttatgttacctttgaagaagataagctgcatttcagcataactttttcatgcaagcatgaaagttatgcattcgatttgcattacctttgcggacataaaataatttggcacatggatttacccgtatcttttgcagaccgtacccgtctcctcctgggagatgaagaatataataaactggctgacaccttaaatggcgaacagcccgtaagcatacgactgaatgaagaaaaactacccgattcttcattcagtctttttcatacctcttttgggcgtgtgccctggtcttccacaggattttacctcgaccgtcggttgacgtttaccttcgatccgttgtttcatgccggatgctattatgtacaggaggcatcttccatgtttgtggagcaagcattaaagcaatatatcggtgaaacgccttccgtgatgcttgacctttgcgccgctcccggtggaaaatctacccatgcccgcagtgtattgcctgcaggcagcctgttggtagcaaatgaagtgatccgtaaccgttcgcaaatcctagcggagaatctgacgaagtgggggcatcccggtgtcgtggtaaccaataacgatccggcagactttgctgatctggaaggcttcttcgatgtcatattgaccgatgttccctgttccggtgaaggtatgttccgtaaagatcccgttgccgtcagcgaatggagtccggagaatgtggaaatctgctggcaacgtcagcgacgtatcatctccgatatatggcccagtctgaaacccggtggattgcttatctatagcacttgcacgtataatacgcaggaagatgaagaaaatatccgctggatgcgtgatgaattcggtgcagagatacttccggtagatgctccggcagcgtggaacattaccggaaacttgcttgctggtgaagattttcctgtatatcgttttctgcctcaccgtacaaagggtgagggctttttccttgccgtacttcgtaaaccggaaggagagacggtacgaatccgttacaaatccactgtttcccaaggaaagaagaaagctggtgcctcagcatctaaaactaatgccggagcatctaaggaacaattattggccgcccgtgcctggctcctttcggcagacgactatgagatttctgcaaatggaatgaatattgtggctttccctaaagaatatatatccggattgtccgtcctccaacaatctcttcgtgtcattcaggcaggcgttacccttgccgaagtgaaaggcaaggacctgattcccaatcatacccttgctatgagcactgtgcaggtttccgatgtttttcctcgtgaagaaatttcgtatgaacaggctattgcctatttgcgtaaggaagcgattgtgcttcccgatactgctccacgcggttatgtgctgttgacgtataagaatgttcctttaggttttgtgaaaaatatcggtaaccgggctaataatctttatccgcaggagtggcgtatccgaagtggatacctgccggatgagatactggtgatgaaataaagaaatcatccggaatttcagttgcgtgagttggaagtagcaaatgcccttcctcactctgtgtttttagcatctatatatcggtggtgttggatatatagatgcaatacattggatatatagatacaacacgttggacatatagatgttgcacatccaatatatagatactccccgtccgatatatacagctaattcccgggaaagttttaactcatgcactggaagtttcagatgaaccaagtttaaataccttttggggcttccagatctttcagccctcaccggattttcctcgttcattggtctttcggctgaaacttctttttacttctttgtaagataatagaaaaacatcatcttttcagcttacaagaagttgggagtttgtcaacaggaagttaacttcttgtcggtaaactcccaacttcttgtaaacaaggaattaatattttgtattcttttgattatcagaaataaagcgttggttgaaatcagtgcgtttgtatataaatatcattgcttttgtcagacattggcaagtagttgttcgaaagagtggaatttgtattcctttcctttatgcagtctgaaatcttcggcagacaatacctgtaagtatggcaaatcgaccgtccctgacgtagaaatgggagaacaagcatagccatgccggttgagtgcatttgttgtccagtgcagcaatacttcatcattggcttccacaatgatacagcggttactatccactttgggataatatactccgtgcgcataatcaaaccggatatcgttgcaggaaaacaagccgtccatccggtgacttagaatcatatcttccgttactccacattgcagtccgttttcttttgaaagtaaccaaagtttatctgccagtaccaatgcctgctctatgtcatgggtggaaagcaggattgctttcttttgttccactgccaggcgatgaagcaaagtcataatttcgatgcgactcactacatccaggaaagctgtcggttcatccagcagaatgagcggacattcctgtaccaatgctttggcaatcatgaccttctgtcgttccccatctgatagctctgcagtataactgtgtgctttatgactgatgcttacagcttccagagcctcttcaatgatggagtgatccgttttgttcaatctgccgaagaatcccgtatgaggttgtcgtcccagagctaccaactcatatacagtcagtccgcctgcttgtgtcttgtctgtcagtactactccgatggtacgtgaacgttctttttcggaataggcagacaatggcttttcctgtacaaataattctcctgacaaggccggttgcgaagccgccaaagtgcggagcagagttgatttaccggttccattagctcccaggaggcaggtcagttctccgggatagagccggaaggagagatgttcatgtatccgtttctcttgctttccctggcggtagccgatgcataaatcgtttgcggtgataacagctttctccatcagttgaagtattgtattttacgttggttgacaatgacataaatgataacaggcgctcccagcacaggggttaccgcattgaggggaataatacctgcttcacccggaaggatgcagatcagattgcagagcaaggcaattacaccacctgtcagcaaagtgacgggaagcagtgaattgtgattggacgtacccagcatcaggcgggagatatgtggaacggctaggccgatgaaagcaacaggtccgcagaaggcggtggtgacggctgtcagtagtccggtggcaatcagtaacagatttcttgtgcgacggatgtttactcctaagttttcagcatagcgtgtacccaacagcaaggcattcaagggcttgataagcaggatggaaagtaacaaacctgccagacagaaaatggagaaataggggagttgttgcaatgagacacctccgaagttccccatgccccatatcatataagaatgtaccccttcggcagtagcaaagaaattaagtaatgaaatagcggacgaagtgatataaccgatcatgatacccgtaatcagcagcatgatgttgctttttatcagtgtcgaaaagaaaaggataagtcccattaccaccatcgacccgatgaaggcaccgagtatcacggaaaagaaaccggataaggtaaatactcctgtagcaatgcttcctccaccggccagcatcaccaatgcgacaccaagacttgctcctgagttaatgcccaggatggatggacctgccagtgggttgttgaatgccgtttgtagcatcagtcccgaagctgcgagtgcggcaccacatagtaatgccgtgacggcttgcggcagacgggactcccagataataaaagcccagctggttttttctacttcatttcctatgagagtattccacacagctccggcggggatattgattgaaccgaaccagagattcgcagccatcaatacgagaatgaggaccgacagtgctatgccatatatatatccttttgctttcgttcttatcatcagttctattctgatagttttttgtaatacctcagctcatagccttccaacagtgaagggtgaaatattttaatcaaatctttcaataaccagtccggatggaaaggcgtttcctcgtaaaaaggaatccggttggtattacatccgtagatgttccgttccttgaaagcacggaaacctgcataaggggcaaattctttttccagttccttgtatgttttatctataggttggttatagcgtatcagccagaaatccgtttgctgacctttctcaaagataacttcgaaaggataggggagcgagccgctatgtgtatcttctctgaaaatatagttggcgcctgcatcagcgtatagcctggcaatggtgctgttgccacccggagtgtaccaggtagagcttgttttcaaatcacacatcacggagggagcaaaggagatgggttttactaattcctgcaaatccttatagcttctttcgaccgaagcaaacatagcatctgcttccgcttttttaccaaatagtagaccgtagaaacgcatccattcggcacgtcccaatgaagaggtttccatatagtcggcacattcaatgatgggtacattcaacttttccacacgcccgtatccgccgctgttttcaaaaggagaaagtagaatggcatcggggtgcaggtctatgattctttcgatattggggttcatgccatcacctacatcggtgatggttccgtttcggcatccttcctcgatttccggcagtttgatgtacttcaagtcgcatacgccaccaatactatttaaagcaccgaggtcttttagcaagctgcaatgaacggatgagtagatgactgctttactaagtggggtgcggacaagagtacctagaggcagttcttggggtaacggctgctttttgtctactaatacataggtgtgtagtatctttgttgtatcccagggattgcgtagctgtgcaacgatgtaatcttcgtaatttatcagagagagattagaagaatagtgcagcgggatgctgtctccttgtgcagagccggaaacagtgctgctctttccgccgcaggcggaaagaaataacactgtcacccaaagggttataaagacagaaatttgtttcattgtaagaaaatcattttgcttgggttgatacctccacaatcaaacttttcagcaaaagttccatctttcttaaaacggtaaatatcaccattggaaacatagtcagaagtactgatatagaattctcccgtttcagggtcgatattaaaaccatatatacttgatgataataattcctgaggggcattctttaagaaatttccttcggtaagtttatgtgtttttgtattataagtggaaaaaatatgctcgtatccgtcacttttccagtcagaataaatgagaaaaatcgtatcatcatgttctgcaaaggctgatgctactgctattgattccacagtatcatccgattttatgcgctggaaggtgtagccttcacccaatacattggtccagataccccatgataaaaggtagacttcatcatttgattcaagtatgcgattgggattttttacaacgggtatatctttttcttttttgaaagtattcaggtcgattacagaaacatctgttccttccccatatccggaattcgctacatatagtttgccttcattttcaacaatctgttccgggttggcattgacatcgacataagcttctattttcatagtgcgagaatcaatacgtgcaacctttccgctccaaagtgtaacgtagattttgccgtctttagctgccatgtatcgtggttgaccatcagaactactgaatgaaaggcgtgcttcttccactgccgcagcgttcagtttcagcaataggcttgagccggacacaatgacataaatattgtcctcatattctaatatatcctggccagtgtctcccaactgtttttcattttgcttaaaatagatgttggcaataaaattattattgctgtcattagcatctctattaggggcataaaaggcaatgcctgcattgttgttatcagcttttccttcattcaggatgaacattcgtcgttgtggtaattctactttagtaccttcatcgttccatggggcatcgtcatcatcgctacaagaggtgaatgttacagagattgcgagcatacaaagagtactgaataataagcttcttactttcatgttttgtttttttaggttgtaattaattagaaaaataggctacccgtcatccgaaatgagcgtcccggcattgggtaatatttgataatatcatattgtttatttgtcaggtttattagttcggcttggaggcgaagtctgcattttcttagttggaatgcgcgggatgctgacagggtatgctccgtatatccatcaatgcgattttcttgtatgttctgtggcaggctgtatcggtcgcttacacaagttaaggcataacctatatttatccaggagctttctgcaagtatggaagcattgccactatgtagaggagtataaggaatctggtctttataattcttactgcttgatgaagttacgtcaatagctttctgataggtataattgcctgttattgataaatcaatattacggtggatcgggatagaggtacgtaaagttatatctgccccggtgatatgtactttcccaaaattcatcatcttccagacataggttgtgggtaaggcgacaattttatcatttacttcattaaaatatccatcaacagttagcattacgtaattagtgaaagagaatggagtaccactccaggtaatacctatattgtattcgcgtgccttttcaggtcgtaggtcagtattgcccatacgttgataataaaggtcattgaaagttggtacgcggaaagtgtctttgtacattaatcgcagaaagagggagtacttctcccaagggcgatatataaatgaaagggtaggactgaaacgagaacgattatcagggcggttgcctgatttcacatcctcggcaatcagcgtatgtactaatgttcctgtggctgtaagccctttccattgatagcgtaaattaaatgcagatagccatgtatatcgtgttggattaggattgttgggcaaattattatctagtgtattaagtacaaggtcatttgcccatgaagtagaaaatgtactgcaaggctgccattgtatggtagctgatagataatattcttgctgcttgttaatgtctgtttgtctacctccttcatatttcacgtctgtatcttcatatttattccacgaatagttatatttagcttggccctgcaaggtccattccgaggtaatgtcttttaggtatcgggcttgtatgaagatatttctgtcccataaacgctcattggcttgatcattgtagagaattactgaacctggcaatccacgttctgaatcgaaataatatgcttttatgttcagttggctactatctttcaatgtatgaaacagatttgcttctgtgtgccatgattttatatcagaattttttcttttttcattcgtagtatatttgccgtttattaatttaaaaggataatttccatctgcttgtagataattactattcaaggtataacaggttcgttgtgttatacgttgtccccatgtgagagagggatttattaagccaaaggaaccacttttaatttgtcctttgaaggtatatgctttgtccgtttcttctaaaggatttttactgtatatagaaagtattcctgctgaagcgaaaagccgtgcaggttgcagtaaatcatgattttgcccaacagacagagataacatgtctatatcatccaatgcaaaacgtcctatatctatttgtcccgcttgggtgttgctcacagccactccatcgtaggctactgctgtgtgtgtagcgccaaggcttcggacggaaacagtctttaatcctcctataccaccataatcttttacattggctccggcaaaacggcgaacagcatcagctatattctgaagtccgagattttccaattcgtttttttcaagtacttgtatgggcatcgctacagatatacgttggggtacacgtcgcccctttattcccacttccggaatggcatgtacctttcccgtaatggagtctcccgcctgctgtgcctgtaaattgacacaaaggcagcatgtgaaacaatataaacaaaaccgtagccagatgcatcggcatggattatccttgatcataacaaatagctgtaaaaatataagtatctcatgccctttcctcgaaggcataaaatttgataggttttgcaggtcttctgacttactcaggatttaccgccttcccaccgtgcgaataccggcagtggcataggtgattggtaaatcctctataatgagcttacagcagcgggactgtttgggagttacacccaattcccttttcatgaagcataccgaaaggcatacttcaacaaaaccgaagggcaaagataggaaagatttatgttttatttattataggatgcagtatttcataaatttatgcatttattctaacagagtaacttaatagaaaactaatactataatgcttatgctaaagaaaactattgctgcgctaagcctactcagtatccttgcagcctgtcagaatgatgagaatccttctcaaccggaacctaagccacgtcaagacatcaatcttacccgtgcggaacaagagtttatggacaaaggtacagactttgctttccgtttcttcgatcaggtgtgcagtaccgaaaaagaaaaaccgaatgtttttgtgtctccattgagtgcatcactttgtttatccatgattacgaacggggctactgataatacgcttgctgagatgcagaatgtattaggattccctgccaatactttctctcttgatgatctgaacaactataatcaaaagttaacttcagctttgttggatttggacaatacaactcaactcggaatagctaattctatctggatagaggaaggttttaaggtttatgactcttttgttgatgtaaataagaaaatgtacgatgctcaggtgcaagaacttgatttcacatctccgaccgccaaagatgtgataaaccaatggtgcgccactcagactaataattgcataaaagaggttattcaggaaatacctgcggatgctcgtatgtatctgattaatgcactctattttaaaggtatctggaaaagccagtttgataagtcggctactggacaggataactttaccaatgttgacggcagtcagcagaaagtagctatgatgaaccagaccgcaacgttcaattacacccagactgatgatttctctattgcggaattaccctatggcaatgaagcttttagtatggtgatactgttgccatctggagataagaccttggatgaaagcttacccagcctgaattatgagaactggaaacagtggagtaagaatatggcaggaaaagaactacaaattaaacttcctcgttttaaagtagaatatgacaaagagctggaagaggacatgatagctatggggatgaaagatgctttcgatgcttataaagcaaagtttgccaatatgtccggtgcagaactatatattggccttctgcaacagtttacttatataaatgtggatgaggaaggtaccgaagcggctgcggttacagtaggaggaatgtttgataatgctgtcggttttccttctcctgttcccttctttgtgaatcgtccttttgcctttatg

SEQ ID NO: 6437 - DNA, 5752 bp, Unknown
  gut microbiota DNA sequence
cagccccttgtccccttgtcaactgattaccttgtcaactgcgaagcttcgcttcgctaaattatcatctaacataatataaactaattgtgatcgggacacttatattcaattgattgaatacaaggatgcggtctcgtaacttattcaccccgttccagtggattataaggaacgtttttcgggttcttggttgcattgccgtgttcatcacttactttaatggtaacgttcggcatacttccggtgataaatcccaccggatctgcataatagcgttcatgtactttattgtatgctttacgattcatcggttcatgcttctttccatcgaagagtataggtctgtcagtatggcattgctctatacctgtggcggtgaatgaataatgcccttcactgtctacggctttcagtatcagccccggcagtccgcataatttccagggaccttcgctaacaggaatttctgtagtgaaccatgctgtccatatccgtcctttgaaccgacattcggctttgccgcagaggtaggagaggatactgtcattttctgccagtatcttccactgcggacgttcatccggttcttcgcaacgcaggcgggatatgcctgctatttcatcgagggtcgttacttttccggcaggataacctctgaaggtacgttcactcagtttgcttgttccgtattgtttcagatgttcattaatcgtttcctgcgaggctttattggcgaagtctactgccagtacagagtcgcaaacatacttggtgtaactgtagaacttagagagatttttaccgacttccaacatcatagtttcttccgtaacattttccggcttttccgtattactgatacagcgcgtttcatattgcacaaggatttgtgcctcaccgatggtatcattttggattttcgttccatcggaaacgatgatttgtgccttcgcttgtgatgcgaacaatatagcgagacacagattaaaaaagataattcttgcactcatagttttactttttagaggtttgacatgctgttgccagcaaatattgtagtgcaaaactatgcggattttacttcagaagaggctgaaagttattactgaaatattactcaatgcataatatctgcctcgcacgtacctatatttgcaagctaacttttacctttgccggtactaaatgaaagtctttctaagcgagactaaaaaaagaacaattatggaacaacggattaagatcgtttggatattctccatcgtatcgatgctgcttattacctgcggacaggtttactggttgcgtaatcagtatcaatatatgaatgatgaacagatcaatgatatttatgatcgcatcttgcagaccactcaacagtatgactctatccgtactcctcaacccaaaaaggtgctcaacaatgccaatatgttcttctatcaactgagcaaatccattgatttggaacaccgcaccaccattgatgaagtgattttgggtgctctgaaaggaagagagttggagaacatgggagggaatgtagaaactctcaagatagagacgcgagattcggctaaggtggatggccaaacaaaacacacacagcgtgagcaatgggcattggatagtatcattcctaaagaaaggatcatcgttatggattcatttaagatcaatatgtccgataaggatgctcctaatctgaattcggtgattaatctttatcgtcttgaactggatgtacctttcgcattgcagcaatttgattctttgcttgccatgcgcctggacaatcagccgtttactacgcatctggtggtttccgaagattccatttaccagtggaatgcggaactgaaacggcaaggtacattgttcaatccatatatagaagtaatgtatccttataatcccctgaaacgtcagtttgtgcttgtttccgtgaaggtttcccctcatgcggtacttgtgcgtatgggttggcagttagtgggcagtacctgtctgatttttctgctggggctttgtctgctgtttcagataaaaaccatcttgaagcaacgacggatagacgaactgcgaaaaagctttgtaaacactatgatacatgaactgaaacgtcccgtccaggctctgaaaatgtgtatagcctttctcaatgacaaatctatgcgaacagatgagaaagcaatggatgaagtgattcacgattccatgtccgagctggataacctgtcggcctatctttcgaaattacgtgatatgacgcgtgccgatgatgaacacacacagctttccgtccgtacctttgatataaagacgagtttggaaaagcttgtccggctttaccatgtgcctgaggataaggatgttgctattgaaacacattttagttcggagactctggtaacggcagacccggtgcatgtttctaatattatcagtaatttgatagaaaacgccgtgaagtattcgggcaagtctgtgcatattgttgtagattgtcttttgcaggatcaccaattgatgatacgggtgtctgatgatggtatcggcattccggtttccgaacagaaccgtgtattcgataagttctatcggggcagtaatcttcccgaccgttcgttgcccggcattggtctggggttgagttatgtaaagttgttggtagaagcgcatcatggaagcatttctttaaatagtcaggcaggcaaggggacaacgattgaaattattattccccaataagtctgtgctaatccgcataatccatactctaaaataaccaatgatatgaaagccttgaaaatactttttgccgatgatgatttgaaatattcaatgctgctgaagcgctttcttgagaaggaaggctatgaagtgacttatgccggaaacgggaaaattgctctggaacaatttccgctcataaagcctgatttagtattgctcgatatcaatatgcccggttataatggctttgaagtggccgaacgtatccgtgagacggataaacacgtcctgatcttcttcctttccgaccgtagcgataaggccgaccgtctgcaaggtttccagcttcgtgcgaacgattatcttgccaagccgttttatccggaagaacttatagcccgtatccatgaacgtttcacttcccagctttccgatacggtggaggaggagacttaccgttttggtcagtctgtcttcaattacagtaccaatgaaatacgaacgggaaataataaagtacttattacctcccgtcaggcagagatccttcgcttgttggcgaagaatctcaacttggctgtggaccgtgacttgctgttgaatacagtttggagtagtacctcttatgcaaactctctggcgttgaatgtacaaattacttatttgcgtaaggcgcttcgcaatgatccttcagtgaagatagaatcgttgatgaagaaaggatatatattatcctttaatgactgcaatgggcgataaggtagtcagaatacgtaccagatcagcctgattggccattacttcatcaatattcttataagcgccggcagcctcttccaagtcttgacgtccacgaatggcatgtatgatattctgcgattcaagacgggcaatttcctcttcgagtgataggctgcgtacagcctcagaacggctcatcgcgcgtcctgccccgtgtgaagaactcaagaaactttccgggttacctaatccctctactatataagaatgtgtgccttgtgatcccggaataatacctatttctccgatgccggcatgtacagcccccttccggtgtacaattacattctctccgaaatgttcttcccatgcagcatagttgtgtgcaatgttgatcattggttcgaaagtggcgttaggtaatgcttcggctataatttcttcaatgcgttccatcataagtttacggttggcaagggcaaaagcaacgcaatattccatttccgcccagtattgtttgaattccggtgcacgcagcgggaggaaagcgagttttatatccggctttacactggaataccagcgggtgtttagtgtttcggccatctggttgtagtaatcgcctaccatctttcctaaatttcggctaccgctgtgcagcataatccacaggtaaccgtcgttgcaacgttgcagttcgatgaagtggttaccaccacctaatgtaccgatttgttttcgtgccgatactaattggcgatttacgactgtcattttctctgtatcgaaaccggttggcatatattgttcatcttgcgcggctttatgatgctctcttcccaagggaatccgtttacgtattcctcgcataatctctttgcgaagtacatcctgcggtatttcttcaacaagaagatttgttttcacggcacacataccgcaaccgatatctactcctaccgcgttggggattactactcctttcgttgccagtacaccacctatcggcatacctttacccccatgtgcatcgggcatcagtgcaaggtgatgaaaaaggaaaggcagtgttgtcaggttgtttacttcttcccaggcatgtgcatccagttggtctacccagagttttacgggtacattgttcattgcaataattttcatatttcgatgtcttttaagttgatgttgcaaagatttgcatggaggtgcgcaatgtttttgcgtagtagagattatttttcaattttgtgtgttgttttgttgtatttatgcagtatctccgtagtttctccatgcaatctccgtatccggtccgtagctgctccgtactgggtctgtatcggctcaatgttttatctgatttcttagatacggacttgatacggacttgacacgggcaggatacgaatcagagacttataaagggcttgtatccagtatatactgttgccgcaaatattgctttttgatgcgttgaatctccttatcctgttgttccaaagatactgattgataaatgaaccactctagttggtaaagtgaacaactggagtcggtcgattgaacaactccagttggtagagtgaatgactccagtcggtcattagctaaaaagtatgatagggtgtatatgaacgggagggtaggcttgcagccttatgtgttgagtttaagtgccattgttgtggcacacaagactggaaagaaggtatgacatgaatgtggctgaaactataaggagaccggaagtttcagccggagagccgatgaatagggagattgggacagaactgtaagactgaaagaactgaaagaagaaatttagagataccgtcagttattggctgcatctcaccctatatttgtccccatacatggaataaaaaaagcgggcagctcccaatatttatatgctttagtatttcttttacagaaaacttttataattttgcctgtattaaagaacaaaaatataaaaagtaagaaaaagaggacgaaagatagaatattgtagaacgtcgaagacgtattattctgaaggttaaatctggtaaattgaacttttggtcatgaataatataagtctgagcattgttcacacccgtacagggcgtggagctgcttcgcttatttcatgaccaaggcttaccagagccgaaccttcaagaaatttgggatgtgggttcgcgctctttttttattattaataaattaaataatagttgtttgtaaatatgaaaaacatgtatttattaggagtattgctcctgtt

SEQ ID NO: 6438 - DNA, 41963 bp, Unknown
  gut microbiota DNA sequence
ttttagacgcggatgacacggataacgcggatttaaaaggctgcgctataaaagtggataaaaaaaaatccgcgttatccgtgtcatccgcgtctaaaagattatttatcatttaactcataaccctacaaaaaggaactaattccgccaatggattacttgtaatagtcttaatcttcagactattgtgaaatcaggaactttgaatgattaaggtaggaattctttgttttcttcctttaaaacgtctgctgtttctttggtaaattgaaaatgtccccttttctttctacttttactgggtaataatatcttgataaacatactcttacgggataaaactctctcttcatttatcccccctatttgttttcccgttcatgggtatcttcctacttttgttacaccttccttagaggcttaactaatatgtattattatattaactatttgacagaatattaactcttaaactaaaattattatggcattttttgtgaaccccggcaaagactgggagaataacctgacagaagaagatattgcgaagctggaagcgcaagggtgtgacgtgagcggactgcgtaacagaccgcccgtgccggaagatgatgacgaagaagaggaggctttcgataatcctactcgcttggatagactgaagccttatctgcaaacaccccgggacatggaaactcccttcttcagggcagtggcaggcaatgctccttggttgttcaaggatcgctggaagaagaaatatacggagtctcccgttatatatgcagcagtggtgcaggccaacagtgctttgtggagaccgggagacaacgattactatccggcagtgtttgtttttgccctcgacaagaagcacattcacgatgtggaatggttatcgcaaatggcagaaaagatcagcgaattgtcagatagtcctactgtgccggatgattgccgtaaactgattaatacgttgcgcgatagtcagagtgagttttgcttccgtatcggcaaaagcgtatccggtgatgccgatgcctggtgtgctacttataaattcgataagcaatcggctcttccgcgcaaagcgcttccttcggatggtatcgttcctttcttgttgaaagccaatccggtagagaaccagtttgtggattttaaactgattccctccgaattgtatattgggtaaatcaaaaaatgcggctatcggaggattgcttttccggtagccgcatttctttaggaatttaaaagagggtgtttattgttagaggaaagttacttgtttgccagcagggcaccgctccagtgggtagcgttgtgttctgtcaccagattccaggagttttccttttcattccagctataagccatgtagttcatgccattttcattcgtctgataaacggctttagctttcacatttgtgtaattgccggctttgctgttccatgctacatattccacgtttacttcgttgtcggtgtagctgaagttaaggcaatactgcttttcaaagcgactgttgtcttggttccatttcagaatttccttggcggatacacgtcctttttcatcatgtgtgtagttgtattgcaggtggcgttccaggtacttgccttcttttactttatagattgtctgggtttctacactgctttcctgtttctcactgttgtaagcgaagtcttttacgttgttaccacttactgcgtttactactgatgtcaatgcgaatactactgataatactagagctttcataatgattttattttttaagttatatatttcgttacttttgatgttgcaaagatagggcaggggcatgaggatgaatgttatcgtaatgttatcattaggttaacgatatctttgcaactctggaaagctttccttgtatttttttagagttgtatgtatttttatattcctcttttaatcagtgagatgctgattttcgttcgtttcttttcatcgtaccttgccattggctggaaagaatgcattctcatcgcatataaaaagtagtacattactccgcgatccatagttatttgctatttttgcaggcgaatataaacggataagatgaaattacgtactgtcatctctctttcacttgtgagtctgattgctgttgtgttgatacagttgggtggaatgctttatgctttccatgcacagatgcaggaagcagagaagttactaaacaagtgtttttggatgtctttcacggagacagtggataatttggtgaacaaccttccttatcctgataattcaatagctatcatagcgtatgcacccaatcctaaatacaagcggattgatgggaatgaaaggaataagcgtacttcccagcaggtggcacaggctttgcaacgggtgtatggaataaaagaaattccgttagccaccatagatagcgtgttgcacaataagttgcggaagttagacatggatggaacgctgaccgtggagcgaattaatgtaaatacaaatgaggtgctggcaactaccaatcctcaggtaagtatccgtaactttgccgctgttacttccgaaactgcttttacctttaaatcccgtggggaggctgtccgtgccattctttctttccctgccaaggagatggagaagagactcctgttactgtcattcattacatggctattgctgggtacggctgtctatgccttgattgtacaaatgaagtcggtgttccgtcaacggcatgacttgcagaaacaacaacaggacttctatacgttggccgaagaaatgaaacatcccgtcagtcggatggagaatttgataaccacagaaaactggcaagagatagaggcacaaagcaacgtactctttgagagaaccaatgctactctggcacatgccaaagcagaaatccggcaaggaagtacaggcaggcctatttctcttaaagcaatttctatagtcagcctggttggagtattcctgttgctggctgtctggtcgggatatttgtattatattacatctcaaaagatacggtatcaggcggaggagcaattggaagaggctttctaccgggaggcagacttacataggtatccgcttttcactaaggctaatcctgattttaattgggatagttcaccgggagaatttctcccttatccgaggcgtatgatgaatgaactttataaggtatatctggagaaaggttatcgttaccgggtacagttgagtgtcatacgacatctttacaataagtttgatgaagatttccgcgtaaagatggcttatgatatacaggatacgattagtctgcgtagccgtgtgcccattccgttctccttgcagtttgccgacagtgttttcaggaaacagcttttggaaacaggctttccggatagggcggatatccgttggatcaggtatccgtcccgggagttggtactttatacaggtagtccgactgttgacttcggggatattactacccggttgtttccgttggataaggatagtacgagttgcatctttgctgtggttcgttcaccacaacgtactattatgagtaccacatggtatatgcaagtgccgctgcttattgctttccttttcgtatctctctgtgttttctttcagatacgtatgttgcgggcacagcgtcggttggagcagtttcagaaggactttacttactccatgatacatgatatgaagtcaccgttgcagtctgtcatgatgggagcacatatcctggcaagtggtaagttggcggataagcctgagaagctggtccgttacaggcaagtaatgggagatgagtgcgaacatctgttgacactttccaatcgtgtagtaatgctgacagagatagatcgtggggaattggaactacataaagaggaagttgccttaaggccgttgttacgggatatagcagaaaagtatcagttgaaagcagcgaagacgattcatttcgatatagattgtgaagaaggatgtagtgtttatgcggatgctttctgtctgcgtgagatactttccaacttggtggacaatgccgtcaagtactctaatgaagaggttctgatcattctttcaggtaaaaagacagaggatgaaaccattgttagagtgcatgatagcggtattggtattcctttgagcgaacagcataagatattcaataagttcgagagggttgcttccggcagtcgtaagacgggtgcatcaggttttgggttaggattgaattatgtgttgcaggtggtgagtgctcacggtggtatggtgaaggtagaaagtatggaagggagttacagtgaatttacgctacaattccccttgcgttaaaaaagcctgctggcaaagatgaaatgtgctcaactatttgttattcagataggcttttactatttttgtatacagagtccgtaaaaaacaaaggaggtagattatgacacgcagggttggcatatcttggctcccaattcgttggggattattttttctgttcatttctggtttgcagttgctttctgcacaggaagatagtgcacgcttcactcttgatagcatgttgataaagccgaaagctgcatttcagcttccatctgtcaatctgcttcccgaaaagactgtataccctttgataaatcctatacagttaggtgatttaccttctttctccttaaaagaggaactccgtataccttatcatataaatccttctccgctattccggggtgattatagcacaggaggcgtattaaggcaatttccccatggagcggtattcggttccggaagccagaccagtgttccgggcatcgggcgtttcaataatgcttcgttaggatatcagcatatctttaacgatcggctatcattgcaacttcgtgccaatgccatgaagataaatatgtctcacatcaccgggcaagctttcagtactgcgggtaggctgacttatcgtgcttctgaccgggttgccttcaatgtcttcggttcgtatgatatcggtaattcttatgggatgagcactaatagttatggtgctacgatgtctcttgatatgtccgaacgttttggtatggaggtaggtgcccagcgctattacgatgccatgcgtggaggttggcagacggttcccgttgtgataccttattatcgcttcgagaagtttaagctggggttggatgtaggcggaataatgtacgagattctgcgcaacgtggtgtttgataaacgtggcggtggtgactttggtggcggccctacgattaggccgccaaagttctcatttccgataaaatagaagaaacagatatttacttcaggtaatcgtttatattcagtagtttgtattcgggcgaacattcaaacagatagttcaggatgttcatgtgcgctgcgccgaaaataaccaatatccgtttgccggcggcatcgggaatccgctggatattcctgagtatccttagattccggttgaaccatcttccggattcaaaatctgttccggtataatcgcctttgacggattcatacttgaaatgcttgataagatagtttcctaaatctttcttgatacgtaccggatcattgagatgtatcagttgtgcaagtattccctgttgcttgaagatgggttcatcttcatagtataaagcagagtcgggagagttcgagaaactttcttcaaaagccatatattcattactttcatcattatccagcagtttctctatgtgggtagtgtgtgctccccaagcatctgcacagtatatcttggcattgcacattcgggctattctgaaacctaactgctgaatttcgtttctgttcaactcatgcttgccggtaaggtatgagttatagagagagtctatctctgattgtttgtataaaggccattcaatgacaacggcatccggcttgaattgtgccagtttcttggatattaactctatctctttttgatattgaggagatagtacatctatctggtcttcttcggatacttgttgcacatccagattgggaaattcgaagtggaagactcccaacgtaaggacttctgcctgctgggcatatccttttgtgaagaacatgcttgcggtaatcagaataagaatgattttattcattgtaattacttttagtttggtgtccaaaagtactgattctttttggcatgaccatacaatcctgatttttgatgttgtaaaggcagggtaggagtaataagaatgaatgatatcgcaatgttatcttcgggttaacgaataatttattacttttgtggcatacaactggaagttaatacaattcatatcaaagacatggatacaataaagttattgttagttgaggacgatcccagcctgcgttacatcgttcagagcggattggaagatatcatagagggctatgaagtgttggcagccgccaatggtgaagaaggattggcaatgtggagggaacaccgtcccgatgtcattctctcggatatagaaatgcccatcatggatggttatgagatggtgaagcgtatccgtgaggtggataaagagacgcctataatcttttcttccggtttggtttctcccaaaaatgtattgaaaggctatgagttgggagccaacaattatatcaagaaacctttcattcccgaagaactggatgcccatattcatgctttgttgaaactctccaaaggtgaaaagagtaaggacgaaagcgaatgttacaagattggaaaggaatatgtgcttgatgctacgcacgccatattgaagcattcatccggtgaaaacaagacattgaccgcccgtgaagccggactgttgcaaatgctttgtgagaacagaggagatgtagtacgccgcgaagccattcttgataagttctggaatacggaagatgattattttgcttcccgcagcctggatgtattcgtcacgaaactccgtaagttgatagctgaagattcatcagtcagcattaaaacggtgaaaggtgtggggctgatgctggaagaaaacatatagttccggctatttgattactatatttattcggggcactaaactgtgtctcgaatatttttttgtccttactgttcgttttcatgcggacacttgtccggaaatgaacatagcttgaaatcgtatattcgttgataatcagtgttttattgttttggcacgccaattgactatatattgtcgaaggcggttgacaaagacttcctctcaaacatcaagaagtaataacaataaaaaaataacgattatgaaaacgaacttaatttctaaagcagtggtaatgttggcagtagtaatggccagtgtaatgaacttttctgcaagtgcaagtaatcctacccagtatgtgaagaacgaagagatgaccggcgagttgatgaccgcaaagactatctttaagaacgaagatggacatctgtatcgccacctccgttacacctacacttacgatacagaaaatcgtgtgaccagcaaggaagcttctaaatgggacagctcaaaagaagcttgggttccttacttcaagatggatgttttctatgccaacaatgaagttgaacttagctatgcccgctggaactccaagagcaatgcttacgacagcagtattaaaaagactgtttatgaaatgaatgatgataatgttactttaatgttggcaagtacgaaataaaacatcaataattaggaagtaaatgccgggatgatgagatttatatctcatcatcccggttttgttttggaatacaagttatgaaagtaattgccttttttgcagatgaaccagagaaaatatctgattccagaaaaagatattatccgattcgggaaagtgaattagatagtagtaattataaaaatatggggacaagcaagaaagtatatgtctggtagcaggtaatgttgctccttcattggttctttatgaaaagctattgatggaatcagttcctttatgcaaatgtccccttatttgtctatcctttatatagagttattatttgaaaaacagctgtttagtttatggattatccccttcatttatcccccatgattgtttcattatttacaggttactttttacttttgttttcatacgataaccaggaaagatggaactattattaatcattataaaaagtaatatttatggaaaatcaaacaaaactctacccaagctatatgggtgaattctatgcagcaaacccggtgaaatttgaaaaaagaaagaacaatgttaagccgatgctttattatggattggctgtagtcgctgttattattgttatttttcctggttttatccctgtagcgggttggttggttcggacggtcggagtaattgctgtattaatatgtctgcttgcagcgtatttgagcaatttcgattattataatagcgagagtggaggtaagataaaagaggtgggtttgaagaagttcaaacgcgatgaaaccgatataaacagaatcctggaagcgtttctcagaaaagactttgagtatctggcagagttgcccggagcatatagcgcaccggtccagattcatgtggaagaggataaattagggcaggagatgtattgcttactgacttcttacgattctgacagcaacattatcggtctgaccaatgtcctgaccttatcaggaaacgattatctcgatcatgcggatgtaataaggcagatgcttaaagatgcggaaaacgattgattcttaaattgtaggacataatgaaaaagctgattttatttattggccttttgctttttgcctttctgaatgtctgtgcgcagaaagagtatcagatagagcaggtgtcagctataaatatgggagacggccgcatcttgttccgggacttgaagactgataagcccttggatggtgagcaccgtatcatagacggttatcattctgcctatatcctggctgactttaaagaaggcctttacaatggtaagtatgaagagcatgaatacaacaaactgatatgtgagggtgcttataaagagggacgcaaaaacggtgtcttcaagatgtattccgatgaggggagactgaaagaagagaagtcttataaagacgggaaattggacggtgcgcacaaaacttactataccaccggtaaagtggaacgcgaaaggaactaccgcatgggaaaacaggatggtaaggaattaagctatgactttgacggcacattgcgcatggatcatacatataaagacggtaagcaggtaggcaagcaattcactttcatgaaagggacctatgagcttcatgaaaccgtttattataatgagaacgggcagaaagacggagattattcctccatatttatctttgggcttcctcatgtgctggggcattataagaatgaccagaaagatgggcgatggattacaattgccgaaagtggtgatacattgatgatagaaacctatgtcaatggcagggaagaaggcttgcatgtttcgtttgataggaaaaccggtacccgtaagcgtgaattctacatgaaaaatgaccgtaaagacgggccctatcgtgagtacgatcctgagaatggtgaacttatttatgaagccacctatcaatacggtcgtatcaatggaaaagaacgtcgtctgatagttacaaatcgctatgattactgggaaatatccacctacataaatggccggcagagcggtccgtttgagtcgcgttacgtgaagaacgaccgtatacgtgaagtgggtgaatgtcggaatgggcggcgcatcgggcgatggaaactctatgatatcgatggtaagctggaaaaagagtgggaagaaaccaagtaatcacttcgcttttccgtatttatgagcagaaagaaatttaaacccaaacagcaaccggttcatggcgaagatgcctcccgacagcagccgaagaaaagaatggcactatggaaaattctggtgcctgcctttgtctttctcttcctgttgcattgcaggatgtggtatatagaagaggaaatgctgatacatactgcattttcttccggcagctatttaggattgaaccggaaaatcgttattctccttatggcaataacgatgtgtggctgcatggtttatatctataagaaaagcactgggcggtggtatcattggagaaacttcgtttatgcctttatgtgtgggggtattgtagtgggattatgtaccaatgtgctggttgtctttctgttctggctgaacagttgctttacttccggggtacagacccgtgagtatataattgtcaatatcgctccacacgacaggacgcgtaaaagtaacattccccgttctgctgcatggttgctgaatacattttcttacggggagatatttatacaaggtgatcgttacactcgcatttacttgcccattgactctgcataccggctcagcggtgaacgaggcatctatcttaaaatagagttggaagacggctggctaggatggggagtaatacggaagatcaattcggtgaccgcaacaaaagtatcggaaaaagtagaagttcgtttccctgaagatgagcagacacaggcgcctgactcttgcttgcacgaaaaaagtgaaaaagcttttaagtatacatggagagatatttatatctttgccaaactgaggaatattaatttatcggataccacccatgtcagtgtaaatcagtatatagacgggcaaaaaggtattccggtgtgggagattgatatacgcgattccattcagccggatatggccagagtgatattgattcatggagagactggagaagtgatgatggattcgtacgaataacacgatattgaagatgagattgaagagtttgatagggataatcctatggggtggtatgttggttgcttgtggtcctgataatcgcgtggccttggcggagaagttgatggcggaacgggagacggatagcgccataaccgtaatgaatgagattaaagaaccgttgcataacttatcgaaacgcgattatgcactttatgccttactgatgtccgaggctgtccacaggaaacaacagttgaatgcagctacagataccctgctgctgccggcaattaaatatttcagccaatcgggcgattctctttatgccgaacgggccctttactgcaaagcacatctggacagacggcttaaccggatgagcgatgccatgcagtcttttctgaaagctctgcttttcctgcaaaatagtggtaatcatgagcagctctaccgggtgaatacctggttgggagttgtttgcctgaatcaggaagaatattccggtaaggtgcgttattccaaagaagccttgaaggcggctttggatttgggaaatatgttctataagaatatggccttgtgcgatatttctaccggatatttgtttctgaaccaattggatagcgccctttactatgctcaggcggcctatgaggcggctttagccgattctgttcctcggcaacttcctttcatctatacaaatctgggtagtatctattctcagcaaggagagcctgccaaggcactggattatataaataaatcaatagctcttcgtccggctaaagatactgcaagaattctttcgctctatggagtaaagttggagttgtttggaaaactgggacaatatgattcggcatatcactattttcagaaagttatctctagtccggagccttcttcggtggccgacgcctataataatatggcgaaaatatatcataaaatgggccgtgcttcagatgcctatcctatgctacaacgctttattgaattatccgataccatacgaaagtatcgtcatactgaggaagccattgcattgcaagagctttacaaacacgaacagctttcggtagaaaacctgtattggcgtacccgggctgcggaaaggcagcgtaatgtgtattggatgactacaatctctttgctgttggtttgggtggcaagtgcggtatatttcatctatcgccgtaaccgtaatcgcctgatggcgcagcaacatcagctcgtgcaacaggaaaaggaactgaagcaacaacgtaaggccacttccgagagtcttcgccgcatggtggaaatggaacaaaaagaagcaaggctgaaggaaacctttttcaggagattaagccagaaggtggtgcaagaattagagaagggcggcaatgtcatcctttcagatgaagactgggatgatattgtgcagaatgctgatattatcttcgacaactttacgaaacgtttgcagcagacttacccaagtctcaataaagacgacttgcgttactgctgcatggtgaaaatgcaattgtctcagtcgagtatggcacaagtgatgcatctggagcgggattccgtgaagaaacgcctgaaacgtatccgtatggaaaagatgggagcggatagtggtgttacgttggaagaactgctatacaatttttaattgtgccgatgtacccaattacatccacttgacagggtgccctaatgcccgttttatcgcttccatttcggcactgtgccacatctcatgtttgaagcaccaggacagcgcctcatacttattattggcaacaggatgtttgaaaggaataggttctaagttctccgataagatacggtcgtccagcagggataagttgtggatacaaatctcgtgaacggtatctaattgcttttttagctctgttgtggggattaagttctcttcaacggagcgatgtaaggtccccatcccattgaagatctttatgtaatcaataagcggaatgagtttgtaaacttcttcatttcttcctgtaatgcaggttatggcatggaagttctgactgataatcaggtgtccgatctgccatgcaaaattggagtcagtgccttgggggatagtgtaccatagactttccgggagttcggataccagacggtttacaaaatcgcgtgattcaataatctgttcctttaaaaaatcaatcttgctcataatcatttattttaagttatacatagtagttagtgagcaagcctcctgttctgtgacaactcaggagataaatttttcccaatagttctttcttggaagttccttttcgagcctttggtaaacgtcgacgaggcggataatcttctttatggcagtatattctttttccagattaagtgagttgacttgcttgcatatccggcatttacaagttccttgcggattatatagcgggcaggtgccatccatgaagtgggtaatcttgttgatggagcgggaagaaatctgtctgatattctcctccgtcatgcccatgatctcgccaatctgtttgtggggcaggttgaggtttatcttgaatatgaatatcagtcgggcatcattcgtcaggcaatggttctgggctgtcagacaccagtcgcaacatgtttttatccattccttttcgtccaggtcggtatcgttataatccatggcaggaaggtcgcggaattctttcagttcatccattgtggcgactctctcgttccgggcatatcgcagtatggtgcgtttgcatattgtgtatatccatgttgataactcagattgctcattgaaggaatctatgcttttgatgatttcataccaaacctcctgagccgcttctttggcaatttctttgttttgtatcatgcggtgtgatatcgaagataccatggcgccatattgttctgcgatttcctttaagttcggttgcatattgggttatgttggatttgcaaatgtagctaatttgttttattctgccaaggtcgataaaggagggtatcgtttgcgtttttgacactttgctttttatgcatagtgagaatgcgatatttccgtcccgatgcagggaagaacggaaagaaacgaacgaaaatcaatattttgttgattgatagtgtaatacataaatacgtacaactctaataatagaaaaacagatggtctgtgcactgaaaacagatggtctgtctcccatctatagaccgtttgtttcccatctatagatagtttgcgttacatctatagatctttcgcgttacatctatagatccttcgcctcagatctatagttccttcatggaagaagtatagttctcttgcataagtattgtatatacggcctgctttatgcagaaaacatgcatgtatattctatggattatgcgacaggattctgtttggggtgttttcagagaggcatctgttagtaaaaaagacattccggtaactttttgttcggaatgatgtgctttccggtagccggtttcttgggctgttggcatttgttatgttattaagtctgaacagccatgctaccctaagaataaaaaatatatctttgtgaatgaacctgttaattgtcggacgtaaatcgaaaacacaaatgagaaatatgttttattgggctggtataataagtattcttatctgcctgtcgcttcgggtttccgctcagtcgtatgaacaaatgtggaaacaggttgaagttctggaacaaaagcaactgcctaaatctgcaatacaagaattgcgaaagatttacgagtatgccaaacaggaaaagaatgtgtctcagatgatgaaagcacatctgacgagagcatccttatgcattgatattactcctgatagtctggatagcgaattgtccgccttgaaagcttggatggaggaagaaaaagatacggtatatcaggccatactgaataacctgctgggatattatatcctggatacaggtaaaaaagatgagactgcaatcgatactgccatcgcttatttccaacgttcgttgcaagataaagaaatacttttccggaagtctgctgtggattaccatcctatgaccaacagcaaagaactgagtgagaaatattgtggtgataatatgtatcagttacttgcccggcaggctatctcccggctaagcggctattttattgccaaccctgtatcagccgagaaaatacaaaacgagattttatctatttatgacggactgattgacttctaccgccaacaaggcatgacagacgcccgattattgttgatgctggataagttacattataagggaaatgacgtcagtcggggcggagtgaatgaaaagctgaggctgaccgatgagcaagtaataacattattaaaacaatgggcggaagaatttgctgattccccgctttgcggagaagtgtactgccagttggcagaacgctatgatagaatgcaggattacaccgcaaaactaaaagcagcacaaaccggacttgcaaaatatccccggtcactttctgccaatgatttgaaagaacagatagcagaagtattgactcccaggctaatggtggaaattccttttgcctatccgggaaaggacgttgacttgaaagtaaaataccgtaatctggccggacttacggtagaactttaccggatgaatctgcctgtcacaagtcctgtcctggaaagggaaataaatgcttccactttaagtcaatatggaaaactggtcagtagccgccattatgatttggcagctactccggactacaaggaaacagatactttactgcgctataaattccccgttgagggcatttatgtagtaaagtctatccctgacggacatcgtaaatatacggcttatggaaaggcttatgtctcctccttgcaggccatatcattaggattacccgatggaaagcaggaaatcaatatcgtagaccgattgaccggacatccggtaacgggtaccgaagtggcctattaccgtgtgtcaccgggagaaggttaccgtttgatcaaagcatatcctgtgaatggcaaagggagtgttattctgactccacccagtgtaggaaactggctgggaataaatgtccgtaagccgggagctgattatatggagatcagttatgcaggcttttcaaatgcgggatatcatgtgcccggttcacgaaagtgggaaaagcacgtttctcttttcactgatcgtgcgttgtatcgtcccggccaggtggtgcatgtttcgggagtagcgtatgagcaatcaggtgattcggtccgtgttttctccagagttcataatgacgtagtgctccgtgatgctaaccggcaggaagtgggtaagatatcccttgctacagatgaatttggagcctttcatggcgatttcgtactccctgaggtacttctcccgggagaattcgaaatatcggtgcaagatggcgaaagccgctatatccgtgtagacgaatacaagcgtcctacattcgatgttgtcttccatccctgtcaggatacttataatatgggtgatacactaatggtcagtggcgaagcaaatacatttgcgggagttccggtgggcttgtgtaaactcagttataaagtaacccgttcactgaatgagttctggaagatctcagacaatgaaacggttctggctgtaggtgagatgcagaccgatgcagacgggaagttccgcttccctgtctttctgcgtgaaccggatgatttccaacctgataaaccggggcgctactatacatacaaagtgacggctgaagtaatcagtctgaccggagaaatagagagcggagccttgtcattacctgtaggacagcagtctgttgccttacagattaaaggtttgcgctccaaagtggcacgtgaaaagcgggatactatacaaattctggcattgaatttaagccggcagcctgtaacgcttcaagccacttacgtggtgtatgccttggatgagaaaggcgacaaaggcaatgaggtgtgccgtcgtacagttgggacctatcaatcatttattcccgaggatatacttgctctcactccgggacgttatagaatggaggcttcagtccttgacgggcagggaagaacctgtacggcggaacaggactttattctcttttcattggcagacgctcacttgccggcatactcaccggaatggttctatcaggatggggcagagcttgatgcccggcatccggtgaatctgtatgtaggtagtagtgagaaagaggtctatctgctgtatgatgtattctgtggcgataaacgtattgaatccgaacgaatgatcctcaataatgaaatccggaagtttacctatctctataagccggaatatggggatggaatcaccgtaaactttgcttttatgcgcgaaggtaagctgtatacaaagaaagtacagatagcacgtccccgtccggaaaagagcttactgctgaaatgggctactttccgtgacaaactgcaaccgggaggaaaagaggaatggaaacttcagatcatgcatccggacaagaaagcggctgatgcgcaattacttgccactctttatgatgcttcactcgataagttatacatcaatgactggaacttcaatctgagtctctcccgttttattcctgataccggggcgaatctgatatcttccgggcattccatctggatgtatagtaacttcccctattcgggcagcactttgcgtggtctccgttggtgggatatatatagtactctgaatactccgttctggcaagttccgcgttctgggggtaatttccgtattaagcaagatagccggatgatgaaatccggaaataccagctttacggatgaagttacgctggatgacggttttgaggtaggggatggaaactccgttgtagcagtatttgagtgctctgctgctgtggcattggatgatggttctccttatgttccttttcgcgagaattttgcagagactgctttcttttatcctgccctccgtacggatacgaatggaatagccagtatatcttttactttgcccgaaagcctgactgaatggaagtttatgggatttgcccatacccggaacatggactacggacagataacggctaaggcgaaagctgtcaagtcgtttatggtgcagcctaatatgcctcgttttattcgtgtgaatgataaacctgctatcagtacgggaataatcaatctgtcgggagaaaacattcagggaacagcccgtatggaactggtcgatccgcagacaaatcagataatatcaacccgggaacatgaattcagtgcggatgccggagcaaccgtttccgtatcatttgatttagaaagcccggaggaacctacggtattgatttgcagaattattgccgagggtagtaatttcagtgacggcgagcagcgctatcttccggttttatccgataaacaatgggtgactgaagcgatacccgttcaattgaatggtacggaaagtaaatcgattacactggggagtctgtttaatgatggaagtaaaactgcaacaaacaaacggctgacggtggaactgacggccaatcctgactggtatgccatacaggctttacccgtcatcggcaatcctgtggatgaggatgctttgtcgtgggcaagtgcttactatgccaattcattgtctgtggccatcctcgatgccaatccccgcatccggcaggtatttgaaagctggaagatacagggaaggccattgtcgggcaatcttaatgataaggaagaattaaaagagctgttacttaaagaaactccctggctggcagatgctcttgatgaaacagagcggaagagaaatatagcgcttttgtttgatttgaacatgatgagtaaccgtaatcgtattgcggtatcccgcctggaagcattgcagctccctgacggttcctggagctggtataaagggatgacggggaaccgttacatcactacccggatcgtggaaatgctggcacggcttcgcacaatgggtgcatctacccttccggtgcagggaatgtatgaaaaggctgtaagctatctccatacccaatggctgaatgaatacagacagatgaaggaaaacgaaaagaaaggcaataagaacggattacccggtgagcaatccttgcattatctgtacatctgtgctttagatgagcaggtggcaaagcgaactgataaaaccgcttatttgtatatgactgatagattggaggccggtagtccgagtgatgcgatttacgacagggcacttatcgctaccatactgcataaagcgggtaaaaaggtgaaggcggacgaattggcgcgatccattctggaatattccgttgctactcccgagatgggacgctattttgatacttcgaaagcccggtattcatggggcagttacagaattccgacacaagtggttgttattgaagccttatccggtattctgaaagaaccgctggcaattgctgaaatgaagcaatggttgcttaaacaaaaacaaatgcaggtttgggataatccggtagctactgccggtgctgtgtatgctttcttgagtggagatgataaccgattggcggaaaacagtaccatgaaagcggaaatagccgggacagcagtagtgactcctgatgatgcattagggtatgtccgtcgttctttctccggtaatgaggtcggagcccggcaaatagaaattgtacatacaggtgcaggaataggctggggagctgtatatgctcaatgcctggaggatatggataaattgcaatcagcaaaaggcaacggattgaaaatcaatcgtacctattataaagacggcaaggaggtttcatcaaagacggatttacatgtgggagatgagcttactgtccggctgaccgtgaaggcggatcgggatatggatttcgttcagataaaagatacacgtgctgcatgtatggagcccaaggaggcattgtcgggatatcgtcattccgatgctaccggttattatcaggtaatgcgtgatacctctgctgaattctttattgacaaacttaaaaagggtactgtccaaatagagtataaagtttatatagaccgttcggggacttaccaaaccggtattgctactgtccaatcggcctatgcacctgagtttgccggatatggaaagagcctgtctgtaacggtgcgctgaatttattagtcatttcttaattataaaatacgtatgaaacatctatgcttactgtttgcaattttatctttcttaagctgtaaggctcagaagggtcatgaagatttggcgaaagaagtgataatctcgggccgtgtatttaacagggaagtttatccgaaggagaaggaggtgaaacttgagataccttatctgtccggtctggaaacagtttacacttctcccatagcggatgacggtactttctgtttccgtttcagtccttatgcttcaactcgtgaggttgctcttcgcaattatgcggaacatttgtatgtacacccgggtgatagtctgcatgttgagattgacttcaacgatttgttgcatccccgcattaccgggacttccggtgcgctgaatcagtatatggctctttttaccgaaggaggatactatcgcagacttagctcctataacagagaagcatcctttgatgaatttgaaaaagaattgaaaacagagtatgccagtctcctggaacgtcgtgccgacttcctcaaagaacattcgccgggcgcagaagttgaagagtatacggcggacttattgctgatagattattatactgcactctttggtaatgctatatcacaggcggcagatggcaaggatgtcagcggatataaagcattattgccggaacttgaccctgtcttttcagggaaaaccgttttttccagtctgttttcgcttgccgcgaatgtatatatcttcctttattttgagcatacccgaagagaaaaaagtgattttgatttagcaaatgtgattgaggttagcaaagatcgtgctatccttccctatttatacctccaacccataggtacctctttatgcgataatgatacaacttacatcgctgatcacaggtctcaattcgattctatagttcgggctccctatttaaggcaacccatgcttaaactatatcaggataaagtgaattatctgaaagccccccaagcgatatcccattatatgctttatggcgataatgctgatgaggcgactgccagggagaaaatgccgttcatgatccctgtgtacaatcttttggaaaagtatgcgggtaaagtgatttatgttgatttctggggagtaacctgtcccccttgcctggcggaaatggagcctttgaaggaactgcggaaacgttattcgcccgatgatgtggtaatggccagtatctgtggaagtagagatcgggaagcataccataagattctggaacgtttctctttgagagggaagaatattgaatgtatctattcggaagattgggcgacttctgatgattatcatcgtatcatggctcattggaatatgcacagtataccgcaattcctgctcattaaccgtgatggaattattgtagattacggaggcttgttgagacccagtaatccgcagacagtggtaaagattgatgctctattaaaataagaaaccgataaaatgtacagttgacttcggaagatagggaggataatagaaatgtctaaatgatgatataattcctgaatcgtgttcttaatggtggaatattcctgttttctgtaacacgcttaattgtgcagattcgcattccagcatattctgtgaataagtaaggaataaaaatgcactgtccctatgtgttattgcatttttacaagctatttatacagaaaagggttactacttacaggtgataaggttactacttatgggtgatatcattactacttataggtaaaagggttactacttccgggtaaaagggttatttgatacgtgattttctcctataaggatgatttaggagagatatttcagtctggaagaaatgtaagtatttcgatagtgtattaacaatctgatgtttgcttgttttcattcgtgtatttccattctcgtaaagttccggttggaagtaacggattctcggctaactaaaaatacaaaatgacaatttgatcagtatgggtttatgtgtaaagtgggaagattcaatctccccactttatatattcatcctatttggattgcctgaacaaccattctaaaaagtctggttgattaaatgccgggtcccaactgttatgtccacatccggggaactcaatgtatcttggtgttttgcctatctttttcaaggcccggtatgcagctcttgaattctctacgaaaactgcatcgtctttatctccatgataaatggttattgctgtggttggtgaagccttttccaaacgttcaggattaattcccccgcagataggaatggctgctgcgaataaatcgggaaagcggcacagtaaatcaaaagtacccattcctcccatagataatcccatcacatagatacggttgacatccacgttgtcgttgttcatatacatgtcaagtactgcttttacagcttccataggaatggtaatctccgggttttcggggaatctttcgccgccggacttaccctcgctgtttggtttactgctattagaccaggaacattcagaagggcactgaggacagattacgaaggtcgggtgttgatcccggattaccggattcaggaacatgtttgctccgtggaccagttgagcttcattgtcacttcctctctcacctgcaccgtgtaaaaacaggaccagcggatattttttattcttttctattctttcaggttctaataccctgtatctgagcgtatctctacggggagatatatattccttcttagcataatatttatcaatatccgaggcaaaaaggccggcactcaataaaaagaggaaaactcctgttactaaaatacatctattcatggtaaaaagatttatgattaaaatgcgagggaaggcaaataacaatatctttttcccttgtctttggctcaacctgcataaattcaattttattatttctcagcgtaacttctacggtggtttgtttgggagcgtgcagcctgaagtgaacgtctctgttttcaggccatgcagggaataggagaatagaatcaccgtttgtttgaagtaacatctcttgcaagccgatcattccacttcctccccagttatgatcgggtgtccaatcaaatccgggtccccagaaagcgggaaaacgatgaggcccatcggacagtttcaataaggtgagccgttcagcttcttcagtcaggccgaggcaggcggcaaagatattgtcttgtttccaccctatatgacttctgaattcgatggcttcagggtcatacagatacgtattaattgcagtttgtaactccggttggcctattccgtatattctccacggatatacgggatagagtgacggaacttctgaattattgattctttcccacatctttgccggtgagattgcctttttaccttgcacttcacgataggaaatggggggaatacgttttaggaaacccgaccaatgttcacgttgtgtagcgtcaagttccggcaattccagaagcttttccgtaatgactttcaaagctgcaacggtagaagtggcgttggttgccattttataggtttcgcatgccgaaccggggtacaacaccaaatgaccgtctccatcgagcttgttcgttccccgtcttaatgccagatagctataatgttcgtcaaagaaggtaagtaggctttcaatgaatggaagatgcggaacaataggctcgttattatataagtgcgcatcgaacatcatgagtgcaaattccaaggctgtgtcccaggtgtattccaaccacgggttactgtctactcctaccgggaatccctcatggcgtggtttccaatcgtattcggccagattaggcagaccgaagttctcgatctgttcgctaaaacaggctccttcgtggttccagtagactttcgttcgtagtttggcattgtccagcatacgttcgtaaaagtcaaactgaggtttcatcatatcgaaatcaccgcttttcaacatggggaaatagactaaccgttgattttgtgccgtcatggttcctccaccccacaagcggaaatcgggagtgaatacccgggtagaatctatgtgtaccgggtcaaacgtaaacagtccgccgttgaatttagtcggttcgctaccgtacgcattacatccgagcatgtatcggaaaagctgatagttacggcccactttccagtaatcactccctattttaccggaatcgatgaagacatagcttcttttccaatacgagttccaccactgccgggttttctgctttgcttttttatcggtttgaactttcgagatggttttattgagcattgtttcccagtctgccgggttttcacattgcaaagtagcaagtgctaaccgaatctgatgctcctgtgccggttttctgctctttagactccaccctttaaaatctgtatcagtgtatattcccgtatatgtctttccggctacgagattatcgccatatattcttccaccaaaggtgagatgtttcagaggattcatcatctgatctttcacatcattcagtccttgtcgttctacggttctatcaaacactgtttctgctgcgttgcgatggcaaaatccgatttggttgtctatgaaaccaattgaatccttcgctgtaaacagaccttcgggagggttgcctttataagagttgaaatgagattcatccttgcgaagcaacctgttcttgtatcgccagctctcataagaaacttctatatccgttttacgactacctttcacatctacatgaatgaccggatggaatacatcagcccaaatctcgatgatgcttttttctttgccggcggtaatttcaatgtatccgtcttcaagttttagctcttggcggaagtctcccgattcgaaaggattaggggtcaggtgtatctttacccggcctcctttcagaaagccgttattggcgtcgaatgtgccgctacgtgagaaatagaaataaagctccccgttctccacccatacgttcataccgattgatcctccgccacaaggcatcgattcgtgtgaacctttagacggggtgttccagatgggattatagtcggaaagcgactgcccgtaaagcggcagtaccaagagtaagcaaatgattattattccttgtttcaggttcatacatcttttagttcaaaatgagtttttaaagatacgattttctgacgggttcaccacagagtgacacagaatgaaactctgtgccactctatggtgaatactcgtttagaacatgttattggagccttcccagcctgggttttgttccaataccccgttcgagagctgaatctgatcattcggaatctgcataaacccaccggtttcttttactcttctatcaaactgatcaaagtagccgttacctctatcttcgttgatggtggtttgctgcaaattattgtaaatgatgcagtggttcagattttgcttgataatggtgcctgcatctgttccgtaccaacgtagcaaatcatgatatctcaatgcttcgaaagccagttcatatctgcgttcggaacggagagcttcatcggtataagcaagaatcggtggaagttgtgctctggtccttaccctgttgatgccatctatcgtccgggtcatttcggcatgcatcaataatacatcggcaaagcggatgagtaccaaatcctgtgttgtatctttcatgtagtgcggacttgttccatataacacgcagctataattacagatagtaacagaaccatccgcattgactttctttacatttaccggcaggtacttcttcggcagataaccggtttcctgccatgcttcccaaactccgaagtcataaccggaaaggccttcttccgtatctctgacatctaaaatagaacctttcttccgcaaatcttcatcgggccattcattccagaaattggtacttaccgtacaaatgccccatcccattccgaacggaacttgtgtctgccctcttaaaccgatattcagtgcaatgggattgctatagttatccgaccaactggcaatggaagagtactttacggcaaagatggtttcattattatcaccgctttctcctacccatgacagattattgtctctcgcgtatttgtaatccgcttcgggtatatctatagcgtatggccattggttgcggaagtcgcttaacagatcatgaccactgttcttgatgcaatcttccagccaggcaatgacattctgcgaggtaacagagccattatccagggttacgttttccctcctgttttgtttgtaatatccgtcatagaacaggtaggcccgtgccataagagcttctgccgcccatttggtggcatatccgattttattcttatcaatatcctgaaattttatattgggcagcaattcaatagcctgttttaaatcagataaaatcaccttgaacatctcatcggcacttgctttaggattattctgaggagtagtgtctaaaacaaggggcgcattgccaaaagttatagccatgtagtaatagaacatgcctcttaaataataggtttcacctaagatcttgtttttctctactccgttttcccattgcacattttcggcattttccaatatgttgttacaacgataaatgccggtgtatagggcagaccacaaaggaccaaagtcgttttcggacattgctttcagatagcggataggttgagataaatctcccaggcctcctccggctaagcaatcgtcagataagatgtttccggccaggaatgggtgggaagggttcgtacagatgtagagtgcggagtatgctccatttagcaattcccgtgcgtcctcttctgtctgggggtagtttgaagagtctttctttgtgagattctctgtatccaagaagtctgaacatccagttattgaaaaggatattgcaacgattgccaataatataatctttttcataatgcgtctaaattaaaatttaattgatgctccaaccataaaggtgcgtggagtaggatagaaaccaaaatcaacgccgctgatccagttttcaccggtacttgtaccgatttcgggatccatgccggaatagcctgtaatggtgaacaggttctgggccgaaatatagaatcttacttgttcaaaaggtagtgatttccatagtttcttgaaatcgtatcctaaggttacattgctcattcttacgtatgatccgtcttccagataaaggtcggagatgtaagaacggttgatgtggttaccactggatatgcgggggatactgtttgatgttcccggtccggtccagcgtcccaggatttcactggtataattctggctgggactatcgggcatgcgatatgctcttaatatatcgtttccaaagacaccacttgccactaatgtcaggtcaaatcctttgtaactcatgttgagattaatgcccaggttgtagtcgggattagatttgccgatcattgtcttatctttatcgtcaatgattccgtcgtcattacggtctacaaagcgcacgtcaccgggtactgcattcggcatgattactactccttccgagtttttgtaattctgaacatcttccggggtttggaataatccatcagtctgatagccatagaaataaccgattgggtatccttcttcggcacgggcaaactccgacgctacatttcccaaacgaacccctgagtgaataatcttttcggtattggcgatacgagtcacttcattcttgttatgggaaaggctaattaaagcactgtaattgaaatcgttgatgttatcacgccatcccagtgataattcaacacccttatttacaacgtcaccgccattgatgtagggtgccgccgtaccgtagctggctaaaacgggcgcttgtacaagccagtctttcgtttttttgtggtaccaatcgaaagtaaacgataatcggtggtcaaagaaccgggcatccaatcctaagtccaactgttcggatgtttcccaggtcacgtcaggattcggcatgatgtccggataggagccggtttgcttgtcacctttgtcttgaccggggaagtagtcgttattagacatggcaatagtagacagatattggaaaggtgttatggattgattaccattttgtccccaactggcgcgtattttcaaaaagctgattttgtcggtgatattctccatgaacttttcattactcaatacccaaccggctgatacggaggggaaataaccccatctgttacctttagcaaagttggaagagccatcagcacgcataactacggttaacatataagtttctttgtagtcgtaattgatacggccaaagtaagacatcaatccggtcttttcccatggtgctccaccgagggtggtctgtccggggataattagtttggcattatccagataggcgtatttaaaggagtcgaagattaatttctcgttcgtaccgtttatgctttcacccaatccgcctctttcagctgacataccgatgagggtattgaagttatgagtatctttgattgtaaaatcatacgacagggtgttttcaaatgtccatcccaaaccggtactcatactttggtatacagaattattatctctcttagctgcatctcccaaatggtatttcggagaaaaactacggtatgaagaagcactgaaattatatccgaaattcgttctgaactttaaattcttgatcggttgaattacagcgtatatattaccattcaggttgtggtttttggaaagattgtttccattttcatagaccattttaccaatcggattcacttctacattcaacaaggggatggcttgatggtattcacctacgatatcatttccattctcatctctggcccacatgggcagcatgggattcgtttgtaaggctgaagaaatgttgttaccgtacatattgcctatggcaagtcctttcttttcactgtatgagtaagagaggttttcacctactttaatcacatccatatctttaatgcggtatagcgtatgctcggaattgattctggcagtgtatcggtcgtagtgcggttctacgggcttgccgaaaataccttcgtgtgcagtataagacaggcccatagagtatacggattgttgtgttccgcccgagatattaagcgaatggctttggataggagcatttttattttccatttcattcagccagttagttccgttccatttgccttcttgtatccttttccagtcacccggtgccaggagcttatcaaaatcgagcggttccatgttgtcattggactgcccttcctgtctgatcattgcataatccgtagcgttcagcaggttgagtttcttgtatacgttttgtacgccatagtatccgtcatattggatggaagcttttccttcacggccttgtttggtggttaccaggataacaccgttggcggcgcgtgctccgtagatggctgccgatgcggcatctttaagtacatccagtgattcgatatcagccggattcagataatcaatgttccctctggccactccatctacaatataaaggggattggaagaacctgtagtaccgataccacgaatgattaccttgaatccttcaccgggctgaccggatgttttggtgatatttaccccgggagtctggctttgcaatgcagtcagtggggaaacggtattcatacgggctatgtcgtcgcccttaacctgtacagtggcaccggtgaccagtttcttcttttgtacgccatatcctacaaccacaacttcatcaatgagttgtgagtcttcagtcatagctacagtgtattgtgtctttcccggagtgaggttcaactcaaggtcgttatagccgatataagagaataccagcgtagcattaggggacacttttaactggaagtttccgtctacatctgttattgttccgctactggtacctttcaggagcacatttacaccgattaattcggactggtcggttgctgagacgacttttccccgtatggttatgtcgctctgaccgtacatcggaataaggacaagcccaaagagcaggaacaatgagagccgaagccatttcatggcagcaacatggcaggaatcaattctaattctatttttcataaaataatggatttaaagaaataggcaatgtagaatgtctacactacctaaattaatggtttgtaaactcttgactgtgatttagtggtttttcttacttatgttttcataggctgatagatttaaaataggacaatatgaagttattttacgcgtaattcaattgtattgagatcctcgtctcgggaagaagatcccaccatgatcttgaatgttcctttctccactttgaagttcatatccgtatcataaaaagacagcatatggggagtgatatcaaatgtcacggtcttttgctctccttttttaagagatatgcgtttgaaacctttgagttctttgagtgggcgggtgacggaactgaaatcatctccgatgtataactgaactatttcgtcaccatccatttgaccggtgttggtgatgtctatactggctgtcagagtttcatccgtggatatttcggatttagagaggcgaaggttagtgtactgataagtagtgtagctcaaaccataaccaaaatgaaataacggaccgtttttgcctatggcgtaggggaaccagttgcttgtgagtttatgattgtatacagactggatttgtcctacgttacgaggtacagtgaccggcattttggccgaggggttgacttttccatagaggatatcagcaatggcttgaccaccgaatgaaccgggctcccaggcctcgatgagagcagcaacatgatcagcgatccattccacgcccaaaggccggccattgacaagtatgacgatagtgggcacacctgtgttttgaatggtttccactaattcttgctggagtccgggcaggttaatatcagaacggtcggtattttctccacaggttttttctgaccagtgctcacgcatagagttttctcctacgactacgatggcaagatcagcctggcgggccatgccggcagcttgtttaactttagccggatccatggtacggatgttccagccaaagtcaagaaatgagaaagtagtattgggtgccgcatctttcaagcctttcagtacggttactacatttccttcgggctgtggtacagcccagtcacccagaatgacatgggtatcggcattaggacctgtaacaaatatctttttgtatttggaagcgtcgagtggcaatatgccgtcattcttcaatagtacaatggatttatgcgcaatttcgagggctgtttgctgatgggctttattgaagagtaggtctttgcttttggcttcatcgaaatagggattttcgaaaagtccgagtttaaattttgcagtgagtatccttctgacagactggtcgatacgtttttctgtgagtctgccatctttcacagcttccagcaaggcttccatgaagtcgggtccgtgcatgtgcatatccatacccgattgcacggagagcacaaaagcatcggcatagctttcagtaacacgatggtaatcatgcaatcgttcgatgtccatccagtcgctgacgatgtatccgtcgaacttccattcgtcacgcaggagatcggtcattaggtatttattactgtgcgagggtattccgttcacctcgttgtgtgccatcataaaagtgtaggcattggcatcaaggcaggctttgaagggaggaagaaatatttcgcggatggtgcgctcagaaacatcgcaaggtgctccgttgattccgtttatagactggcttccaccgatgaagtgcttaggacacgcaatgacgttttcgggattggagaaatcatttccctgtaatccccgtacggttgcggcacccattacccctaccagatgaggatcttcgccaaaggtttctccggtgcgtccccaacgtgggtcacgtgctacttccacattgggagtgaatgcccagtgtgccccggtggcacgcatctcaagagcggtttcacgagaggcctgttctatcaaagcaggttcgaatgtggctgcctgaccgatgggagtagggtaaatagtcgttccgctacatagtccgttgccatggacggcatcgatgcctatgatcagggggatcttcaaccggctcttttgtgccagactttgcaggtggttggcttcttcaagatcggtgacgtggaggaaggaacctattaaaccttcctctgtcatccgggctacatctgttgaatggagatttttataaaagccttgtgcatggcttttctccatttctgtgatcagcaggtcacgttctgcggtctgcatgtgtttcaggccgacatactgacacatctgggccactttttcttgtaacgtcatctgtttcattaggttatccacccttgcctctataggttgggcagggtccagataaagattatcaggggtattgcacccggaaagagccagtgacactacggttatccttaatcctttcaaaactaaatctttcatacttcttatttcttaatttttgtattgacttttgaaatagggggcagttgctgtaacagccggagaactattctcaacggtgggccagccatcctcccagacgattttgctcatcataagtacacgtccttcggggttttttacattgacgccgtgatagaatatccagtcattaccggcatcgtctgtcacaagttgagaattgtgcccaggacctacaaaatctttattcttctcaataactacctcgtgatggttgctgagcataagttcgccttttctattgacataagggccaaacagattcttcgatctgcctacaacagtggtataagtgctcttcaatccttcgcaacaggaacctgtagaggcaaagaggtaatagtaatcaccgtgtttatgcagtagtccggcttcgtagccatttccggctataggaattttgggcgtattgggttggagggcaagaccatcatcggtcagttccactccccacagtccgtgccaactaccccagaagaggtattttcggccattttcttccatataaaatgcgtcaatggaattcataacctcaatttcatcgctgagaaataactttcctgcgtcggtgaaaggaccctcggggcgtaaagaccacgctacgccaataccatttgtgtgttcttcaccccaggaagagttggcgtagtagagcacatatttatcgcctattttacggatatccggtgcccaaatcaattgctggaaagtgggacgagtactgtccgtaaaggctgtgcctacaaactcccagtcaacgaggttggcggagcggtgtatgggcaggttgcgtatatcttcagtagcataaagataaaagtagccgtcgtcagccttgatgattgttggatcgggcagactgtagtcaataaccggattgttataggttcttttttcttttacttttttgcctggctgagccatacaaggtatacataaaaagagagtaattaataaggtaactgttttcatatgttttctatttataagattaaaatcagtgcgaaggttttctgcctgcaagattacgcatagtaagcggaaatggctttttccagttattaaaatacttttgtttcctgttaaggggagatttttatcagttatcaaaagtattttatcagttatcaaaaaaggaaaggaataggggtagaacgcctttccgtgttggattcacacagaaactgaacttcgaacctttcagataagtctgaaagagaaagctgaattctatagaaagcgggaatatgttgtaatacttatccggatacgtcttttaaccggggtcttcggacaagtatttgcgcggactcattccatactgccttttgaaagctgtactgaaataactggagtcggggaaaccggtcatggcagctacttccgaaatattgtatctcctgctgcgcaaaagctccgcagcttttttcaggcggatgatacgtatgaaatcattcggtgcctgatctgtcagagctttaagtttattatacagtgaggaacggctcattccgagtttagcgcagagattgttgatagaaaattcgggatcttccatacattcatcaatcaatgcaagaattttctccataaactcgcggtctaatgtattggtgtatgttacatcctgagcaggtggattgtcagaaagtaatgcttctcttatcttcttcctgttggcgagtaggttacgtatccgggcctttaggatggatatgtcgaaaggtttggtgatataatcatctgcaccacagtccagtcctttgataatatcttctttatctgccaaagctgtgagaagaatgaaaggaatatggcttgtttctactgaagttttaatgcggctacatacggcatctccgttgagaacaggcatcatgatatcacatacaatgatatcggggttcaactgtagggccatattcatagcttcttcgccattggaggcctccaccacatgatagtctgttgaaagactgtttttgaggaacaggcgcatatcatcattgtcttcggctacaagaatagtgactttctgtgactgtttttcttgctgctccgcttcgcgggggatgacctggacttttggataatcgcttccctgatattcggttagtttgttgccgcgcataaaatactggtctccttttggaaaagtcagtctaaattctgttcctataccttctttactactgaaggatatttctcctttatgcagtttcactaactttttagtcagtaacagcccgataccgctacctgtttcttttgagttgatggcatttttagcccggaaaaaactcttgaatagatgtttttgttcggatgccggaataccaatgccggtgtccgacacaataagagaccagtttttatcatcctgacagaccttgatgtggacttgtccgccttctttcgtgtatttgatggcattggagaggatgttattaactattttatccatcttctcgcggtcaaaccatacgctaagcgagtcgaaatcgatatcgtatgtcagatagatttgcttgtgcttagcttcgacattaaagaaagatatcttttcctgtatgtattccgccagctcattggggctcacaatgagtcgcaatgccgaaagatctgccttttcgaaatcaagtaattgggaaaccatctgaaacagtttttcagtattctttacggcaatataaagagaggttttgcctttttcagttagtgcctcactctctccgaggtcatttagaggacctttgattagagacaccggagtacgaatgtcatgggctacattaacaaagaaacgtatcttttcttttgaataccgtttgtccatcttgtttttggcatactgaataatgaaccgcagcaatattgcaaacagaagcagataaactgcccaggcccaacccgactcccagtaaggtcgggcgacttcaatgtccaactccctttcgtcaatgatttccttattgtctttgtttaatgctctgagtctgaatgtgtattttccgggattgatattggtatagctgatgatattattttcgggtgcagcataccattcattatcaaaaccttcgagtttatagacataagaaatcaagtgctgatggtggaaattgacggaagaaaaggcaaaggagaaagagttctggtcgtaggccagtgaaaaggcagaggtttcgttgatggcctgtttcagcggtgaaccttcatcttttgcctttactgagttgtagaataacttgaaatcggtgataatcagcttggattccagttgaatatcggtttcttgctgggcggagaactcaacggcgccatctgttgttccaaataccagattaccatttttacgcttacaggcgatgtggtagctgtattcgaggttgttcaaaccgatatattcgccaatacttaccacttttcttgttttgagatctatataagatattcccttgtttgtagtaaaccaaaggcggttccagtcatcgagcttcatactatgaatgtagtttgatttgagcccttctttttcagtataagaggtggaggtttcggactcaagattgtagcaaatgattccgttcccttctgtactcatccagatttctttattggaaacaggagcaatattacggattgcacgattctgtatgcgctgaccgatatggaggtattctttatagtggtgggtgttcttattaaatactgccaggctattggctgtaccgcaaagcagaatactgtcattgagaggttttatatcgcctatagcttcgatgctgtgataattgaaagatttggtgcggagattatattggatcatacttttgtcgagactgcctaaccataggttctcatcatcggcatacatggcatagatgtgataggcatcaaatgtcccggaggcattggctcctttttgatgcaagagggagtgtatcttaccactttgtttatctatgcggaatgcgcctacaccgtatcctcccgtccagatattgccatctttgtcttcacagaaacatagaataacagctttattctcctggttgtcgaggaaatgtttccatctttgtttccgggtgtcataaacactgattccgttattggttccataccacagatcgccgtcggaatcttcgaaaataacattcacatgattgttgattagcgaattgggttctcggtattcgtgacgcgtacgtatgatttccggcgaaaacgggtcaataatggtaattccgttagtataggtggctatccagaggcaactggcattatccacgtagatatcataaacggtatttcctcttagaccgtctttcacatcatcgttggccacataggaactgaccagcttgtgggtttgagtatccaccacataaacaccggatccatcagtaccaaccagaatatgatggtctgccaaacattttatagcccggatggggacattgggaatgattgggttcaatgatatgcgcaggttgcgtttagaatcaagcatgaagacacttttggactcggtaccgatgtagaggtactcttcatgacataacatggttgttaccggcccggaagattcgggcagggcgttcttttcgatgattgtataatcgtcgggtattttttcctttatcttatagataccttcattagaagctacataataggtatggctgttttgttgggttacaacatatgtgtttttatctttaaaaacgcgtacgaaccggagttcttggcggggggtataagtgtacaatcccatattcgaacatatccatagtcggttagcttcatcgaagaacacggaagagataatgtgactgtcggaatgcaggtcttttcggatgtccagcatacactcaaaatcatctatgtttttgttatatctaaaaacttttccggtatagagtacaatccaaatgccaccatcccggtctttcaccatctttgtggaagggaaatagatttcttcgatggtgtcctgaatactgagtttgtagttgcgtatctctgatccgtcataacggttaatgcccatgtaggtcacaaaccacatgaatccggtagtgtctttctcaatctggaatacacggttgctactcaatccgttttctgtatttatataacggtaagagaaggaataaacgtgaagagaagtacaaagtagtataagtaagagtgtttttctgtttttcatgtttagctaatataagtagagctgatttgaaaacaaagttataaaacattcggcatgaatgattttctcttatatcgaattccttgaaattaacaagtattataactggcaaaaatgcaataacatccatttaccgaagttttaacttgaagggaaaagtgtactttattcttggtttgtccgcttttatgcggacacttgtccggaaatgaacatagcttgaaatcgtatattcgttgataatcagtgttttattgttttggcacgccaattgactatatatagtcgaaggcggttgataaagacttcctctcaaaaccaagaagtaataacaataaaaaaataacgattatgaaaacgaacttaatttctaaagcagttgtaatgttagcagtagtaatggccagtgtaatgaatttctctgcaagtgcaagtaatcctacccagtacgtaaagaacgaagagatgaccggcgagttgataaccgctaagactatctttaagaatgaagacggtcacttgttccgccacctccgttatacttacacttatgataacgaaaatcgtgtgaccagtaaagaagcctccaaatgggacagctcacaagaggcttgggttccttatttcaagatggatatttcttataccaatagtgaagttgaacttagttatgcccgttggaactccaagagtaacgcttacgatagcaatattcaaaagagtttttatgaactgaacgatgctgacgcaactttgatgctggcaagcactaaataactatatcaatcgcatacaggatgagggagacttgaacggatctcccttattttattatgcctagtttactatttatgacgttgatgtattgtttttgcatcgtttccggtaataaagattgtcttataaaatctgaccagctttgttcggctttcgcgaattttttaaatagattgtctatgattttatcttcaattcccgaagcggtaatagctataataaaatccttcttttttattttacttttctttccattcaaggtcagtgccagttcttccgtgtcttcaggcataactaatactgtagaaagcatatcataagccggagttaaaacatagtttcctttactctggctatataaagaaaagttcttcaggtgcatgtcagcattccctgtaatccatgaaaatatcacttgttcccaaaagttgatgaggtctaattttggggtggaggaatatttctgtatcagttttgctatctgttcataagaacctttatacttgtattcagttaatcgttcggctaattggcacatgtcttccatagggagcttcgtcccgttttcacgtctgtcaatgcgtcgtgttatgtaacaaagttcgccatcctgaaaccgtatcaaagagtgtggcactactttgattctgactatttcagccaaatgcatagtaagatcttccaattccggaaggtaaggatataaatcagtttgtggtttcagtatgtatcgtccccagagaccgacgattgtaaaacgttccggttcgttcctttctcctttgtgaatgtctaaagataactttgcctgtactcctgttaatgtggtttggcttcggatcacctgttccgctaagtcggctaattgattcctgacgtatgggaggataggaggtactttcgtaccaaatattttttgagagcaagccggatggaaatcgcggtctccttctcttaattttttatagcaatacaaacattttcccatattattcctcggtttgattaggtatgatacttactgcgccaatacaatctctacaacatgcaagtaatagagacattctgtcccgttgattaattttccagcttttttccgctatattcagtaaccagccttcggggattaatccgtcaaaaaaaggaaatagaactttatcctgataaggtttatcggttagcggcatagtcagactgattgcttccgcgtgagcagattccagaaaatctttatcatacaaaaatgtatatccgttttcatcttctgtcaatgttcctgccttataatcgtgcagatagactgatgctcgcttcataattctgcatttttaggcattggaacggcacctacttccattccaaaaagattcaatacttgattgactttatccaatcttaaagtctgtttaccttgctctaattcgcggataaagcggagccctacaccggacttttctgataaatcaacttgtgtaagttcatactgcttacgcatctcttttacgtattttgctaaagccatatattccatattatacccgtttgggtacaaatataataattatcttcttgtttataccatatcgggtataaatagtttgtctttatatcttgattatacccactaaggtatagaataagtattcatgattcatttgcatttgcttttttattatttccatacctatcgtccgcttttgtgcggacacttgtccggaaatgaacatcgtttaaatttgaatatttgttgataatcagtgatttactgttttggcacgccaattgactatatatagtcgaaggcggttgacaaagacttcctctcgaaaatcaagagtaataacaataaaaaaataacgattatgaaaacgaacttaatttctaaagcagttgtaatgttagcagtagtaatggccagtgtaatgaatttctctgcaagtgcaagtaatcctaaccagtacgtaaagaatgaagagatgaccggcgagctgataaccgctaggactatctttaagaacgaagacggtcacttgttccgccacctccgttacacttatacttacgatacagaaaatcgtgtgaccagcaaagaagccgctaaatgggatagtacacaagaagcttgggttccttatttcaagatggatgtttcttataccaatagtgaagttgaacttagctatgcccgttggaactccaaaagtaacgcttacgatagcaatattcaaaagagcttttacgaactgaacgatgctgacgcaactttgatgctggcaagtactaaataaagatataggcaccactgaaagccggatacggagaatttatttctctggcatccggttttttcgttattggattgtggagatagcgggttaagtctcacatctgtaagtctgaatttcattaggtggagcggatagcgaatgtactgttatgcgtgattggtgtactgttcttttatcaggtaatattcttttgtgcgttgtatcaatggattccgtttgtacgtctatctcttcttccggtatttctattactgatattggtagacagatgctattggctacacagttcccgtcagtactgcaaaagctgagataggcgactaactcatcatcctgccagtcttccgggagctgtagtccggcatgacagtcagagcgcagggctgcttctgtatcatagacagccgcttccctgtctttgttatataccagtaccatcacaatatctgttctctctgcattccccataccactattatctttccagttgaaagtcatttgatgattgctgacggtggctgccccttcaaatatcggcatcagggttcccatagaaaccaatgcccggtcaaagtctattttgatttcttttccactgccagtcacggctcttttcagtgtgtaggacatagcggagttgaacgcggatttctcctgtgtaaattccttgtagccaatacgtatgaaaggttttatagctttcaggaagctgaatgccgtggcgaatttaccgcgttgttcctgttgtttcggtgtgcgcggattgctgactttggcggcccgtgcacgtatatagtagtttgatttccagcggaaccctactatcggtcccactttaccggagaaacctccgagaatgccctggttgataattcccatgatatc

SEQ ID NO: 6439 - DNA, 13180 bp, Unknown
  gut microbiota DNA sequence
tgatataataacagttctaccggagatgattgaaggctttttcaattgctccattatgaaacgtgctcagaataaagggcttgcagaaatacatattcataatttacgtgattatactgaagataaatatcgacgggtggatgattatccttttggcggttttgccggaatggtgatgaaaatagagcctatagagcgctgtatcaatgccttgaaggcagaacgggagtatgatgaagtcatttttacgactcctgatggtgggcagttcaatcagccaatggccaatacactttcacttgcccagaaccttattatcctttgcgggcattttaaaggtatcgattatcgtattcgcgagcatctgatcactaaagaaatcagtatcggagactatgtgctgaccggtggagagctggcggcagcagtgatggcggatgctattgtccgcattatccccggtgttatttccgatgagcaatcagccttgtccgactcatttcaggataatcttttggctgctccggtctatacaagacctgccgattacaatggttggaaagttccggaaattttattgtccgggcatgaggctaagattaaggaatgggagttgcaacagtctttggaacggacgcgcagactccgcccggatttgctgggagaggaataaatcagttgtataaaaatagaaaaaggacattcgtaatgaatgtccttttttgtgtaaaacaggtgcgaatgatattcacttgttattagttatacctcaagcgcaccgataatttctttcacagacttatatccgtgtctatcgagatagtcgtttataccttccgctactttaattgtaattgccggatcgatgaaatttgccgtaccgatttggatggctgaagctccggcaagcataaattccactgcgtctttccaattcatgatgcctcctaaacctatgacaggtatttttaccgcatgagcaacttgccataccatgcggagtgcgattggttttactgctgcgccggacataccacctgttacggtagagagtataggacgcctgcgttccgcgtctatagccattccaagcagtgtattaattaatgaaacgctgtctgcaccgccattttctactgcacgggctatttcagcgatgcttgtcacattgggagacagctttacgataagtgtctttttgtaagctgcacgcacagctttcaccacttcttcggctccttttgcagtgacgccaaaagccattccaccttgcttcacattagggcaagagatattcaattcaatggcaggaattttgtcaagttcgttaatggcttccgctgtttttacataatcttctatggcagaacccgaaacatttacaatcatattggtttcgatgtccttaatacgcggatatatctgttcaacaaagtaatttactcccttattttgcagtcccacagcgtttaacatacctgacggagtttctgccatacgcggatatgggttaccttcacgtttgtgaagagtcgtaccctttacaattataccacctattcgcgtaatatcaatgaaatcggcaaactcttcaccatagccaaatgtaccggaagccgtcatcaccggattcttcatttgtaattctccaatgtttacacttaaatctgccataatagtttgtttatattaaaaaccggaccttctttacatacacataaatgcccttccgttgtattttccacacaacagaggcaagcgcctataccacacgccattgtattttccaatgatacttcacaagctatatctttacttttggcatatttagccaccgccatcatcataggcttaggaccacaagtgtaaatctgctcgaattgcaccttattcaatatggaatgttgtgtcacatatcctttttcgccatgactgccgtcctcggtagtcgtatatacatcaccataagctgcaaactgctccagttgcagcaagtccttattgcttcttgctcccagaaggaacgtcggtttactaccgtttttagctaattgctcgcccagataaagcatgggagctgtaccaacacctccacctactaacagaagcttatcagaagccttttcaggcattgtgaagccatttcccaaaggaagtactacgttgaccgtgtctccggcttttgcttcgcctaattgcctcgttccgtctccaatcagttggatcagaaaccatacttcattgcgttgtctatctacataattaatggaaatggggcggcgcaagaaagtagttggagatccgtccacacgtatttccgcaaattgtcccggaagcatatccggaagcggagacggagacgtcagtttcaatagcacataattagcgtgcagtcggacgttctcagtcactgtcaaatctaaaatgtattttttcattatcctatataaagaggtgaattttatcttcagggtacaaagataatgcaaatcgaatgcagaactttcatgcttgcatgaaaaagttctgctgagatgcttatcttatccaaagatacgggaaattgtgcaaatagtcgtttatgagtcttacttttcaggtttaaacgtttcgtacgtattatcgtcgaagaaaattcttatttcagtgatttttctgggaggcctttctttatagataatctcctgttttacaatctctttagtggcatttataggcgtttctaatgcgatttccttgcgattttcggccgaacctgtctctttggacggatttacggaattctcagcgaataatggatagtcgaatccactctcgatagaagagtcagaatcggaaggcgtattactcatttcaccttgtccggtaagtaaccattccaaatttatatcattatatctttgatgtagacgaagaataacttctgtacttggatacttattacgcgggcctaaaatatgtgagatggtggcttgagctacaccaatactttcggcaaatgcgcctgcggttaatttttcccgatccatgatcattttgaacctatcttttatgctcataactgttgcgatataggtgatgtttacaattgtattgataatcttttggattacaaaagtaaaaaaatgaagttacaaaagcaaattaaaaatgtgaattctttcatattacaattgtgtcctcattatttcaaatgttatatatacaaatgtgatgatatatattacctagattttaggcccatatctgtactttaacaaaactatgtatattattggttattatgtatataagtttaagttttttctgtatcatatcctatattacaattgttttctcattgatttctctatttatgaactgatagatcatataaatggctatatttatattgattattagaaatttaattgttatttcaatcctcgttaacccctatcctattacctttgttattttatcattacttcattaaaaatagtcttattacaattgtatattatatcttttaattgcgtttgttatatgtataattgttatatattcaattgtgaatatagtgatattacgtttttaatatttcatagttgaaatagcaactatttccttttctaattgcatttattcttgatgatagattcgatattacagaaagaatttgttacactaaaataagaagagcccaattgatatgttctaaagtcttcgtaattgtaaatccttgctgtatttctgtataaatgatcgtgaacttggaatttcttaattctcaggagcttattttgagtgtatttaattgtaatacagtgtattataccctattttttagttttaaaattcttttattctagaaaaacaacccctttttaagtgagaaatgacataatgatagtgaaaatggcatttacttctctattattgctgatatagttaacaagtataatctcctctaaaataaggaatagacgatcatttccattgatctgctgcccgctttctaaatataattttccttttttcttagaaaaagtacattgttttcctataaaaatatgcttgctttactcgggacaggagattatattatataaaaacagatggtctatttacattaaatagaccatctgtttatatcagataaatggtctgttcactgtatatagaccatctgtttctgcgaatatgctgtatgtatttcagatacccttccacactctattacctatgaacagtacgtttgggaacagtggaagggggtgaaggaaaagctaaatttcttgtttaatgaagagtgtatagaagaaaaagctattaatgcaggatcttgaagaccagttcgcgaagaatatccccgtcacttaaagatggatttcccactcctttagattttgcatctgcatatcgtatttctccgataatttgcatggtctttactccattatatcgacgcatagctgcgagatagtctttggcctgccagggggtgcgtagtcccaacatgttggctatgccttgctccgatttttcaggggcataataggccaacatcaagttagaaaagaatccaaaaagtaaagataaagtcatttgaatagggtttgttttcggattttcttcaaaatattttattatcttattagctttcagaacatccttttcaacgagggcactgcgcaattcgaagttgttataatccttactgataccaatgttcttctctatctgttcgggggtaacgcgtgtatgaccttttggaagtgtaatgatcagtttttccagctctcctgtgaggcgactgaggtcggcgccaacgaaatcggccagcatggcagtggctttaggttccacgtcgatacctttgcgtttcatataagaagtgatgaatgcaggcagttgcgcatccttcacttttttagattcaaacaggacaccagtcttttcgatttcggcagccagcttctttcttcgatccagtacgccatgtttatggcatattactaatatggtagaaagcagcggtttttggaggtaataagaaagttcctccatattacggatattctgcgcttcctttaccaccaccacctgatgctcggacatcatcggataacgcttggcggcattaataacagtagctatatccacatctgccccgtatacaacggtcaggttgaactccttttccgtttcggtcagaatattgtctgttatatagtcggcaatgagatcgatgtaatagggttcctcgcccatgagataatagacgggacggtattgcttcgctctcagttcctttaagatgtcatcacacgtgatttcctgttttgccatattcgtttttaccagtcgaatttcagatgttttacggttttcttctcgtcaataatcatacgtagggatgcgatgccgatttcaacgtgctcggttacgtagttttgggtaaccagattatcgcttttatcggtttttactccttcaggaatcatcggctggtcagaaaccagtaaaatggctccggtaggaatgtgattggcaaaaccgcagctgaagagagtcgctgtttccatatccacggccatggcacgggttttcttcagatattccttgaattcctcgtcatgctcccaaatgcggcggttggtagtgtatacggtacctgtccaatagtcgcgggcatggtcgcggatggatgaagaaacggcacgttgcaacataaatgccggtagcgccggtacttcgggcgggaagtagtcattggaagttccctcgccacggatggcggcgataggaaggatgagatcccctattctgtttttcttatcgataccaccgcacttgcccaggaacaggcaggctttgggctgtatagcacttagtaaatccatgataattgcagcgttagggcttcccataccaaagttgataatggtcatgccttctgctgaagcagacgtcatattagcgtctttaccaagaacgggcacattgaacttctccgcaaaaatatccacatacttgttgaagttagtcaacagaatatactctccaaagtcctcaagcttacgttttgtgtaacgaggcagccagttagctacgatttcttgctttgttttcataagatttcattaaatttgttccctaaatactttcagggagcgattatttaactcacaaaagtacaataaaaaagtagaattcggaaatttgttaatcacttatcacatatcaatatgttatcgttaaacttacctgtatttgatgctaaagtcgtgaaccgtgaagggaaacctgctattttcgacgtgatacggcgccgatatgtagcactgacgcccgaagaatgggtacgccagcatttcgtacattttctgctgaaccataaaggatatccgcagacattgatggcgaacgaggtacaggtacagctcaacggaacgaagaaacgttgtgacacagtgctttaccgtcgtgacctcacggcacggatgattgtggagtataaagcgccggacatagagattacgcaagcggtgttcgaccagattacacgctacaatatggtgctgaaagtagattacttggtagtgagtaatggaatgcagcactattgctgccggatggattacgagcggaacagttatacttttcttccggatattcctgattatcagacgttataatatcctctaaaaagggctacaccctttaccccggatgactacaccctttgggggatatggtgtagccatgtgaggcaaagggtgtagcccttttcaatgagactaatcaggatctaaatcaatgaacccaatcagggtctaaaccttctcagtcttttcttctatctgcttctttcccaatttttcctgtatcttctgcatcaactcatagaaattaggaatataaactgtggcaagcagtgtattcagtgccataccaaacacgacagcagctcctagtgcaatacggctttccgctcctgcacccgtagcaaacagcaacggcatcacaccgaatacaaatgccagggatgtcatcaggataggccgcaagcggatatgccctgcctggaatgccgcatcacgaatggagttgccttgtgcacggaaatcgcgggcgaactctacaatcagaataccattctttgccgacagtgccacaagcaggataataccgatttgtgtatagatgctgactggtgttcccatgatgagacagccaatcatcgctcccaacaatgctaccggaagcccgatgaccgcagctaccgggctcgtccaactctcatactgtgctgcaagtaccaggaaggcaacgagtaatgccattacaaacacaacggttgtcgtcgttcccgcctgcgtttcctgataagctactgacgtccattcataaccaaattcattgcccagttgctccttaaagagtgcctccatttgctgtatcgcctctccggaactgcttcccggggctacgttgcaagtgacggaggcagtggaatacatattgtaacggttgatctggtccattcccaactgttcctctacccgcataaaggctgaaaatggtaccatctctcccgatgcattctgtacactcaacttcagtacatcgtcaatgatccgttgggcgcgatcccgtgcaccgagttttacctgataaatacggccgaactcaacgaaatcgttcacataagcagctcccatgtagtaacctaaggaagtgaagacactgttcagcggaatacccatcaattgcactttatcccggtcgatgttcaggaaatactggggcacattagcctggtactgactgctgacggatgccaatgcaggtttggtgtgataggttgccatcagcgtctccacggcatgttgcatttctgtggcaccgaggttattacgatcttccacttgtagctgtagaccgcccgtagcaccgagtccgggaatggcagggggcaccatggcaaaaacttctgcttcctgaattccataagcctgcgcattgaaacgatttactacagactgggccgtatgttcctttcctttacgttcgtcccagttcttcaagatgacgaaataggtgccggaattactctgttccccgcctcccatgacagagaagccggatatgccgatataatttttcacttcgggatagctgttgaggatttcattgatctcacgtccgacagcttctgtacgttccagacttgaagcaggcggcaattgcaccacggcaaggaaatacccgtcatcttcttcgggaataaaggtactgggccacttcataaacaggatcacggcgagtgccgtaaatccggcataagacaacagtgcagcagcaggacgccggagcaaccaacccacggttttatcatatatcccttgtgtcttgtcgtacacaaagttgaagccccggaaaagtggcgactgtgcaggttttgtgggctgtaatatcaaggcacacaatgcaggagtcagtgtcagcgagttgaaaccgcttagcacggtactggcagcaatagtcagcgcaaactgcttataaagctgtccggagataccgctgacgagcattgtcggaataaatacggcaagcaacaccagcactacgcccacaattgggccggtgatctctcccatcgcttgaatgaccgcctgtcgggcactgtactgccctgtatcaagcaaacgtgtggagttttccaccaccacaatggcgtcatccaccacaatggccacggcaagtatcagtccgaacagcgtcagtgtattgatggagaatccgaagagcgccatcactgccagagtaccgataagtgatacgggaatggtgatacatggaatgataaccgcccgccagttctgtaggaaaaggaagatgacaagtaccacaagcagggttgtttccaggaaagttaccagcacttcgtctactgaagcgtggatgacgtccgtcgtatccagggttacactgtaatggatgccgctggggaacgattctgacagttcctgcatcttctctttcacacctttggatacatccagcgaattggaacccggttgctgatagatggcaatggcggcggtaggttgcccgttcagccgggatacgacgctgtaggatgcggagccaaggtcgatgtgagccacatcacggaggcgaagcactctcccgcccgcttctgttcgtaagatgatattgccgaactcttcgggagacgaaagtcgccctttcaccgtcagactgtattgataggcaggggcattgttgccggaagagacattgccgatgttagtgttgtccggagtaggatttcccggcaggggttgtcccacggctccggcactgacttctacattttgtgattgaatggcctggtagacatcggctgccgaaagattacggatacgcagtgctgccgggtccagccagatacgcatggagtagtctcccgctcccatcacattgacagcgcctacacccggtacgcgcgtcaactggtcgacaaggttcagggtggcgtagttgctgaggtatagtccgtcatattccttgttttcggaagtcatggtgaggaacatcacgatgttcgacgactgcttttgaacggttactccctgtaccactaccggggttggtaatgaagcctgtgccacactgacacggttttggacttgtacggttgccatgtcgatatctgttccgacggcaaaagtaatggtgagcgaataggcacccgatgaggaggaattggaggacatataaagcatgccttccactccgtttacttgctgctcgatgggtatacccacggtttgggccactgtctgcgcattggcacccggatagacggcgctgacctgaacggtaggcggcgtaatgtccggatactgcgcaatggggagtatgcccaatgtgaccagtcccgccaccacgatcagcagcgcaagcacggtagcaaagataggacggtttatgaagaattttgagaacatgagcttagtatttagttatttacgattggttatttgctgatgggctttactttcatcccttcccgcactttcatcagtgcccgggtaacgtagcgttcctgtggcgagagtccgccggttatttgtcgcagactgtcgtctatcaactgtcccaccttgatgtggcgatagcgcaccatatcggaatcgttcactacatacacatattttcccaattgatcggtaccgatggacgcgtccggtatcagtattgcctgcgattctttgccgtatggcaaggtgatactgacataaagtccgcttttcagtaaacctttcgggttgtccaggcgggcacgcagattcagagttccggtgctcaggtctacattcggtgcaaagtaatcgagtgtggcaggatacggttgtatgccgtcttcccccaggttaacagtgatttgccggggtagtgtatctttctgctgtgcggttccttgttgcatcagcatggcaagccactggttatcagtgatattgaagtatgtatatagcaggtcatctttatagatcgtggcaagggtgacaggttgcaaacttccccctacataactgcccacatcgacttgattccggctgacagtcccatcaaacggcgcccggactgtgcagtagcccagatttgtgcgtgccgtattcagtgcagcttcggcgttgctgactgccgcttgtgaagtggcaacattcgatttcgactgtaacacctgtatctggcttacagcatcgcttttcacagcttccagcatacgggcatagttgttctgggcatattccaaattggctcgggcggtgttcagttccgcttccgcctgttctacattgtcctggtaaatagtgggttcaatgacaaacaacacctgtcctttccgaactctgcttcccggagcataggcgatggtttgcagggtcccgttcacccgtgccaccaggtcgacggtcttttccgaactcagatagcccggatactctttagtcagtgtgatgtctttcaccaccggactggctacgcttatttccggaacgggcatcgctccgcgcgctgcttcttttttattcccacatcccgccagtaacggaatcagcgtgaggatgatgtacatttcatttttcatatatggttatggtttaggaattattactcagttctctttatatcctcctcccagtgcctggtacaatgacaccagatatagcagtgaactaccctccgcctgtgtcaactggttttcgtacgtcagtagcgaacggagtgcatccagtacattctggaaaggactaagtccctgtttataaagctccagggagagtttcagtgtctcttgtccctgatttcgtacttcccggagggcgacaatctgcttgatggaattccggtaattattcatcgcattgtccgtttcctgtacagcggtaagcacggtttcgttgaagttatgcactgcttcgtccaattgtgcacgtgcctgtttggtggcattcaccagttttgttccgctgaagagtgtccaactgagggttggggcaatttcaaatgtcatacttttccgtcgggtcaggtctttcaaatcccgggcggcatatcctacagatcctttcaggaatacttgtggcagccagtcgcttttgctggctcccaatagtgcggcttgtgcattaaccagtctttcggcttggcgcacatcgggacgacgaagcaataaatcggcaggtaatcctactccaacaggttccatgtagtcgggcaatttcccgattctttccaatgtggggcgtatctcctgcggataagttcccagcagaatagccagcgagttgatgtattggctgattccggattccagttgcggaacagatgcttttgtgctgaaatacactgatttagcctgtgctacatccagtttcgatacaagtcccgtgttgtagcgtacttcggtgatgttgagcacttcttcttgcgtccggcagttatgcattactacctgcagttcctgttgcagttcccgcaggttgatgtaggcagaagctacttgtgcacagagggatacctgtacggagatgtactcttcacggctggcttggaatgtttcccgttgcgcctttacccgttgccggatgcttccgaatatatccagttcccaactggcattgagtgacgcatcataataatgtgtgatggattggggcaattcggtggtgtttccactgctttgctggcggagccatccaccatttaaagaaatagaagggaaaaaaatactgcgctccatcctcaggctggcacgtgcctgctccatacggtctatagcggcaagtacggaatagttttcgccggatgctatgctgataagagagtccagtaccgggtcattgaatgctttccaccactggtcatctaccggtaatatctgtccgctgaataagttatcatctgcggatgccgtggtagaattagcggttcctgtggaagtagggaccgttttagagttcagaatcaccgtattcccccagcctcggggcaatggtttttccagataacggttgccattctgtgccgtgacggcagaacataggcacgataagagcagcacgctgccccaagctttaatcttcataggtttaggttgttttttgtgatacagggttcataacaacctggagctctatttgtttagagaagattggggaggttataatggggttctgacagatggatgtggattggtgtgggtgatctataattgaagaaatgaattaaagattgctggtatccttttgttagtttgctgataatcaattaactgtatttaccgacagcttactgcaagatgtaaaagcatttaccgccgtatgtaacaacctttaccccttattgtaacggcttttacttcggcatgtaacgacctttaccgcgatatgtaaatggagttaccgtgcggggttaacaaagctatcatttggggtaaacagaattttcatgagaggaaacgactgtgcatttataaaatgaagtaagagataatccatacccctacaataatgagtttaattcaacgacttcggtagtgtatatataggaaagaggttgtgtcaaaatgctggcacaacctttttttatgcgcaaagcccagactttcccaagcccg

SEQ ID NO: 6440 - DNA, 5328 bp, Unknown
  gut microbiota DNA sequence
aaaagttcgcgtacccccgagaaataagcctccaaagtagatataagcaaactcttgccaaaacgacgcggacgactcagaaaataatagctgccagtcttcaccaacctgtagataagcgctgtcttatcaatataaaagtatccgtttctacgaatcttttcaaagctctgtatgccaatcggatatattttattactcatggttcgttctccttctcacattaaacgacacaaagataataatgttttgtgatgaacagtgtgacaaaatgaaaaaccttgcgacagatagagcaaatatcaattcaattatttatctttgttagcttttataagttagcatacaaaaaacaataactacaatgaaagaattttttaaatttacgctggccaccatcacaggtattatcgtgtcaagcgtcgtgttgtttttcgtcagcatcctgatactgtttagtatgctgtcctcgtcagagtctgaaactcaggtacgcaaaaactctgtgatgatgctcgacatgagaggtatgctctcagaacggagccaggacaaccctttcgacatcttcctgagcgaagatgaaactacgtacggactggatgacattctttcgtctatccagaaagccaaggaaaatgaaaacatcaagggaatttacttgcaagccggttcaatgggcataggatttgcctctttggaagaaatacgcaaagcgctggctgacttcaaaaccagcggtaaattcgtggtagcttacggtgaccaatactcacaacgcctgtattatctggcaagtgtagcggataaagtgttgctgaatcctcaaggcgcaatcggctggtacggtttggcttctaccccgaccttctacaaagatttattgtcaaagattggcgttgaaatgcaggtattcaaagtaggtacttacaaatcagctgtggaaccattcatttctacagaaatgagtccggccaatcgtgaacaggtaaccgtattcctggatggtatctggggacaaatgctgagtgatatttcagaatcaagaggcgtaagcaaagaaaaactgaacgaggctgccgacaaaatgctgatgttctatcccgccaatgactgcgtggaatatggactagcagatactctagtatacaaaaatgacgtacgtaactacctgaaaacaatggtgggaatagacaaggatgacagtatgccaatattaagcttaaaagacatggtgaacgtgaagaagaacgttccgaaagataagagcggaaatattgtcgctgtgtactacgcatatggagccattgacagcggaagttcgtatgcaggtagtgaagatggaattaattctgataaggtaatccgcgacttgcgcaaactgaaagatgataaggacgtgaaagctgtagtgctgcgtgtgaattctccgggcggtagcgctttcggttcggaacaaatatggtacgctgtcaccgaactgaaaaaagaaaaaccggtgattgtttccatgggtgactatgcagcatctggcggttactatatctcttgcaacgcggacagtattgtagctgatccgactacactgacaggatctatcggtatcttcggaatgttccccaacgtgaaaggattgacggataaaatcggtctgtcattcgatgtagtaaagaccaatacatacgctgacttcggagcaatgggacgtccgctgaatgacggtgagaaggcattgatgcaaaatatggtgaatgagggctatgaactgttcgtgaaacgttgtgcagaaggccggggcatgaccacggatgaaatcaagaagattgccgaagggcgtgtatggacaggcaccaaagccaaagaactgggcttggtagacgaactgggtggactggacaaggctttggaaatagctatcgaaaaggccggactggatgcctacacagtaatgtcttatccgggcaagaaaagtttcttcgatatgctgacggatacgaaacccggtggatatatccaatctcggatactgaaaggcaaagtcggtgaactttacaaccaattcgactggctgaataattttgagaactgcgataaaattcaggcacgcgttccgttcgagttgaacatcaattaaagaaaggagtggatggaagaaccgctggttaagatacactattggctataccccatctcgtggatttacgggatgggggtacgcctaagaaataaactctttgattggggatattaccggtcaaagagttttgacgtacctgtggtatgcgtcggcaacctcgctgtaggcgggacaggcaagacaccacacacggagtatcttatcaagctgttacaacaaacgggaacaaacgttgccatgctgagccgcggatataaacgaaaaagcaaggggtatgtacttgctacggaagaaacggatgtaaagcgcattggtgacgaaccctatcagataaaaaccaaattcccggctatccgggtagctgtagatgagaaccgctgtcacggcattgaacaactgatgaaattggaccaccccaaagtagatgtagtgttactagatgacgcttaccaacaccggtacgtgaaagccgggctgaacattctactgacagatttccacaggcttttttcagacgataccctacttccggcaggacgattacgcgaacctgaaagtggcaaaaacagggcgcacatcgtgatcgtgacaaaatgcccggaagatatcaaacctatagatttcaatatcatcacgaaaagactaaagctgtatccgtatcagcaactttatttttcctcgttccgatatggagcattaacaccgctcttcggagaaaaacgccgaaccctcgcatcactggaaaaagacgaacaagtattactggtaacaggaatcgcttcgcctgtaccgctggtggaaaagctaaaagtgcacacaccgcacgtaaacttatgtcagtttgacgaccatcatgatttcagcagcaaggatttgcaagctataaaagaacgcttcgaacgtctagaaggaaagaagaagctgattatcaccacggaaaaggatgcgacaaggttgcaacaccatccggcactcgccgaaacgttaaagccgtatttgtacattttaccgattgagatagaatttttacaaaatcaacaacatatatttaaccaaaatattattggctatgttagagctcattcaagaaacagcagcttacctgaaaggtaggatgcacacacaacctgagacagcaattatcctcggaaccggtttaggcagtcttgccaccgaaatcaccgagaagtacgaaataaaatatgaggaaattccgaacttccccgtatcgacggtagaaggacatagcggaaaactgatattcggaaaattgggaaacaaggatatcatggcaatgcagggacgtttccattattatgaaggttactcaatgaaggaggtaacgtttccggtacgtgtaatgcgcgaactgggtatcaaaaccctatttgtttcgaatgccagcggtggtacaaatccggattttgaaatcggcgacctgatgattattacagatcacatcaattacttcccggagcacccgttgcgtggcaagaatattccatatggcccgcgtttcccggatatgagtgaagcgtacgataaagagttaattcgtaaggctaatgcaattgcagcggaaaagggtatcaaagtacagcatggtgtatatatcggtacgcaaggtccgacatttgagacaccgtccgaatataaattattccatatcctcggtgccgatgcagtgggtatgtctacagtgccggaagtgattgttgccaatcattgcggtatcaaggtattcggtatttcggtaattaccgaccttggcgtggaaggtaagatcgtagaggtgacacacgaggaagtgcagaaagctgctgatgccgcccagccgaagatgacagaaattatgagagaattgataaacagagcataatcatgagaacagaaatatcaagcctcggtgaattcggcctcatccgccgccttaccgatggtattgaactgaagaatgaatccagccggtacggtgtaggcgatgatgctgccgtactctcctatcctactgaaaaacaagtcttgattaccactgacctgctaatggaaggtgtgcatttcgatttgatttatgtcccgctgaagcacttaggctataaagcggctgtcgtgaacttctccgatatctacgccatgaatggtacgcccaaacagatcaccgtttctctggctctttccaagcgtttctccgtggaagatatggaagagttgtatgcgggcatccgtctggcgtgcgaagaatatgatgtggatatcataggaggcgacacctcttcttctcttacgggactggcaatcagtatcacttgtataggtgaggcagacaaagataaggttgtctaccgaaatggtgcgaaagaaacagatttgatttgcgtaaccggtgatctgggtgccgcatatatgggcttacaattattggaacgcgagaaagtggctttgaaaggtaaggctgatatgcaacctgatttctccggaaaggaatatctgctggaacgtcaattaaaaccggaagctcgccgcgacatcattgagaaactggcggaagaaggtattcaacccacttctatgatggatatttcagatggtctatcttctgaattgttgcatatctgcacgcaaagtaaagtaggctgccgcatttatgaggaacatatccccattgactatcagactgccgtcatggctgaagagttcaatatgaatctgacaacatgcgctcttaatggtggcgaagactacgaactgcttttcaccgttcccattgccgatcacgagaagatttctgaaatggaaggtgtgaagttaataggacacatcactaaaccggaattaggttgtgcactgatcactcgcgatggtcaagagtttgaactgaaagcacaaggatggaatccactgaaagagaaaactaccgagagtgaaggcgaaaaagctggcgaataaagatttgtaagagcagataaagatttgtgagaacaaataaatagctaaattcatttttttcttaaaacataagcgctgatacttagccacataggcaaatatcagcgttttttatctccaaagcgcttgcatagtccaaaagtttcactacctttgcaaccgcaaaagagaaacaatggtgccatagctcagttggtagagcaaaggactgaaaatccttgtgtccccggttcgattcctggtgg

SEQ ID NO: 6441 - DNA, 37448 bp, Unknown
  gut microbiota DNA sequence
tagcgcagccttttaaatccgcgttatccgtgtcatccgcgtctaaaaaataatataccgaatggcgccaatcacttatcaccaaacactaatcacttttgttcttttctttcccgatatgagttatataggagtgatgcaaagagcataactgtctgtgtggcaatgcacttgctgttccactaatgtcagtcgtagtggaacacgagttcagtcctagtgggaagtggcttcagtcctagtgggaagtaccttcagtcctaatgggaactatcttcagtcgtagtgggaaaagagcttatcactgatggattctaagctaaagtaaataacggactataaacaacaagtatctttctgtatgttagcgttaagctaatatctgatagttttttgatacacagttcggatacttgccattggtagctcgttgtttgggcgggctttgcccgctaaattttcattttattgagtacaaacttccctcttttccgtcttctctttacggaatccggttcttctctttttgggatgcttatcctgaactctgtgagaaccctaaatatacaacgatgaaaaacttaatagctacagcaggcactacacttgctatttttctatttgcagtttgcctgtcaactcatgcagaagtgcacctgcctgccatcttctcggatggcatggttatgcagcaacagacccatgccaatctttgggggacggcaactcccaataagaaagtaaccgtccgcactagctgggatggaaaactgtatgcagcaacaacggataaacaaggtgcatggaaactagccgtttccactcccgaagcaggcggaccttatacagttacttttgatgatggaactccgaaagttctgagcaatattctgataggggaattgtggctttgctccggtcaaagcaatatggagatgcctatgaaaggctttaaaaaccagcctgtagagaacgctaatatggatattctccgtagcaggaaccctaagataagactattcacagtgaaacgtacctctacgttcactccgcaaaatgatgtgacaggctcctggaaagaggcaagtccggctacagtgcgcgatttcagtgcgacagcctattacttcgggcggttggtaaatgaaatattggatgttccggtaggcttgatagtggcagcctggggtggttcggcttgcgaagcttggatgactgccgactggttgaaagcttttccggatgcaaagataccccggtcggagacagatatcaaatcaaagaaccgtactccaaccgtactgtataatggtatgttgcacccattgatcggactgaccatgaaaggagtcatctggtatcagggcgaggataactggaatcgtgcccatacctatgcggatatgtttacgacactcattaacggatggcgtaccgaatggaaacaaggtgattttcctttttattactgccagatagctccatacgattatggaattatcacggaacgtggaaaagaagtaatcaatacagcctatctccgcgaagcacaggcgcaagtagagcaccgtgtacccaataccggtatggccgtactgctggatgtagggatggaaaaaggcattcatcctgcccgtaagcaagttgccggtgagcgattggcacttcttgccctgacaaagacttacgggatagaaggagtaaacggtgaaagcccttattataaaagcattgaaataaagaatgacacggtcattgtgagtttcgaacgtgccggcatgtggattagtggtaagaactgttttgaatcgaagaattttgaggtagcgggtgaagataaagtattctatccggctaaagcatggatcgaacgcagcaagatgcttgtaaaaagtgagatggtaccacatcctgttgctgtgcgatatggttttgtgaattatgtggaaggagatgtctattgtgacggtttgccgttaggttctttccgttcggatgactggtgatacgtgtgaaatatgaaaagaatttatctgattatcatcctgattcttgttggcgtgtcggctctttggagccagcatgccaatgttgtttggaatacccccagtcgtaattcttccgaatcaatgccgtgtggaggtggagatatcggtatgaatgtgtgggtagaagagggggatgtattgttttatctgagtcgtagcggtacttttgatgagaataattgtctgctgaaacaggggcgttttcgtatccgcctgtctcccaatccttttaaagaaacaaaagagttccggcaggaattaatgcttaatgacggattcgtagagatttcggcagaaggtacacgaattcaaatttgggcggatgtattccatcccgtagttcatgtagagattgttaatgcccgtcccttgcaggcagaaatcttttatgagaattggagataccgggaccggccgatccggaaaggagaggggcaacaatgctcctacaaatgggctcctccccagggagcagtaacaagtgccgacaccatccgtcccctcccaaactctcaattctccactcttaattctccacttattacgttttatcaccgtaatccggaagagaccgtttttgatgtagcagtatcccagcaaggtatggatacagtcaaatcccggttgatgaatcctttaaagaacctgacgttcggaggatgcctgtcaggtgagaatctggaatatgccggaatctcagatgcggtatatgccggaactgattatcgggcctggaagtttcgttcatcgaaagtatcccgaaaacaacactttttcgttgtactgcatacagatcagacggagacagaagaacagtggatacaagacttacaagtcggtctgaggagaataatgccacatggaaaggtttctatgaaagtgctttcgcaagataagaaacaaacccgccaatggtggaacgctttctggcagcgtagtttcattgtggcagaaggagaggctggggagataacccggaattatactcttttccgctatatgctaggctgtaatgcttatggcaatgttcctaccaagttcaatggtggcttgttcacctttgatcctttacatatagatccgaaacaggcatttactcctgattatcggaaatggggaggtggcacaatgactgcacagaatcaacgtctggtatattggccgatgttgaaaagcggtgattctgacatgatgcctgcccagtttgatttctataaccggatgttgaagaatgccgaattgcgcagccgtgtgtattggcaacacgggggagcctgtttctgcgaacagatagagaatttcggtttacccaatcctgccgaatatggttttaaacgcccggaagggttcgataaaggactggaatacaacgcatggttggaatacgaatgggataccgcactcgaattctgccaaatgatacttgagacgaataattataccgatgcggatatcacttcctatttgcctttgattgaaagttcattgattttctttgatgagcattatcgtatgcttgcttcccgtcgtggacggaaggagttggatggagaaggacacctgattctctttccgggttctgcctgtgaaacctataaaatgactaataatgccagcagcactattgccgcattgcggaccgtgctggaaacttacggacggaagaacgaaatgctggaagtaatcccaccgataccattgcgttatatcgaagtaaaggattctgcgaattccataactatgccggtgctgaaacaaacgattgcccctgctaagagttgggaacgtattaataatgtggagactccgcaactctatcccgtatttccgtggcgtgtttacggcattggcaaagaaaagttggaggttgcccgcaacacctatttctatgatcccgaagcggttaattttcgttcgcatatcggatggaaacaagataatatctgggctgcatgtttaggattggctgaagaatcccgacggcttaatctggctaaattatccaacggcccgcatcgctttccggctttctggggccccggctatgactggacgcctgatcacaactggggagggagcggcatgatagggcttcaggagatgctgttgcagacaaacggagaactgatactcctgtttccggcttggcctctagaatggaatgtgcacttcaaacttcatgcacctggtaaaacaacagtagaggctactttgaaagagggtaaagtgacagatttaaaagtgtcaccggaaagtaggaagaaagatgtggtgataatgattcaagagacaaaatgatgatatgaaactaagaaatatgaataagaacttgtttttaactttgtcagcctttttgtttttattcccattatcagggaaagcgacaggaacttaccgtcccgagacctcagttgccggtttcattcagcttcccggaagcggacggcaggtatatgatttcaatccgggctggcgcttcttcaaaggcgacatatctggagcggaaacagtgaacttcgatgatcgttcatgggaagttgtctccacccctcacactgtggaactaatgcctgctgaggccagtggatgccggaactatcagggacctgtctggtatcgcaagcatttcgtcgttcccgcagagactaaaggtcaacgggtatccatccattttgaagctgcaatggggaaacaaattctttatctgaacggaaaacgtattcaggagcatataggcggttatctgcctttcacactggacttgacaacctatggagtgcaagccggagactcctgcctgcttgctgtttttgtagataacagcgatgataaatcctatcctccgggtaagcgtcagtataccttggatttcacctatcatggaggcatctatcgggatgtatggatgattgccaaatcccctatatccattactgatgccatcgaatcgcagacagttgccggaggtggtgtgtttgttcacttcgatcagatcagtgaaaagagtgcgcaagtctgtgtcaatacggaagtacagaatgaaaatacccgttctgaatctgtgattgtagagacgacactgacagatgctgacggcaaaataatcaggcgcatatccggtaaactctccttgcaatcgggagagaagaaaataatccgtcagcaaatggaagtgaagaatccgaagctatggtcgccggatacaccttatttatatagagtacagtctcgccttaaaaaaggcaatcagtccatagatggcggaatcacccgtgtcggaattcgtctggcggaattccgtggtaaagatggcttttggctgaatggcaaacctttcggtcagttggtgggagccaaccgtcatcaggatttcgcttatgtgggcaatgccttaccaaactcccagcaatggcgtgatgccaagcgtttacgtgatgcaggatgcactattatccgtacagcccattatccgcaggacccgtctttcatggatgcatgtgacgaacttggcctatttgtaattgtcgctacgccggggtggcaatattggaacaaagatctgcaatttggagagcttgtccatcggaatacacgtgaaatgatccgtcgtgaccgcaatcatccttctgttttgatgtgggaacctatcttgaatgaaacccgttacccgcttgatttcgctttgaaggctcttgatattaccaaagaagaatatccgtatccggggcgtccggtagctgctgctgatgtacattcggcaggagtaaaagaacattatgatgtggtttatggttggcccggtgatgatgaaaaggaagacaggccggagcaatgtatcttcactcgtgagttcggggagaatgtggatgactggtatgcccacaataatgataaccgtgcaagccgcagctggggagaacatccgttgctggtgcaggcactttctctggctaagagttatgatgagatgtatcgcactacgggcctgtttatcggtggtgcccagtggcatccgttcgatcaccaacgagggtatcaccctgatccatattggggaggtatttatgatgcttttcgtcagaaaaaatatgcatacgagatgttccgcagtcagtcttcagccagtctgcggcatcctttggctgagtgtggacccatggttttcgttgctcatgaaatgtctcagttctctgataaagatgtagtggttttcagtaattgtgattctgtcagactttctgtctatgatggaacaaagacatggacgaagccggtggttcatgccaaaggtcatctgccgaatgcccctgttgtttttgaaaatgtatgggatttctgggaagctcgcagttatagttatactcagaagaattggcaaaaagtgaatatgattgtagaaggcattataaatgggaaagtagtatgcactcagaagaagatgccttcacggcgttccactaaattgaggctatatgcggatacagggaatgtgaatctggtggcggatggttctgatttcattgtagtggtggctgaggtgactgatgacaatggaaatgtgagacgcctggctaaagagaatatcgtctttaccgtagaaggggaaggagatattattggcgatgctactattggtgcgaatccccgtgcagtggagttcggttctgcccctgtactgattcgttctaccagaaaagccggaaagatcaaagtgaaagcccgtgtgctatttgagggtacacaagctccgacggctgcggagctggagttcgaaagtgttcctgcagaatttcctttttgttatgaggagcgggaaatagcttctgcggctgtgagaacaaggttacaaaaagatacaactgacaagaaaatacagttgacggaagaagaacgccaaaaggtgttggatgaggtagagcgtcagcagacggagttcggaacaaaagaataatctaaaataagggagtgataattttagtcactgttagaaaaagcttatctttggatacattttatatcaactgttgttataaatgaagaaacgatctattctaatactatttctatcggtgatagggcttacaagctttgcctatcccagcatgattgtggaacattacacggccgaacgagggttacctaataatattgtaaactgtactttaaaaggtagcgaaggctttgtctggttcggcacttggtatggcttatgtagttttgacggcactaagtttcgttcgtacgataatcgtgacggattctattcggctgatattcctccacgtaagattcagcgtatcgtagaagataaaaatggttttctttggatcaagaccattgatcgcaaactttatctgtttgataagaagcatgaaagttttcatgcggtttatgacgatgtgaaggaatactctgaaaatattcagattatcaagattcagacaactgcggatggggatgtcctattgctgaccaaggataagagtctgcttcgtgcgcatactgataaagagggcaaaattacaatgaagcaattgcacgattcacgccctaatatcaatcactacgatatgcgtttgaagcataatgtgttatgcgagacttccgaatttatcaattgggtgggtatggattatcagatactttcgttaaggaaaggagcggggttgaaagataagcctgccgatttcattcagaagaagatagccggtagccccgaccagttcacctgtgcatcttataactccagatgcttatggttaggtgaccggaacggacatatttatagtattgatccggaaaatggagtggtcaatcgttatgaaataccgggaatagatcagtcggtcgtaaatttgctggtaacagagacagggttggtctatattactacaggtgaaggagtatatgagtataatatcggttataagcaattgacaaagttgctgctttccatcgacgggagagaaacaggaactatatttatagacaaatatgataaaatttggtttcaggaaggtaataatgcattggtatactatgatcctttaaataaagccaatcgccgctttacatttcctaaacagaattccataggaaattttgaaatgcaagatgccggtgaacagggtatgttttttctgactccgggtggagagattcttttgttcgaccgggagaaactggagatggttcgtctgaatcaatcaaagcctttcgttgatgatgctcccggacaactgttttttcatctattgctggacaaagacgagattctctggttggcttctacagataatggggtgtacagggttaactttcccaagaagcagttccaggtacttaaagaagtgtcaccggtgccggttggtgatgaaaaacctaattcctggaatcaggggatacgcgctctgtatcaggcaaagaatggcgatatctgggcaggaacccgttggcaggccctttatcgccttgatagtaacggacaggtaaagcaggttttctcggaaaagaattatctggtgggagctgtatatcatatcatggaagataaagatgggaatctttggttctctaccaaaggcaatggtcttgtgaaggctgaaccggatatgaattctccgcaaggattacgcttcgtacgttataaaaatgatcctaagaatccgaattcaatcagtagtaatgatgtgtatttcacttatcaggatagccaggggcgtatttgggttggtttgttaggtggtggtctgaatctgatcagtgaagcgaacgggacaattgccttcaagcataagtataatggtttgaagcaatatccgctttatgggctttatatggaagtgcgtacaatgacggaggataatgacggacgtatctgggtaggaacaatggatggtctgatgtcttttgatggtcattttaccaatcccgaagagattcaatttgaaacttaccgccaggtgagtgaacgttcgaatgttgctgacaatgatatttatgtattgtacaaagattccgaatcacaaatctgggtaagcgtatttgggggaggattgaataaactggtacactatgataaagaaaggcgggtacctgtctttaaatcttacggcatccgtgaaggtatgaataatgatgtagtaaaatcaatagtagaagataaagacggaaatctctggtttactacagaaataggattgtcttgtttcaataaagacaccgaacagttccgtaattacgacaggtacgatggattcctgaatgttgagttggaagaaagcagcgcgctccgtactttgagcggtgacttatggcttggttccaggcaaggtattctcacattttcacctaataaactggaaacgcagaatatgaactatgatacgcgcatagtcgacttcaaaatctccaatcgtgatttgcgtagttttcatgaagatcctgtattgaaagaatcgattacatttgccgatgcaatcaggttaaagtataatcagtctatgtttaccattgaatttgctgcgttgaacttctataatcccaatcgtgtgttttatcgatatatccttgaaggatacgaaaaggagtggcattacaatggtaaaaaccgtattgcttcttacacgaatgtgccgcctggatcctatactttccgggtggaaacaatagatgaagccaatccggagctcgtttccaatcgtacattggccatcactattcttccgccctggtggttaagttggtgggctattgtgatttatgtagtcttgggtattatagccctttatttcagtttgcgtctggctttctttatgattaaaatgaagaatgacatctacatcgaacagaaggtttcggaaatgaagatcaagttctttacaaatatttctcatgaactacgtactcctctgactttaataaaaggtccgatacaggaattgagagaacatgagacactttcaccaaaaggtgtgcaatatgtggaactaatggagaagaacactaaccagatgttacaacttgtcaatcagatacttgatttccggaaaatacagaatggaaagatgcgtttgcatgtgtcgttgattgattttaatgagttggtagtctctttccaaaaggaattccgtgttctttccgaagaaaatgaagttagctttactttccagttaccggatgcggctattatgatatgggcggataaggagaagctgagtattgttattcggaacatcatatccaatgccttcaagtttaccccttccggtggcagcatccatgtagttgccggactgacagaagatggggaacactgtttcctgagagtggaagataacgggatcggaatcccccagaataagctgaccgaggtttttgaacgcttctcgcaaggagagaatgccaaaaactcgtattatcagggcacgggtatcgggctggcactttccaaagaaatcgttaatctgcatcatggagtgattcgtgctgaaagccctgaaggaaagggaaccgtgtttattgtagaactattgctcggaaaggaacattatcgcatttcggaagtcgatttttatgtcagtgacactgaaacagctcctgccggagatgtgtcttctactgatatcatggcagaagaagattccgaagaacagacggaaatagatgcttctttgccgaatcttttattggtggaagacaataaagacctctgtcagctgataaaactgcaattagaagacaagtttaatattcatatagccaataatggagtagagggattaaagaaagtccacctgtatcatcccgatatcgtggtcaccgatcagatgatgcctgaaatggatggtttggagatgttgcagtctattcgtaaagatttccagatcagtcatattccggttatcatcctgaccgcaaagaatgatgaaggcgccaagacgaaagcaatcactttgggagctaatgcttacataacgaagccttttagcaaggaatatctgttggcacgcattgatcagttgctatctgagcggctgctcttccgggaacggattcgcctgcaaatggagaatcagaaaacaacggaggaagatagttatgagcaatatcttgtgaagaaggatgtgcagttccttgaaaagatacatcaggtgattgaggagaacatggacgacagcgattttaatatcgatactatagcttctggaataggattaagccgctcggcattctttaagaaattgaagagccttaccggactggcacctgttgacctagttaaagagattcgtttgaataagtctgtcgaattgattaagaacacagacttgagtatctcggagattgcctttgccgtcggatttaaagactcgggttattatagcaagtgcttccggaagaaatataaccagactccccgcgaatatatgagtgaatggcggaaaggagagaaataaccgattacaaaatgttttcttaaccgtcttcttagaaaacctattaagattcgaaagaatgaacaacattaagaaagtattatcagtatggatgctggctacgtgcgtattaccggtggcagcacagtatcctgtcattcccgactcggtgaaaacgagagcggcaaaacaagaagcggagttcgaccggaaatcagatgcggcatggaagaaagcccttccggttgttatggaagaagcacaaaaaggacgtccttataagccgtgggcttccaaaccggaagatttggtgaaaagtaatattccggcttttcccggtgcggaaggcggaggcatgtatactcccggtgggcgtggtggcaaagtgattgtggttacttctttggaagactcagggcccggaactttgcgtgaggcttgtgaaacaggaggtgctcgtgtcattgtgtttaatgtttccggagttatccgtttgaaagcgcctatcagcctgcgtgctccttatgtcacaattgccggacagaccgctccgggagatggtatctgtgttaccggacattcttttctggttgatacgcatgatgtcataatcaggcatatgcgcttccgccgtggtgcgcaggatgtagctttccgtgatgacgcgttgggaggaaatgccgtagggaatatcattatagaccactgttcggccagttggggattggatgagaatatgtctatctaccgccatgtgtataaccggggagcggatggacatggactgaaattgccgactgtaaatatcacgattcagaattcaatattttcggaagcattggatgcctacaatcatgctttcggggctacaattggtgggcataacagtatgttttgccggaatctttttgcttcaaatatcagtcgtaacagctcggtaggtatggacggagactttaactttgtcaataatgttgttttcaactggtggaatcgctccattgacggtggtgataataagagtttctataacattataaataactatttcaagcccggacctatcacaccattggataaaccaatatcttatcgtattctgaagccggaagccggacgtgacaaaagccagccgatgtcctttggtaaggcttatgtaaatggaaatatcgtccatggaaatgcaaaggttacaaaagacaactgggatggtggtgtacaactagccaatgaagtggatgccggaaaatttattccgcagataagggtagatgagcctttcaaaacatctcctgtaactataatggatactcaaaaggcttataacttcgtgttaagtaatgtgggagcgacttttccgaaacgggatgctgttgatacgagagttatcaaaacagtgaagactgggaaagccatttatgtgaaagacgctccggagttcatttctccttatgtgaaaagacgtttgcctgcagactcttataaacaaggtatcattacggacatccgtcaggtaggcggattgcccgagtacaaaggagagcctattgtggactccgatggtgacggtatgcccgatgcgtgggaaatagctaacggattgaacccgaatgatccgagtgatgccgtgaaggattgcaatggagatggttacactaatattgagaaatacatcaacggtatggatacgaagaagaaagtggactggacggatttgaagaacaactacgatacattatccaaacggaaaagtctgctataaaagtatgtgtagaaaataaagtttattgtaatgaatatgcaattgagaacaatccttctgggattattgagtatagggtttgtgcagggatatgcgcaaacctttgctttacaggttaagaatgaaggaattacttacctgaatgatgaacggggaaaccggatacttgatttctcctattgcggctaccatgcttctgggcaggatattccttctgttggcaatgcagtgtttgtaccctggaaggcgggtgataatactgcgcgaatccagcgtgccattgactatgtagcgtcattgactcccaatacttccggtttccgtggagccgtattgctggatcgtggagaattcagcttatccggggaacttcgtatttccgcgtccggcattgttctgcgtggtatggatagagaaaaaactattctgctaaagaaaggtgtagacagaggagcacttatctatatggaaggaatagataatttgaatgcaaaagataccttgcaggttctttcagcttatgtccctgtgaatgaaaggacattacaagttgcctcgggcacttctttaaagaaaggagatcggataatggtgactcgcccttccggtaaggagtggattaccgctttagggtgtgatatctttggaggaggtatcggtgctttaggatggaaggcgggtgatatggacctgacatgggatcggacaatcagcgaagtaaacggtaatcagatcactctggatgcaccattgacggtagcattggatactcaatatggggcttcttctctcattctttatcaatggaacggtcgcattcaggagtgtggaattgaaaatatgacattggtttccgattatgacaggcgttattctaaagatgaagaccattgctggacaggtatttctatcggagaggcggagaactgttgggtgagacaagtgagtttcagacatttttcaggtagtgcggttattgtccagcgcaccggatcaagaattacggttgaggactgtatttcccgggaaccggtatctgaaataggaggaatgcgccgttgtactttccatacattgggacagcagactttgtttcagcgttgttattctgagcagggcattcatgactttgctgccggatattgtgctgccgggcccaatgcctttgtgcaatgcgattcgtatgaatcgttgggattcagcggatctattgattcttgggcgtgcggattgctgtttgatgtggttaatatcgacggtcataatcttacatttaagaatctgggacaagataagaatggagcaggttggaatacggcgaatagtttgttctggcaatgtacagccgctgagatagagtgttatactccggcaaaagatgcgaaaaaccgcgcgtatgggtgttgggcacaattctccggcgacggtgaatgggcggaatcgaataatcatgtgcaacctcgtagcatcttttatgcccagttggaagagcgtttgcagaagaaatgtgctgaacgtgcccgtattctgcctagaaatacaagtgcaacgagcagtcctactgtagaggtggcgatggaacttgccaaagaagcttatgagccacgtctgacgttggaacattggattgaggagagggaatttgctccttcggtgtcagttgccggtttgaaatctattgaggatattaaagagaaaaagacaattcagggcgaaacgcgagacttaccggaaatggttattgcaaatgggcgtattcaaatggatggggccttgttggtgggaaaaagccgcactactccttggtggaatggtaagctcagaaccaactatttgaagaaagcaagtccggcaattacccgctttgttcccggtcgtgaagggctgggactgacagaccgtatagattcagtcgttaactttatgaagcggaataatatactcgtatttgaccagaattacggactttggtatgatcgtcgccgggatgaccatgaacgcatccgtcggcgcgatggagatgtatggggccccttttatgaacaaccttttggacgtagcggtcaaggtattgcctgggaaggcttgagtaaatatgatctgaaccgtcccaatgcatggtattgggcacgtctgaaagaatttgcggaaaagggaggtagagaaggattgctcttgttccatgagaactatttccagcataatattttggaagccggtgcacattgggtggactgtccttggagaagcagtaataatattaatgaaacggactttccggaacctgttccttttgcaggcgataaacgcatttttgttgcggatatgttttatgatatcaatcatcctgtgcgacgtgagctgcatagacgatacattcgtcagtgcttggacaactttgccgataatctgaatgtgattcaattgaccagtgcagagtttaccggtcctctacattttgtacagttctggttggatgtaatagctgaatgggaggtggaaaccggtaagaaggctaaagtcgctttaagtacaacgaaagatgtgcaggatgctattcttgctgatccaaagcgggcagctgtagtagatattattgatatccgatattggcattataaaacagatggcatttttgctccggaagggggaaagaatatggctccccgacaacatatgcgcaagatgaaagtcgggaaagttacttttactgaagcgtataaagcggtaaatgaatatcgacgtaagtttccggagaaagcagtcactttctatgcacagaattatccggctatgggatgggccgttttcatggctggtggttcttgtccggtaattccttgcaaagataaggcgtttctgaaagatgctgcagtgatggaagtagaagaaactgactctgaggattataagaaaatggtaaaatctggtatcggaagtatcatttattccaattcgggggtagaggtgcctgtgcaattgtcatctgggaaatacattttaagatatattcatcctgattcgggagaaatggaagtgattagtaaatcattgaagattaacaatgtatatactctgaaagtgcctgatggaaaagaaggtgtttattggttccatagattatagaacagaaaatcccgttgaatgaccttcaacgggattttctctttttgctggtaatatctaataaaaaagtgttataaaacatagtacttgttttttcaatccacagatcagattttacctagagtttgggttgattccccatagctttgcaacatcaaaataactgaattaatgctatgatggaacagactaataattcaaccgaaactttacttgcttcttttcaagcaggaaatatggctgctttttctcagctgtatgatttgcacgtacgtattctttttaattatggtttgaagttgacccttgataaggagttgctgaaagattgtattcatgatattttcgtgaaactttatgtgaagaaggatgaattagggactattgataatttgaaatcctatttattcatttcattgaagaataaactttgtgatgagcttcgcaggcgtatgtatatgtccgacacggccgtagaagaggtgaatgcgatatcatctatggatgtggaagaagattatgtggaggaggaacaacagaagaatgatttctcattggtgaaacatttattggggcagttatctccccgtcagcgcgaagcgcttacattatattatatagaagaaaggaaatatgaagatatttgtgagataatggatatgaattaccagtctgtacgtaacttgatgcaccggggattgacgaagttacgtgctctggtgagttaatttaggtaaaagggttttccgattgagtacaggttcagggtaacagcgtcctatctttgtaaacgtttaaaataggatgcaaatatggtttctaaggtaagggattttttgatggatgaaggtttcattgaatatgtactgggtgtatcttcgaagctggtttctcaatgggaagcttatttcaagatacatccggaatatatggctgctgtagaggaggctaaagctgttttactggctccggctgacgtggattgtgaattttcggaagatgaatatgatgatttaaaggataggattattagtagtatatttgatgtacattgaaacaagttaaatatgtttttatgaattttaatctcaatcgtatatatagaatggtgagttcatcctctttggggagtatttgacattgtaactttatgcagtaatcctgttttagtgtgtggtaacagtacagctgattacatgatactacaaagcaaatgcagtgttgttgtatgatagatgcgacattactgcgtatatgtagtaataccgcaagggtaaaaagaaaactttattagtttatggtaatgcttcagttcattcgttggatgtttttatatgtacgataatggcaccatttgctccgttagaaccatagatactggcatctttcatcacttccacgtagtctacatcgtttaagttaaggccgtcgaacgaggaaactatcacattatctatcacatagacaggggtggaactagcagtaaaacttctgttaccgcgaatattgatattcatagtcttgccttgtgtaccttgtcccgtgattgatagtcctggaacccgtccttgtagtgcttcgataacattgtgataaccgcttttccgaagttcttcgcccgatatgatattacttacacctgtatgttcccgtcttctgatatatccgaagcccaaatctatcagttccgcatcttcttgggactggatgttttcttcatcagccaaacgaattttcatacttttttttccgtcaacaggtactaggtataattttttcttaattaggatctttaaggtatcattcggaaaaacatttgttagtccgaattgtcctttcttattggttaatgcgtagtctttcgaagtatgtacgtatatgtgggcacctttgatgggctttcctaaaccatctgtcagcaatccgttaaatgctacttttctttgggcgcttatgtccaatgaatatgaaaataaaaatgcaataataagtagtagtgtgttatttttcattttatttaattctttagataagggtacccttttcaagtacccttattgattttaattaataatgcaatgcaaattatcttactttactattcgactagaccactgccggccgttgaaccatatccattgtcaccatattcttctttattcaagatggtagacaggaattcataagaaatcgggcgattataatgataaggtttaaatgattgggcagcacgtttgttgtattgatctaaacgggattcgaatgcattgtgacgtttcagtaaagaccagcgagagaattcgccacacaattcgcgggcatattcatcaaaaatatcctcttcagtagcagttgtaagtttccatgaagattcattggcttgatcgcgtgcggcacgtttacgaagtacattcagatattcggcggctttcgttccatttcccaattgctgctctgcttctgctgccaacaaataaacttcagccattcgcataatgaacatgtctccagtctttatttgtaggttactaccgtagaataccccattatatgaccagttgaacttaatcagacttggacaggcggatgaggaggtcagtccatttcctatagccggaggattggcagcttcacttccattgtctacattaccatacggtaagtcgttagaaccaaataagtcatctaaaacaactacagcatagagacatttacttttatccttcagtggtttatgaacaaacacggtgttgaaacgattgtcatctggagcaacagggtatggtatggcataaacctttgtagaaccagcgaaacctggcttcttggcttcttccgcactcttccctatggataataatttgttaggatctcctgagtaatcacctttaggccataccttggctggatattggttgcctgcgccattagaagaagctatggcattgcaatcagcatacggataaagcgttgaatccggatgaactgtctcatctacttgaatatcgtattttgtacagatactcttattcaatttctttactcctgcagagtagggaacccaaccgcactgaaccatactccattcgcaatatgcatattggaacgagtattcccaacgtttgtcccattcgggattgaagcaataaagcagatatttggacggcatccagttttgactgtttaggcgtccgtagaagtaacctttatcgccaggcttatgattgctgttgaagaattcactataagagcctccgcaagaataggctgataatttattgcctttaccgatatattgccaggcagtactgcttgcatccggaccggcggcaatcattaatgcttccttattggttctattattggcgtcggcccacatatcggcaatatcggtgtagagataagcaccataggaagaagcgttttcaatgaggtctttggcagtttcggcagctaatttccaataggtatttgcatctccatatttactttgtccaagaccggcacgttgtgcataaacacgggctagtaaacctttggctgatttttttgtgaaacgtgctctatttccttgataaggttctactcctaaatctggaattgcttctgtcaagtccttgataatatggtcgtagatgtctctttctgaagaacgttctggatataagtccacatcacccgttataccagcactactcttgagatttaaagtgacgggtccatagtggcatactaagattgaataatataaggcacgcagtgtcttagactctgctaccagtagtttgattgtttcagggtcgccatcatttaagttagtagattcgttgattacagagttacaatttgtaatcatcgaataacactgtttccacactttttggaatgtattgtagttggatgttgggtcttcgtaattaaataactgcttatagttggttccgtttgatttagcaacccacaagtcggtaccaccttctgccaggtatagccagtccatggcagtatatagttcatcgtttaagcaagaatagctataactgtgcaatccactccatgcatcgaaagaggtaagagacgcatcaccagcactaggattaaactcatccaaatcgcacgcattaagcattagacccgcacaagccattaatgctatatttttgaatattcttttcatattttctgtctttaaaaattagaatgaaaggttcaagccaaacactagttgttttgttagcgggaagtccaatccaccacccatttctgggtcgtaatcctccagcaaatgactgttggcaataaccaatgggttggtaatagttccgtatacacgtagattggtcagtcctattttggaacagagacgtttaggcatggtatagcctaatgtaatgttcttgattttgaagaaagagccgtccacgtatgccaaagaagtataatattgatcatctctccagttgcggctggcatttaatgacgggaagtcgttggagggattttcaggagtccaatagttgaaacatgaagggaatgcaccaccggatgagctataccaggtaataggctcatagtaaaacatttgcccttggcgtagatacatatagatagataaatcgaagtttttccaggtgaatgtattttggaaacctagtgaccaatcgggagatttatgtccaataatctgcttgtcatcggcatttacagaataagggttctcggcatcataccggtttgttttccatgtaccatcttcttgttcgaaggatttttcccaaacgccattgcttatcttttccatattgggtatttctacttttaagtcaccgggttgttttccgaatacggcggcatcagcttcttcgccatattgccatacacctgcgatcttgaaagcgcgatatgactgaagagcatcgccaatatgtaaagtatagtccccattctcgatgaagtcggcagcaccttctcccaatgctgttactttttctttgtttttgaagaaggtaacggtacttgtccaattaaagtttctgctcacaatgttacgggtagtcagcgtcaattctaagcctttgttctgtgttttggctatgtttctgtttatttggaaaactgacgaagcattaaatgttccgttggtggccggtacattctgtttccaaatgacacctgtggtgttggttatgtagtaatctgcattcaagtcgatgcggttatttaagaaagaagcatcaatgccaatatttgtattttttgaacgttcccacgttaattgtgggttactgagcttttgcgggaaagagtattgggtaatctgttcatctcccaaccccatgatactttgtgagaggatggcccaagagtcataggcgctaatgccggccgcacctgtctctccgtagcctatgcgaagctttaagttatccaaccagtcggaagttgattccataaaactctcgtctgaaattctccaaccggcagaaaaagcgggaaaagtgctccaacggacatctttagctaatttggagtttccatcgtagcgcacagaagcggagaataagtatttacccaagaatgaataatttaagcgtcctacaaagcccatacttttccccatggaatatcctgaactgacagttttatttccaactgcggcagccaagtttgtccaataataagtattactgaggatgccgacagcatttgaagaagaactctcagattggctatctgaatatgttgttacacctgtcagcgtaaattcatggtcattggaaattttgaaattgtaagtcaggatattttcccatgaatatccccaaccgcggctgttgcttaccgaagctgatgtatattgggaggtttcttctttactggcatttaaagctccagttcctgcctggtcgtagaattgataggaaccataaccaatgaacttgttagttgtattgtagtttaggttcatactcaagcgagattccagactaagtccttttagtggagtgatacggatgtaaggctgtagatagattttgaatttatttgcattgttgcgatatacatcacgattttggttaagcaataagtttacttgtctattatcttcaagcacaggatattcatttaatgaaccatcctctttatatagagtaccgaatgggttagctctcattgcttgagataggtcactggatgttttctcttgcgttgtataagaagtttgcatatgcatacctgctgtgaaccatttggtaacttcctgattgatccgggctgttgaagaataaagtttatattcatcatttgtatactgaccctgctcgttagaatagttcagggagaaataagcctgcgtcttttttgttcctcccgaaatagaaagagaatagttttgggtggaaccagtctgcatcatagcatctacccaatcaatcgtatgaccggcattgactgcatcttgatagatttcatcataaacagttccatcatcttcaatagtccctgcccatttccttgcttccatacgtgtgtcaagccatcgttgggggctgttcattttaggtaaggtggaccatccgttaaatcccagataggtattgaagttgacacttagtttaccttcttccccctttttggtggtgataatgacaacgccattggaaccggaggaaccgtaaacagcagttgatgaagcatctttcaatacttcaatactttcaatatcgtttgggttcagtgtttcataatcgcctggcattccgtcgataataaacaatggtttgcctgaagctgtgatagaacggttaccgcgtaattgcagcgaaacgcccgtgccagcctgaccggaagactttgtaatatccaaaccggctactctaccttgtaatgcctccatagggttggctgatggagtcaactttacaatatcgctcttgacagatgagacagctccagtcaaatctctttttttcacagtaccgtaacccactactatcacttcgtccaaagttttggtgtcttctgtcaaagtcacattgagattgggttgagctttcacacgttgtgtgatgtaaccaatgtaggaaatttcaagtgttgtgcctgcgggcacctttattgtgaaattaccgtcaatatcggtgattgcaccattactttgactccctacttgtagtatggtggccccaatgattgtctcaccggaagcgtccactacttttcctttcactacaatttgttgttgctgtgttatgatagatgtcgtctggatgccagttgcaaaggcgacatcagggacaactaacagacttgtacacagaactgcaacggaacataatggcctgtataggtttgaccattctgagaaatgttttttgttttgatacatagtactaactttaaaaaaataacattttttaggttataattctattttgaatgacgtgatattaattaaattgtaatcagctaatgaagttttttttaataaatcttgcattagaaattattaaaatgttctctgttgtttttaagtaaaagaattgatgattacagaatatgaattcttccgtcttattgtagagtttaaggttgacttaactttcgtagaaaaatattcttagactttttctattcttttttcttcttgggaactaacggtattgtttttctgcgaaaactgaataagactatgaatgggaaagaaatttagatttaattaatggtatgaatagacaagttgttgttagtatttatttactcctttttatcttgtttccggcgaaagctcagaatagagagatagcatgtaatgcggattccgttcaagttctccatcgctataaaatagctgtctgtgactggatgattttaaagcgtcagaagattggttcattccagttggtgcatgaattgaatggtgatggtgtggaactggacatgggatctcttggtaaaagagaaacatttgataataaattgcgtgatccccattttcagcaactatttcgggagacggctcgggaatttcaactggaagttccttccattgccatgtccggtttttatggtcagtcttttttggagcgtgccaattatgaggagttggttagggaatgtctgaatgctatgaaagtaatggatgctaaagttgctttcctgcctttgggaggaattaaggcgggatgggaaggagagccggcgcttcgggcggaagttgtaaagcggctgaagaaagttggagatatggctgctgccgaaggtttagttattggaattgaagtccaattggatgccaaaggagatgtcaaattgttgaaagaaatagattccttaggtattaaaatctattttaagtttcagaatgcattggagaacgggcgtgatttgtgtaaagagctcaagattctggggaaaaagagaatctgccagattcattgtacggatacggatggggtgactcttcgttttaatgagaggctggatatgaataaggttaaaaagacacttgacaagatggggtggagtggctggctggtagtggaacgctcacgggataaagatgatgtgcataatgttagaaagaattatgggacgaatattgaatacctgaaggaggtgtttcagaaatgaatctgtaaactttaaacatagcatatatgaagaacacaattattttttctctgttttgtttcttggtgtgttacttgttaaaatatttttggtgttaaatgcctaaattatagaaaatggaaacaatagataaacaacagtatacattgaatctattaaataatattgaattgagtatttgtgtaaataagtctaataattttgtgttgatagggattttatgcatggctattgctatttttttagctcttattgtctcttttgctctattgggaattaaggggggagggtgtttcctttggatttattattagttgtattgtaggatttttgtgctcaggatatttggtaagattgtatctgtggaataaatatgggagagaagtatttattattaacaaaaatgagtttgttatgtattatgattataaactttttaaagacagttatagaaaactatattttaattcaattcaggtctattttgaatataatggtgtattgatgaatatttctaaaggaatttgttgctcccgagatgaaaaatgtaatagtatcatctattttaaattagatgacaaagaaataaaatctataggtgaaatacctattgaagttattataaatattggtaatcaattgaatgattgaatcatgttcaaacagttcgtatttgtactgtatatggaataagatagtacctttactccttttggtggtttgtttggagaggggacggctacaagtaatcgggcttataagtataatgggaaagagcttgataggatgcatgggctggattggtatgattatggggcgagaatgtctgatgcagttctgggaagatttatgagtattgacccttcagcggaatcttattctatatgcttattgtggtaataatcctattacccgaattgatccagacaattgtctttacttcagaaagtgtaaaagaacaattgtataatgtgtttagaaatttattttattatgaaagtaaataaaatatttataatagtggcaattagtattttaatattacatttttcactaatggtttatagcaaatcaactaatataagaactgttttcccctatttggcagatatattagacagttattgtagctattatcttactggccctaataatttgaaagaattagaagaatttacagatgatatgtatgagatttttccagatgaattattttattataatatattgaaaataaaaacatttcctatgttagagcagaatattgacgatttgtatttcgtgaataatacatgcttatttaatttgagactcaaagaaactattttgtattcatctgatgatactttaccgtgctgctttgatattaatttggcttatccagaggaacgtttggccataataataaagaaaataagatattctatgtatgcatttgatcaagctggaaagtgtatcttcaagatacaacaattacaggaaaaggtttattctgaaatgaagaatatttatatagagtataatgtgaataaacaaaatatcgttttacttgaatttaacacggataagggattgtcagcttattgtaaaaaagatagaataaattgtgataatgcttattttggaaaaataggcgatgtattagaactagtttgtgaagagtataagattaaagaaatgattttctatgtatttagtttattgtaattcgtttgcttagataggatatagtatgaagtattttactgtagatgattcacttgatgaattggttgtaggaaaagattttcagtttataaagggggataatccagaggctcctgaggcattgatttacttcatattgttcctaattgtatagactgtgttgatttaagaaagtcatctttcatggaatgtgaccttttttcaaaaaaaataagctgatgcttttgtcagctctaaagcggacttgtatcaaaagaggagtataattaaaaaggaataagtcgtaccatttggggagagagaatcgtgatgaatgaccattttgataaagagcttgatttcttttcaatagggataattgatgctcatacatatataagtgaacgtttaaaaaacgccgttgaagcaaatggtttaatggggtgggtttttactccgactactaaattagttgtagagtaactgtttacctgtatatatttggcattttgatatgttagataaacaaagtacaagaaaggctccatatgtcctacggacaaacgaagccctatatcattaacttcttgccgacagaaaatgcacttcttgtaattttctaataatcaatggttaagcattggcctaaaagagctgttttgtaattatagttgccctgtattttacgtgccccttttgcttttcatgtcccttctgctttgcatccctttctgctttgcctcccctcttacttgctcttgcatagcgctttctttaccttcagatgctttaattctgtgtacctacatttgtggtttacgtgcttcacaatcgtaggcatgctgctttacctatgtgaagcatttgaaccacatatgtggacatgctaaaacatcgcttgtcagcggaagaaacatggagtgtaagcagaaggaacatgggtggttagtgaaagaaatacaggccggatgacgcaagattatgacgtgtactgaacggacgaaggcgtatatcaagcaaaaagcggcataccttccatgcttttcttcataaaaaggcataaaaatagcagattgccaaacagtcattttgagcatcttgcatgacgtatccggcagattatgagtgatatatagagagagatagattggtgcaggcaaatttacctacacttttttttatttgctgccaccaccgctctagccccgatgaataaggagatgcaagatatgagtgcaagcgtgcaggtaaaagtgtgtgtaaactaatagtaagcctcctgagttcaagttgtaaatgcaggatatccgatgaataaagctttaaataggcatttctctttttttgttctttttaggtgattacatattttttagttgttcgtcctttgtatgtgaaaatacatattgagtccaatcaatggattttatatttttgaattaaaattagtaaacagatgaaaaaagaagaaatcttttctggaaaaacacaaggcaaatatctgagcgcagcgaagattatttgtttctctttcttgttttcgattcctgtagcggcatttgctgaaagcgtggtggaagtgcctgcggtaagcgtggttcaacagcagggaatagtgaagggaacggtggttgacgaacaaggcgaaacggttattggtgctaatatcaaagtagtaggcactactgtcggtgctattacggatctaaacggtatgtttagtgtgaatgcaccggtaggggcaaaacttgagatatcatttataggatatgtaactcaagtggtgactgttccggcaagtaggagccttaaagtaatactaaaggaggattcggaactactggatgaagttgttattgtcggctatggtacgcaacgcgtgaaagatttgaccggtgcggcatcaaatgtgaagatggaagatattcccgatattcctggtacatccattatagatgctttggctggccaggttattgggctttcagttactcaaagtgatggtcgtcctggttctacaggttcatttaaggtacgtcagcctatgagttttgatgctgatggtaattctggtagctttaatcaaccattgattgttattgatgatgttgtccaagtggatgaaaatggtgatccttcaatgacggctttcaatatgttaaatcagtcggaaattgaaagtatgacagtcttaaaagatgcgtctgcagcggtttatggttcaagagcctcagctggtgttattcttgtaaagactaaaagaggtaacgtgggtgctcctaagatttcttactctgggaaattggactttgctgatgcagtaagtcatgcaaaaactatgaatgcttatgaattgggtgtatttaccaatcgtttgtataatcaggccgatatggtgaatggtaatggaaataattcatactttaagtattcactggctgaattggaggccatgaagaacttaaactataattggctggatgaagcatggcattcgtccgtttcgcatcgtcattctttgactgttaatggtggttcggaaaaggtaactttctttgctggtatcaattatcagaaacaggaaacaaacttaggtaatgtgcaggattatgacaaatggacatttcgtgcgggtggtgaggtaaaagttgcttcaggtttaaagctgtccgctactctatcggggtataatagtaataaggtgggtaacaatgctcaagtcaatgtcggagcaggtccttgggggaatcagacagcttccagagactatgccatgttgagtcacatgcctaaatacattccttgggaaacttcaatctatgatgaagttagtggagaaacaaagacttattttgtatctccatggggcggtccacaacttttggataacagtacggactctaaagtaagtggtgctcctgtttggaactattttgcagaagaggcttctaaagcaagaagctataataagacgaatggctatagtgctaacttctcattgacgtatgacgttccttttattaaaggcttgaacttgaaaggtacttatgccatttcttataataattcaacctcagagcaagtaggtgattattataagttggctcgtgccggtaataccaataaaccggatatgcacttgctaggtgattatacagaatggaattttataaattacggcgatccaaatggagaaaatattgataaaaaacctcgcgtcaagtatgctaagaatggaagtaaaagtgaacaatacagttttgctatttcttataaccgtacttttgggcagcatgatgtttcggctactggagtagtggaacgtgcagagagcgaaggagatgatttgtcgcaattatatcaaggtctgggaatgtcctatggaggaacgagtgctacagccggaacattgagttcagatgatacgggcacttattataggaaatatgaaagtggctctctttcttatattggtagagcaagttataagtatgctaatcgttatttggcacaattcgttttccgttctgatgcatctactaagtttgctcctgaaaattattggggattcttcccgacaggatctttaggatgggtggcatctgaagaaaaattctttaataatagtactttagggaagatttttgatttcttaaaagttcgttatagcttgggtaagacaggtaaggataatgtagaggcatggagatggttgcagatttataatatcaagcctaccggtggtatggggtttggttcgctgggaggtcaatatactagtggtgctagcattaatggtacggctaatcgtaatatcaaatgggatactactatcaaacaaaatattggtttggatatgaatatgttgaataatcgcttgtctgttactgctgatttttattatgacaagaccaaagacctgattatgaccatctcagatcctgaagagcctatctatgtaggcgctaagttgccttccattaattatggaaagaaagatgcatggggttttgaactttctgtaagatggagtgatgatatcaagcaatcattgcttccatcatggggacccattaaatattctattggattggattatggaatttcctggaataaaacagtactgggggtagaacctacatttgactatcctgcggaggcggttaatagaacggattataccggttatcgtggtatgggcgctgaatatggatttaaaacttggaaacataccagtagtggtgatggtatcctccgcaatcaaactgatattgataattattgggattatttgaccaaacttgctgaagcggcaggcgtttctcctaatttcttgggtattacgtcaaaagaaaaaatgtatcccggtatgttagtgtatgaggatattgctggagatattgatacggaaaataaaacgattgccggacctaatggtgttatttccaaggagcatggtgaagactatgcgaaattagcggataatcgccgtcatggcatcaatacaaagttgagattacaatgggggaatttcagttggtcagctcagatttctactacttgggggggattcttggattttcgcggttcgcagactaagacaagtagctttatgtggagtcagttctcgtacataaatgatatgtttgatatggatgataatccgaatggtcgttatccgaccatggcagccggaaatgcgtatggtgaaacttctgatttctggcaagtatctgcatttcgtatgtatgtacgcaatatgacattcgcatattcttttccaaagtctatattgaaaaaagtgaatgttgatgcactctccattaatctgacaggtaataatttatgggatttccataatccatatccagatcatttcgtgaatgtatatgatggaattaagacaggctatccgactttaagaacttggagtttgggacttaaccttacattttaatgatatgatttctaatatttaaaataggctaatatgaaaaatattaaaaatatatttctaagtgcagtaggactgcttatagggttctcttcgtgtagtgatgagttcctgaaagataaaaaggattataacagaatgactactatcgatgtgtatagtgatagacaacaggctactgctgtgtttgctaccatttacaagcaaatattgtcaagatacaactctcctctttgcggctctgatcctttgatgagacaagatcaatctactggtggtaagcaaaacatcttctcggaagaaatgacgggttggaaaagtgcaaactatacaggacaaattacaaagaatgtgaaagcgggaaatcatataagcaatcctccttattggaatgatccgcgagataatgtaaaaaactttaataatttcgaacgttatactttatttccgacaatatatgtaattaatgattttattaaggaaatagaccgttcgcgctccttgattgttgatgatgagttttgggatcatctgaaaggtcaagctatgtttgcccgtgcatggctttattttgatgcagctcgtgagtggggtggtttcccttattattgtacagaactggatatgccggaaaatggtgatcgttctccacgtatgcctatgcaggagtgtattgataagatatgtgctgattttgaagcagcagctaagttacttcctgaaagttggaaaggcgagaattatgggcgttttacttcggtagctgctttagcaatgtcggctcgtgcccgtttattcatggcaagtcctatatttaatgcaaactgggatgatccgtccagtaagcgctggcaagtggcattagctgccaatctgactgctttagaagctgctaacaaagccggatatggtacaagcgtaacagatattgagtcatgggataaagcattttataattataatggaacgtttaatccggaatctataattactgttttaatgagtgatgatccgttagtatccgggacttttaataagtgggaagctaagattcgtccgggtgctgttgtcagtggtgaatctgcaggtgttccagctccagatgaagttttgaaagcgtttcccatgaaggatggtagaatggctactgctgaaaatggttatgatgatgaaaaattctatcgtaatcgcgatccgcgcttctatcgtacttttgctttttccggttgtgaatggtctttagcgaaagaaagtaaacagatttggctgtttacttataaatatagcgataatgaaagcaatatgtatcgttacactgacagtaccaaaggcgatggtggtgcaaaaggaaagagccgtgccattgtatggaagatgtctaatcctaacttgggaataggtgcggaagaatccagtggaactgatgtgatggaatatcgctatggagaattgttgctgaatgtggccgaatgttatgcagctcagggaaaagccggtgaatgtctggagtatttaggaagaatccgctctcgtgtaggcatctcgaatgctaacaattatggtttaggtaatatttccgaccgttatcagttgataaaagcagtattgaacgagcgacaggttgaactggcttatgaaggtaaacgttcttgggatttgaagcgctggttactgtttgagggaggtgctggatttgacccgaatatcggtggtggctacgatgcggcaactggtaaatatgaccctattgcatcatggggtgctggttggaaaatttatgatggcaaaaatggaagacctgaatattcaagaacaaataatgtgttgactaaattaggattaactcctttgtcaggaactaagcatactagtaaaatttggggatatgatttagacaatgtacatgctgttgaggaatatattgggactgaaattaatcacccattgcttgataatgtattgtatacagctgtaccgggtattacaagaagtatgaatgaagtcgatcgtaatgcagcctttgacaagctggaagcattctatgacggtgtaggcatgaagacttatgatccgattgagaagatggggcataaatatggaatggaatccggttcaaaggagacagaccagaatttcttgtttgcttggagaggttggtattatatctatccgattcattatgatatgtatgatccggcaaaaggtaatagctggattgaacaaactgccggttggatgatagagaatagaactccttcctgtcttaccgtagacgaacaaaacggtacatattattattgtactccggaggaataataattctttctgtttacgatctgaagattgaatctgatgtaaaggtcaggttcaatcttttttattataaagtcccttactgccgattacaaaggttcatctttttcgtcctattattgataataatttatgtataattgtaaactataaaaacatgatgaatagaattttatctctccttactttattctttttttcagtagtggtatctgccgcggatataaaattaaatacgagaaatcttccggcaaatgttgtaactgaagctcagcaaaagacagctaaggtaatggacaaacttttattggccaatgattccatccgtgagaatattcaaatcgttataacaaaccgatatctggaattaagggaaattcatctgaattatgataaacggaacaagacgattgaggcgagaggattacctaaggaagtggaagcagaagagctggaacgttcgtactatcaatataactctgatttatatcgctcccgctttggctatgaggcttggctctctttctacctgaatgataaacaagtagaaacgatcaaggatgctatgacctacaatttattccatatacgctatgacgattttatggatttgttaccaaatctgacaggggcggacaaaaatagagtgtatcattggttggtagaggcacgcgagttctgtatggacttcgaaactcctcggaaaatgcgccagatgtttacaaaatatcggggacgcatcaataattatctgtccagccgtggatatgatttaagaaaagcgacagaggagcaagaggcacgtaagatgaaaaataaatagttccttctgattacaattcttctttcttatcgtcttattattgtatttttgaaaagcaatcggacaaaaccaataagataatgaaaaataaacttgtatttttggcggcctgtgccgtcacagtgttgatgccggctactgttaaagctcagtaccctgggataactaaagaagctggagaaatcagtggaaaaataatgtctgaagggcgtcagcgctcggatgaggcatgggcgaaagctttacctattgtcgagaaagaagccaaagaaggacgtccttatataccttgggcttcccgtccggacgatctgcctcaggctaaaatcccggcatttccgggtgcagaaggaggcggtatgtttagttatggtggtcgtggtggtaaggtaattactgtaaccaatctgaatgatcgtggaccgggctctttccgcgaagcttgtgaagtgggtggagctcgtatcattgtttttaatgtagcaggtattatccgtttggaaacaccgattatagttcgtgctccttatattactattgccgggcaaacagctcctggtgatggggtgtgtattgccggagaatctttttgggtagatacacacgatgttgtagtacgtcacatgcgttttcgtcgtggagaaaccaaagttacccgtcgtgatgattcctttggtggtaatccgattggtaatatcatgattgaccattgctcctgcacttggggattagatgagaatatatctttttatcgccatatgtatagcccaggtgagggttataaagatgagaaacttccaaccgtgaatgttacgattcagaatacgatttcagctcaagcattggatacttataatcacgcttttggtagtactttgggtggtgagaattgtgcttttatgcgtaacctttgggctagcaatgcagggcgtaacccatctgtgggctggtatggtattttcaattttgtgaataacgttgtgtataactgggtacaccgttcgatggatggcggtgattatcgtgcgatgtttaatgtggtcaataactattataaaccgggaccgttaactccgaaagattctcctgtcggacatcgtattctaaagcctgaagctggacgtagcaaacttgactataaagtatatggtcgtgtttttgctgatggtaatattatggaagggtaccctgaaattacaaaagataactgggctggcggtatccagattgaaaatcagagaaatacagatggctatacggaaaatatgcgtgcctatgagccgttcgcaatgccttatatcaatattatgtcagccggtgatgcttatgaatctgtattgaaaaatgtaggtgcaaatatgccttgccgtgacattgtcgatcagcgtattatacatgaagtaagaactggagaagtttattacgaaaagaaacttccgaaagatgcttatggtgatatgtggggattggcggagaaatcacaggatgaggacggtcatttcaaatatcgccgcttgccgaaagattcatataagaaaggtattattacagatattcgtcaggttggcggctatcctgaatataaaggtacttcttatgtagatactgacggtgacggtatgccagatgcatgggaaacagccaatggcttgaatcctaatgatccgagtgatgctaataaagactgtaccggtgatgggtataccaatattgagaagtatattaatggcatcagtacaaaaaatagaattgattggactgatatgaagaacaattatgatacattggcagagaaaggaaaattgatgtaattatgaaaaaaatactattactctcaatcctgctttggacgggatgggtatccgctcaggccattgacttggataaagagaatcgtgatcctaaatatgtagaatctatagttagccgttcacagaaaatagtagataaacttggtataaacgatgcaaaggttgctgaagatgtacgcaacgttattgctaatcgctattttactttgaatgatatttatgagacgcgtgacgcaaaggtgaaggaaattaaagaatcagatctggttggtgaagcaaaaaataatgcactgaaagctgcggaagatgcaaaagacgctgctttatatcgtattcattttgcatttcctgctgatttatctctttttctaactgaagaacagattgaggctgtgaaagatggaatgacgtatggagttttgaagataacctatgactcacatcttgatatgattccatctctgaaaaaggaagaaaaagctcagatttatgcttggctgaaggaagctcgtgagtttgcgattgacgcagaaaattcagatagaaagcatgctttttttggtaaatataaggggcgtatcaataattatctggctaaaagaggatatgatttaacaaaagaacgtgaagagtggtacaagcgtgtgaaagcacgtggaggctctctctgataattaggatagataaaaactggttagttatgtgatgtgaagggtggctgagaagtcacccttttctgtgttctgatttttggaatatggcgaatcttccattatctttgagtacaaattcgtcttattgccgtctcctctgtatacagaatacgatataaaaacaaaagtattatttagaaa

SEQ ID NO: 6442 - DNA, 10914 bp, Unknown
  gut microbiota DNA sequence
aaagactactatatgttcacctcattccatgagccggctaatgaaggtttaagatatctatatagtgaagacggcatgcattgggatagtgttcccggtgtttggctgaaaccggaattgggacaacaccagctgatgcgcgatccttcgatggtacgtactccggacggtacttatcatttggtttggaccaccagttggaaaggtgatttgggatttggctatgcatattccaaagacttgattcactggtcggagcaacaaatgattccggtaatggccaatgaaccgacgaccgtcaacgtgtgggcaccggagattttttatgatgatgaggctgaacaattcatggtggtctgggcatcttgtgttccggggcgttttgaaaagggtatagaagaagaaaagaataaccatcgcttatattacatcactacaaaagactttaagacgatatccgaaaccaaacttttgtatgatccgggcttcagttcaattgatgctaccatcataaaacgtgcaaagaatgattatgtaatggtgcttaaagataatacacgtcccgagcgtaatctgaaagttgcttttgccgattctttgacaggaccttattcgcctgcatcgcaacctttcacggaatcgtttgtagaaggtccctctgtagagaagataggagatgactatcttatctatttcgatgtctacaggaagaaaatatatggcgctgtgcgtaccagggattttcgtaattttacggatgaaaccggaaacgtaagtgtacccacaggccataaacatgggactattttcaaagccccggaatcgctcgttaaggagttgttgaaagaaagcaagaagaaataatatataaaacaggaacagataatgaacagccctatcaaaatactttttgttctggcaactggatggctgacactaacgtcggcttcagcacaagacaggatacattacactggaaccgaactttctaatcccacctatcatgatggacaattgtcaccggtagtgggagtgcataatattcaattggtacgtgccaatcgtgaacatccggatgtgtcgaatggtggaggatggacttataatcaccaaccgatgttggcctattggaatgggcaattctattatcaatatctggcagatccgtcggatgagcatattccgccttcccagacttttctgatgacttctaaagacggatataactggacaaatccggaaatcgtgtttcctccttataaagttcccgacggatatacgaaggcttcccgtccgggtatgcaggcaaaagacttgattgccatcatgcatcagcgtgtgggcttttatgtatccaagtccggcagactgattacaatggggaattatggagttgcgttggataaaaaagatgatccgaatgatggaaacggtattggtcgggtagttcgtgaaattaagaaagacggttcattcggtcccatctactttatatattataatcatggatttaatgaaaaaaataccgattacccttatttcaagaaaagtaaggatcgtgagtttgtaaaggcttgtcaggaaattctggataatccattgtatagaatgcaatgggtggaagaggcagatcgggaagacccgattattcctttgaagaagggatataaagcgttcaattgctatactttacccgacgggcgtattgtcagcctttggaaacatgcactgacttcaattactgaagacggtggctatacttgggcggaaccggtgcttcgtgcgaaaggattcgttaatagcaatgcaaagatttggggacaacgcctgactgatggtatgtatgctaccgtgtataatccttcggagtttcgctggccgctggctatatcgttgagtaaggatgggctggaatatacgaccttgaacctcgtgcatggtgaaattccgccgatgcgttatggaggaaactataagtcgtatggtccgcaatatccccgcggtattcaagaaggaaatggaattcctgcggatggtgatttatgggttgcttacagtgtgaacaaagaagatatgtgggtatcacgtattcctgttccggtacagatacaagcctctgcgcatgcagacgatgatttctcaaaagccggatcaatagctgagttgaccgactggaatatttactctcccctttgggctccagtcactttagacggaaagtggctgcgtttgcaagataaagatccttttgattatgccaaggtagaacgaaaaataccggcttctaaagaactgaaaatctcatttgatctacaggccggacaaaacgataaaggtactcttcagattgacttcctggatgagaacagcattgcttgttcccggcttgagctgactcctaatgggatttttcgtgctaaaggcggttcccgctttgggaacctgatgaaatatgaaccgggaaaaaactatcatgttgaggctatcctttcagtgaccgatcgtaatattcaggtatttgtggatggtaagagagtaggattgcgcatgttctatgcaccggtacctgctattgaacgtattgcgttccgtacaggagttccacgaacatttcccactgtagatacaccggctgatcagacctatgatctgccgaatgccggtgaccaggagccactagctgaataccgtatcgccaatgtgaaaacctcttctgtggataaagatgcgactgctgctgttttgaagtatgcggattttagccattatgcagattatttcaatggtatggaagatgagaatatagcccaggccattccgaatgcaaaggcttcggaatggatggaagagaatataccgttgtttgaatgtccgcaacgtaattttgaagagatgtactattaccgctggtggtcgttgcggaagcatatcaaagaaacacctgtgggatatggcatgacggaatttctggttcagcgttcctattctgataaatataatttgatagcctgcgctatcgggcatcatatttatgaaagccgttggttgcgcgatccgaagtatctggatcagattattcatacgtggtatcgggggaatgatggcgggccgatgaataagatgaataagtttagttcgtggaatgcggatgctgtgctggcacgttatatggtggatgctgataaggatttcatgctggatatgaaggaaaatctggaagccgagtatcaacgctgggagtgcacgaaccgtttgcaaaacggattatattggcaaggagatgtacaggatggcatggaagaatcaattagtggcggacgtaagaaaaagtatgcccgccccaccattaatagctatatgtatggtaatgcaaaagctctttcactgatgggaatcctttcggatgatgaagaaatggctatgagatatggtatgcgggcggatacattgaaaaggctggtacaagataagttgtggaattcacgccaccagttttttgagacaatgcgtgcggactcttctgcgaatgtacgcgaggctatcggatatataccttggtactttaatttgccggacacagtgaagcaatatgaagttgcctggaaagagattatggatgagaacggtttttctgctccttacggattaactactgccgagcgccgtcatccggaatttcgtacccatggagttggtaaatgtgaatgggacggagcaatctggccgtttgcttctgcccagacattgacagcaatggctaactttatgaataattatccgcagacagtattgtccgatagtgtgtatttccgtcaaatggaattgtatgtcgagtcgcaatatcatcgcggacgtccttatattggtgaatatctggatgaggtgacaggttattggctgaaaggtgatcaggaacggagtcgttactataaccattctacctttaatgatttgatgattaccggtctgattggattacgcccgcgcctggatgatacggtagaagtaaatccgttgataccggcagataagtgggattggttctgtctggataatgttttatatcatggtcgtaacctgacaattctttgggataaatatggtgatcgttaccatcgcggaaaaggattgcgtatttttgtagatggaaaacaagttggatatgcagatagattgacgagaatcatttgtgagaacgtcttgaaataatggttactactgaaatagaaaaaaacgaatgatgtttttaaaaagatatattttctttcttctttgcttgccgtgtctggcacaggcaaagaatataacggtcagccatctcacttgcgaaatgcaggaagggctggtgctcgttgaagcctatccccggctggggtggaccatggagtcgccggagaatgggacgaggcagactgcttatgagattgagattcgggaagcctgcaccggacgtacggtttggaatacgggaaaggtccaatcttcacaaagccagttgataccgactcatggagcgaagtttctccgatttagtttctataactacatctggcgtgtacgggtttgggatgaaacggacgcaccttccgaatggagtcgagaagcaaagtttcgtttagttccccaaggtttttcttcggctgaatggattggggccatcacccgtaaagacgcacgcttgcccgaaggacggaaattccacggaggcgagttgaagaagccggaggtaaaggcggcatgggaagacgtggatacattggcaaagaaaagcatttgcttgcgtaagacgttccgcacggacaaaaagattgcggaggctaccgcatacatctgtggccttggattctatgagttcaccttgaatgggaagaaagtcggtgacagtgaatttgctcccctctggagtgattatgacaagagcgtctattataatatgtatgatgtaacggaactgttgcaggagggcgagaatgtggcgggagttttattgggaaacgggttctataatgtgcagggcggacgttaccgcaagttacagatcagcttcggggcaccgactcttttattctcactgcttgtcaattatgaagatggaacacgggatgtggtttgctctgacgacagttggaaatatgacttaagccccctcacctttaattgtatttatggaggcgaagattatgatgcgcgtcgcgaacaaaaagggtggaaccgggcaggttttaatgatgcgcgttggcgcccggtagtggttcaggaagctccgaagggaacgttgcgtccgcaaatggcggctccggtgaaaatcatggaacgttatggtgtccggaaagtgacgaaactgaccccggaacagattgcctctgcctgtaaatcgaccaaaagaaccatcgacctttccgctttcgtactggatatggggcagaaccttgccggttttccggaaattaccgtgtgtggtaaacgaggtcagaaggttactttggtggtggctgaggctctgacggaggaaggagcctgtaaccaacggcaaacgggacgtcagcattactacgaatataccttgaagggtgagggggacgagacctggcgtccccgtttctcatactatggttatcgctacattcaggtagagggtgccgtactgaagggggagaagaatccccggaaattgcctgttctgaaagatattcaatcctgctttgtttataactcggcaaaaaaggtgtctgctttcgagtgttccaatccgatattcaacgctgcccatcgtctgatagagaaggcggttcgcagcaatatgcagtctgtatttaccgattgtccccatcgggaaaagctgggatggctggagcaggtgcacctcaacgggccgggacttttatacaattatgacctgacagctttcgctccgcagattatgcagaatatggcggatgcccaacatcgcaacggagccatgccaagcaccgcaccggagtatgtcgtgttcgaaggaccgggcatggatgcctttgctgaatctcccgagtggggaggtgctttggtcattttcccgtatatgtattacgaaacctacggggatgattcgctgattaagaagtattaccagaatatgcgccgatatgtggactatctctctacccgcgcagataatcatatcctttctttcggtttgggtgactggtatgattacggtgacttccgtgcaggattctcccgcaatacgcctgtcccgctggtggctacggcacactattacatgattgtcgaatatctgataagggctgctcgcattgtgggtaatgctgatgatgtcaggtattacaattcgttggcgaatgatatcgtggtagcattcaacgagcgctttctggattacgatgcggcgcagtatggtacgggaagccagtgcagcaatgctttgccgctttttctggatatggttctgagtagaggccattctggaggttatgaaacggatcgtcatctggagcgcaaagtattcaagaacctgataaaagatgtggaagcacacggcaatcgtctgactaccggagatgtgggaaaccgctatctgatccagacattggccaattacggagccgatgaactcatctataaaatgttcaaccatgaggagacgcccggatatggctttcaactcaagtttggtgcaacgactctgactgagcaatgggaccctcgtcagggctcctcttggaatcattttatgatggggcagattgatgaatggttctttaactcgttggtcggtatctctccggacgtgaagcatggataccagaagttcagaatcgccccgaagcctgtcggtgatctgaaatacgtgcagtcatcttatgaaaccctttacggtaagataactgtagactggacccgcgagaacggccggtttaagctgaagttgtccgttccggtaaacactgtggcggtggttacacttccgggagagaaagaaccgagagaggtggagagcgggaaacatgaatttgtagtgaatgaacaacaaactataaacgaaccataaacaaccatactatgaccatgaaatatagaatacttctttgttcactcttctgcctttgtgcggttacggtgcttcgtgcagaacgtgtagatatgctgaaagcaggagcgaaggtggatggaaagacgttgaataccaaacttatcaattctaccatcgaccgcctgaacgcgaacggtggcggtacccttttttttcctgccggcacttatctgacgggaagcatccggatgaagagccacatcactttggagttggaggcgggagccactttgctgttttctgatagcttcgatgattatcttccctttgtggaggtgcgtcatgagggagtgatgatgaagagtttccagcctctgatttatgccgtggatgcggaaaatataacaatcaaaggtgaaggtacgctggacgggcagggaaagaagtggtggatggaattttttcgtgtgatgattgatctgcgcgacaatggcatgcggaatgtgaataagtatcagacgatgtgggaccaggcaaatgatacaacggctatctatgctgaaacaaacaaggactacatcggtacactgcaacgtcgttttttccgtcctccgtttatccagccggttcgttgcaaggacgtgaagatagagggggtgaagatcgtcaactctccgttctggacggtgaatcccgagttctgtgaaaacgtgaaggtgaagggagtaaccattcataatgtaccctcgcccaatacggacggcatcaatccggagtcctgccggaatgtacatatcagcgactgccacatttcggtgggagatgattgcataacgatcaagtccggtcgcgatgcgcaggggcgccggttgggagtaccctgtgagaatataaccatcactaattgtatcatgctttccggtcatggtggtgtagtgataggcagtgagatgagtggaggcgtgcgtaaggtgactatttccaattgcattttcgatggaacggaccggggcattcgtctcaagtccacccggggcaggggaggagtggtcgaagatatccgtgtcagtaacattgtgatgcgcaatatcaagcaggaggctgtggtactgaatctgaagtatagcggtatgcctgccgaacccaagagtgaacgcactccgctgtttcgcaacatacatatcagtggaatgacggttacggatgtcaagactcctgttaagatagttgggctggaagaagctccgatctctgatattgtactgcgcgacatccatgtgcagggagccggtgaggaatgtgtctttgaggattgcgaacgcatcacgatggaagatgtcatggtgaatggtaaaaagatgtatccaaaggaagtcgatgaaaagtaaacaataatatatagaacaatgaaacgtattcttttctctgtgctttttgctgcatctctttcggctgaagcacaaacacaaacatttgaaacggcctttgcccgccctttgaacgaagttcttacggacatacaaaatcgttttggtatccgcctgaaatacgatattgatacggtcggtaaagtgttgccttatgcggattttcgtatccgtccttattcagtggaagaatcgctgacgaatgtattgtcccctttcgattataagtttgtgaaacaaactggcaatatatataagttgaaagcttatgaatattctcggcggacagatgctgacggagagaaaatgctggcttaccttaatacgctttatgcagataaggaagcttttgaactccgtgccgattctttaagaaaagaagtccggcaacgtctgggaattgaccttttactcgcacaatgtgtggagtcgaagccgattctttccaaagtgaggaaatatgatggctatacagttcagaattttgcacttgagacgcttccagggctgtatgtttgcggttctgtttatgcccctaaatcgaaagagaagcatgcgctgatcatttgtccgaatggacactttggaggaggtcgttatcgcgaagatcaacaacagcgtatgggaaccctggcacgtatgggggctgtttgtgtggattatgatctcttcggttggggagagtcaattttgcaggttggcagtgcggcacaccgcagtagtgcagctcataccattcaggcgatgaatggtttgctgattctcgactatatgcttgctgcccgtaaagatattgacaggaaaagaatcggtgtgaatggcggttccggtggtggcacgcaaacagttctgctgagtgcactggatgatcgcttcacggcttcggcgccggtggtaagtttggcttctcattttgatggaggatgcccctgtgaaagtggtatgcctattcaattggcggcgggtggcacatgcaatgccgaattggcagcaatctttgctccccgtccgcaattagtagtgtctgatggtggtgattggacggcaagtgtgcctacactggaatatccttatttgcagcgtgtttatggattctacgatgcaaaagataaagtgacgaacatacatcttccgaaagaaagacatgactttggtcctaataagcggaatgctgtctatacattttttgctgaggtgttcggcttgaatagaaatatgctggatgaaacaaaagtcaccatcgaaccggaatccgctatgtatagtttcggtgagaaaggagaacttttgccggaaagcgcaattcgttcgtttgataaagtagctgtttatattgacaagaaagcttttgcccaattaaagtcggatgcttctcttgagaaaaaggcaatggactgggtggcttccttaaatatggaggatgataagaaagcgggctttgctgtaacaactatctataatcatttgcgtaaggttcgtgactggcataatgaacacccttattccactgttccggagggtatcaatcctgtcactggtaaatctttaagtaaattggatcgggaaatgattgccgattccgccatgccgaaagaagttcatgaaaagctgatgaaagatttgcgcagagtgctgacggaagaacaagtagagcagattcttgataaatatactgtaggcaaagtagctttcactttgaaaggttatcaggccattgtccctgatatgacggaggaagaaaccgcttttgtgttggaacagttgaagctggctcgtgaacaggctattgattataaaaacatgaagcagatatctgccatctttgaaatctacaagactaagtgcgaacagtattttaatgagcatggtcgtaactggcgccagatgttcaaggattatgtaaataagagaaaagcggaaaaggctcagaacaagaaataaatatatcccccggaattcaaatcatgaaaagttccgggggatttctgtataataaggtgtagtcatttatgcgtatttcatgacaggcagtcatatcttctgttcttacttttgatgttttccttcttttccatacaaaacaaatgatggaaggtagagttgagaggagatactaattaaaagaacagtgtgatgaaaatgaagacattaaaggagggtattataactcatgcggatagtttgggcgagttgtttaagttctcggcggaacatacttgcaggagtatgctacatagcctggaagagtttgctaatatggagttagttacttttaaagaattgacggcaggatttttcttgggctttgaacactatttgtgggcttcgggatgttcacgtaatacttcagcgtgctatttccgagcgttgcgggctatttgtcgagaagcagaaaaggagaaagagttgaaagatgctaaactgctctttagtgaagtgtttacgggatacgag

SEQ ID NO: 6443 - DNA, 33843 bp, Unknown
  gut microbiota DNA sequence
ataaaagtggataaaaaaagatccgcgttatccgtgtcatccgcgtctaaaagattatttatcatttaactcataaccgaaaagagaagagcaaataaaagttcatataccccataatcatctgtgtaacaacacacttggtgttccatcatgatcagtcgttgtgaaacacgagttcagtcctagtgggaggtaccttcagtcctagtgggaggcaccttcagtcgtagtgggaaataccctcagtcctgatgggaaatacccttggtttagcatagtaaatgaatcattccgttgttcatgcccgaaaagagaaattaattccaccaataagtttatttattataggaatacggagcgtcttcaggctttactcccctttctttatcaggaacacaatccatgattagtttaagttcaccaccttgcattagttcttcatgtttcaggaaattatgggagaaattcttcccattcagagttgccgaacgaatatagcaattatcctccgacgcgttttctgcatgaattacaaactgttttcctccgggcaaggaaagagttgccttattgaacaacggacttcccagtacatattcggaagcaccggggcatacaggataaaatcccaatgcagtaaatacataccacgctgaggtctgaccgttatcttcatctccgcaataaccttgcggaccggagttatacagtttgttcagcacattgcgtgtatggtattgtgctttccaaggttgacctacataattatacaagtagatagcatgttgcacgggttgatttccatgggcatactgccccatattgagtgccaccatctctgctatctcatgaataacaaaaccataagtaccataattaaaggtgttaggagccgtaaacatggaatcgagtcgttctgccatttgttcatgcccccccagaagcgtagacaaaccttccggatcatggaatacactccaagtccaatgccaggaacagccttcagtgaaaggtcctccccactcggtggcgtcaaagttatcacgccacttgccattggcatcccttgcccacatgaaacctttttcgggataaaacaaattgcgatagttctgtgcctttttataataggctttcgcaatttcctggtttcccgtagcttctgcaaaacgtgccagacaccagtcagcataagcatattccagagttttggcagtcgcctcgggcacttcaggataaggcacataacctaaacggtcgtattcctcatatccgtcgcgtcctaccgacgctatctctccgcgcgcctgcgtctgatgtaacatggcttccaaagctttgtctttatcaaatgtccgtatccctttcatccaggcatcggtaagcaaagaaattgaattgtttccgatcatacagccacgatgtccgggactggcccactctggcataaatccactttcatcgtatgcattcactaaggactgcatgattcgtccgctgacctcgggatatgccaaagtaaacaatggatgtactgcacggaaagtatcccagaatccgttatcagtatacatatatccgccatgcaattgtccatcgtaaggactgtaataaacaggcttgttatccgaatcaaattcatagaactcacgcggaaataaaagggtacggtataagcatgaatagaatgttttctgctgctcatgtgtcccgccttccacctggatacgtcccagttgatcattccatatttttttcgcttctgctgagacttctgccagtgagcgcccagccacttcacggttgaaattcagacgtgcctgatcgtggctaataaaagaggaagctgtacggacagtcattttttcgccagcttccagctgaaacttaacgtacgcacaagaattttcatcggtgccggactcgacaacgggtttatcaaattcgataataaagtaattagcaaaattttcaggcactccaccattattataatgagtgataccatagatgcagttctcttctttgttccataccacacttccaccgtgttgataagcatccaccacaatatactgcccttcttccgaaggatatgtaatctcaaaaacagctccacgtgaagtagcagacaatgctgtactgactccattatcgaactttacctgataacaatcgggagccgctttctcattctcatgtgaaaaacgcattccacgtttttgattatccatagtcagttcaccccatacgggcataatggaaaatgttccataatcattgatccacggactgggctggtgtgtctggcgaaagcctcttatcaagctatccttatatgtgtacatccaaccacttccattttctcctgtctgcggactccagaaattcatcccccagggtacagccactgccggataagtattgccatgtgagaactcgaaagtcgactcagtccccatcagtggattcaccaaagatactaaagacacctgagacttctgtccgcacgaaacgagcagaaggcaaaggttgaaaaagcaaatcaatttcttcataagcattaatagattttattcaaataatccagagtttgttcaggacgtcgactcatgcgtaaacgccaaaccaattcctgcatattaatcgcctcaaaacggtcgtccaatcgttcggcacaccgtttggcagccgaggctccataagtatcgccttcaaaacgactccaagcgtgcacacataccactgagaaactttcttcctgtgcttcctctttcagcttcgaagctataaagtcgggagaaccttcacgttcatgtattctgtcccagagagaatatttcaccgtaataaccggaatatcatatcctgccttattagtcacccagaagacttctccctcacctccggcatacggagaatattgcaaaacaacgatgccttccaactggtcattagcgtccacataaacttgataggcttctttggccgcttccgacttcacatccatagccattattcccaataacttgatctgatattgacgcatagaaaccgccaagcgttttgctgccactctcagattggttttccggttattatcctgactgtacgtatccacataataatagcctccgcccagcatctccataagcgagcaattctgtttctgcaagcccatcagattgttgaactgtacaggagccatcatcgccaacgtagcaaccggcaatccaaaagtcatcttcacatcttctgcctccggaacatcataataccgggaagcaaaatcctgcatcatccactgaatgttatcaccatcggaaaggaaaaaagaaacaaagtttttctttttcttgaaatcgatagaccggggatcgaaaatccgtggcaatacctgttcccggcctttttcataaagcagggacagtaacgaatgattatagctccagtcgcaggggatcatcggatgtccgcttttggatacacgggctacaaattgatcttcacttactccttgctcccaaccgtataccggagcattgggttccagccaggcaagcacttcttcgagtaatgaaatgttttgtccggccccagcatctcccagttccttgttcaggttcaatacaaacagattgttcttgatggcaaattcgcgcaattctccggtttgcaccggcattatgaccagtgcccttttactgcatttatttctgaattcatgccaggcatccactgtagtctttcgggtggcatcatatttcatcttataccccgctttctcaaaatactccttatcacgaatatccacaataatggaattgtaaacatgagaagcgacagatgccactacaccactttccggattattcttcacatcggtcaatacatatccatcgaacattccttttaactggacttttacaccatccacagaggagtattcattgcatgccagttcaagcccattctgcatgccttgttcatgtatccccatatcttccaaagcctgtctggaaagtttataagaagtctttccaccgtggtcgcacaaccagactgctattgcactcttgcctttttctaccgcacgattcgtcaatcccgccaaggactgacacaagagatggtattgcaatccgcgcattttatctgtctcgtctacactattacggctatccacagggattacacccacacaactccagtacttcttcggcttagccttcattccgggcatgtgatattttccctcatctgccacagattcagatatccatggagtttcagagaaacgataaggaacactgccaatcgctttcagcccagcaaaaagcaataggaaaccaataataaacttcatgattcaacttaaaaaaatacctattgaaaactgttatcctacctactaactataactgtatctcaaaaaccgaagaataattatacttagcctgtataccttcacccagatctttgggcagtgcaccgatacggaagaagtacttctgtccggctttcaacttcttaccttcgtcagagttcaagtccaatgtcaatgtaaagactttattcgcattccggctattattctcaaaattgatatcatcgccttcaatattagccgttacatgtgccagattgaaagagttggacggattctgatccgattgagcaaacagggccaccttttcggctttacctgttctgtgaccatactgtaatttaaaggtggcaacaatagcgttattctctttcttcacaatgggctctttgatacggatattcggaatcaccctgaaatcaagcctattttctcctttgtcgaaacgatatcctttaatcgtatccagcttcacaaagttaccattattcataatgacatcataagtaccggagaaaacaagattgtttctgtattccccattcagcatgagcttccattgctgcaccttgcggatagcatatccatactctataacctgcacacaagctgcatcaccactggtaccaatttcctgctggatcaactcttctgtttcggcatcaattaccgcaccatatacttgtgcatccggaccatcaaaattatccagctcgcagcttaccatgaaaactgctgcactgattccggctattatatatttaatctttctcatattctgtactaatttaaaagttaaggattctgaatcatttggttaatggcattgcgtggtacatcttcatagtattcggagattgaatagctattgggaccattcaggcttgctcccatagtggttttacgcacaaatatcagggaaggattcgtatcacgcaaatcaagcataggcaccagaatgtcatgagagaaattattcatcaacgtatgcagcactctccaacgacgcaaatcccagatacggatattctcaaaagcgagttccacaaaacgttcatttctcacattctctcttgttaattctatttcattagtatgtgcggctctcttacgaatatcattcaacgcttttgctgcaatagtcttatcccccaacccgctttcgcagactgcttcagcataattcaacaacacttccgcatagcgaaatacgatataatccaacgtcgtcttatgatattgcgccggcatactttcactgatcatctttctcatgaggaaaccagacatggaatgagttccgtctcctggccagaaaccggacacctgatgcttttcacctcctaaagaatagtaagtcttaccgtcttttccggtcactgtagttggaacacgatacagttctgttccatccggttgaatcacaccgccttgcatcacaatcttagtccctttccattcggtaccgggaagtatgatggaagcccacagacgagcatccttcgcttttttctcatctccataagcgatgccattaaacaaatcataaggggtatccttatttactttgatataatcagtataaccagtatcaaaacctgcattggaataattgtcattgacacgagtcttgacctttgcatccgaacggatacccggcagatccgtataatcttcataagcatctaccaaattaagagctggagacattttaccctgtccctgtgtctggtaaggctcgataaagtaatttaaactactggcaaactcagatccttcttttacaatacctttaataaaaatagcctctccgtctgtttggttcggattaacaaagatactacgatagttctcctccgcttcctttggactggcaggattcggtttatacagtttatggttcgattctgtcataatagtcagggaagcatcaatgcaatgttgataaaaataggctgcattttcaggtttcattccggctaagccttttgtcacagcctctccttccatcggcgccagttctccgaatttggcaatagaagcagcatacaaagcggcacgagattttaaagccaatgccgcccatctggttgcccgtctgtccgaacgctctttgggaagttgtgcggctgcaagatcgcattgctgcattacataatcccatgtatcatactctgtactacgtggaaccaccaaagctcccggattggccggatcatactcctgcaattccttgatcagcggtactccaccaaatttttctgctaggtagaaatatacataagcagtcatgaaagcagcctctccttccagttctttcttttcactgtcacgaatatccagtgtagggatgatgcttttcagcaaattaatattacgaagcgtttcatagccatgattaaaataatccgcacgaataacgtatcccggtgactgctccccccactgactttgtacagcttcctcacagatattagcataccataataaaccaatattccctgtcggattattgaaacctccttctccgctggtacccggcataaacatgtaatcttcaataggcaaatcgcgataaatagttgccataaaagcttttgccccattagggttattaaacagctcattgggagtgatcttgttattaggctcaatgtccagcaagtccgtacatgccgtaaacacagctgatagaccgataaccaaataatattttatatttttcatatctaacgttttttatattagaagctaacatttacaccgaagttgatagaagacgataacggataattcatcatacgattatcctgaccggctgttttctccggatccagtttcaaatccttcttcaaataagagtcacagaatgtgaagatattataagcatttacataaacacgcaggttttgcaagcctacatgactggcccaacgttgaggtaacgtatagccgacttcaagacttttcaaacgaagatagcttccatccaccgtattgcggtctgtctcctgtgcattgttccccatcggattgtagttggccacgcgggctgccgggaatcttcccggaatccagttgctgtttgcatcaaacggatcttcacgatgccatctgtcatacagataagcagatgaattaccttcccaaggtgcataattgcgcaggttgtcggggatctggatagaataacaggctgctccttggaatagagccatgaaatcgaaccatttccattcagctgtcagagtgacgccataattcagagccggcatattcaatccataatatttaggcttcatgtcattgccatcaatgtatccatcaccatttacatcttgcaggtaatagtctcccggaagaatcatggtattacctctatcaccgctttgcacaggtgcattataaatctgatcatagttctggaattgcccagctgttgtatatccccagccgataccactccaacgtccttcggtagcggatttccaaacatcccaactactctcgtattcaccatgtatctggcgggtcatcttactacgggcaaagttgaagtttccttgtacaccgtatgaaacctgaccgattttgttccggtgccccaaggtaaactcaataccttcggtacggtcggcattcagattctcttccggcagggaagctccaaatgtattggtcagttggctgcctctggtagccagcagcccatctctgtcacgacgatagacatcaaatgtgaagtccaacaagccatcccacaaggttatatccacaccaaggtcataagtacgtgtcgtaatccaggtcaggttcttattaataagtgccggagtcagtactccattggtttgtgtaccatcaacgaactcgtacccctttgatcccattgtaaagccttctatgaactggaattcattaccggcatcaataccggtctctccatagctggctcttaacttcaagttactgacaaacgatatattatccttaataaaggattcctcggacattctccagcctgcactgacaaccgggaaaaatccccaacgactccccggagcataacgataagaaccattataacggaaagcaccttccaacagatatttgccttggtagtcataatttagacgccccagataagagatgtttgccgtctctccatagccgccagaattctggatattcgtttgagaacctaagtcaagaataggtttagaataaatctcatactcgcgggtagcagaaacattatcattccagccatgattcatttcgtacatagccatcaaagaaatgttatggtcgcgcgcaatagtagtactataagacaattgtgcctgaatattaagattattaccattattcatattcacatacaaactgctcgggtcattaattgtctttgatacatcatacgattcattctgcgaattataactgtacaactggtagagttttctctcatgcgaggtacggttatcactggcatcatacgaagtcattaatttagctttcaatccctttacccaaggaacatcataggtcaatgtggcagttgactgtaaactacgtcctctgctggtattcataccggtgagatcaccattcattgctgccactggattgtccaggaaaggataagctgcattgtagtattcggaattgttattggcatacactccggatgtcggtctcatcaacgtagatttgaacagtaagtcaaagactccctgaataggagcattcgtcacgtcatatcttccggaaacattaacttccgctttgagatacttagacaactgggctgtaaaattactacgcatagtatatctttcgtaattgaaatcgcctcctcgtgtcaagtcaccatcgtgcgcataaccgaaactggcataataggtcatcttatcactaccaccttcaacagaaagagtatgttgctggctacctgcactttttttgaatacagcatccaaccaatcggtactttcatagccgggaccaccggcctgccatttggcaagttcttcaggagtggtagtagggccggtacccgcattcattgacaattcattggaaatctccgcatattgggcagcattcataaccttcatcatggaagtggggaaaatagctgtgaatgaaccgttgtaattaaaacgggctttaccttttcttccttttttggtggtaataatcacaactccattggcggcattcataccatagattgccgcagcaccatctttaagtacagaaatattttcaatatcttccggattcaagcgctgaaattcagaaccaccgtcgccactatcgcggacaacaccatcgattacatacagcggactaccaaagccacgaatttgtaccatagaactgaacgaacctggttgaccgtcctgttgacggatctgtacaccggcaatctttccctgtaagctctgagccacactcgtgcttttggttgtcagcactttgtcaccactaagagtagaaatagccccagtcagtgtctgtttcttctgagtgccatatcccacaactactacttcgcccaaaacggcttcatcttcctttaataccactcttactgagttttcggctcctactttgacttcctgagtctgaaagccaatataagatatctgaagaacagcgttcttctcaagattttgtagcacaaattcacccgacatatctgccacggcatttttattattggctcctttcactacaacggtcgcaccaaccagcggattcccttcctggtctatcacctgtcctttaaactgtgcatgttgcgcatataccattgtggtacagagtaacataatgcatcccaacaaggtgcgtgctaaatgattcatgtgttttatcatataaaaaaagatttttaactttacaattacataaaagatttctaaatgttacgtttccaacttttctcagtggatacattctttgggtcatttaatcttttcttttaacataggcattttcttttaggagttaacattcttattttattgttacgtaacgaaagtcatgtttatctgcctcctgaagtaccggggcttccagacgattgtcaataatacgatcccagtacggactcagatccaacgtttttccctcttccaccacaaactctttaatttcgatttctctcttttcggaagtggaaagtcctgcaggttccgatatcactttattgaaactgatccgctctttaccatatttcttcgttattttaaaagtgatggatttcttctgaggatcagcagttactactccccaaaagttaggataaaacagagggatgctgattactttatcatcggccactacaggagccagacgcaattcttttcggggaatgttaacgccagcaccagccaatacatctgtagagaaccaagttaccggagctgtcatataagtaatgtcactgggattccacaagttttgagtccatgtccagcctttacgcagatgtactaattggatgtgcttcataatatccatggcatcttcataaaatcccgcctgcataccggctaaagcagtatagctttccaggtagaagggccagcattgtgatcccctattatcaatacctcggttcagattgatatcccacactttattagcgtaataatcaggagacttggaaagagaaatcttgcattgagatatcatagatgccttcactatatccataggatatacgtctccccatccgcagtaacggctcaggaactggcctgccaactgtcccgtaaacaatacattatccagtcttttggaaccatccggttcacagccgtaggcaaagaaacgtccattccacaacttctcaagagcctctttctgagaggtagcaaactgttgttgcgcctgtttcacgatgctttcatctccaatagcttttcctatagcttcgtaagccctgagtgtagtcagccatacacctgcataataagagtacaaaggaggatgagtaaaatcatcatacgtagtagggcctacaggaattgtactgccttgaggcatacgactatataagaatttcatggctcttttaagtcccgtaagatgtgctttcaagtactctgtatcgccagtctgctcatagtctttaacaagttgtatgatccagccggaagcattatccaacatccaacccttttccgttggtacacggccacctacggtacccatacctacatagtaatgtccgatgaaatgaagtatataaccttccggatccattgcatctgcaaaaatatccatctccgaacgatccagttgagtgaaaaatttctggtaaaaaggatgtgaactcaaacgctgatccattgttccggcaaagccgcccatggctccttcattaaccataacatcacctcctttagtaagcaccatattggtgtaaatgacatatccactattaataagcttaaacttataccagtcaggaaggctactctcaagaaccgggatttgccactccgtagtctgtcgggcaattcttgccctattggctacagcatagctcaccatagaattcatactattaaaataattatgatagtatttattgtagtcagctccacaaggccagtagctaccgataggaaggactgccgcatcaatctgcagttcaggagcataccatgccagcataaaacgaattgttttcttttgacctgctttcaactgtgtcttaacagccagtgcagaagcagaagaagtttgagattgctccgtcagtacatttttggttagtgaagaagtgaattctccattatttctaaactgatcccatgcttcagaattcgaacgataagctggaagataagatacattcttttcttcttccactgcaatcaccacttgattcacatagttctgaaaagtcaatttgcgaggttgcaagctatctgcagcatattgtatcaaccctttcaggcttcccatctgataaggttctacataggttttagccttctcacgcaacggccagttttctccattatttatattagctctaccttcactcaatagctggccattgtcaaaaccttccaagctcttcgggtcattaaacaatccgataaaatcttcccaggaaaacgctaatgcagcttccatgtcctcctgagctatgagatcaacctcaaaccatactaccggcaaagaggaatctttcacattgtgcggcaccaatcctgaataggcacgaattacaggggttactttcaaattattatccgcataacttaattctgctgtaggaaataatcctttatattgagtatgttctactcctttcattccatacaaaacatgattatccctaaccagacgaacagcttctttttcatttcccttccgtgtccataaagagaagaatgaatgctccgaacgtttaataggagtatgaatattattcattcctatcctggtgaatttgccacttggagcgaaatttatattgcctactccaataccacccaagggcactccgcttacgtcttcatgatcttttaatgaaaggtaagtatagttggtttctccacctaaaactccactttgaagactgaatttggtattggcttcatcgacaccataattgttctgattttcttcttgtccatacagtgcaaatattcctgcaagacaaaaggctaaagagacaaaggttcttttactcatacatgtgttttttaagattaataatagaagttatgaatctacttctgctttcgttagcgttcgagtgcaaaaatagatgctgatagattacaatagcggttacattggggttaatcgagggttaattttgagagatattttattaattacccgattaatttaagaaaatctatgctctatggcataaagttacagacataaaaagattacctctaaatatagagacttataaattggaaacagtcctttttttctgattattgaaaacttgtccttaagtcattgtgtatgatatcagagtaagaataggaatagttattacccatacttttattatattctgcaatatacagataatatttcttcattgcctgatcttccttcttcagcttatggcaggcattcagcatgtaccacaaagctatatcattcaaagaatctactctcagccagatttcagccaattgagcaacctgctcatacgcagctttcatatatagattattcaactcaatcgtcaacatctcatgcaattcatattcttgttcactcttaaaggaatcaaacatagagtcgtcaatagactttaaaaatttccctcgcgacaaaattccgatcagtgattggctgacttcctgagatgcatcactttgccggattttattcatttgttcaagatattgttgataatcgcaatagaaagcctccgacaattggatagaatagcgactattagtatacaccaattcaataccttctagatcatccagtatttttcttaatcggtttattgtaacacccttcagatttttggcactactcaattctttttctggccataacaacccatagatataattcgaggtaataccttccttattacctaaaccattcagaaaagtaagtaagaacagttgctttatcttggaactaaacaaatgagtgatatctcttccttttttatctattatagtgaattccccaaacagatacaaagcatttgcctgtggtgactttttattttcaacctgagtgaaagttttacgaacaggtgtgactttaggtatcggttgtttctccttcttccttttcaagtaatacgtaatgccaacaatcaatatcagtacaacaaccattacaaaaataacagcacgcaaagaaagtccttcttcaacagcatataaaaacaatgcgttctctgcaatggcaggtgccgacaatgaataaaaacgtgtaacagaagattcaccgccacgttcattaaattcttgtgtacaacaataaaactcctttgtttctttattataataaagatttgcattagataaaatagccttcgactccataggaatagaattacctaatacttcataggaatcattctgcaacgaaaacttataaagctgcaaatgggaagaagcttcctgcataggataacacaacgtatagaaagaagctccatcatcagataaaagaaggtttcttaccggaacaatctgagctccatcataagagaagtccctcactttctgcacggttgaatctttcagattgatcttatagagatcataatagtatattttcccgatactctgatccccactactattcccagtaccaccaaacaaaagcaactcattagcattcaatgctcccatagaagagaaaaaacgaggggctacaaaatcacctttcaatttaatagtattccatgacttttgatccaaatcatatacttccaatgtattggtatatttgcgtgagccaaaacctccaaaaatatagaacttattacgaatagtatccagataagaagaatggtggtgtcgctgtgaaggcaaaaatttatcatcaaccttttccacttctcctgtaagtacattcaaagcacaaatggtacaaacatctgcatgattatccacttcatagatataaacagaacgagaatccggatagaaaaagtttgttcccaaatacatcttcatcggcaggggttgatgcttatacccttcccaaatattacggcggatatccagagtatataaagaatcgctgttaaaatagacaaaattgccagaattgaaatcataattataccccgccgtactctcagaagcctgcgaatgaagcaaattccaataataggatttatttattaaccagattgggttaattgcttttcctctgatctttccttgtttgtcatgaacaagaataccggaactttcattcaaaggaaaattgatttgttgattcatgtcggagattactaaattccggattgcaaaagaaggtatttcttcagaaaacttactacttccgaacatgatggtaggggtcaattctccggataagcctaattttcctgattgatattgtcgcttatcaatagtaaggcatacagaatcttcttttaaaaaaaaggagatttctatgggtatccaacgccgaggaccaagttttttattacatagagtatctacaataagacattcttttgcctcaatattaaatttcagataactccgttcgtcattgtcataagagaaaacaaaactataaatatctgcattttcacgtttcagatcctttaatcgaaatatataaccgaaagatccataatcctgaatagccaaatcataagatatagagaaatgacctttaaaagtcaaaggattttcatcaaaaacagaatagcttgtcttttgtatagtttcagattcataagtattaaattcaagaccttgagcattagctcgcaagcataaaaagcaaagtagcaatatgaaagatcctatatatctcattatcatttccttgtcatgtagttacttatttattaactagacaaatatataacttaaaaaccggactcatgaaacataagcccggttttaacaaaaatgcattcctatctttaattcgccatctcagaaataaacttaatgcgaaccaaccttacttcttcttccgtgaaatcatcacccagttcatcaagtgcgtcatctatcttgtcagtagtagattccttgaaataatcatagatatccaacatgtggtcttcgtccataatctcatccaagaagtaatcaatattcaacttcgtaccagaataaacgattgcctcgatttcgtccaataaatctccaaactcaatacctttggaaagtgcaatatcatccaatgccaccttacggtctacagcctgaataatagccactttcatcttggatttattagcaaccgtacgaacacgtaagtcttcagggcgttcgatttcattctcttcacagtgacgctttatcagcttgcaaaactcctcaccgtagcgtttagccttacctgcacctacaccgggaatgttttgcaattcatccagtgtcaccggataaatggttgccatggcttccaatgaaggatcctggaaaattacataaggtggtacttccagtttcttggaaagcttcttacgcaaatccttcagcatggaataaagagccggatcgacagcgcaagagccaccgccccttgccggagcttcttcctccacttcttcgaaatcattatcttcggttatcttgaacgatttaggatgtttcaggaacttctttccttcatccgttactttcagcaaaccgtaattttccacatctttactcaggtaaccagcaatgagtgcctggcgaatgacagcattccatgttctgtcttcttctcccatgccggagccgaaagcttccaggtcttcatgcagatgcgcctgcacttcggtagtttcacgtccttgtataatgtcgatgatataatctgccttaaaattttctttcaccgcgagaatagcctctatcacggtacacaataattcttgagcctccacttgttttttcgggtttaaacagttgtcacaatttccacagttctcttccatatactcttcaccgaagtaatgcaacagcgtctttcggcgacatacggaagattcagcataagcagcggtttccagcagaagctgtttaccgatttcctgctctgccacaggtttaccttgcatgaacttttcaagtttctgcaagtctttattggtataaaaggtaatacactgtccttcgcctccatctcttccggcacgtcctgtttcctgataatatccttccagacttttcgggatatcataatgaataacataacgcacatcaggcttgtcaatacccataccaaaagcaatggtagctacaatcacatctattttctccatcaagaagtcgtcttgattttgcgtgcgtgttgcagaatccattcctgcatggtatgcgcgggcattgataccattcgcctgtagaatctcagcaagttcctctacctttttccgactcaggcaataaataatgcccgacttttccgaattattcttgatgaacttgatgatatctctatctatgttattggtcttgggacgtacctcataatagaggtttggacgattaaacgacgacttgaacacttcggcatcaatcatacccagattcttctggatatcatgttgcactttaggggtcgcagtcgcagtcagagcaatcaccggagcttttccgatttcattgataatagggcggatacggcgatattccggacggaagtcatgtccccattcagagatacagtgggcttcgtctacagcatagaaggaaatcttcactgtcttcagaaactctacattttcctctttcgtcagcgattcgggagctacatacagtaactttgtcttaccgctgaggatgtcagacttcacctgatctatcgcacctttattaagagaagagttgataaaatgggcaataccatcttcttcactgaagttacgcatcgcatcgacttggttcttcattagggcaatcaacggagaaatcacaatacccgtaccttccatcattaatgacggtaactggtagcatagtgattttcctccacctgtaggcatcagtacgaatgtatcgttacctgccaacagattttgtatgatagcctcctgatttcctttaaatgtgtcaaatccgaagtacttcttcagctggtctgtcaaattaatcttcttccctgccatgattcattaggttgttttttgagtgattgtttaacatctcggttagctattctttttgtaagaactctaacaaagttataaacaacttcttaaatttcaagcataatccaatgaatatttttcaataaaaaacaaaatagtcggtttcgtgtacccttaccatttgattttaagcagtttgcagttttgcaatgtttgctttttcaagctggtgtttagcataatccaacgtcacttcaaagtgatccttgtgttcggacgggatttcgaacatagcatccatcatgatggtttccacaatggatcgcaatccacgagctcccaacttgtattccacagctttatctacgatgtactcaaagacagtagcttcgaatgtcagttccacattgtccatctcaaacagtttaacatattgtttgataatggaattcttaggttcagtcaggatagagcgcaaagcggcacgatccaacggattcaaataagtcagcaccggcagacgaccgatgatttcaggtatcagaccgaatgactttaaatcctgaggcgcaatatattgcatcatattgcttttatcaattaccgcagtgttacgcactgcactataccccaccacatgtgtattcaaacgctgggcaattttcttctcaatgccatcgaatgctccaccgcaaataaaaaggatgttctttgtgttcaccggaatcattttctgatcaggatgcttgcgtcctccctgaggcggaacgttcacaacagaaccttccaacaatttcagtaaaccttgttgaacaccctctccgcttacatcacgtgtaatggaaggattatctcccttacgggcgatcttatcaatttcatcaatgaacacaataccctgctcagcttcgggaacattgtaatctgccacctgaagcaggcgggtcagaatactttcaatgtcttcgcccacgtatccagcctcggtaagcaccgtagcatctacaatagtaaaaggtacgtgaagcaatttagcaatggtacgtgcaagcagtgtctttcccgttccggtgctacctaccatgatgatattagacttttcaatttccacatcatcaccgccgtctttttgcaacaggcgtttatagtgattgtataccgacacggaaaggaagcgttttgcatcatcctgtccaatgacgtattgatcaaggaattcttttatttctaaaggtttcggaagttctctcaggttcagtttcgttgcagcgccactcctttttgctccacccagcgcctcctgagtgatctcataggcctgagtggcacaactatcacaaatgtagccgttcattcccgtaatcagaaatccgacttcatcttccgtacgcccacagaaactacacctatttttgtttctttttgagtctgccatatttattttttaatcaacacttcatctaccatgccatactccttggcttcctgtgccgtcatccagtagtcacggtcagagtctgcccaaactttatcgaaaggagtatgagagtggtcagcaataatagtatacagttcctttttcagcttctgaatttcacgtgccgtgatttcaatatccgaagcctgtccctgtgcaccacccattggctgatgtatcattacacgagagtgagtcaacgccgaacgcttgccttctgcacctgccaccagcaacaccgcagccatacttgctgccatacctgtacagatagtagccacatcgctcgtgataaactgcattgtatcatagatacccaatcccgcatatacggagccacccggtgaattaatataaatagagatatctttacccggttctaccgaatccagatacagtaactgcgcctgtaaagtattagcggtataatcgtcaacctgtgtaccaaggaaaatgatgcgatccatcatcaaacgggagaaaacgtccaactgggttacattgagttgacgttcttccaggatataaggatttaaatacccggcttgtgatttaatcacatcgtccagcaccaagctattcatacctaaatgcttggtagcgtattttctaaaatcatccatattactttcttttttaggtttagtaaattgaaatgcaaagaaacaaaaaagaacacagagacacaaaaaaacacagagttatatgatataagactctgtgtttcttaatgtttttaaactgttttcagaataaaaaagcttattcaaacatcttattaaattcttctgcagaaattgttttgttttccagcgtcacctgagacttcaaagcagaagccaatttagtttcaacaacgcggtttaccaaaccttcaacgctttctttcttcttcagcatttcttttgcatagttttccagaagatcttcaggaacactcatcataccatattgtgcaaactgtgcacgggtagcttccttagccatattgactacatcttcctgttcaaccttgatatcgttagctttcaccaactgctccttgatcaggtgccatgtcagttcttcgatactcttatcatagttgtcttctacaaatttctcgtctttgtcctggttgttcatgcgcatgatgcgtttcagcaatgcatccgggaattccaacttgccaactttctccatcaacatcttacgagcgtcaatcagaaatttataatcagtgtctgccacaaactgattagcaattacttcttttactttagcacggaattcttcttcagtcttcacaacatctttaccacatacctgatcgaaaatttcctgagtcagttcaccggctacaaaacgagtcacttcttctacctgatagctgaaattagatttcatttcagcggcttcttctttatcgatcttcaacaaagaagacagttcagctgcattaccatcccatgcagtataaggattgaatacgagtacatcatttacttttgcattggcaaagatagctttttgctcatcgttcttcatataagacggcatcattacagcagcttctacctgaatgccaccttctttggtattgccgttttcatccaattcagccagcaatcccttcagcatatcgttatcttcgtaaacgtccacttgttcgtacttaccattacgttgtgtgtaagccttcacctgattgtttaccatatcttcggtaacgtcaatcaaataatagtcaactttatctttagtgcttacttcagctttgaattcaggtgccagagcaatatcgaaaaggaattcgaactcttccatagtatcgaagtcgatatccggttgcttatcttcatttggcagcggttcgccgagaatagatacattattatcttgaatatacttatatacagcttctgaaagtgccttgtttacttcttcagcaataactgatttaccatacattttcttcaccagactcatcggaaccatccccggacggaaccccggaacctgagctttctgacgaagttttttcaatgatttatcaactttttcctgataatcggctttctcaagcttcacagtaagcagagcgcttactttgtcaatgttttgtaatgaaacgttcattctgacaattatttatttgatttatactttattccaatctcaaacgagggtgcaaaattagcgttattctttcaattatcaaaaaaacattgctgaattatttctttataacaaaaggagagattagttatcactaaatcatactctctgtattgtttaatgaaaacataattatgattattctccataagctacagatcgtaattagataaggcatttagcttcagaatcgaaagaaaaagcaaaaaaaacagaaagaaaatatggaaataccgaaataattatgtttctttgttgcggaatggtaatacattagttcttagattttcagtacatggtttttacttccgtttttcatgaaacgcttttgtaaactctctgttgttgtgatccttttattatagttacccttccaagagagttttattcatttatttattttacattttcattatgaacatttacgtaggaaaccttaactacaaagttagggaatcagacctccaaaaggtcatggaagattacggtgctgtaaccgcagtcaaatttattaaagatcgcgaaaccggtcgtttcagaggtatcgcatttgtagaaatggaagatgcagcagctgcagctaaagctattgaagaactcgatggagccgaatattttggccgtaacatggtagtgaaagaagcaagacctccgaaatactaattatacaggagaaaagaaaacaagtccgcctgctccctttcaaaaagagagcaggcggactttgtttttagtgattaggagtaaatgattaatgttgcgctaatcactaatcacttacccctaatcactatttcataaagtctttgcgacgcagcacaaagctattacttaggtatttttcacgcacaattttattttctgctaattcttccggtgttccctggaacaagattttaccttcaaacaataaataagcacggtcagtaatacttaatgtttcctgcacgttatggtcagtaatcagaataccaatatttttatctttcagcttccacacaatctgctgaatatcctctaccgcaatcgggtcaactcctgcaaaaggttcatcgagcatgataaacttaggatcaatagcaagacagcgagcaatctccgtacggcggcgctcaccacccgaaagttgattacccttattcttacgcactttctgcaaacgaaactccgcaatcagactttccagcttttctttctgatattccaaaggcttatctgtcatttcaagtaccgaagcaatgttatcttccacactcatctggcggaatacggatgcttcctgtgccagatatccgattccggtttgcgcacgcttgtacaccggatatttcgtaatatccagatcatccagaaagatacgtccctcattcggcgtaatcaatccaacggtcatatagaatgaagtcgttttaccggcaccgttcggtcccagcaaacctacaatctctccctgcttcacatctatggagacgtggctcactactgtacgtttaccgtactttttcaccaagtcttcggtgcgaagcaccattttactttcttccatattctttcagttacaaactgtcaaaaccacaagtgacgagcttgtcactcacacattttgcggcaaatgtagcaattatcagctgaaaatgggctatatttgcagacaaaatagttaagagtcatgataaaagcacttaaaactgtcggaagatacatcatgttgatggggcgtacttttgcccgaccagagcgtatgcgtatgttcttccgccaatacattaacgaaatggggcaactcggcgtgaactctatcggcattgtgttgctgatttcgttttttatcggcgctgttatcaccatacaaatcaagctgaatatcgaaagcccgtttatgccgcgctggacggtaggctatgtgacgcgtgaaatcatgctattggaattctcttcctccatcatgtgtctgatattagcgggaaaagtaggttccaatatcgcttcagagctgggaaccatgcgagtgacacaacagatcgacgcactggagatcatgggagtcaattcagccaattacctgatactacccaaaatttttgccatggtcaccactatccctttcctggtgacgttcagtatctttgccggtatcatcggagcctttgccacatgttggttcggtggcatcatgtcggcggtggacctggaatacggtttacaatacatgtttgtggaatggttcatttggtgtggtatcatcaaatcattgttcttcgcttttatcatcgccagtgtatcggccttcttcggttataccgtcgaaggcggttccatagaagtaggcaaagcctctacggactctgtagtatgcagcagcgtgcttatcttatttgccgacttaatattaactaaactcttaatgggatgattgaactgaaaggactttggaaatcatttgaagacagggatgtattgaaggatatcaacgccacttttgagaacggaaaaacgaatcttatcatcggacaaagtggttcaggaaaaacggtactgatgaaatgtatcgtcggactactgacgccggaacgtggtgaattattatacgataaccgaaacttccttgccatgggcaagaaggaaaagaaagcattgcgccgggaaatgggaatgattttccagagtgcagcattgttcgattccatgactgtattggataatgtgatgtttccattaaacatgttcagtaacgatacattccgcgaccgtacccgccgtgctatgttctgcctggaccgcgtgaacctggcagaagcaaaggacaaatttccgggagagatcagtggcggtatgcaaaagcgcgtcgccattgcccgtgccattgctctgaatcctcaatacctgttctgtgatgaaccaaactctggtctggacccaaagacatcgctcgtcattgacgaactggtacacgacatcacgcatgagtataatatgaccactctcatcaatactcatgatatgaactccgtcatgggaataggtgagaaaattatctatatctacgacggatataaagaatgggaaggcagtaaagatgatatcttcacctctagcaacaagaaattgaatgacttcatctttgcatccgatctcttccgtaaggtaaaggaattggaggtacaaaacatagaaggataagccgcttaatctcatccatctgtcataaataaaagcgtccggagatacctccggacgttttttttcttataaaaccagttaatagaattgacatatatcctcacgacatactttgattgtccctatatcctcatgagaaaacatgaagaacaatttcaattacgcaacaaagataacccaaatatattaataaaaaatcacggaaagccgttacttattgaattttctgtaaatcaatctagctttatccatccttgtgaaacagccttgaccaccatatctattgcatttttcgccccaaatttactaataagcctcttgcgaaatgtttctacagtattttctgaaatttttaataacgcagcaatctcatgtgtattcattcctttggctacagcttccagaacatcgcgttcgcgccgtgtcggagcatcttttggttgtaaacctgatgatgaagaatttaacttttgcaatatagaagcaaaacgaggacaagtatagctctcccccctcagtacactgcgaatagctgccaccagttctgcatgagccgaagatttcagaataaccgcatttactccgcattgcactaatcggttcaccatccatatctcctcatgcatcgtatttacgacaatcttcgcctggtcattcaactcacgaattttggctatcaattcaaaacctgaaatatcggggatactgatatccaaaatatatacatcataatcacgctcttcaatcaactttatagcctgctttccggaagtcactgcatccgccactgttacttccggcatcttattcacaattttgcaaataccttctaaaatcaggctatggtcatccactaccaataattccgctttcacattcttttccattgctcgattagattattacatttactctcagccgggttccttcacccggagcagaaatcagttcaactttagcaccaatcgtttcagcccgttgccagatggtatgcaagccaatacctttggttttcttgctcatatcaaacccttttccgtcatctgtaacaagtatggaaaggttcttgttttccagtgctaacttcacctgtatacgggcagagctggcatatttcactgcattgctcaccgcttcctgaacaatacgataacattcaaatccaacagctttaggaattatattccagtcgacattttctgtagagtgatactccgcatacataccctccggtaatgccaaatgcagcacataatctcccaacatctcgtcgagcgtagcatactggaaggcgggtggcatcaactcatgcgaaagagttctcaacctttcgcgagtattgctcaatagtcccaactgttcactcaaatccgaactttcctcaccggaaatagtacgaatattcatttcaagcgcaagcaaactgttacacacatcatcgtgtaattcagtcgccatacgttcacgctcactctccaaaccatcaatgtattttcgtgtcagacgctgctcagtctctttctgaagttccagaaactcacgttctttctcattagtggcattagccaacacagcgatccttgccctttggcgttgacgtgcatagagagaacctaataatagaattcccaacagtgaaattactgatcctacaatgatacggtgacgcagcatatacgtctcctgctccaactgttcctgcctcaaagtaacgatctccagttctttctctttcgtctgatattttactgaatactcagatagctgttcggtctgttcagtatgaaaggctgaatcacgcagcgcataggcttgggtcagatactcataggcctgagatgagttgttcacagccagatagcattctgccaaccgcttataatgttcataatcacgggcgtccttgtagccacagcgaagcatatcgattattctccgataataaataatggcttctgtatactttttactctcttgcaataaacccgccttcgcctgataatatcggaaccgttccgcatcagtttgcatttcatgtgccagcttatcaagtttttgcaaataatacattgcctggttcagatttccatccatccgataggcgttcaccaaataattataagcatcgcacaatagtcgtctgtcattcacttcttccagaataggtatggctttcaataatgtagcaattccctccgcacgcatttgtaccaatcgagtctgaatagctcccaaattgacataacatgtacctatccttcgcttattacctgtcttcaaagcatattccacggctttctcagaaaaaggaatcgcatctcccggacgattccaatcacaataagccgttgctatatttccatatataaaagcaactgcattatgatttccacgtaactcgcataaatgaagtgcttgttcaaagttggcaatgcaattttctaaatcctttttccgacgatagatagtacctaactgattcaaattctcaattaacatggccgtatccttatcagcagcagaacgctcgctggcacggatagtataaactagagcagaatccgtcttcccttcaaaaagaaacgaactggcataatttgtcaacatggtacggcacgcttctcctgcctccgataaatcctctccggcttccaaccctttacgaaaatagtaacgtgcagaatcataacgagcatccacattgcaataataccccatatcacaacaagactggcttattgcaaatttcaatcccgctttttcagccagagcaatagctttccgctttaaggcatatccctgctggaaatctcccttgatgaaatttccctcacttgcccaaatataatattctacgagttgttccggcttcttgctttttgtagccaactgatgaatagaatctgcatataaaaggagtaattcaggattttcttccgtttggtagagatatttacaaactccgacatagccctccatatctctgctttgggcagccttttgttgaagcatacgtaaatccggctcatccgcagcccatagcatacctatggacaggaacaagcagcatcccaataaccacctgtagcgtttcatctaatcctttttttctgttacctaagcaaaaataaatattatattcatactaacctattttttgtttgcatttcactgataaaacgtaaaaaaccgcccgatttataactaaatcaagcggttttatttcaatatcttaaagccctgataatcctacttctgacggatatagatgtttatcggagttccggtcaaactccacttctcacgcatcttattttccaggaaacgtttatagggttcctttacatactgcggcaagttagcgaaatacacaaaagaaggaacctgcgtattaggtaactgcgtgatatacttaatcttaatatacttgcctttggttgcaggaggcggatacgcctcaatcaagggaagcatttcttcattcagccgggcagtaggaatacgcgtcatacgattatcatacactatacgcgcttcttccagcaccttcagaatgcgttgtttggtcaatgccgaaccgaaaataatagggaaatcaacaaacggagcaaaacgactacggatagcatcttcgaaagtcttcattaccttcactgttttgtcctgtactaaatcccatttatttactaccactaccaaacctttggcatttttctgtatcagtgagaatatattcaagtcttgactctcaacaccacgggtagcatccaacataaggatacacacatcagcgttctcaatagaacggatagaacggattacggaataatactccaaatcttcattcaccttgttcttcttacggataccggcagtatctaccagatagaaatcaaaaccaaatttattgtaacgtgtatagatggaatcacgtgttgtgccggcaatttccgtcacaatattacgatcttcacctataaaagcattcacgatagaagacttacctgcattcggacgtcccaccactgcaaagcggggaatatcttcatccagtatttcgtcagcttctttcttgaatgtaccaacaatcaagtccatcatatcacccgttccactacccgtcatagccgagatacagtaaggatcacccaatcccaacttataaaattcgggagcattgtattgcagttctccattatcggtcttattggcaatcagcaataccggcttttgagtacggcgcagaatagcagccacttgcatatcaaggtcagttactccattcattacatctaccacaaacaaaatcacgtctgcttcatccacagccatcaatacttgtttgcgtatctcttcttcgaaaatatcgtcagagttcaccacccatccgccggtatctaccacggagaactccttccccagccattccgatttaccatattggcggtcgcgtgttgttcctgcttcttcgttcacaatcgcctgacgtgttttagtcaagcggttaaataaagtagactttcccacattggggcgtcctacgattgcaactaaatttcccatagttcactctcattgttttttgcgactatcccagtcgtatgaatattctaatccagttgataaccaaaattgcgcaactctttgtccgaactacgccaatccttatccactttcacaaatgtctccaggaaaatagtctttccgaagaacctttccaaatcacggcgcgcctcagtagccacttttttcagtgccttaccctgcttaccgataataattcctttctgcgaatcacgctctacataaatcacagcattgatatgtatcttcttcgcatcctccttaaattgttccaccactacctctaccgaatagggtatctctttgtcataatataatagaattttctcgcgaataatctcattcacaaaaaaacgcgccggtttatccgtccattgatccttgtcgaaataaggtggtgaatccggcaataattccttcactcgtttcatcacatattccacattgaatttcgtagttgcagaaatcggaataatttccgcattaggcaacaatgctttccatgcttccaccagctccaccagtttctcctgattcgacaaatcgatcttgttgataagcagcaggacaggtatttccatacgtgccaccttttctataaactcattatgcttatcaggcgtctcaaccacatccgtcacatatagcaaaacatccgcgtccgtcaatgccgaggtagaaaaattcagcatagactcctgcaacttatactgtggcttcagcacacccggagtatccgagaatacaatctgcatatcgtccgtattatagatacccataatgcggtggcgagttgtctgcgccttaaaagtagcaatcgaaatccgctcacccactaaggcgttcatcagcgtagacttacctacattcggatttcccacgatgtttacaaaaccagctttatgcatcacattcctctattttagttgagacaaaaaaacgcatcgaaaataggatgcgttttttcttatttattaacgtaacgttgttactgtttttttccatcatatccccacttcacataaacggctccccaggtaaatcctgcaccgaatgccgtaaagatcaagttatcgccttttttaagtttatcctcaaaatcccacaggcaaagcggaagcgtaccggcacttgtattaccataacgttctatattaatcattaccttttcgcggggaacttccaagcggtgagctactgcatcaatgatgcgcaagttcgcctgatgaggaataatccagtcgatattatccttagtgagattatttctttccgcaatggcaacacaagcgtccgacatattggatacggcatacttaaataccgtacgaccttcctgataaagaaagtgcatgtgattatccactgtgaaataagaaggaggacatacagaaccgccggccttcatatgcaagaaaggtaagcctttaccgtctgttcttaaaatagcgtccatgacaccaacatcctcagtagtcggttccatcataaccgcagctgccccgtcaccaaagatcgggcaagtagcacgctcggtataatccaccatagacgacattttgtcaccacctactaaaataattttcttatatcttcccgaacggataaaattagcccccgtttccaacaagtacaagaaaccgctacaagcagcctgtaagtcaaaagcaaaagcatgttttaatccaagcttatcacataggatagaagctgtagaagggaaatgataatcaggagtagtagtagcgacaatcaccagatcaatatcatcaggattagaaccagtacgctgcatcaactgctttgcggctttacgagccatgtacgaagtccccaatccttcttcgttcaagatatgtctttcctttactccgatacgggtcataatccattcatcattggtatccaccattcttgatatctcttcattcgtcaagatataatcgggtacatatccgccgactcctgtaattactgcatttattttttccattaatcctgcttaagttaatgaatacctaaacaacggtagtctaaaaaggtttgtgcttacaaatctttttagacatccggcattcaagtatattctttatcaggctgcaaattaaacagcagcttctttctcaatagcaagcttgcctctgtaatatccgcaagcaccacatacagtgtgatatacatgccattcgccacagttcgggcaaattgccaatgtaggagctactgccttatcatgagttcttctctttgcagttcttgttttagactgtcttctcttaggatgtgccattttttttaatctttaattgttatctaatattttctttaattcgttccagcgcggatcaatctgagtttcctctacatcacctcccggcagtgcatcttcaccttcaataaagatttcatcttccgcatcatcttcgtccgctttcgtccgcaaatgcttatgcaacttactgctcactgccttgttacactttccgggagcatgtacatgcttcatcggaatagccaatgcaataaactcatacataaaccatgccacattgatctctccttcttcttcgggaatcacaatgaggttatcaccttcttcagcatactcatgaccgaacttcaccagcagcttatctgtagagcttaccggttgttccatatcatccaggcagcggtcacacggtacccataccattccatccgtctggaagttcaattcgaaagcacgagatgttttctttacaaccagcgtaacattaaccttacccttttgtacttctggtccatcaatgttagcaaagaaaaggttatccagtacaaactcatacttacaagagtctgcctgcatgcctttcaaatcaattttgtatttatcaaactttcccaaagcttcttttatttattcgggcgacaaagatacaaataattatcctcataatgtagaaattagcaacgaaatattcattttttaagctctattctgaatatcgtccccttattgatctccgattgcttcacaaaaatggatccagaatgatactcaaccacaattcttcgtgctaatgaaaggcccaatccccatccccttttcttagtggtatagccaggagcaaaaaccgtttcaaaatatcgtttgtcaattcctttccccgtatctgccacatcaatacaccaatatcttgacgtttcctgtaccgaaataaccaatactcctactccacccattgcatcaacagcattcttacaaagattttctatcacccattcaaacagagcaacattcagccgcacggggggaagtgaatcgggtacatgggtactgattttcactttatctgaagtacggtgcgctatataatccgtcacccgttccaacagagcttttaaatcagcatcctccagctcaggaatagaaccgattttagagaaacgattagcaatcatctgtaaacgctctacatcctccgccatagcaggaatcaaatcatcctgtgggtattgtgtcttcagtaattccatccatgccattagtgaagagatcggagttcccagttgatgggcagtttccttggataacccaacccatactttattctgctctgcctttttagaactcaacaaagcaaagatagcaataagaacaaaaatgagtactaccgttaattgaacataaggataaacagctaaccgggtaagcataagggaaggtccataatatacattcagataatcgccaccgccattgagatctatgcgaatacaattaccttcacggttaaaatcactcagtttttcctttaaggagactattgtatcggctgaagacagttctatattcctatatgtctgtacatcctcattctgatcaaccacgattaccggaatagtatgattggcattcaaaactttcaagaccatagtcaaatccgtatttccatctgcagtttgcaaattcttcattgcttccgcccacacttccatacgtacccgttcttcagcagataaatcgcttatcagagaatgtgagacgtaaagagaggcaacagctatcaccatggcagctaataccaaccagaattttatcggatggatttcctttataaagcgcattatatataaataagatgtaaacttacggtatataaacggaaaaacaaaagaaatattatacctataaacacaaaaagaggttgtgtcaaaatgctggcacaacctttttttatgcgcaaagcccagactttcccaagc

SEQ ID NO: 6444 - DNA, 1448 bp, Unknown
  gut microbiota DNA sequence
gttaatccgctacgtaccgcaagtgaattctcgttgataaaggtgtaatccgtgaatactccggtgtaagagcgcagaacgatttgaataagtttgtccatgtcctctcccagttcgcgtaatttatacagttcatcacggcggacggtgaagtaaagacgggaggcattgtcctgttcgtcggtatattccagatatcctgcttgcgtcagaatcttcaatgcactgtcggcaggtacagggaagtatttgaacttccggcaaaagtcttccagattgaactctctgacacatcccaaaccgtctcccattgccatctggtaataatattgcagatgttcgtacacctgtttgatgtagtctttctccggaaaggtgtccgggatacgtttatgaagggtgactttgtccgatttggcatagagtattacggcatacgctttgttgccgtcacgtcctgcacgtcctgcttcctggaaataagcttcgggagagtccggcaaatcgaggtggattacgatacgtacatcgggtttgtcgatacccatgccaaaagcattggtggcaaccattacacggctttctcctgtctgccagcgatgctgacgtatatccttggtggcatcatccagaccggcatggtagaagtcggcggtaatctcttcgttaattaaaagttcggtgatttctttggttcgccgacgattgcgtacgtaaataatggcactacccggcatacggcgtaggatgtgaagaagttctccggtcttattttccgttttgcggactatgtaggcaaggttcttccgttcaaaactcatgcggaaaacattttcctgccggaagcacagccgcgcctggatgtccttcacgacttccggagtagcggttgcagtcagtgccagcacagggacaccgggtaggagatcacgtatttcggctatcttcagataggcaggacggaaatcatatccccattgtgaaatgcaatggctttcgtcaacggttatcatgctgacgttcattttccgtagcttggtgcggaagatttccgtatccaaccgttcgggcgatatatacaggaatttataattgccgaaaatacagttttccagcgtaacgataatctcttgcctggacattccggagtagatggcaagtgctttgattcctctttttttcaagttctgtacttggtctttcatcagagaaatcaggggagtaataactatgcaaagcccctctttggcaagtgcaggcacctggaatgtgatggactttccgccgcccgtaggcatcagccccagggtgtctttgccttcgccaatgctattgatgatatcttcctgtatgccccggaagttatcatatccccagtattctttgagaatttgagagtagggagttgaaggttgggagttgagctgcgcagtcataatacgaagaat

SEQ ID NO: 6445 - DNA, 3256 bp, Unknown
  gut microbiota DNA sequence
cttgggccttcactttgtgtcgatgtcttttgtatggcattgcattcactggtataatgaataataccgataatagaataaataatacttttgttttcatttctatatttaattaattgtttacggttgcaaagttagggcaaacaattatgacgaatgcatttttgtgatcacactatagaaatgtaatgtgttggtaaatagcaggatagcgaaagaggcaatcacatcttgctttcttcttcaatcattctctcttttattctatattttttctgactgagaggatgcgtgtcgctataaccaaagcaaatagcgatggattgtgaatcaagagaggtttcctgcaaacagaggtataataaatcactttctgtcaatttggaatattttttttgaaggaaagatatgtaatcatggtatatttcaaatatggtcttttttaattgatcttgctcagctgtggtcaacactttcattgcttttttattcgaaacagtttgtttcgaaagagtaatcactcttttataaatattgctttgctccaataaccagttaagtagtcgttgcttttctttctttaagttagctatactttgttctctttcttctatttgccttttaatattttcttgttctttctttaagttactctgctcttggggtaataagtcaattattaattgattattttcaattgtaccttgtaaagaagataatttattctgtgtttgttctaatgattgtttgtattgaagttggacacgtttctttcggtttatatagttttgatagccaagtatgattagaaagcaaatcgaaacaaagcctgcaatggtacaatatatgatgcgttttccttttaattgttcctctcttaccctcattttagtattgtattcataaatcagttgttgtatttcggttgactgttccatgcaatatagagaatctatgatggcggcatgttcttctaaataaatatttgctgttttataatctccgttttctttttcaagatcatataaattctttaaagtagtagacttaccttcaatcgatagctcttctaagcttttattcatataatagcgcgctgagtctttatttcctcctgtcttcaaaattaaatatcctagattactataataatttccatggttctccttttgaggtagtcttttaagggcattttgtgcataatataaggcggaatcaagctcatcaaaactatcaaattccagacttaaattgtgcttagacattgcaatctgtagagaatctcccgaagcgatagcataatgtagtgctttacgctggaacatgagtgtggagtctttttcatctattaagcaataatatgtactgatactgttgagggctattgatttatccaggtctgtgatagaacattgatacatagcttcgtatatttctatggattcgtcataatacccggcgtcaaagtagagattccctaacgaactgaggaacaaacttttggttttaagttcttttggaaagttttgtatgatggtcaatcctttttgaagatatgaaatggcttctttttcctcttccatttccaccgccagccttcctttataaagtagtgccattgctttttctttttcatcatcgtcataatactctaatgccacgtttagcagcgagtcacaaggtaatagggagaacttgcacttatccgtggcacgtgcaagaagcagtgcatagcgtgcgcattctttgtctgaaaaatcttctatttctttcggctgaatgttcaataattggagtacgctgtcaggatattcatccattagtgaatctgcttttaagaataaggcttctgtctcattgttgtgtgaacaggaaaagagtagcaatgataagctaagcaatgctgatgttattttcattttagttatagcttgtttgttttgtcgacggcaaaggtataaataattatttgtaaaacgactgttgaaatcgtttttaaatattcattcgtttcgcttttctttctgtatttcccatcggcagggcgatacaggctaaggcactttttttaagaggataaggtttaaggatagaataggataatcttaacggtgcagctattgaagtgtcatttataagctgttttagctatctacatgccacaacagaacgcttggaaacaatcagaaagatgggaagaaagccgtatgaaaaacatgctttgctttattgttttttttcttttgcctgtagctaaacttcgtcccgcagttgtgggctctacgttttccagttgagggctgtgcagcctgcaattgcgggatggacagcccacaactgcgggacgaagtttagctgcgggcataatgacattaacctgaatgctttttgggaaaaagtaaggagcatatcaagttttatatctatcatttgactttctacgtaatgggagtatggggcttatcatcccttaattcctaacgaaatgctaactttattcactcgtgcgacgaataaaagagatatttgcatcaattcggataaaggttgcataacgtatattaagcgcttgtgaattagtgaattacaagattaaaagcacgctttttgagccgttttacggtgtagaataaaactttcctacaccttcctacaccacttcctacactacctatttatctgataatcagataaacataatagccggtgtaggatgtagacaatattgatgaaaactcaactgtgtgagatttccttttattgcttactgagttcactttaataaaaaaaacagtgggagtgggttaagctctttcacattgcacttccactcctgccgcatctaagtctgcacccatgggtggattacgtttagcgagttttagctcaatagctttaacggtggggaaagtacggaacaggcgttttatgatacgtccgcaaacatgctccagcaatttagaaggtatctccatctcagccttcacattttcgtatacatcggcataactgacggtatgtgtcacgtcgtcagtctcggctgcacgtgcaatatcgactttcaatttcagattaatgacaaactcattacctacttcccgctcttgctgacctacaccgtggtaggcaaagaaacggacgttatcaaggaatatataactgttcatatcaaatagaatattcggtgaatgacaaaaataagaataactgcccagtaaacaaagaaaacaggtgtatttgtaccaacagctaaaga

SEQ ID NO: 6446 - DNA, 7398 bp, Unknown
  gut microbiota DNA sequence
aatattataatactatataaaatgaaattgaatagattaataatcatcgtaagtgccttattaggcattatccataatgcaagttctcagccccaattagtaacctatccagccccccaaggagccgaactcatgaacgatttctcagtccgggtaagagaagctgggaaagactggaaaccggtagatacatatatggttaaggtggatgaagtacggggtaccaaacataatgtagaaaaagcctccatgagctatttcgacttctccggcgaagtggaagtatcagtaaccttcaatcatggtgctattcagacaggcagagttcgcccactctcttacaagatcactccttccatatccggtaacactatgaccttcaaactggatcgtccgcgtaacttgtcggtagaagtgaatggcgatattttccacaatctccatctgtttgccaatccgatagatgagaacaaacctaagaaaataaaagataagaatctgatttatttcggcccgggcatacatactttcccgggcgacacgctgaatgtaccatccggtaaaactgtctatgtggcaggaggcgcaatagtgaaaggcctcatccaagtggtcaacgctcaaaatgtaaaagtacagggaagaggaatcgtgattcctaaccgctgggccggactccgcatcgtcaattccaagaatgtaacgatagaaggcgtcatcagcacccaatgtcctaccggaggctcagacagtgtgacgatacgaaatgtaaaagtcatcagttcctacggttggggcgacggactgaatgtcttcgccagcaacaacgtactgtacgatggtgtattctgccgcaactccgatgattgcaccaccgtctacggcacccgtatgggctttaccggcggttgcaagaatatcaccatgcagaactccaccctttgggcggacgtagcacaccccatattcattggtatccacggaaacacaaagaatcctgaagttctggaaaacctgaattatatcaatatagatattctggatcataaagaaaagcaactggattatcaaggctgcctcgccatcaatgcgggagacaataacctgattcgcaatgtccgttttgagaatatccggatagaagatttcaggcaagggcaactggtcaacctgcgcatcttctttaatgagaagtactgtacggctcccggcagaggcatcgaaaacattttgttcaaggacatctcctacacgggagagaatgcggaagtttccatgattatcggctatgacaaagaacggaaagtgaaaaacattcgtttcgaaaacctaacgataaacggtgaagtgatttacgatgacatgcctaataaacctaaatggtataaaaccggagatatggcgcgtatctttgtgggtgaacatacggaaagcgttacctttgagaaaaaatagaatccatccgcaaatatcaagcaacaagtcatttcaatgaatcctaaaaaactaatcatacttttccttttgtgcacaccgggcatatggctcagtgctcaaacacatatatcgccacgtagcagcatcaacttcaaccgtgaatggaagtacatgcgcggagatattaaaggtgctgaacagccgacttacaacgaccgggaatgggaatcaataggtatcccccactcgttcagtatcccctactttatgtcgaacgaattttatatcggatatggttggtatcgcaagctattccggctaacggaagaagatctttcgcaaaaaatattccttgagtttgacggtgtatttcaggaagcggaaatctttatcaatggacagcaggcaagccgccatgtaggagggtacaccggtttccaagcagacatttcctctctggtacaggcaggagataatctcgttgccgtacgagtgaacaatatatggaaaccgaatgtggcacccagagccggagagcatgtgttcagtggcggcatctaccgcaatgtacggttaacaaagaaatctcccgtacatattgattggtatggcacattcgtcacaactcccgatttaggcaggaatcagggaaaagcctccgctgtgagagtggaaacggaaatctgtaaccactcaggcaaagatggagaatacaggctggtgacccgtatcctcagcccggaaggtaaagtgatagctaccgtggaaaataaagaaacccttgccgcccactccgccaagacggtatttcaaaccacaaagagattgcgcaccccgtctctatggcatccagagcacccggttctctataaagtaatcagttctctgtataaaggtaaggaattgttggactgtgacgaaacggctttcggcttccgctggtttgagtggaccgccgaccagggtttcttcttaaacggaaaacatctgttttttaaaggcgccaatgtacatcaggaccaggctggctggggtgatgccgtcaccgaagcagccatgcggagagatgtccgcatgatgaaagaagcaggcttcgacctgattcgcggttcacattatccacacgctccggctttctcaaaagcctgcgatgaagaaggcatgctcttctggtcggaagcgcctttctggggtatcggcggatttcagcctgacgggtattggaacgccagcgcctatcccgctagtgaaaaagactacaaaggcttcgaagagagcgccctgcaacagttgaaggagatgatacgcatccatcgtaaccatccttccatcgtgacatggagcatgtgcaacgaggcattcttctccacaccggaagccataccgggagtacgtcacctactggaacgtatggtgaaactgtcacgacagctcgaccctacccgtccggcagcaataggcggagcacaacgtcctttgggtaaagacagaattgatttgataggagacatagccggttataacggtgacggcgccactttatccgatttccagcaacctgcaatcccaagtgtgatatcagaatatggcagtaccaccgctgaacggccgggagcatatattcccggatggggcgacctgaaaaaaaatgacggatggaaaggtctccattggcgtagtggacaggctatctggtgtggcttcgatcatggtagcattgccggcagccgactgggaaagatgggaatcgtagattactttcgcatacccaaacgttcatggtactggtatcggaatgaatatgccagggtagctcctcctgaatggcctcaagaaggcactccggcacagttaaaactggaagcatcagaaaccacaggagtacaggctgacggtacagacgacgtgcaactgacagttagcgtgctggattcagacggacgacggttaagcaattccccatccgtacagttaaagattgtttccggaccgggtgaattcccgacaggcaggtccatcacctttgaaaagaacagcgatattcgtattctggacgggcaagccgccattgctttccgttcctattatgcaggtacggcagtcattgaagcgacctctccgggactggctccggcacgcatcgaaatcctctttgaaggagcccccacctacgaaccggggttgacacccgtagcaaaagaacgtccttaccaacgtttcgtacgcaaagcgcacaaagaaacggttcagacctttggtcgtaacaatccaactttttccagcagccagcaagaggcacaaaatgccggcttagctgctgacggtaattcgacaacctattggcaagccgccgccaatgacgcttctccatcgtggacactggacacggagaaaggattgatattacgaaacatccatgtctgtttccctaaagctgaaatatatcgttatgtaatagaagtgtcagaagataatgaacggtggagcaccgccttgaacaagctggatacaacaatcgccgaacaagaagccaaaatctcctttaaggttcaggaggcaccggtaaacgcacgctttattcgtatccgcttcgtagataagtccccggctgccattgccgaggtagaagtcagcggcattgtacgtgactagttttcatccatactcagaaatatctcttacatcaaaaaactctgccggaacagatctaaactttctgtttcggcagagttttttcattcttctcatttccctcttctctgtcctctctgaggcctcatactctgatactttttatactgttcgtccgtcagaatctttttgagtttcgcatctgcctcattacgcttcttctccatttcctcgcgtgaaggcctttcgcccgaagcatctctgtttggtctcatctcctccattactgccttaaactctttagcctgagtttcattcagtcccagatcagttaccatctgttcgatgcgttttgacggatcaggacgttcgcctctgttttcctgtgccatacctacagccgttcccagaaacagggcaagggccaaacttaaaatttgcttcttcataattctattcatttaaaagtgagttaattccattttatttatgaaacacgtatctatgacaatattcccgggatatagtttaatccataaatagaaaaatcgactaacagaagttttttatcgatgaaaaagaaaagattcatagccaaagctttagctttacacaaaaaggagttacttttgcatatatcacttactttcagctacaaactatggcacgaaaattattacttttccattttctatccttctgctgtctactttcggcaaatgcaaccggacagattcccgatttaatcatcatcggaaaagacaccctgatgttactggaatgtcccatagaacatgactccattctcagccgccgagtgagcgaacgtttatcccgggaagggggatgcacggcttgctggaggaattatcaagctctgtggcaaatagaagacgataaattgattctcaaaaaaatagaagacagcaaaagtatctttgccgatcccgacaccattcctgaagttacaatagacctgaacggcattttcgacaaataccgtgacaagaaagatagagtgacagccacctggttcagcggagaattgaaagtagtttccggtaagcagatttactatgtccatatgggatttattcgggaacatgaatacgaaacggtctatcaggtaaaacaaggaaagattatttcgcaagccagctaccggaattcattaaagagaggaatcccgataaaggacgctttgaactttgtctgtacacaattcaacggagatcgtttccccgaattagtagatactaaagtggtggcaacagttacaattctacccaaacctgatggaagcatcgatagcatggaaattcatgtacaccgtccggatagcgtcacagaagagcggaagaagctctatgcagaacaaatatctatggcattgcataaaattccccgatgggacgtactcaccgtacgtaataaaatacggaagactgatccgtggaccctatccctatggaaaggaaaaggctgcaaagccctctatcaggaaaaacaggtaatggacactttactatacaacgataccgtttatgccctacggggatttccacttcaatatgatatgaacctttatgaaaaagtagaaccctatttaaaagaagaatggagaaacgactgccaccgtggctataccggacaatggaaaatagagaatggcaagctctatctcataaacttgtttcacggaacaagtacctcccctctcccactcgactccatcttcggtatctccggcaagcaaccgatagaagcatcctggttttccggcgaactccatctggtacgcggaggcaggctcatagacagttacgaatttagggatgtatttaaaaaggaaatattctgcgaagtaaaagagggaacagtcatccggcagaaaacttacaataattcgttcaccttgggagatagagaagctttgaaacaatgccaggaagaactacagaaaaaagagatatggagtaaacttccggaactaaaaggcaaatcagtgcattgcagttatcagataagcctgcgaccggatggaacaacagattcaattgactgtaccgtgtatgtgaatggatgtgattggcatcaaggtctcaaaaaatatcacaaagaaatcaccaatcaggaacatctttatatccggattttcaaaaaagcattgcaagccgttcccaaatggaatgtcctgtacattcgtgataaaatcaagaaatatgaagattggatagatagtaaaagatgcgacgattgaataaaaacaatctcaataaaaagttcgttcgggttactctcactaccctcactttggaaatagatacttgataattaaaatattaaatgtgagtgagagtaaaaatatagcgtgagagtaggttgtttactctcacgctggatttttacattttcgcatcgtaacttcttctgttataccgtagtaccccacatttagcgcatatatcaattggttctgtaatctgatgttttttaactttccttccccgcataaacgacggatatgccccattatggtcgatttcatcatgccgcataccctttggaagtcacttcttgtcatcatgtggtactgactaaaagcaaaggtattaatttgttttacataagggactattctgttttctcctgaggaacatcccgttcacccttaggaatgattgggtagcaaccttggtcaaccgctctgttaaccttggttgctcggcctgttgaccttcattaacgagcctgttgaccaaggttaacacccaatcggacttactgcaaaacccaaaacatgcagggtaaagtcaaataactccctgtgtatttctcaattactattgaagcttttactcttatacgaaaaggttttcaacccctactccactttatcattcaggaaactttcaagctgtcctgcataataaaatggaaggttatacaacgtatattgtttcccggaaggtaaccgtatttcatccgagcaaaacgttccgttccacaaacgtatggcaatattctctttcgactcttccataaattgatgcagagagcgcaatcgggaattatctcccgttttcacttctatcggtaataaacaggacttgaacttataaacgaaatcaacctccgcctgcgaattacgggcatcgcgtacccagaacattcgtttagtaccaaatgtaacagatgcccccaacaattcttgccccaccacttgttcggctatgtctccattccacagttcgtctgttgcagaagtgaacaataggcgttcctgcatttccgccacataattgaccaatcccgtatctaaccacaaca

SEQ ID NO: 6447 - DNA, 8958 bp, Unknown
  gut microbiota DNA sequence
ttatcaatatattggattggagttgatatgctgactaaacaaaaggtttggttatatgtaaagcgaagatttagaaaatgatattgtattttataacagcttttataaggcatctgataagatgccttataaaaaaagatttgttttacgctataattttataattccctatattcctttgccgcatcaaaacaaggacagtttttcatcgggttgaggtcgtgatggcctactatcaatgcccgtggaaatacccgtttcagttcgcgcagtaaggctactaacgaagctttctgatgtaaggtgcgtgtatcagccggctgtccggaagcggtaagtccgccttcgtagcaaatacctaaggaatggcggttatgattccggcaatgtgctccaatgcattcgtaaggtcgcccacggtgaatttcaccgtcacgtgtcacgtagaagtgatagccaatgtcattgaagccacgatggtggatgtgatcccgccgacagtcgtcaaaactcaggcgcacgccctgaggcgtggccgagcagtgaatgataatgagtgtgatggttctcatcagtgcatgcaggaggttataccgaatataccggccaaagcagtggccaccgtgacgataactttgaggacaatgccccatactgattttgatttcttttccataaacctattaaatttaaaagattaaaattgaaacattagttgaagtttaagaatttgcgtagcctttcatggttaattctttcattattaatttctgaatgttacgcctttatattctatcccagtgggttttcatccagtcctccgtctccggtattgccgccgtcatccggtttgctgccggaatttccaccggaagagggcgtttttgaaaagtccaccgttgtctgtcctgccttttgagctttgagcagaaggcgtgtggcagcacgggtaggtacgggtgaaaactcaaggctggagaatatgcttttcaaatcttcgcctggaatgaactggatattaactccggtgatgttggtagccgtgaatttttccgcggtttccgcacctcggctggtgatctgaagacggaattttcccaggtctccgaagtctacctgttcgcccgcacgaaggccgtcaatcatgttttctacggtagcgatgataactgcggtgacgtcggcacgactggcggtggtctgcgcggctacacggcggctcagttctttcaggggcagttcccttgtgatttgtgacttggcgtaagcctttgcgctctcatcctggttttgcggattcttgagcattgcgatactgtaattcagtcccatgataaataaattaaagaattaataattaaagcattatgttcttacggaaagagtcggcgcaactccgggaaaacctcagtgaaactctgtgtcttccgtggtgaacaatacaaagataaaacctctcatacctatgaaaatgagtgacattgatgcctgataaacctgtttcggaataggtgatatccgatgactttttcgtacctttatagcataaacagtactctaaaagttatcgtaaaatgaagaagaccgtatgtgatcatgatgtggatgaggctattgaaggatggcctgttcgtccttattctaagagcgagttggcacgcgcttatgcgcctgaaataggagagcgttcggctcttaaccgcctttcgcgctggatacgcgggaacgtggttttgtatcaggctctgctggatacgggttatcgttgcgcccagcaaattttcactagtaaacaggtggaactcatttttgagtatttagggaagccttaagggagttgagaggggagagtgacacttgcggttgcgaagcttgacacttatgcaagtgtaagcttacgcagtagcaagtatcaagctttgcagccgcaagtgtcactccggttaattctctatgagactgacccatggtaagtggtccttacccatgactttgccttgtgcttccgacactacctgttcttcggactctcgttcgtcgtaacgtccgcaggcttgtcggacatataggacgcttcctgtctgacacaggtcctggtcgcgtacttttagcatgtcgagtcgggtatagttgccgtcctgccgtttgatgcgggatatggaaaatatgaaatcggcaagattggcccagttggcgcttcccgaaatggtgtacatgtctatgttttcaagttcgttcttgccattctgtttcttcagactgcgggggtgcgctacgataatcacccagatgttatggattcgcccccatgtctgcatttgcgtcagcatagcttttatggcttgggtttcggtgttgtagcggttggtttccacttccatgaagaggtatgggtcgataatgagatatttcagtggaaggctgcgtcgcacgatgtccgcccttgcgatgatattgtcgggagtgggggatacttcatgcaagtcgaggtgcaccatgtggctgttcaggaaactgacgataggtttcaactgttcttgggtataatttacggtgtttacctttcccaacatgagctgtacgaggtgggcaatgtgcttatctttgtcgggcacttcgaaagagaggtaacatacataacgtccggtctttgccatgagccggcacgtgagatcgtttaggaaatcggtcttgccactgttgggcattccggtctcaatgatcaaccctccctggtcggtggggtggaatacatggtcggtcaggggaccgtaacctacgtcgtatccgtggtcgtattctccgtgcagcacgttcagaatcccgtttgcccgttcgcttacggtgacgatgtccgccgtgtgttgcggtcgggcggattcgataatttcacgcactatttcaatgccgtaggtgacgagtacgtcagagatgtctttgcagtcaccaggtagttcggtgagcagacagcgtgctccgaaatagtcgatgagatgttttaccagagttcttcctggcaggtcggtgtctccgcaaatcacgatgtccctaacctggtccatccagggttcgaaggcttcgaagctctttgagagatcgcttgacgctccgttgggtacgctgacggcgtaaggatatcctgcttcattgagtgtcagcacgtctttctcgccttcggtgatgatgagtcgagggatggttgcttcggatactttcagagggttgatgcagtcgatgtggtaaggtggacagggtgcagttggcgagtcttggctccagagtttggtgtaggcagttgctttttccatgccggttatttctctttcatctgtgcttctgccggttgagggatcgcacgaacgatatttggcatttacaggctgaccgttcaggtagttgacgtaggctacgcaatgatgcatggctcctgggttcttgttatcctcgtctttgccgaagcagcggtgggtgaggcaaccgatacgggcttcgatggctgttttcagtgatatgccctggtcggcaagatagcgccgggcagtgagttggtcttgatcggtagtttcagaatcgtttgtcagcggttttattttggagaatacttcggggggcagctttttgtagtcttcgggaatcatgggtacctcggatgtggtacttccgcttccggcttttccttctcggcggatgctgtggaggcgcttacaagcagtgttatagtttccggaagtgccatcagcgaattttccatttccgatgcctgcggatgccgagtcatagttggtgcgttcttcccagaagtctttgagctttcctttgaagtcgcaacctccgtagaaacaatgaaaggctcctgtctctttggagatataaagatgttttttgccgcatttagggcactctgtcacgaaattttttcccacgttcttgcgttcgggaaagtcacatagataataaaatggtttcattggaattataaattatggtttatggaagttttatacccatttgttgctcagcacattccaagtcgcttctgctgatggtcttgctggtgcgccctcgggtatgttcaccatcccttccacctcatcgtcatagaatcgtatttcggattcgggatctgtccattcgaattcgctgagggggtgattgctgcgttggttagttcttatttcatggattacttgttttcgtttctctctgtttgttcttgcggtatcgtttaacagatgttgcccgtgaggtgattttaatagattgttcagccagcagagccgtccggcatgattggatttcataaatcgtgcctgcgaagcaaaataaggaattagtagttcattgaccagataaatgagattctcacatgcgtgcttacgtgtgactccttcgtgcaactgaaaccaattgatgagtggcgttaacatctgtgctttctgcgtggaattctcattgatgagatgaaaaaattctttagcggtagctaaagattctggtgtaacaatatttattttagaagaaaagttcttggaaggtgcttcgccggtaggcgaaagttcttcgttagaagaattccctttagtatatatattattatatatattatcttccacaaaagtttgcgcaaaagcttgtgataaattgggtgatgcactggttgtatttataatctcatttgttctatttttagaatttgcatgataccagagtggtgaataaaatgctttaatctgttttgctttatcatcttggatgaattcgaatgattggcttctctttatagcttctatgagtgattgcgtggtagagaacctcaatgacatcttgatatcatagaagttttctatcggataaaccttttcttcattcatataggctgttagtccaagatataagtcgagtaatttggagattgttgaatctgtaatttttcgacttttccattgcttgattatcttttgtaattccataatggaaatactcgttttaagtgctttcattacttgttgtttttttgaaatgtggttcgaagttagaaagtttttaaaagagtatcgtaccaacatgttggtacgattgatggattaattattgaatattaacatttaattatatagaaatcgtgttggaaatagcagaaaaatcgtgtggtcataagagtttaggtgaatatatcaatcagcttcgccttgatttaggggtaagtattaaacaactttgtgaggactgccacattagtcgacgtacttattacgagagttctgagtggtaaagatttgaaactgagcttctacattcgtattctcaatgcctttcatgagtatgaaactgaggaagaattcggagagatgtggagggagatagccttgttgctattttgattttattaaaaagaaagggctttatgcttattttcatttaaaatatatagaaatgaatgtaataaaaacctcaattgatggagttgtgatcattgaacctcgtctttttaaggacgttcgtggttacttttttgagtcttttaatcagcaggagtttgaagaaaaggtgtgtcataccacatttgtacaagataatgaaagtaaatcttcttatggtgttattcgtggtctgcattttcagaagccaccttttgctcaaagtaaattagtgcgtgttgtgaaaggtgcagtgcttgatgtagctgtagatattcgtaaaggatctccgactttcggacaacatgtatcagtagagctgacggatgataatcatcgtcagttctttatacctcgtggttttgctcatggttttagtgtgttgagtgaagaggttgttttccagtataaatgtgataacttttatgcaccgcaaagcgagggggcaattgcgtgggatgatccagatttggagattgactggaggatgccagcagataaagtcttgctgagtgagaaagatagggtacatccgagattgaagaatgctgagtggttgttcgatagtaatgtgtctttgtatttatgagaatattaatccttacccaacccttgcggaataactatggtgggctgcttcaggcctatgctttgcaacagatattgaagagtatggggcatgatgttgtgacagaccgggatggaattgtgcggaacttatctctgtggaatcgaactctacattttatatatcatgccattcggttttatatactgaaggattatcgttattatccatatcgttatctatttccttcattcaatagagagaagaaagctcagaagactatttccatcaatatgaaacgttttgttgatacttatattgatacggttgatttttttacggaaaatgtagaatctttgagtgataaagtcaaatattatgatgcaatagttgtagggagtgatcaagtttggcgagctccgatgagtgatatccctacttattttttgtcttttacaaaaggtatacagataaaacgtgtggcttatgcagcctcattcggtacagatcatctaagtgagtattcaaaagcagaaataggaatagctttggaatgcatcaaattatttaatgctgtttctgtcagagaagaaactggaattagactttgtcgagattatttgaaaacaaatgcggttcatgtcttagatcccacaatgcttttgaataaaaatgattatctgaagttaatagaagatgaggacagatcttgctcacaggatatattactaacttatatcttggacagaacgccagagaaaagtataattatagaaaagattagtaattttctgcacttgagtccttgtgaaaatggccctataaaaaacttttctaatatagtggaaaataacgcttcagaatgtatttatccttcgatatccaaatggttagcaggattccgtgatgctcagtttgtagtaactgattcttttcatgggacggtgttctctattctttttaataaaccatttgttgcgattttgaatccagaaagaggttcttcaagatttgtttcactgttaagtatgttgcatttagagcatcgtatgatttctatagatggagaattgtcaaaaagtcttctatcccctatagattatagtcagataaataaaatattagatgattggaaatataagtctattgattatttacaacaatggctacgaatgaattaatttgtttaatcttatggaagtaaaagtctcaattattgtatcttgctacaatcaaggttgttatttggcggaatctttagatagtatattgcaacaaactttctcaaattgggaatgccttattataaatgacggttcaacggataatacagaagtggttgctaattcttatattcaaaaagataatcgtataatatatatttatcaggataaccaaggggtttgtgctgcacggaataatgcgataaagaaatcatcaggagaatatgtactttgccttgatgctgatgataaaatatcaccggagtatgtggaattatgcgtaaaagaattggaattagattcgaaaatagctgtggttgcttgtaattatatgtgttttggtaaaaaacatggtaaagttattttagagccatattctttagagaaactaatggggcataatttatttgtaaattgttctatgtttagaagaattgattttgaaagggtaaaaggttttaatgaaaatatgaagttgggattagaagattgggatttttggttgagcattcttgcccaaggtgccaaggtaaagtatttaaagggctttcatttcttttatcgtatgaaatcagcgagggaatctagaaatcaaacaacgtttgtggtagaaacacaaaaaaaacttcgaaaacaaatatgggaaaatcataaagatttatattcagagatctattcttctccttattattcagtagaatatttacttgtagctaattcaatagaatatcgtttgggaaaactgtttttacgtccttttcgtatttttcgttctttatttgattagtctttttttaatgttatgttagattatgtattgaataatatacgaagaaaaaatattgcttatatgaatacttgcctttttactcatagtcgtttctcaataactggtttttgcacgaattctaacaagtaagaatataaacatgatcaatttatatcttttctttttcttctgtcttagtttttctgtcatagtcgatcctggtggaaatttattggggctaaaagagttttttttctttttaacgtttataagcggattagttctagtcaagcggattccatctgttattatggtaatttatatttttataggattattatttcctgtttatggtctgttacttggctgtattgtgggtgaatatttttctatagaatatgggatgatgtatttgaaagcttttttatttatctctttgatattagtttcatttgaatatggcatgagtattgggcgaatattttcaataacatctttattaataatcccaataactctcattctttggtgtttggtaggagagttttcagaaatggcaagcaaagcttatcctagagatattgtagtgatatctcgtcgttcatttggtcctcttttaattgatccatgtattttttataagacatctccattattgttatttggtctttcttacctctgttcaaaaaagcaaaatattctaacgggagtgttacttgtagcaggttttcttgctatgttcgtttcgggaactcgtgcaaatttgttttctgttgtattattatacatatatttcttttgggtaagattgaaaaaacatgcaggtttgaaacgtctatttattattggaatttttttgtttggaatattactgttaccatatttaatgaatgaagttttttttaatgataatgagccctctttggatacaaaaacacagttaatagattcatatattcaatattggaataataatacttt

SEQ ID NO: 6448 - DNA, 11756 bp, Unknown
  gut microbiota DNA sequence
gaggggagtacatatattttctgtaagtgaaatagatcttcaccttgttgttgcacagatacataaccacacacttctttgtccttgtatccaatgaaatagacatgtccttcttcttccatttgcttgcggatgttctctatggagtacatccattccatcatgtaatcgttttgctccggtgaaaggatttccttataggtttccggaaatatctgccatgcaagtttatgaatcagctcacaatcggctgtagttgcttttctgatagttaacatagttcgttgtatttacagtttggtcgcaaagatacatttttctcttatatgttattctcccccttggtgctttattaataaggtgtgaatagataatagtgttaattaaataaaatacaaggtactttgtattgcatagtactaagataatacatatatttgtgtcatacaaagaaaagctctatttcaatcagttgctatctttgctgtaaaatagaaaattgtcgaatcgtaaactaataagagatggacgtaaataatgtaaagtcgcaaatgcgtaagggcatgttagagtattgcatcatgctactgcttcacaaagaaccggcctatgcttcggatattatccagaaacttaaggaagccaagctgatcgtagtggaaggaacgctttacccgctgctcactcgtctgaagaatgacgatttattaagttacgaatggatagagtccacacaaggaccaccacgtaaatattacaagctcactccgaaaggggaagtttttcttggagagttggaaatctcctggcgtgagttgaatgaaacagtgaatcatatagccaactattagattcaagatattaaaaacctcgtatcagtataaattttaaaaacaaatagcaatgaaaaagacattaacagtaaatttgggcggaactgttttccacattgatgaagacgcctatcgccttttggataactatctatgcaatctgaaactgcactttagaagacaagccggtgctgacgagattgtaaatgacatcgaactccgcatctctgaactttttttagagaagctgactgctggctctcaggtgatcactataactgatgtagaagaagtaatcaatcgtatggggaaacctgaagagatggaaacagggactgaggagaatgctgcttcaggttccggaaatacgaagggtgcctccggtgaaggttatggttccggttcctggaatagtgataataattcttcttatacttcaactcgtcgccgtttgtatcgcaatccggacgataaaatgctgggtggcgtgatagggggacttagtgtttatttaggctgggattccacttggttccgtttggttcttgttttttgtgcaatctttggtttcaagttcttgatccctatctatatcatttgctggatagtgattcccgaagcgcgtacggcggctgagaagttgaacatgcgtggtgaagctgttacggtagagaacattggaaagactgtaactgatggttttgagagagttacaaataatgtaaacgattatatgaagtctgataaacctcgtacttctatgcaaaggactggtgatacattattaatgattgtcggttggttcctgaagatttgtctgattattgtggctatcatttgcagtccggtactgtttgttttcggtattgtatttgtggctttgctctttgccgctattgcagttgctattggtggtggtgcagcgttgatgtcttggttcccggctattgattttgtattacctacatctcctttgtcagccatcgtactatatattgcaggtatcctcgtagtgggtattcctctggttagtcttgtttttgcaatcttccgtccagtgttcaattggcaacctatggtttccgggttgaagtggacattgcttattctgtggattgttagtgctaccatcttctttatctgctataccatgcaaggatttacattcccggaattgctgatgcgagggtaacagattgttattttagtttttctgggggcttggagatattctttaaaatatctccaagctattttaattaatcataaatataaatactatgaatcggacgcgtttttattatcttgacttattacgggttttccttactatgttggtgttctatcatcattctgcggttgctttcggagcttccggtggatggtattacatatcgaaggaaacaactaccggtctaactcaaggattgctctcagcatctatgggcattgaccaatcctattttatgagtcttttcttttttatctctgcctatctgatgcccttttcttttgatcgtaaaggaatgaaatcttttatatgcgatcgtctcaaccgtttagggattcctcttttgatttatagttttctagtcaatcctctattaatatattggatatatggggtatggggtagaccgggttttggaccgatgtggtttgtatttacactgttgatttttgaatttagttatgctgtttatcgccatttttgtacaaagcggttggcactgaattggaaatatcctgcaataatgggtattcttctatttatggtagtaacgggtgccgcagcatttcttatccggctttatgttcctgtgggaagtgaagttttgggattgcagttaggtttctttcctttatatataggtatgtatttattgggaattgtagcgcatcgtaatcactggttggataaaatctgtgtgaagaatgcacttccctggtttcttatagcaattctttgtggtattccttctttattgattgtgatgagtcgtttttcagaacagatggatttattctcgggtggatggaatttgcaggctttattttatgccctttgggaacctgttatgtgtgtgggtatttgctattttctgttagcatacgggaaggctcattggaacaaaccgatgcctttggttcagaaattgtccactgatagttacgcggcttattttattcatcctgttgttgtggtaggttgcatatttgttatggaacttttgccggtctctccattgctgcgattggcattggtttgtgtggtgggcattccgtgttgttttattgcggcaagaggagtgaggttagtgctgggaacggttggcgtgaagatgtaacaaaaaaaagggagttcgaaaaattcggaactccctttgtgtctaatcatctctgatttatttcttcatccttagtactctgattcctgtccagttatcattattctgtagcatttgtcctaaagccactttggaaaccaccactttcttttctttagaagaagcatgcagcagactcagtttgccgtttacatagaaagcaatacccatatgagctacatccaatcccggagtattcgttgtaatagcaatgatatcaccattctttatccaaggcagaccattaaacggtagcttatctttgggaacataatggaattcctgaccattcaatgacttctcgatctctttcatttttgctacattctccggagatttactcagctgcttgtacagttccggatgagaagacatgtaggaaagagaaactttctgggtgtatgggctgtaagctgttgttacgtcttccaggaaaccgttacgaacaccattgtttacccagtctgcaatgtagtgcaggcgtgaaggataaccgttgatttttccatcacggtagcggattttttgcagattggtagcaaaatcgccttcagctacctgtccgtcttcggtaggagagagggccatagcaagagtatattctacaaaggtggtgcaatctacttcatcacaattaatgataagttcttcttcgccatcagtaacttccaacgtatgtgctacgtaaggaatatccagaaaatttattccattgttcagcatggcgttgtctttttcatctgtctgagcactgacagtagctacacaaagcgcactgaacaggagggtaatcattgttttcattgttctttcgtttattaatataaataaaaaaggatgtcgcaaaagtacgacatccttttcataaatccttaatttggacagattaaatttaatattgatagattaaatttttgtaatccgcctttttgtcaaatggtacgatggagaagccgtattcaatggcattttctacaccgggacgaatcagatacggttcgtgtgctatagctccccaactattatcaccacctacacccatcatacgatagtcgataaacatatctacctgtttcacgggttgtgggtcggtgaggtgacggtgattcgtttcgttggtacgtggagcaccattgtcgatggtttcgccgctatccagacttccaagcagatagttggaagcattcagttcaaacgtacggtcggcaatgaagagtaaaccggctttttgtttagtggtgagtgcacaccagtaaatatccgtacgatgctcattttcttgcggacggatgtacggttcgtacaagtcctttatcggagtagtatattctccgataaactgggaagtgcgacggtcacgatagttctcttccggaccacggccgtagtaagtaaggtcgtttaatatttccgataattgcatgcgcaaacctacacggggtatcatcggagtttccgtaccttctgctacaaagcgattatccactttgataatgccattggcaaataccttataggtaatttcccactgcgcatctacctgcggaaaacgataggtaacttttacaatggacttgtcaccatctttagaaacattgaacgattctgccttaggtgtctggtaactggcctcgcgccatgctttcaggcgagtgggaagctttgctccgtaatcattatcggtaggtgcacgccagaagaaaggttgcgggccctggccgttatggatatactcttgtttcttatagatataagaggtcagcaagccgctttgtttatcaaatgtagccttgaaatcatcaccgctgaaaacaacctgtgaaaatacttcatctactttagcgggatccatgcgtaccacttctttcttaaagaacggatgaacataagtttgttcacgtgcgattaccgtaccaaccggtaagaaaggttctgcattacgtatggttgcatagaactcgatgcgtacatctcccgtagtattcttttctttaggaataccttgcaggaatgcactggtagccgtcttgcccggagcagcattgatattgtccatctgacctttataaatctcttttccatgatcgcgaacgacatagtggaaatcatatttattcagatcagtaaatgagaagtcattgcgtatctgcaccgtgcaggtttgcggatcgaacttaatgaatttaatgttctgataaaccttacccatttcaatcgtctggggctttatgctgcggtcgggataaactacaccattgatgcagaagttaccatcggaaggagttccggtatcgccatagtcaccaccataattccagtatttgcgtccgtcgctggttttggcggcaaagccttgatctacccagtcccagatgcaaccaccctgcaatatcggatatttctcaatcacatcccaataatcctggaagttgccaagactgttacccatagcatgagcatattcacacaagataagcggacgagtcatttccttattctgggcatacttttcaatagattggggagaagagtacatcggacaataaatatccgtattccattctaatccggcacgttcgtactggataggacggctatcgagcatcttcagcgtattataggttacgtagaagttcagtccgtttccggcttcgttacccaatgaccagatgattacagacggatgattcttatcgcgttcgtacatgttcatggtacggtcgaggtgagcattcatgaataacggattgttacccaaagtaccacctacattgaggttataacccataccgtggctttcaatatttgcttcatcaattacgtacatgccatattggtcgcaaagttcgtagaagcgttcctgttgcgggtagtggcaggtgcgtacggtgttcacattatactttttccagagttcgaaatccttaatcataagatcttccggaacgtaatgccccgtgtattcattatgctcgtgtacatttacaccttttataaggataggcacgccatttacaagcagttgcttatccttaatctctatcgtacggaaacctaccttgcaactggtagcttctattacttcgccattggtgcgcttcaggctgatgacgagtgtataaagattaggcgtttcagctgtccaatgctttacaccacggagggttttctttgtgaattctacttcattctgatcaccttccacacgggtagaggattgggttacttgctgatcctgatcatcgagtaaacgataggaaactacataaggagactttatatcactttcgttcgtaagcttcactttcagttgcaggataccatccttgtaataaggatccagcggagtttctaccttgaagtctgcaatatggattttgggtgtggcatagagatagatatcgcgctctataccgctgatgcgccaaaagtcctgacattccagataattggcatccgagaaacggtgtacctgaatggcaatcatattcttgcctttttttaccatggcggtaacgttgaagcgggcaggagttttggcatccttgctcatacctacaaacttgccattcatgtaatagaaagcagcaccgcgcacaccatctgcactaaggaagatttcttttccatcccagtcattacctacaacgaaatcacggcggtacgtacctgtcggattccactctttgggtacataaggtggattaggcttgtcccaataaggttcgtaacccttagaacagaactcgtaaggctggttgacgtagatcggagtaccgaagccctgcaattcccagttacccggcacattgatgtccggccaacggttcacctcagtacgcacgttcatgaagtctgtgggacggtcggcaaagttttccacatagttgaacttccatttcccgttgagggataggcggctggctccgttcgtccggtcgttgacgatagcatcttcttcggtggcataagaagtgaatgtactccggggagcctccttgttgatactggtcaacttcggattggtcaactggtcgtaacggtcttcctgtgcctgaagggcgaggggtagtaatacgagacaggtgataaaagtcaattttttcatgagttgatatattaattattttttctcgaatttcaccccgtcacgcaaccacttctccagttcttctgtccactggcgtttgtaagtgaagttatcacggaagccccagccatgtccgccaatggggtagatgtgcatggaaacgggaactttctgttgattgagagcaaggaagtagccgatactattcatgggcggcacagcgccatcatcagcagaaagtacgatgaaagcttgtggagagcggggagatacacgacgttccagagaatacgcatcttccagttctttggtcggattatcaccaagaaggttcttgcgcgaacctccatgagtaatgcccggtaccatcgagattaccggataaagcaatatctgaaagtccggacgcgtttcatcactactgtaaagtgtagagagagaagcagccaggtgtcctcctgccgatgcacccataacgcctacctgattcggattgataccccattcttttgcatgctggcgaatcatgcggatagcctgttctgcatctgagaggggcacttcgcgattcccgttcggcatacgatatttcagaacggcatacgtgattccctgtgtgttgaaccaggatgccatgtcatggccttcgtgattcatggccaggcgggcatatccgccgcccggacacatcaagatagtcatgccgttcggctttgccggacgataaaccgtgatggtgggattaacgacattggccacacggccgccgttcaaatcttcctgatctcctgtcaggccatttgtattaggagcaccgttgggccacaagggtatctcaacgggcttctgagcagatagcagagttgacataaacagtgctgtgataaataaaatcgttctcattgtatttttattatttggttttcatcgaagccttgataaagtaaattatcagcaatgcataagcacccaatgccagtacttcggaccacgtattgtttacccaagcatcattcaccaggttgatacctccgaaacgcattgctgcactgactacgcccataagcgcaccaccggcaatgaaaccggatgccagcaacgtacccttttcgccacgttctgcattaagagcagcatctttgctacggctggttacgtaccagttcacagcaccacccacaacgagaggaatgttcagttgtaacggaataaacatacccaatgcaaatgccaatgcgggaattttgaatgcattcagtacgatagcaagtactgcaccaatgccgtaaagcaaccagggagcacccacgccattcattaacggttcaataactgccgccatcgcattagcttgtggagcagccagttgtccgctggtaaatccgtatgtcttattcaggataatcattacaccacctacggttgcagctgaaacaatcgttccgagaaacttccaggcttcctgtttggcgggtgtactacccaaccaataaccgattttcaagtcagtaatgaacccacctgccatagatagtgccgtacacacaacgccacccataaccaatgcggctaccattccctccggacctttcaagccaacagataccatcactaccgatgccagaatcaatgtcatcagcgtcataccggaaaccgggttcgtacctacgattgcaatagcattggcagccacagtcgtaaacaggaaagcgatacctgccaccagcagaatagctaccacagtatgcagcaaactgccttgcatcacatcgaagtagaagaataagaataccagtaacagcgttataatagaaccgatagcaataatcttcatagaaatatcgcgctgagtacgcttcatgctggcttctacattggattttccacccatctccttagctgccagtcctacagcactcttaataatgccccatgacttgatgataccgatgatacctgccatagcgataccgccgataccgatgctcttggcataataattgaaaatttcttcgggagccatgctgcctacggtagctacaattgacggattccactggttcaacacactgtcaccccagatcatggacattcccggaatgataatccaccatacagccagtgaaccggcacagatgatagaagcatatttcagacctacaatatagcccaaaccaagtacggccgcacctgtattcactttgaataccagttttgctttatcagccaacatctcaccaaagccgcatacacgtgtggtgaaattttcgttccaccagccgaatgtggcaacgatgaagtcatacaaacctccgatgatacctgccagcaacaacggtttggcctggcttccgcctttttcgcccgataccagtacctgtgtggtagctgttgcttcggggaaaggatacttgccatgcatatcacttacaaaatatttacggaacggaatgaggaagagaatacccaacacacctcccagcagagagctgatgaatacttgggtgaaagtaactgtgatttcttccggataagtttcttgcagaatgtataaggcgggcagggtaaagatggcacctgccacgataacgccggaactggcgccgatggattggataatgacattttctcctaacgcattcttacgtttggctgcgcctgatacgcccacggcaataattgcaataggaatggctgcttcgaacacttgtcctactttcaatcccagataggctgccgcagccgaaaagaggatagccatagcgataccccataatacagaccaaaggttaacttccgggtacttcttgtcagggctcatcaacgggttgtagacttcgcccggtttcagttcacggaatgtattttccggtagaccggtcaatttctcttcttcttgtttcatagtttcttaattgcttttatgttttatagttattatgtcgtcaattaattgtttattttatccaaatcagcttcaaagaaagcaaaaaaaaaggagaattgaaaaattctcctttattcttatatataaagatgcttattttgcatctttcggtgtcatatctccttctacaaagagtcgcatcatttctgttttggcattcgtgcgcaaagtgatggactttttgaagtgtcccggatacttgcctgttccgttgtaagtaatcttaacggttccggttttgcccggcaatacgggttcctgggtatattcgggaactgtacatccacaggaagctacggcttgatgtataaccagcggagcatcgcccacattggtgaatgtgaatacacaacttactaccggatcattttcagaaaacgtaccgaagttatgtgaggtcttatcaaacttaatatcagctttcccctgtgccgaaacgtaaccaatgctcagtacgagcataaacatatacaatgtaagtcttttcatgtctataaatcttttgtattacacagtgggcaaaggtaaggcatttttgtgaaaattaatccaatgatgtgcgaaatagtattaaatgcgcctcagaaggtgctgtggcgtatgattaatagtgaaaaataagggaaagagagtgccgaaatcagctctgtatcatgcaggtatttctctttttccgtgcctatattctcgaaataatgatagttatattcgggatggagatggatgcaacggtgaatttcttcggtacattgagaaagtttcatgatgacaatggtagtctcttcctccatatatttctctatttcttcggcggtaatgataccgggaatgacggtcaggcgttcctcctggctggcaatgtggagtcctgcacaggcacctgctgcaatgaaggcggggataccggcaatgtgttgcacaggaatattgtcggcttgcagtttctcaaagatatagtgtacggaagaatagaaacctgcatctccttcggcaacgatgcagacttttttattttctttatgaagaagggaagcttcgctatacactttatcgtaagctgcgaaagcctgttctcggttcttactcataggcaatgcaaagcgggagagggtggtatttggaatattcagtgcatgcagtatgtcggcagcacgcgagagtatccgtccgcttgtggtgcgagtttcaggacaaaagatacaatcggcattttgcagggctttcaagcctttcagggtgataaggtccggttcgccgggaccgagggatacgaatatgatggggttggacattttgttagtgattaatggttagtgtttagtgataagcaccctcataataacttttatggggagtgcaaaattggggattttctgaatataaaacaaaataaaacccgatttcttgtttatctatcttttcttgcttactaaagtcaaacgctctggtgcaacggtactttttaatgaaccgaatgcaataatagcttgcttgccaac

SEQ ID NO: 6449 - DNA, 54112 bp, Unknown
  gut microbiota DNA sequence
tatccgcttccatttcaagggttatttcagaaaagggtgttctctcggggctttgaagttcttgcatatacttgaatttcaatcacttgcgaacactttatgtaagatatggcaagttttgtgttcttcttgcccattgatttcccgtagttgttcattaccatgacatatagcaggtaaagagctataaactaattaattaaacagatatattatcttttaatcgttcgtttaaaagacaggttggaaggttgttttcatactaagattctttcaacaagaaagtaatctcaaaattacaatctcatttcaaaggtaacaggctatatattagtaatatatataggcaaaaagaaaatatttaatttttctttatcagaatattttgttgtttcatttctgggcattatctttgcgcacattaaacgaacgattaaaaaacacccatcatttacgacaatcattattaacaccatatccataccctcctatcctatcccctatttccttattcttgcatttctgtcccggcaatctctcatcccacagtttcttttataataatgtacccgcgtatacacacccataggcgcgtattttcctactttttctttataccttgttacacacattctataagtaataggtagtagctctccatacctatttaccattttgtgtataacacatagaacagaaaatattcacttttacagaaaagaatgacagatattacagatagaaccgttaattttgctttcgtacagtaaacttaaaataaattactaacttctaaaattgtgattttatgactaaaaaaacacaatcttgagtattgaactcaactgcaaggatggctacaacatcgaaattgaaaagaaagaagacaggatcaatatcctgttagttgaaaatgaagcgtttggagaacggattctggtcggggccgaagaaaggaaggaattcctcactccatggataaacatgcttatgcaccacaagaaagaagcaggaatcaaaggaacgatggatctggcaaagaaactggagcacatcgtactctttgaaaaaggaaagcatgaaaaaggagttctagctctgaaaagcattaatactgaaatcattaatctgagaaaagaatttcaggaaaaagaggagcaagtaaaaataaagaagtaaacgttcaaaattgtgcaaaaacgccttttctcactaaaaaggcgtttttgccattcagattattatcccctatttcgtgccgccaataaggcagatttaaacaactaaaaacaaatggaaaatattccagttaccgcatacagcggattcagcaatgtacggggagaaataacactccgaaaagttattgaaaacatcaccaaagggatacatgcaaaactgatattcaaaatcaggctgctcgtcagccagggaaagatggaagaggcgaataatgtgaaaaaacagttgcctttctataccgttacagcgggatacagggagaaaaggcaggcatacagcattacaaggtatacacacatcatcctattggatattgacgaccaacctgaagagaagttggaaggactgagggagaaaatcaatggagatcccaatacgctggcttctttcctgactcccaaagcacacggattcaagatattcgtattcatgcgcacgaagtatgccacgactctaagagaaagtcttgccaaaacggggatggatttctccaccttggagaagcatcaccgaataatgtatgacacctgcaaggaatattacgaaaaactgctggatgtggaagtcgacggaagcgggaaggacatatcaagaggattcttcacgtctttcgatgaaaaggcgtacctcaatgaagaactcatgaaagaggtggacgagacactggcggatatcattccacccgaaaagccacgaccaggaaggaaaaaaacggtaagtgaaaaagtgataagtggtaaggtgataagtgaaaagacagtgagtgataaagtgatgagtgataagccggagggcggaaaggcggaagccgaaccctgggaaaggatggaattcaacaaggcggtgcttgcggtgaagaggatatcaaagtttgaaccgggaaaacgggactgcttcatcttcgcactgggaaacaagtgctatacgaaaggcctggaagaggaagtggtcatgcgtctggcacaggaaaaattcggcagtgaagagttcaacgcggcagcgcccatacacaacgcgtacatctataccgacaggacgacggaagccaacatgcgcaaggaagaggagaagcccgacacgattcatcagctgctcgatttcctgaaaacgcattatgatttccgaaggaacattataatggaccgactggagtatctcgacttcaacgagaagacagaaaaatggataggcaaactacgacccgtaagagcaacaagctacaacaccatattcctggaactgcaactgacaggaatcaagtgttcgctggattacgtgaaggcgatcgtaaactcttcatatcccagggaattcaatcctttcacggactacattgagaagctcaagccatgggacggagtgaccgattacatcggacagctggcagaaaccatacagaccgaagaccaggagttctggaagaaaagtttcagaaagtggttcgtgggcatgctggcgtgtgcattgcaggacgaagctgtgaaccatctcgtcatcatactctactcagagcagggaaagggaaagagcacatggatacgaaggctgttgccacctgagtggagggaatattaccggaacggaatggccaatccggaaaacaaggaccaccagctgatgctaagcacgcacctcatcatcaatatggaagagtttgacggagccagaatcagtgacttggcaggactcaaaagaaccatcacgcaggagagcgtcacggaacgaaaagtatacgacatgcagacactatccttcatacgacgagcgtccttcattgccagcaccaacaaccggctgtgcctacaggatataggaggaaacagacgatttttgccctcttctgtcatttcgatggattacagaacacccgtcaattacgaagggatatatgcgcaggcatacgcgttgctgaacgggggatatcaatactggtacgaaggggaagagatagacgaactgaaccggcacaacgaaatgcaccgcatgaaagatccggtggaggagaatctgctggtatatttccggaaaccggaacccgaagacacctgcgtgaagtggatgcccgcagcagccatactcagcaagattgccatttacggaaagatacaggtgaacaggcaggcgatacagacattggtactgtcgctggagaaatacagattccgcacgagaaggaacgcacagggaagcaccgaatatgaagtggtggacttgcagaatgatgaggtaaacaagggattcgggaagtgagttatcatataacgaaacgggtgataagaatatatgtaatacagcattacatcatatcttatcacccgttacatatattggcattttatttacaaaaagtacaaatctttcatttgccggattcaaactatctaaggctcaccgagatacttgaatataagtttcacttcaaggggcagataagaatggcggttcttgttataacccgcttccttcagttccgacatcagttgcctgttagcataaatccaccggcgaagaagttgtagggcggtagtaatacatacaccgggattgtaaagcatggcaaggtcggctttggtataagcgcggacagggactttttcatctaagttttcttctttcataagtttgttttttagtgatttacatggtataaaggtactcatttacagcgacaacagaaaggaataaagaaggtattacctctcatttacattctctttttttcatacaaactcaaatagcttcaagcggaaagtggaagggaaaagaacggggtatatttgcaatgtccaaaggggaaaagagcgaaaatcttccggcaagcccatgatggcagagtaaattaagaaaagcatgagaagaggattcggacagctttccccaaaggatcattaaataaccttgttttttaactttaaaaaaatgattgattatgggagtaccattcaaaaagattccgcggagagatccgcgaaaggaggatgcggtggcaaagttttatccgcaactggtgacgttaggggacaatgccgacctggaagacgtggcatacgtgatgaaggagaaaagctcgctaaccttgggagatatcaaaagtgtaattaccaactttgtagaggcgctgattgacaagctgtatggcgggcaatcggtgaacatcaaggatttcggggtattcagcctgtcggcacggaccatcggagtggagaaaaaggaggattgcacggctaagaacatcaaggccgtgaaaatcaatttccgaccgtcaaccaccatcagaccggatgtgacggcaacacgtgccggacagaaaattgacttctacgatttggaggcattggtaaacaaggacggaagttcgtcaggtggcaactcttccggtgatcagggaggatccggtagcggcgagggaggactggatgaaaatccgctgggttaaaatatcactaatcatttaatcaaagaatatgaaaaagtcaatctgggataaaattctcaaaatagtgattgcggtagcttcggctatagtaggggcactgagtgccaatgccatgaatgtgtaaaggggtaagataaatctccctcgaaaatgaataaggctgtttctgatgaagcagccttattttctacaaaataaaactgacctatcagaagctcaaaatggttagtataattttgcatgataaaaaccataactcacaacaataacataatgtaatagttaatctttattaatatagagttaaaaagcaattataagaaaccttacttttgtatttttgtattaatatctaatattaattcaatataaaagaatacttaataatctggttatgagactttttttatcttggaaacatataatcagcctctgctttgtcttactacacttaagtttatccattgcccatgcaaccgtagtccccaaacaacatcgactacttattattaactcttataatgaaggagccccatggagtcaaacgcttataacccctattatgctccaaacttcttcaatagaagatgtcagtgccgatttagtacatataaatggtacatttatccgaaatgactcattgtacaaccaaatggaagaaggaatcttccagcgttatgaaaagaataagccggattatctggtgctcataggcagtatagcttttactttaagagatcgcattcagaaagaatggggagatattccaatgatattgattgccaatgaagatacctatgccccccgggaatattacttcacaggacgctctataaatatggcggataataaagtagcacctctgaatgacatcagagaacaatataacttcacctttattgaaaccccggatatgtataaagaaaccattgacatgatgatacggatgttgcctcaaatgaagagaattatatttgcggcagacgagctttatcagaatcaacgactggaccgactcatacactcgtacatcgcatcagaatatccgaatatcgaatacgaacgtctggtaggtaaagaagaaaacagcaagcaactacaagaatatttattgacagatgatccgaccacaagcatcttattttctacctggttctatgaacgtaaaaacctgtttggatcgcctacactcatcagcggtgattttcagctagtggcatcttcacctcagccggtatttgcgttaagaggagcgtacatcaataaggcaggattcattggcggatacttctatgaccaagcagaactagagaaatcattaactgacattatcgggcaaatgctccagggaaaaaagctacgtgacatcccattcgtatatagtaaaaagtcatacccgctcgtcaactatgcacaactgaaattggatggccttgatgcagacctttgtccgtcaaatacaatattcctgaataaaccgctcacattctggcaaaaatatagatggtggattatcagcggaacaatcctgcttctttcacttgtggtcatcgcatttataatatacttgtttcagcgaaagaaaatagccttgttcagtgcccataatacacttgtgtgcaatatgccgatatcgtatacccaggcaaaagtagctttcgatgaaaagggagaggcaatagatataaagtaccaagccggcaatagcttgttcaataatttgtttacaacaaatgaggagaatgatatgaataagaattcgctttcacaaattgactgtcttcctcgatttataaaaatggtattcaaagaaaaacaagcgattaccttcacccactattttaagacgactcacaccttttatgaattcattatctgccagtcgtccgaaaagcataccatagatatcttcggagttgacatcacagcacgcaatgaagcggaaaacgcattgcgggaaatcaataagaaactggaaatgaccttgagcgtggctcgaatcattccttggcgctggaacctgaaaagcaatatgattacttgcgaatcagaacaaatactggcccacatgaatttcactaaagaaaaagggtccactccccaggcgcacattataaaggcctccgaatactttcagaaaatgcacccggaagatgtggaacgtatgcaacagatacacaagaatcttgcatccggaaaattacaacatgccaaagaagagtttcgcatcattactgaagtggaaggacgaaaatttacagattggcttgaaacgaatgcggtagtagatcaatacgatgagcagggcaatccgatatcattggtaggttcgctactattaattacagaacgtaagagacaagagaaggcattggtaacagctagagaaaaagctctggaatccgagcggctaaagtctgcattcctggctaatatgagccacgaaatacgcacaccattgaatgccatcataggtttctccagcctgctgaccaccactgaggatgaacatgaacgggaagagttcatcagtatcatagagaataacaaccagcttctcctacaacttatcagcgacattctggatctgtcgaaaatagaggcaaatactcttgatttcaattaccagcacgttgacttgaacggactggcaagagatgtagaaagaacagtacgacgcagactacaaccgaatgttgtcctgaattttattcccggagttaccgagtgccatgtacaaaccgaacgtaaccgactttcacaagtacttatcaacttgcttgtcaatgccagcaagtttacctcgacaggcagtatcacatttggttatgaaatccgtggagaagaactctatttttatgtaaaagatacaggccggggtatctcacaggaggatcagaataaaatattcgagcgtttcaccaaagtggatactttcacccaaggaacaggactgggcctttccatctgcaaaaacattatcgaaaagatgaaaggaagaatcggagttgaatctgagggtaaagacaaaggaagcacattctggttcacaataccgtataagcaggaaattgctacacaacagaataagcagcacgaagctgttaatcctaccacaaaagtaccccagcaaaagcctgtcatcctaatagcagaagacaatgaaaacaactacctgttattcgattctattcttaataaagagtacaatctgatacatgcctggaatggtgaagaagccatagaattatatcgaaaatttcagccgcatgtcatcatcatggatatcaatatgcccaaaatggatggctacgaagcagcgagagagatacggaaattctcaaaaacgatacctatcattgcagttacggcatattccttctcttctgacaaagaaaaggttctggagaacggattcaacggctatgtacctaaaccggtcgacgtgcacatcttgaaagaaaaactccatagtacaatcaaacaaaacattgcagcaatataagagaatgtgccaaaacagaataaaagaacgcaaattacatgaattacgcaaacaacaagtcagataagttctgattatcagaaggataaaaaaagaatcatttgtctaattcatgtaatttgcattctaaacttcattttgacatactcccatcattatcttgctttaaatctgaattttctttttctgccgtcccttttcccctatactcgctcggactgaccccgaaatgcttccggaatacctctctgaaatattttgcatcgcagaacccggtcatatccgctatttccgtaatagagtgttcgccttctttcaacattcgggcagcatactgcatacggatgagacgtacataatctgccggagaacaatcagtcaatgctttcactttattatagaaactactgcggctcatgtggtgaagcgaacaaagcatatctaccgtaaaatccggatcggccatgttcttctccacattttccctgacggaagctatgaatttccagtcaagtgtatcccgacaccccttcggccatttttcagtttcgaagtccgaactgccatacttcttatgcaataagatccgattggtaatcaaacggttgatactcgccttcaatatgctgatgctgaaaggtttcgccatgtaatcatccgcacctatcttcaatccttccagcatgtttttctcatcacccaatgcagtcaacagaagcaccggaatatgagatgtttcaatattgcccttaatggcggcacacaattcatctcccgacatttccggcatcataatatctgacaacacaagatccggcttaaactcggataggatttcaagagcctcctttccgttgtgacaggactgcaccagataatcctcaccaagcgtgttcgccagataaatacgcaaatcgtcattatcctccacgacgaggatacgtcgggaagaagcatcactctgcttgggctcaacggcagaaagtgccggagtaacaacttccggcatgctgatagatcgctccggagttgcagatatgatactggctttacgaaaatgtttgttccccttaggaaaaatgattcttaccagtgtaccttgttccgccgtactctctatagttatttttccaccatgtaaacgcaccagcctatgcaccaatgccaggccgattccactaccgctaaccctcaagttgacggcattgctacctcgaaaataggtatgaaaaagtcctttctgttcattgcggggaataccgattccggtatctttcacctcaatgccccaaccatcctcatattctgatgcactgacatatatgttcccattttccggtgtatatttcatggcgttcgacaggatattcttcatgatagaatccatcttatccctgtcaaaccacacattcaggtattggaaattactttcgtaagtcaacctgatatgcttgatgtttgcatacgcatgaaatgtgtcacaaatgcctgacatatacgtacctaattcatattcggcaatatacatatgtgacgaataggtattgatacgttcaaaattaataagatttgttataagccgtaaaagaacatccacatttctcagagccatgctcacatgtcccttaccttcctcattcaccatatctttgttccgtagttcttccaacggggcctttatcagagtcaaaggtgtacggatgtcgtgagctgtatttataaaaaagcgtgtcttctcttccgaaatcctcttctgtttcctcagtgtaatgatgcggaacagaatcacacacaccagaacagccaacataatataaccggctatagcccacggagtagcccacaacggaggagatatgataatcaacatactgcgctgttcataactcttatacttttcttcgttagatacggaacgtacatgaagcatatatttacccgaagggatattggtgaaacgcatcagaccgttggaagaaggcgtagtccattcatcataaaagccctccaatctccaggagtataaaatattagaaggatagtcgtaattaatggaggaagccctcagtgagaaagtgttctgttcatatttaagtttcaaaactttcgtatcgttaatatccgtttccaagggcgatccttcatcaccaggatatacaggctgataggatatattcaaatcactaagcaacatcggagaaaaagttgggaccggtatgtgcatatccgaaggaaaaccaatgaccccatcattacttcccaagacaaaacgaccgctactatgcaaaataccggcaccgggattgaaacagacactcataagcccctgttcacgcgtccagttattaaatgacattctacgaggtgaaaaatgaacaattccattttccgtactaagcaataaatccccgtccggtttaggaagaattgtatagatattattggaaataagggcacaattatctgtataatactgagcgaaggcctcttcttcgggattataaagcaccagcccggaaccactggtacctatatacaacacaccatcgtctccctgatacaaggcatggatatgcatagattccacaggcatatcgatgctgcgatattttccggaaaatttgtctagcaaatatagtcctgccgaagtgccaatccacatcgaagaatcgtctttttcgcgaatgcaggtaatagaattcaagccggaatacaggcgggatttgccacttttaagatcaaaacatttcagattgtaaaaaccgcctgaccagatattaccttccgaatctttccttatgtcacgaatgtactgatcgggacgcaggtctaaatgaaagaaaagagaagaagcaatatagtcaaccgtaagggcacgtttatctatctggtaaagaccggaggtaaaaccacctgccagaataattccgggcgagatttcacaaagcgtcaggaatatatgattcttatcttccagttcatgatcaaaagtgctgaaaaaggaatgccattcccccgtagcggaactatatagacttatgccattgctggtaccgaaccaaaggtcaccctcactatcttcaatgacatcatgcacctggttattgacaagtgactggcggtttccaaccgaatgacgagtccagcggtaaccgctgtaacgattgtcgcggatggttattccactgggataattagcaatccagatgcgaccctcatggtctacatgcacatcgtttatattgttgccattcattccattatggatattataatctgctacaatataaggaactgcataacatgtatcaatattcatacgatagattcctttcccgtcagtagctatcagaatttccctttccccaaagggtataatacgtttgatattcacgtcactaagggtttcatccgaccgattttcctgagaagtatcaagatcacaaatccacactccctgcttaaaagtaccgacaaacaatttcttcaaagcagctgaaaagaataactcgctcaccggtgcatgaagattatatgccggtgtacacgaaagtaacgtacgagactcatccaataccgcccgatacaacccggactccgtacctatgaagaagttttccctatctatctgggcaatagaagtgacattactgattatactggatgataattgcgatatctttcctgtgcgggtatcgaacaatgccatttgttccttactgcaaagccagatacgtctggaatgatccatatagctatatgtaatattcggcgaagagattcccttttccggtaaaggaggcatatacacctgttcgaaccgatcccggccctgctcatagcggaaaatgcggcctttccgtccagttccccacaacacaccgtcgtcagccatgtaaagccaattcaggctaaactgcatattgagcttctgtcccttatccgtcaattcatagtgtttgatttccttgccattgtaacggtccggaccttcctgagtaaggaaccacatatatcctaaagaatcttgtaggatacgataaactttctgactgcccagaccatcctccatacttatatatttatatgcctgggctacacatacctgagtaaaaaatacgagtatggcaaacagcatggaggtttttctctgttgataaaatcttctcctgttcatcacagttcgtgtgttatcatccaaggattcctgactccgaatctgacaaggaatcccaacggtttaatattaaaatatgagattaatatgcaaaattaaccaaaaaggcagaaaagttcacagtataaaacaagtttttttcataatacacgtcattttttatcgctattatcatatttttcttataacaaatagcattcaccagaaacgatcctttttcttattttcgttctcaatcacttatttgacaactttttagccatcttatttgttagagacatatactaatctataatccatgatccatgaaagtacatgaatatcaagcaaaggaaatcttctcccagtatggaattccggtagaacgacatgtgttatgcaatacgcccgatgaagccgtaaaagctttccggcagttagaagtggacaaagtagttgtgaaagcacaagtgttgaccggtggacgaggaaaggcaggaggcgtaaaactggctgacagtgaagaactggtaagacagcacgcccgggaaattctgaaaatgaccatcaaaggttttcctgtaacccgaattttaatcagcgaagctgtagatatcgcaactgaatattatgtcagttttaccattgaccgcaacacgcgttcagtagtgcttatcatgagcgcggcaggaggaatggatattgaagaagtagcccgtaacactccggagaaaatcattcgctataatatcgacccgttgatagaattgcctcaatatctggcacagagttttgcattcatgctttttgaccaggcggaacaagccaggcgtatgacttccatccttcagaatctctataaagccttcatggaaaacgatgcatcgcttgctgaaatcaacccgttagtgttgacggctaaaggtacccttttggctatcgatgccaaaatggcgttcgatgataacgctctctaccgccaccccgatatacatgctcttttcgaacctacaccggaggaacaactcgaagctacagccaaagaaagaggattcagctatgtacgtatggacggagacatcggttgcatggtaaacggcgccggactggcaatgactaccatggacatgattaagttatatggcggttcacctgccaatttcctggatatcggtgggagttcaaaccccgtgaaggtgattgaagccatgaaaatactgctgaatgattcgaaagtaaaagcggtcttcatcaatatatttggcggcatcactcgttgcgacgatgtagcaataggattgatacaggctttcgatcaattgcaaacggaaattcctgtcattgtaagactgacgggaaccaatgaaaatatcggcaggaaactattaaaagacagtaaccgctttcaggtagcggaaaccatgaatgaagccaccctgatggtagtaaaatctgtgaaaggagaaacattatgagcatacttattgataaatcgacccgcctgttggtacaaggtattacgggcagagacggacattttcatgctgtgaaaatgaaagaatacggtacgaatgtggtaggtggtacgtctcccggaaaaggaggtagcaccgtagacgggcttcccgttttcaacaccatgtacgaggcagtggaaaagacgcaggccaatgcctccattctttttgttcccgccagctatgcggcagatgctatcatggaagccgcagatgccggaatcaaactgattatctgtatctccgaaggtatccctaccctcgatgtaatcaaagcgtatcgcttcactcaactgaaaggagccatgctgatcgggccgaactgccccggtttaatttctccggaaaagagcctggccggaatcttacccggcaatgtttttaaaaaaggaaatgtcggagtgatcagccgtagcggaacattgacttacgagattgtttaccatcttacagccaacggcatgggccaatctaccgctattggcatgggaggtgatcccgtagtaggactttacttccgtgaactattggaaatgttccagaatgataaggatacggaatccatcgtcatgatcggtgagattggtggaaacgcagaagaactggcggctgaatatataaagaagcacgtaacaaaacctgtcgtagcttttattgccggacaatctgcacctccgggaaagcaaatgggacatgcaggtgccattatttccggtaattccggctctgccgaggaaaagattgcagcactgacggcagctggaatacaagtggcaaatgaaccggcagaagtacctatcttattaaaagcgtcacttccaaacaaataacataaacctgttggcggaatttattcatttcggtatagtaatgaattaattcataacccaaaaaaagaaataaattccgccaacgagtaacataactacattttaaatcaattcgtagctggcgctttggataggcatatccagattgtgcagtactttttccagtaaaataccctcccgattgtcgtactcatacccaaaagtagcgcgaatgccctgaagaatgaattgcgtggcacggtccaaagcaataggaagactgtccccttgcaataaagcaccggttatgacacttgtaaaagtatccccggttcccggataatgggccggcaaatacggacaagtaattttccagtatcgatcccctacccgattataagcatataccgaggttttgtgactctcttcatgaacaggaacgctggttataataaccacctgagggcctgcatcagacaaaagacgaaggtaagatttcaattcttcatccgtattatctgctttataaggcttgtccatcagataaaaaagttcagtgagatttggggtgatcacatccgccttcgttgccaggtggcgcatttcgcgaatcattgattcatcaaagtttgtgtatagccgtccattatctcccaatacggggtcaactaccaccaagctgtccggctggcggaagtcatcaataaaatccgaaacaatctgtacctgacgcggagctccgagatatcctgtatagaaagcatcaaattgtacatccagctttttccattcggcaataattcgaggcatttcatccgtcaggtcaagaatagagaattccggatattgcgtatgactggagagcacagccgtaggtaaagggcaaacctgaaagcccatggaagacaaaatcggaattacaaccgtaagggatacacgcccaaaaccagacaagtcatgaacggcagctattctctttactttatttgtatacatcttggttactacattttttctttcacataaaaaactccccgcaaagataatcttacggggagtaaacaacaagctaaaagagaaaatgtttgattcaattaaagtttaggaattaagctaatgcaagtatcagtatttgtgcagtaagcacacgtaaaaacatggtaagcggataaacagtggcatatcccaccgcaggagcatcacacgaagtcagatcattggaatacgccaacgcgggcggattcgtggttgagccacccaatactccgatcaacgtataatagtttaatttaaagacgtatcgtccaacaagcccggctatcagcaaaggaacaatagttatgataacaccataacctacccagacatagccaccgtcataaatcaccgtttccacaaatcctttaccggcacccaatcccacacaagccaggaaaagggaaattcctatctcacgcagcatcagattggcactcatggtagtataagtaatcattttgtactgagggccgaagcgactgatcagaatggaaacaataagaggtccacccgccaatcctaactttaccggctggggaatacccggaaatacaaaaggcgtactacccaggatacatcctaacgctatccccaagaatataggtatcagattaggatgatccaagcgtttcattgaatttcccaatactttttccgcatgactgaccgccagctcgctaccaacaatagtaacacggtcgcccatctgcaattgtaattgcggagcagcaaccaagtctactcccgaacgattcacccgggtaatactggctccgaaattattacgtatcttcaattgggaaagcatctttccattcagttcaggtttcgttatcaagatacgacgggaaatcagtttcttgtccaattgctcccattgcatatcaatctgcttaccgaagaagacgctaatagcttcaatatctttaggggtagagataaccaaaattttatcattcagatgcaataccgtatctgaattagccaattccgttccttgcccgtcatgatactgtacacgcgaaatcacaaaatcacggttcatcagcggacgtatatcttttatcttttttccgtcgatagcttcattacggatttcaaacgaaataggacgcacagtaagttcctgtatgtgtcccagtccacgttcagcttccgcctcttctgtcttggtattgatacgcaaaatatatttcaaggctatcaatgacaagataataccgactacacccagtggataagcaaccgcatatcccaatgctatctcaggggcatctattccgttcaaatcactgtttgcctgctgggcagctccaagtcccggagtatttgttaccgcaccggaaaggataccgaccatagtagtgataggcgtacccgtgacaaaatgtaatataatcgtgatgactactcccagaaaaacgaccagcatagccaacagattcaaggtaagtccgccttttttgaaagcagaaaagaaaccgggtcccacttgtagccctatggagtaaacaaacaagatcagaccgaactctttcataaaatgaagcaagtgttcattcagagtcatatcaaaatgcccgaatacaatccccacaaaaagtatccatgtgatacctaatgaaactcccgccactttgattttagccagcataatgccaaatgctatcacaagtgaaaggatcagtacggaatgagccactcctccaccccaaagatcagggtatccttcaaaaaggttcttcaatagttccataaattaaagcatatataattttttcttcatataatccgtttaaagtctccccggagaaatcacttctacggggagacgcacacattgaaacataactaaatcatagtggcatattgccgtgctttttaggtgggttgctctgactcttgttatgcgtcatttctaacgcctgaatcagcttataccgggtatcacgaggcatgataatctcatcaataaaaccacgctcggcagccctatacggattagaaaacttaaattcatattcctggatcagaccggatttttcttccggtgtaacatttctatataatatattcacagcaccttcggctcccattacagctatttctgcctgcggataggccagattgatgtctgcccctgtctgtttgctggacatcacgatgtacgcaccgccataagccttacgggttatcagggtaattttagggacagtagcttctgcataagcatagacgatttttgccccgtgacgaatgatgccattatgctcctgcgtcacgccaggcaggaaacccggtacatcttcgaaggtaatcaacggaatgttgaagcagtcgcaaaaacggatgaaacgtgcagccttatcggaagcatctatatccagcacaccagccagataagccggctgattggctacaactcctaccgaacgaccattcagacgggcgaaacccaccacaatattctttgcaaaatgaggcatcacttcaaagaaatattggttatccataacaggctctataatatctttaatgtcataaggaatgttcgggtcttccggaatcacagtttgaagctcttctgactgacgtctggcatcatccgtacaaggaataagcggagcatcctccatattattggaaggcaggaagctgagcaattcgcgtatggccagcatggtttcttcttcagtgttacacatgaagtgagtaacgccactcttactgctatgtgcataggctccacccagctcttccttgtccacttcttcatgcgtaaccgttttcactacatccggccctgtgatgaacatatggcttttctctttcaccataaaaataaaatccgtcaatgcaggtgaataacaggcaccgccggcacatggacccagaatagctgagatttgagggatgaccccggaagcaatcgtattctgatagaaaatagaagcatatcctgacaaactgccgacaccttcctgaatacgggcacctcccgagtcattcagagcaataaccggagcaccatttttgagtgccagttgctgtactttcactattttcgctgcattagtttcactcaaagaaccaccatgcaccgtaaagtcataggcgtacacaaataccggacgaccgtcaatcttgccgtaaccagtcaccatgccatcacctggaatttgttttttctccattccgaaattggtgcaacggtgatttacaaacttgtccaactcattgaatgtccctttatccagcaaggcttctatgcgttcgcgtgcggtcatccgcccggcagcatgttgtttttctatcttatcaatgcctccaccctgcgaggcacgcttattaagttcttcaaactgattatatatttctgtcctttccatacttattcttcatttataatatccaatgtcattaaaatctggttactgctcactgaatcaccttccgccaccaagatttctctcactacacagtccgaattgaccttatagttgctttgcattttcatagcttcaagcaccactacaatatctcccgccgacaaacggtcccctttctttacaggaatcttcataaccttacccggcatcggagcaataatcttatcgtcctgtctctcttctcctccttttcgcatacgcaagtatttcacctgggtatctgctatatccacatgataagagcgatagaacaaattcacatcatagctttttcctccttcaccgcggatgacttccgtattgtaagaatttccgtcgtgtaagatggagcagctgccgttttctgccatggcaatatccacatcgtagattcttccatcaacattcaaccggactttattatcttctttactgaccaacgtcacgtcggcaacgcggtttccaatatgtatttccattaactacttcctccctctttaaatacgtaaaactcctttttgcaaaccgaactcacgccagcgactgataggacgaccatcagacgactgcgtggaagaattctcttccaggttcatcaggtaatctatataagcggcaatcatggcaatattctcaatttcttcattattactgttaggacgctgcaacatacgcgagtttttctcgataaacagcgtgttgtattctccctttacgaaatcggggttgtgcatgatgcgcttcagataagtaagattcgtcttcaatccggtaattttatactcatacagcacacggcgcatacgctcaatggcatactgccgattggtggcccatacaatcagttttccgatcatgggatcataataaataggaatctcatacccttcgtaaacatagctatcgattcgaacaccgataccgttcggttcagccaataacttaatgattcccggagacggcatgaaattattctccgtatcttccgcacagatacgacattcgatagcatgtccccgctgaaacaaatcttcctgtttaagatgcaacggataaccggatgcaatcatgatctgttctttcaccaagtccacacccaccacttcttccgtaatgggatgttccacttgcaaacgggtgttcatttccaggaaatagaaatgacggtgcttatccaccagaaattcgatagtacctgcacccgaatagttcactgctttggcggcagctacagccttctctcccatctctctgcgtaattccggagtgaggaagggagacggactttcctccacaatcttttgatttctacgctgaacagaacattcgcgatcaaataaatgaatcacattgccatgattatcacccaatacctgaaattcaatatgatggggttcctccacaaatttctccagatataccgtatcgtcaccaaaagcagacatagactccgaacgggcggtattataagcttcaactacttcatcctcactatgtatcagtcgcataccttttccaccaccacccatagaggctttcagcatcacgggatagccgatcttattacatatcatcacagcctccccggcactctgcaagggttgttccgtaccgggaactaccggtactccggctgcaatcatgtatttacgggctgagattttatcgcccatcgcttccattgtttcggcagagggcccgataaaaataatgccttcttctttgcaacgacgggcaaagtcggcattttcagataagaaaccatatccgggatggatggcatccgcttcatgctgccgggcagcacgaattatattctctatattcaaataactgtctctggaagctgccggacctatcagacaggcttcatcggcatacatgacgtgttttgctgcacggtccgcttccgaatagacagctactgtacgtattcccatctctttgcaggaacgcattacacgtacagcaatctcgcctctattggcaatcaatactttttttatcattgttcttctgtttatcacaaaggggtgcatcacatacatccataacgataccctctttgactgccgtcagacagtcatgacataaacagcccgggtaattcttttgcaaataagcacgttgctgctcattcagtcgtaccgtagcgcaatggcatgacaaaatccgatcgtgcatacactcaaaggttgcaccacaacgcggacatacctttttcataggcatccctttcgcattaattaaattaaaacaattatacgttcgtactgttcccctaatcccacgagtagcaacagactttaacgaatggcaggtcttctgactgactccctttctgattccttcccggcctccaattcacagccagtggctaaagtatttatcaagaaagttatggagcttcacagcagcgggactgtccgggatttacacccgattcccttttaatccaaatgacagaaatgttcatccgaaaccaattcggggcaaagatagtggaaattatcattggatatgctttttagaacaaaaaatatttctaactttgtcagcgataacggtttccaaatcaccgcaagcgtgaaatggaattaaaagggaatcctgtgaaaatcagggactatccccgtagctgtaagtttcatctccctaccatgtggagaaaagattgtggcactctttagccactggtcctgcaaagaccgggaaggcgccacaacggaaacaagtcagaagacctgccgatatctgtaatcattcaggctttcgggtgaaaagcgatagaatgcatcctccaagattcattttattacttactctccttattttgtcgtttgatttagtatagctaactaaacaaagaatatttatttgttaaatcttaaattacaggtatgatcaattcggagactttcatcgtcaaaagagatgggaaaaaagaagcgttttcacttgacaagatcaagaacgcaattagtaaagcatttttatctgtcggcagttttgccacacaagatgtgatcaccaacatactcagccgcgtgaacatcagtgatggaaccagtgtagaagatatacagaaccaggtagaaattgcactgatggctgaacactattacagtgtagcaaaagcgttcatgctatacagacagaaacatctggaagaccgggaagtacgtgacaagctccgtttcctgatggattactgcgatgcctccaaccctgccaccggtagcaagtatgacgctaacgccaatgtggaaaataaaaatatagccacactgataggcgagctccccaaatcgaacttcatccgtctgaaccgccgtttgctgactgaccgtctgaaggacatgtacggcaaggaactttcagaccgctacatcgaattgctgaaccaacacttcatatataagaatgatgaaaccaatcttgccaattattgcgcaagcatcaccatgtatccgtggctgatcagcggaaccgcatccgtaggcggtaactccacggcacccaccaatctgaagtctttctgcggaggattcatcaatatggtatttatcgtatcgagtatgctcagcggcgcctgtgccacaccggaatttctgatgtatatgaattatttcatagaaaaagaatacggagaggattactataaacatccggaacaacttgccgacctttcctccaaacaaaggaccatagataaaataatcaccgattgttttgaacagatcgtatattccatcaatcaacctacgggggcacggaattttcaggcagtattctggaatgtagcttactatgatcaatattatttcaatagccttttcgaacatttcgtcttcccggacggaaacgctccccattgggaatcattgagctggttgcagaagcgtttcatgaagtggttcaataaggaacgcaccaaagccgttcttactttccccgtagagacaatggctttactgaccaaagacggagatgtactggataaggaatacggtgacttcacggccgaaatgtatgcggaaggacactctttctttacatatatgagtgataatgccgactcgttaagtagttgttgccgcttacgtaatgaaatacaggataacggatttagttacaccctgggtgcaggcggcgtatctaccggatcaaaaagtgtgttgactatcaacctgaaccgttgcatccagcatgcagtgaaatccggattgctttatcatttcttccttgaagaggtagtagatctggtacacaaggtacaactggcctataacgaaaacttaaagcatctgcaaagcaaaggaatgttgcctttgttcgatgccggatacatcaatatgggacgccaatatctgacaatcggtgtaaacgggctggtggaagccgctcaattcatgggaattgaaatcaacgataatcctaaatatgaagcttttgtgcaggagattctgggaatagttgaaaaatacaataagaaatatcgaacgaaagatatactctttaactgcgaaatgataccggccgagaatgtaggcgtgaaacatgccaaatgggacaaagaagccggtttccagacattccgcgagtgctataacagctatttctacatcgtagaggatgagtcgctgaacgtcatcgataagttccgtatgcatggacacaggtatatagagcatctgacgggtggttcggcactccacatgaacctggaagagcacttaagcaaagagcaatacaggcaattacttcgggtagccgccactgagggctgcaattactttactttcaatatacctaacacggtctgcaacgaatgcaaccatattgacaaaagatacttgaaagagtgtccggaatgtcatagccagaacgtggattatctgacccgcgttatcggctacatgaaacgaatcagcaatttctctcaagcccggcaaaaggaggctgcccgaagatattatgctgaagtacactgattacgacattgtttttcaggagataccggatgaggtgacattggcaatcaacctttcgaactgtccgaacaggtgtaaaggttgccatagtccctatctgcaacaaaatgtcggagaagcgctgacagaagaaaacctttccgtacttttacaaaagtatggaaaggctgttacatgcgtctgttttatgggtggagatgcagatccttatgatgtagcgtattttgccaattttctacagcaacagcagattgccccggttaaagtgggttggtattccggtaagcaggaactgcctgacggattcccgatacggaacttccaatacataaaacttgggccttacgtagaaagccgcggtggcttgaagtctgaacaaaccaaccagcggctttacaagattgtacaaggagaaatgaatgatattacttaccggttcaggacaaagagctgatctctttccgcctgaaccggaattacaaagtcttattcaaaccggagaacaaggcgtcccgtttgcgggccatccacccattttggttgtgaagaaggaccgcacaagtccgtagaatttactttattacgcaccggaggaattacattcaaaacagaaattccgctttcgggaagtgtatacagtaaccggtcacgaccatcacgaggttgatatactccgatataggaatcaggtgtttcattcgtcaggctgatggttccctctttcgtgcgaatactcatccaggaaacactaccaaaatatcccttgaattcaggataggtgaatgtctcacccggaataggatcgttataatcattctcccagatatcatactgcgtgccatgaatacgattctgccatacacgatacggacctgctcccaaccaacgcttgctgagcacttgttcttcagggtaatcaaagcaaatacccatcaggtctaccacaccggagaagttgtaggtataatcaagagtagccatgccgtccggatgaattgtccactgagctttatctaaattacccagtttataattagcggtgaggatcagattccccccctcttctttcacatccagtttcgtgaagactgccgcatcggtaaattcactgtaagtacggtcctttgccttggctttttcgtcatcatgattatagaactgatctagggaacggtctgcacgacgtgcaccgataaaacggggaccgttagcaaaactaatcttacggttattgacggatacatctttcaactgcccgtctttctttgaaaagacaaaagtacgcccgtttgcttttaccgtaatacctttttctgtttctgtataggatgcacggccggatgatgcagaaaactgttctgtttcccgattcagtttatctacggggaaagtccagcgccaaagttcatgcccatatttatctataactgtcaggaaaagagcatccgcttcgggaagaatagaagtcttgatatccaccactcccactccatgggctgctacatcgcttccttgcacttcaccttgtttcagaatccgtgtagttgtattggaagcatccgttaccgacgggaacttcacttgctgccagataaaacgacaggtgttcaggttcagataatcataacggttctccacagagagtttaccgtcgaaattccggtcgatagcggtattcataacctgcaccgggctccatagctgcttgatagtgtaatagctgccttccttttcatggtgagggcctacaattccgtcagctccgaaatttccctgattgtctatgaacccgtccatatccacgcgcttcacgccttcatccgccaatacccacaggaaaccaccgatacaacgcggatgtttacgcatcatttcccagtaatcatacaggccggcaccatgacctccgtcgtacaaaccatgcaggaattcagtaggcataaagatttccggcaggcgcatgtagttctggctttctccatacgaacgatagtgcatggtttcgaaaccggagaagttaccttgcggatggatgaccgggcgtttctgcggatcgtatttatggaattctccgtccagttcaatgttccagcctttttcattaccattgctccaccagataatggacggatggttcacatcacgttctatcatgccttcaatcagacgtactcccgtaggggtgtcgtacttaccatgccagccacccagttcatccataacatagagtccaagagagtcgcatgcttccagaaattccgggtccgccggatagtggctcagacggacagaattcatattcatgcccttcatcagaagtacatcttcaatattcttcgctttacttagggtacgaccgctttcgggacggaaactatgacggttgacaccacgcacgttgatacgcaccccgttcacgtacaatccgtcactttcacgaacttcgatagtacggaaaccgaatgtctcggtctcatgatgcaggactttaccttctttatccaacagtgaaaattgagctttataaagattcggagtttctgccgtccataaggcaggtgcagaaacgttcaattgtaaagtagtccagtcgcttccggcttttaggggtacggtggtatctgccagtttcttccctttaccgtccaaaatctgtgcacggatactcattccgtcaccggagatattcgtgtagcaattggcacggaatgatccgtccatttgtgcatcaatagcaatatgacggagattgacggcaggttttacttccagaaataccgggcggaagataccgccaaagttccaataatcggcgcgccgttcggcaagattcacactggcattctcactctctttggaaactgttacttccagctgattcttcttgccatatttcagtaaatccgtgacattatatgaaaagcgatagaaggctccctggtgtttcgatcctgccttacgtccgttaaccttaacttccgtatcggtcatagatgcttcgaacacaaggctgacctgcttgccacgaaattcctcgggaacttcaaactcatatttatacattcctttctcaccggcaatgccttcgggaaaggctttaccataaaaactgattccatactgataggtaccaaaaccctgcaactcccagcaagaggggacgcctattttcgtccatcgaccggagttacgtccgtcggtacagaaaaagtcccattctactgtgtcgtcgcatccgtggccggagaggtattgccgctctgtctgcggaagtgtctgggcagtcagggtggtggctaatgccaaggttgataataaagtggttacgtttctcattgttactttcattattgtgttagttattcttagttactgataccggggcggtactagcaatccgtatatgcaaggtatgttccttcttatcaatggcatacttcttcagtacgcccggtccgcaactgctgttacccaatccaagtacggcggcatccaggctcaggataacctcggggcggggtttcagattacagtcatgcgtttctttatataaatcctgtgcggtatagtgcagggcagaagcagaaaagacatcttccacagcatcgacacgaatacctttgccatgcctgtcggtcagcataaggagacacacttcttccttatttccactatcttgcggacggggataatgcatatactggtcggcaaccgatcctttccaaagtccgacagcagcggaagtcttacggtcaggataattatcctgcggaccacgcccttgccagataaaagtattataatcggatgaaaggcagaatgctattcccaaacggggtagttcgggcagaattccctgcggttggaaagtagttttcaagtctatggttccatcggaaaggatggtatagagagacgttgtcacgattgcaccttctttatagcgattcctggtttgaacacggacaatgaccgctccgtcctcacggacttcatgcttaaaagagtccagactgatacgaggattatccatttgatgcaagctccagtctttagccaaccagttgccaaaactcttatcattatctgtcggtgcacggaaggcctgcgttacaggttgaagaggaaaatcagccggatgagccagcatttcttttccatgataagtaagggaagtcaggctcccggttgcgtttttctcccattgaatagaaaagccgctcccactgatggataaatgttcttcatctgcccttaccttcagtctccctctattctcaagtttggaagacaataatgcgccttcctgaatgcagaactgttcccatgccacttcatgcccggctttcgcccaaagagcatcccgcttcaagatgaagcttatcgtgagacgcaggtcagaagtagcctttgccgaagctttcttgccggctatggaaacaggtaaagggatcgtttcactttctccgggagctacctcgggcaatgttatttctccttgatccttctgcttcccatctatggacaacgtccacaaacagcgatattgggacaaatccgtatgatgattcctattcgtcactctcagctctccactctccactctcaactccacgggtgagtatactttcttcatctcccaatatttaggagttgtttcgcggtcactcatcaacaggccattgaagcaaaaagccttcagattcggtttatcaccaaaatcaccaccgtaagctaccatgatacgtccatcgggtaacgtcttgtagataccctgatctacccaatcccagataaatccgcccagcatacggggattactgtatatctcgtcccaatattccttgaaattccccagagcatttcccatggagtgagcgtattcactcgtcatcacgggacggttgtcattggtacgttccgcaatttccaacagccgctcccaacgtgcattttccgcacgttccttatcttctccctcggcaatgccgggattcagatactcctgttttacccgggtatagaaacgactgattacatctaccgtcttcggatcgggttcaccgccggctccctgtgcaccttcataatgcacgggacgtgtcggatcgaagtcatgcagccaagctgaaatagcggcaaaattcggaccataaccactctcattacccatactccacattacaatgcttggatgatttttatcccgttctgccatccgcacggcacggtccagaaatgcggcatgccaatcgggagtgctggctaaggttccgcgcaaaccatgctcctcaatgtcagcctcatccattacataaagccccagactgtcacaaagctcataccagcggctgacattgggataatgactggttcgcaccgcattaatattggcttgcttcatcagaagaatatcctgcaacatacgttcttcgctcatgacacgagccgtacggggatcgtgttcatggcggttcaccccacggaaacgaaccggtgcgccattaaccagcagttgtccgtttcgtatttccactgaacggaaaccgacagcttgttctacctgctctattacttcaccttcggcagtcagcagagtcaggtgcagtttatacaaataaggggtttcagcagtccaccttttcggagattttatcgttgccgacatacgtcccaatttacggggaccacgttgaggataccattcgttcatcctgcccgctttatgttccatgtcgagtatatcttccacatcccctttcagtgtcgcgatttctcgtccggaagcatctttcaatactccctgcagggtagttccttttccggtcatccctcggtaaacgctgaattgaggatctatctgcaagatgaaatcctgatagtccgtagaaaccggaagagtccgcactgcataatcacggatacggatatcgggtgtgtgcagcaaatggatgctgcggtggataccaccaaaacgccagaagtcctgatcttcaagataagagccgtcactataccggtaaacctccagtgcgatctgattctctccggcatgcaggtagtttgtaatattgaattcactcggctccatacttccctggctataccctacccgttctccatttatccagacatagaaagcactcatcactccttcgaaacgaagaaaggtctggcctcttgcttcccaaccggcaggcaactgaaacgaacggcgatattgtcctacgggattccgttctttgtaagtcgtatagtcaaccttcggttcacccatcacccggggtggatctatcttgaacggatagcctgccgaaacgtatatcggcgtaccatatccgtttacttcccaattggcaggtacgggaaaaccgacccagtctttatcattgaaatccgtctgatagaactctacaattctttcatcgggcacaggtgtccagcgaaacttccatgttccatccagacagatggaacaatctcccttctgtacgtggaaaggagtaaatgcggcccgcgccggttcgcggttgatttgaagtacatggtgattctcccagtcatgcacagtttgtgctgacggctggatggggagcaatagaccaaagagtaaagtatatatcttcattcgttacactattaatattaggatagacggacgaagatgtattttgtactctttactgaatctccaatgcgtcaaacgccaatccattcatatcttccgccgaaagcagcactttataatagcccgcattgatgaatgttccggtagtggtactcaccattttccacttatcgggcgtttcagggaaagtaaggatatcatctttcaacgtcacacctttgctgtcgataaactgcatccgtacaggcagcggcttaccagttgtattcatatacttaaaccggagagcgtagatttgggccaatccggtagaaacactccactcgatgctgttcttctttccttttccaaagaagacgcccatctgtttgcgatgctccctcttcgtaaaagcaccttttacagaagctgtctcagcctcatacgccacactggcacgagcatttttatcttccggaagcaattccttgggagtcttcaccaaaagctctttgtctgccgccgcccaactccagtccggagccacccagttcctgtccgccgctgaaagtagttccgaagctttcagtcctaaagccggaaacacagacggtttcagttcctgacttgcagaagcaatggcaattccggaaatcagtgcctgaccggcctttacttccgggaagtgtattttcaacaggccttgcttcgcaacggcatatactacctttttgcatgcaccgtcatggccactttcagcccatacgtccagatcatccaacacgagggaatcgttcaccattacatcaaatatgcgcaaaccttcacaatcggtagaagcacttccccccgtaccatgccagggctctgtaaagtaaaattcgatacgatagattccgtcagctacaggaaaacgatattccaactggtgacggccaaagcggaaggactggaataacgtccagtcgcgcgtgccacgtatcggatcagacgtcgtacgctggctggcaagataaggattcagaccttcaaaatttgcagcccatgaacgggaataccccagattatcctgtgaccagagttgcccgaagctatccgtatattcatctccaccgcaattgatgcgatacaggtaattatatccctcctctcccttcagtacaggctttgcttcctgataaagcgcatcaaagcgaggcgcccgctctaatccttccagaatgattatatcttccgcaacaggttttcctttgtaataacctaccgcgcgaagcacattgtagcggatatcccggttctcccacacgaaatgagttcctactccattattccccttccgtccgaggaaagtgactttcccatcagacatatcgttatagagcaatacagaatcgcaattactataagcctcgatagtagcccggcgacgcccctccttaaaacggtccgtccaggtatgtgatacgagataaaccataggatctttggctgccggaacatagttggcacgatacatataatatacatccagcggctcttcccacggagtcaccaatcctttataattgaatggtcctactttatctattttccggtaagcttcatccggctggcggcgtccgggattgtcatgactgctatatatccattggaattgtccgcaaacactatctcttgcctgctccgccaaacggatcttagtttccatcagccggcacatgcgatcttcactccacgttccgtttacctcaaactctccggattccgtatgcaatccgatgcttctccatgcaccatattctccgttcaacagttgattcttccgggagagttcttttccatatttggtgacatctcccccgtacgtaccactccaattctggattacattccagtcggttccttccccaccattgcaggtagtgatgacacgcatcgtacgcgccgtcggatccatctcccggataatctcactacattcctgtgcaaattcacggggcaatgtactttcattctgcaatccccatataacgactgagggggaattgcgacgctctttcacccactggcgaagcagcttcttaaaattctcccggaattccggtgtgtcataccatacatgtgcggagaattgcgtccagaacaaaatacctttttcatcccagtatttctgataatcaagatgatggggctgatgggcgtcacggaaaccgttaaagcctgccgcacatatctgctttacccttgcagctacctgctccctgctgaacgcgtgactttgtccgaactgatgttcgtactcgcaaactccattgataaagacaggctttccattcaaatagaaacgtccgtctccgtcattccgtttcaccggccaactgatggtacggataccgaaaggagtcgatacctcatccgtagtcttcgtatcccgcttaatcatgcttgccagtttatacagataaggattatctgtactccacaacaccggattctctacaggagagtgctggcgaaccaccttcatctctcccggtgccaatgtcactttcctggccagacggaacacttgctttccatccgcattgctcaatttattaaccacttcaatcgtttccgtagtcttaccatagttcttaacctccgtatcgacaaatacattagctgctttctcatcattccagatatgtactccgaaaggttcgatacggatttcatctgtaccttccaacaccacaggccggaagattcctaaaggttgcgagccttcactgaatccccattccgaagaacagccgccacacacccaaggcatatcggcaatcatttccgggtgctcagcttttacctccagatgattgctaccttgcctcaatgcatcggtcacatccaaggtcaatgttgtgcgtcctacgggatgccgcccaaaatcctgaccattcaattgaattgtggcataagtgcctactccttcgaaacgaagaaaatagcgcttccgggattggtaattatccaaagtaaaatctttcacatacatagcagtgccatgcagattgccatgagtgagctgacgataaccatagtaatcatcccagttgtgaggcagttgacaattgattgcattatcacgctgtaatgaattagtattcaccggttgtgaatgatcaatcagccatgttttccaatcttcattcaattcggtcagtatacgacgattcttcgtctccgtttttgggaaacggacggcagaacgtcccatcggtttactggtagcaaccgcaatcccccgctgttccgcattattaaccgcacaatagaagtgataaacaactccatcatgctttaccacataacttttatgggcaaacagttcatcatagtttttagagggaataataaggtcttctccagtccagtcggtccagtgcaccaagtcatagctggcagcaaaagtattgaaagccttgtatctccgtgacggttcaaaagctgaaaaatagaacattacatacacatctcccattttctgtatatgggcatctcctgtgatggttccatcagcttcgtgtgcaaaaacaggatttccgggataacgtttccatgttttcatatctttagaaagggctatccctacacgttcccctttcagacctgtttccggatggcggcctcccgcattatagaacataacaaagggggcacccaacgtcttatccttatcccaatagacggtacttttatattgagtcagcttttcccaccattgggcatccttgtcatggatactcagaatgggcttattcagagactcccactcgtacgcagtagacaaatctcctttcgtccatgccaaaccgacaaaaagcggtgccttcacagcctcgtaccccgttccttctccaccgatgtaagtcatccaatgacggtccttataagtctgaagttcatagcttcctccccactctatatccggtagagcaggaaatccacctctttgattgcaatcccattcaccatcccggtacgaaagaacccgccccaatgtgcgccactcaagcaaattatcactttctgccagccaggtttcataaccacggccgtctgtccctcccttaccgttataaacaacataggtcatcagccatttgtctccctgacggaagaccgtagggcaatctattttatggtgattatcctccggagcaaccaccagtccatatttatagggtgtttttgcttcttcgaaaatctgctccatccgctcctgcgcaacatcacgctgagcaaaagcagacagggcagatatcatgcaaaagaatgtcagtgatagttttctcatgattcagtattaataaaacaaccaatccattgtttcttcgtctccggccaatcctgcattacgggccttcatatccgcatccgtaaatcccagaacctggagatatcctttcggcaacatcagcgtatgcttgcctgcctgaaaactatatgcatgtacattggccagtggcattccactgatacgaacagcattcgtcaatatcggctcggcctgaccgtaatcattagccgaagcatcaatctcaagtttcggtgctttggcatacttcttttggtcatccttgaaataggcgaccagaagttttaccggcgcatccgtttcaaaagtaatacttgttcccttttcacgctgctcattggcattgaaacgaaatgctttcaatccttccagttcaggagccatggcttctatctttcccggaagattagtaaacagggaagcgccctcacttaatttaacggtcggataaccggatagaattttcacgctggcggaagcccaggccggaatatctaccgattcagcagttgcttttccattttgtttttcctccagcagaacaaggttcgctttaaaattctccagttccttttcgtaatgtaccagcaattctttccaagtcttattgttgccgccatctccacctataggaatacggcgttgtgctgtctgcatactattggcatacagataatgttcatctgtaagtttcactaatttacgataatgttccagactctgctccatcagaggaatggcattttccagattctttagatcttttccccactgataatccaataccagtttggcagctctcactttcagattaaacgcatatgcaaactcgcgataacaatgcatgtcattctgcaaacgtgcgaacttatctttattgtcagatacggaatttgctgccttatcaatggcggctaccgctttatctccatgctctatagcctgggcaatgatatccaaaggcaactcacctgcatgaggttgctttttccattccttttctacatattctatcagtttctcaccttccggtccgcaactttcatagaaccccggatagatggtgtatttgtatggattgacaaactgactcataaacatacccagcaacaatgtctggcgatttccttctgtgatgccgaaacgacgcagcagcttcggtgctatttcgccactttcttcatacgcctcacgaatcagtccggcattttcatcagatgtaccatagaatttacctaactgatgattccagtaatcaatttcctgtgaacgatcacgacgacagttccatgcatatcgtccccaggtctgataccatatccagtcacggtcaagctgaaattcccgcttgccatccggtaatttgtcggcagtgtatggccaatcccaataagaagcctgtgggtaaagatgcagggcatttgcgccatgaacatcgtgcatggcctttacagccttctgcacaaaatcgggagacccccaacggaaaggttccagattcgccaaaatatgaacattactgatatggatagaaccgagtgaactcaaatccgtatgtatctttgcccatggtccgcgaggttcgtaagtggtcagtgattcaccgttatacttatgcatggtataaagattcttatagagtggcagggcggcatccatcactaatttacagtctgtatcgtgtgcacgcaacaagagaggcggttcatctgtacgtccaagtgcctgtaatccatcctttactccggggataattgtctttgtgaaccattccacatcatcctccactgtacacatggcttcacccaagcaaacaagcaatcctacattaggatatttctcaataaaagcggcaatgctcttacgagtataatccgcaattaaaggagtaataggacggttacgatcctgtgttctcagaccgtaatgttcggcaaacggctttgaaagaatgatattgtagaacatttgtatcacaaagataccacgtttatccgcttcttccgtaaggaaagaaaacatttcttcgttctttttgaaggtctcttcgtccacttccaatgcaaacgggtagtcttccagcttcactaacgaagcaaacggatgcccgttccagagataaagtgagttcatacgattagcaaccagcatatccagatatttaatccattgttctttatcatagaaccagggaaaactctctggtgtataaggatattcatatacaccgtgacccggcagataagtcatcttctgcaatcctacgcaggcgccacgcaataccatttccggtccatccgtcagcttctcgggaaggttcagtttgccttttgaactactcacacggtctatcagttcacggcatccatagatgacaccgctgccatccctgccggatactttcgtcagattaccgactgttgtaatctgaaagccttctttctttaaagtcgtatcattggtttctgtcagcaggatggttcgaacatccgggttggagaatatagtatctccctgttgcatcacaacctgatagcccgctttatccagagtggtttgtaactgttccgcaccaaacagaatacgattcgacgcatccggcggagttataatcttcacggtttgcttgccgcacgctgcaaaaaggagtgtacatgccgcaaacatgaataatctgatatttctcatatttctatttatgataactctctctctttctacgaaagaagaggagaggatggttttactttatattgaagtgtggtaaactttgagagaagtttacaaatgataattttactcactacacttgccaaacctgagtttatagtaaaaagacgcaataagtatccgtttgtactcatattctgcctttcagtacttcaatccgctaacaattctctcttccggagtatctatccagaggcgccaggtattctcatcaatcttttccacagttccaatattagcctttggctgccggcagctttttatcgtcagataccctttgccttctgttgcgcgtaccttaatcattttccggtccatatggatatgtatatttccgttcggtgtaggtacactgccttccatccatttcagacctcccaataccggagttatagagaattccttatagccttctttcacaggtttcactcccaggtaatatttgccgagcagataaataggacttgctccccaagcatgacacagactcttcccataaggacgaccatacatggagagatgctgcgtaccgctttcctccggattatatttttcccaaaaggaagtggcaccttctttcaacattcctccccagtacgctttcatttcctgcatcactgtttcttgttcaccaagcgcacaaagggcttctaactcataaaagcgcatatagggagtcgtgatcttcaggatgctgtcattcaaaagaacggaatgtttgatggcctgctgtttctccggagtcagatagttgaagaaaacggaaaacatattggcataacgggtgacggcatcgctctgaacaccattgatgctgttatgtacaagggcctgttttgaggcattccagaatgtcgtttccagtttagctttcaaggtagtagccagtttctcatatttctgttggttggtccggtctcccaccaaccctgcacagagcgccattgtctcaagactccggcagaacagaacctgctcaaaagagagttctccctttttatccagataaccgtcggcccagtctacaaatacccaatcaccggacataccttcaaccataccgttcttattggtgcgtcccaatacataatccatcatagtctgcatacgtggatagagttgattgacaaactgccggtcaccactatacaggtaataatcgtagacgctgagaaaccaatagaatgtataatccataatcgtattgctatgactggtcacaggatctttaccccgaagcaaccaaatagtacgcttcaccgactcactgtcaaaaaagagatagtagttcatcaaataactctgaatggcgtctccgctccacacccaacggtcacgcttgatgccgtcgataaaaaactcacgggtagtgaggtgcatagtgtaggcacccacttcccaaatacggttcagttcttcatcgttacaacggaaagttccacgatattcttcgggaaggtattcgtactgcatagatacctcacctatctgtacccccggttcatgagtgatatagacgtagcggaaagccttactgttttccagggtatattcgttttcgataccggacagcggggatgtttggcggatggcaagatcagtgacttgtcctgcttccagttgcagtttatccaatgtttcgcagtatgccttgtctttcgcctcttccggactttcaccgtaatagatgtcgatgatacctttaccggagagattcttcagagtgaggtaaccgaatgtttcttttccgaaatcatagaggatgcctccttcgggttgtgtagcacgggaggtgggctgatggagtgtccgcatcaatcggaattgggaagggagttgtgtggctccgtcaaagttccagcagccggcatccatatagatggtggctgaggtgtcactggctttgccgctttcgtcaatccattccttgtcttcataagtcacacgccaggtagcatcggagtttacagtcttaccttttacgtagatggcagggggagtcgattgattccagactttaatattcaaattatgtgtcccggccggaagcaataaggtttccggcataccgaattggagttttccatccagcttaacgttatactttccttcagcggcaatgaagatttcttccggttcggaaaggttcagttgtttgctgaattccacgactacatagtggctgtcggtcttccaaaaaggaggaaaaaaagcaccccgctccgtacgacggttattcatccggttgcctaaccatatttcataatcgcccggataccatatccaagtctgggcaaaagtgcaagttgccaatgatatggcaaccaaaactacgatccatctgcttttcatttctactataatattgaattaagatttccagattcgttgaatgataatttaccagtgtagttattgatattctgactatctcaattcccctcctcccaagaggaggagaatttaagatacttccacgtaacaattctctcgccgataaattatcatttattcttcaagtctttatattcctcttccagccctgcccgttcacgaatagccgcatccactcccggcccgttattctcccacacatttccgggtccattcgcattttgcagatacttctccccttccgtccaattatcgcggacggtgataaaagacgaaccctcatcggtatagagataaaaccagtggttagggtcatgcacataacccggcttataaatgctatgcacacaattttccgttacataggtcttgggctgggaacctaacgtataaattcctgccacatcatacatatgcttcgcatagtgatggatcagattggcatgaacctgattattcttcatacaattcactgtctgagtccatccccagccaaggctgataccgctataaggcacttcgcatatttcattgtgcacgatatggatgtcgcttacatatcccgcagcaatggcaagacaaccccaatcttcgttacccgtctccgtaaaataacaattatcaatccgttgatgtgtacacacttcacgacggtcggcaggatcgtacggaagatgtgtctcgtgagcagccggggagaaactcccgaccaataaaccattccccacaatatcacggaaaagacaaccacggatgattcctccatgcaccgcttcttcataatccaaccccgtggagcccagatgctcgaaatggcagcattcaaagtctatcgccccagcggcagccacccgaactgccgccgcaggacgtcccaaccagccctggttatccaacggatgattcctgtaattccgtttcattttcggatcgatacgatacccatccgtcagatacataccagcctgaagaggaacgtgcccttttacggaaggacgcatccaggtggtatatgagaaagtgatccgctcgaaacgaagattagtaaccggacgatccaaagtaccttcaatttgcaccaatgtctcaatagcaggcacaatcgcttccgctgattgcatattttctccctcacgcggataataataaagcttacgggtatctatatcatgataccactctcccggaacatccagcagttcacgtgcattggtcagataaaaagctgaattgtgtccatcggtcgttaccatgggacgcggccagggatgttcaaactggatacgactctcgggctgatggaaacggactgccgcactatctcccaaaacctgcacagaacgaatccgaagattagccacacaccacatctggtgaagtaccatttcggcgtatcttgactttaacgcgcctttcccatccgtaatctgccgaacggcggcggcaggcacataaagagtttcagtcttctcgtcgacactgcaaatgcgatgcatattctcaaagtcctccacatcacgggcacgtgtggccttctgtccatccacccacagttggcggaaatccagcggacggccattgaacatcggtacatccgccacccatagttttccttgttttttccagttcctgatagacacaccaccacttaatacggcatcctcgccacgaacggagcgaataacggtgggcgagccctttgtcccgctatcttcaggacgaatgaataccggttcatagagggaatagacaccgccctccatatacactgtgatgcctcccagcacacgattatctcctgtccggcgccactcgcgtgcctgacgcagggcggaggtcagtgttgccttcggagattggcgggtaccatcattctgatcatttccacgtggggaaacccaaatatcgcctgcatgccctacaagggtgaagagcgacaaggcagttattagtatgattcttctattcgacataatgtttgattatagatacgcggacgacgcgtatctgtatttatctccctagaggcatccaaacggtcatttctcctttccccctattcccccaagcatagtaaggaatcaaacggatatccaccgtcttcccggcgaaactgacaggccggtaaagtatcccttcccaggaattggatgaaatcagacgagccttgccctcaagagcaacaaccggactaccttcaattatcactttctttggaatgagtttgatatcagcagggatcagtacattatcaatgcttccgccacctctcatatccatgctctccaagcaatataccaacggtccgcgcttcaccactacctgattgcgtatttcttccgccaacggatgagcctcaagcaggcggacaggcatatccatcacccactctaccacatcccccttcttccagatacgttttacctccgcatacgtatttgcttttgcggcaaccggaaccggctctccatttactgtcagcatagctttctcacaccactccggtatacggaggaaaagggagaaggcaccggctttgcggggcacccggtcaaactctacacgtacattgccttcccaaggataagcggtcttctgtgtcaaagcaatttctcctttatctctccagtttgtagtcaatgtattcgcaccatacaaattgcaataaatgccttcggaacccaatgtataagcatagttctgtgcctggcagagtgtacgcaacgtattaggcgggcagcagaagcaactgatatactccgtccgttcttttggccagcgaagtgtataaggtaaatcagcactgatacggagcggattcgtatagaaatatttctttccatccaaactgataccactcagaatactgttataaagacatgtttccactagctccgcatacttggcatctcccgtcacttccagcatgcgccagttaaaaagcatattgccgatgttagcgcaggtttcattatgagctgtactattgggtaattgataagggcgaccatagctttgatgtaccttctgaatactatccggctcataacaggtgccgtcgggcgaagtaccgtcataaagggcaccgcaagccccggtcacatacattttccgggtaacgatgtcattccaaatactggtcaggttcttcatcaattgctcttcaccggtttcggcatagacatccgccaccccggcatacaggtaattggcacgtaccgcatgtcccatcgcccggtactgctcacggaaaggaatgcggtcctgattatcatccgtaccattttccaccatcccccgaatgtcaatcagattcttcgacagttccagataacgtggattccccgtggcgcggtacatttcgactacccccatataatgggaaggacatatagcgttacgggccaattcagcggaagcggtttcatagaaatgacaaaggaaatcggtggcacggacggctgcatcaaaaagagtggtcttcccggtgacacgacgatgaacgatggcggccatcatcagatgtcccagattgtaggtttcaaagttcaggcgattggcaaaggcgcctttctcatcttcggatcctaccttggttccgacgactgtttgcttatgcggctcttccagagtatgagtatcgattcctttattaagctcttcgataataaccggggtatggatatatccatctgttcgctgagcctttacgacgcaagtaatgaaacggtccattagtttgtccagttcggggtctttgttaactgcatagactgaggctactccttccatccatttatacatgtccccatcgtgaaagggtggtccccagtgttcaccctcgcaaatgctggcagcgatctcaaaattacggaaaccgtgagatacttcgggcgtgttccaggtgttccacatgctttgcagggaggtgcggctgaacacatcaaagcgctctgcccagaagccatccgtccaatgtacggcatcaatgccggtgttcaccatccgggcgtagcggctccggctcatatccgtcagtccgttgttctgtgcaaatgctcccgtgacggaggcggaagctaaaagaagtatcagtttaatctgtctcatgaatatgaatcatctgaaatttcatacaatatctttaaagaagagacgcaatgaagcgcgttttgtactcaacaagaaatggtccagcaagtgctattacatgcaatgaccggattaatacgacattttatcacctatttgctgggtacaaaagctatctttaaccgtccttttctaaaagtataaaagctattagaaaagatgaataaaaagagattattcggctatctgtttgtactggtatccgtgggcaatatttctgcacaggagtcacgcctgtccgcacaggaatacaaactttggtacgaccgccccgcacaagtatggacggaagccctccccttagggaacgggcgtctaggagctatggtatacggcacgcccgccacggagcagatacaactgaatgaagaaaccatctgggcgggacgccccaacaacaacgccaaccccaatgcactggaatacattccccggatacgcgacctagtattcgccggcaaatatctggaagcacagacgctcgccaccgaaaaggtcatggcaaagaccaattcgggaatgccctatcaaagctttggcgacctgcggatcgcgtttcccggacatacccgttacacgaactattaccgggaactaagtctcgactccgcccgcaccctcgtccgctatgaagtggatggggtgcaataccggcgcgaagccatcacttcatttaccgatcaggtaattatggtacgtttaaccgccaaccgtccgggacggattactttcaacgctcaactcacctcccctcatcaggacgtcgtcgtcacttccgaagaaggaaactgcgtaacactttccggcgtatcttccctgcacgaaggactgaaaggcaaagtggagtttcagggaagactgaccgcccggaacaccggcggccggatggcatgtgccgacggtgtgctttcagtagaaggagccgatgaagccatcgtctacgtctccatcgccaccaacttcaataactatcaggacatcacaggcaatccggccgaacgtgccaaagattatctggtaagagctatgacacattcattcactgaagcccggaagaaccatacggacttttatcgccgatacctgacacgcgtctccctggatttaggagacaaccgatacgaacacgtgactaccgacaagcgcgtggagaacttcaaacagaccaatgacgcacatctggtggctacttatttccagttcggacgttacctcctgatttgttcatcccaacccggcgggcaacccgccaatcttcagggaatctggaacgataagcttttcccctcctgggacagcaaatatacctgtaacattaacctggaaatgaactattggccctcggaagtcaccaacctgagcgaactgaacgcccccctgttccgcctgatacgcgaagtcagcgaaacaggtaaggaaaccgcccgcatcatgtatggcgccaatggctgggtgctacatcacaacaccgatatatggcgcatcacgggcgcagtagacaaagctccgtcaggtttatggcccagcggcggcgcatggctttgccggcatctctgggaacgttacctctacaccggagacactgaattcctgcgctccgtctatcccatcttgagagagtccggacgcttcttcgacgaaatcatggtgaaagaacctgcgcacaactggctggtggtctgtcccagcaactcacccgaaaatgtacattcgggcagtaacggcaagtctaccacagctgccggatgcaccctcgacaatcaattgatattcgacctttggacagccatcatagccgcctcggacatcctggatacagaccgggcatttgccgcccgactctcacagcgcctccgtgaaatggctcccatgcaggtaggacgctggggacagttgcaggaatggatgttcgactgggatgacccgaaggatgtacaccgccacgtttcccatctgtacggactgtttccaagcaaccagatatctccctaccgcagtccggaattattcgacgctgcccgcacttccctcattcatcgcggcgacccatccactggctggagcatgggatggaaagtttgcctgtgggcacgtctgctcgacggcaaccatgcctacaagctcattacagaccaactgaccctggtgcgtaatgaaaagaagaaaggaggcacctaccccaacctgttcgatgcacacccacccttccagattgacggaaactttggttgtgccgcaggcattgccgaaatgctgatgcaaagccatgacggtttcatctatctgctacccgcattaccgacggtttggaaggacggaactgtgaaaggaatcatcgcccgcggaggtttcgagctggaactaagctggaaaaacgggaaagtggagcgtctggttgtaaaatcccataaaggaggcaattgccgccttcgctcaacgagtccgttgacaggcaaaggtctgaaacgtgccaaaggtgagaatcccaacccgctttatgcagttcccgtcatcgcccaaccgttaatcagccccgaagccaaattgaacaaagtggaaatagcaaagacctatttatacgatctgcccacccaggcaggacaagaatatacattgattggaaactaaatactgaacttatatgaatcgtatctcactgaaactactgacggtgtgcggaattacctgtttcatggcctgcacaaccacccaaaaaccaaagaccgaaaaatggagcgagcgcatggcacgctccgaaatgaagcgttttcctgaaccctggatgattgaaaaggccagcaaaccgcgctggggatatacacacggacttgtagtaaaatccatgctcgaagaatggaagcatacaggagacagcacttactacgattatgccaaaatctatgcggacagtctgattgataacgatggacacatcagaaccatgaaatatctttcattcaatatagacaacgtcaatgccggaaagattcttttcgacttctatgcccaaacgggagatgaacgctataaaatagccatggacaccttgcgcaaacaaatgagggagcagccccgcacaagcgaaggcggtttttggcacaagctgaggtatccgcaccagatgtggctggacggtatctttatggcctctccttatctggcgcaatatggcgccacttttggggagccgaccctgcaagacgaagctgtgaaacaaattctgcttatagcccgcaagacttatgatccggctacaggactctattatcacggatgggatgaaagccgcgagcagaaatgggcaagccgggaaacaggttgttcaccgaatttctggagtcgcagcatcggatggtatggagccgccatagtggatgtattggattacttgccacaggaaaccgaaggacgcgacagcgtactgcaaattctacaaggcctggcacaggcaatggtgaggtatcaggacccgcaatccggaacctggtatcaagtgaccgaccagggagcacgcaagggtaattatctggaatcatcggcaacagccctgttcatatatacacttgctaaagccatcaatgagggatatatcggaaacgaatacatcacccctgtacagaaagcattcgacggcatgatccgtgagttcacccgtcttgaagaagacggcacttacacattgacccattgttgtgccgtagccggactgggcgggaactccggaaagtatcgtgacggctcgttcgagtattatattggcgaacccgtgatagaaaatgatcccaaatccgtagggacgttcatattggcggcaattgaatatgaacgaatgaattagtgattaagcaaacaattataataacatcaataacaatgaaaacattcaaactaatcccttttcttctgcttttgctgactgtagcaatgcccgcctctgcacagaagaaaacacagaaaacgtatatcccctggaacaatggtaaactaatggtctccgaagaaggtcgctatctgaaacatgaaaacggcactcctttcttttggctaggagaaaccggatggctactacctcaacgtctgaaccgcgatgaagccgagtattatctggaacaatgtaaacaacggggatataacgtcattcaagttcagaccctgaataatgtcccctccataaatacctacggacaatattctatgactgatggatataacttcaaaaacatcaatcagaaaggcgtatacggctattgggaccacatggattacattatccgtacagctgcccggaaaggactttatatcggtatggtctgtatctggggcagtcctgtgagtcgcggagaaatgacggtagagcaagccaaggcttacggcaaattcctcgccgaacgctataaagacgagccgaatatcatctggtttatcggaggcgatattcgtggtgaggtaaaaaccgctgaatgggaagctctcgccacatccatcaaagcaatagacaagaatcacctgatgaccttccacccacgcggccgtaccacttcctcaacttggttcaatgccgccccctggctggacttcaacatgttccaaagcgggcatcgccgctacgggcaacgtttcggtgacggtgattatccaatcgaagagaataccgaagaagataactggcgctttgtagaacgcagtatggccacaaatcccatgaaacccgtaattgacggtgaacctatctacgaggaaattcctcacggtctgcacgatgagaatgaactgcgctggaaagattacgatgtgcgccgttatgcctactggtcggtttttgccggttcttttggacatacctatggtaataattccatcatgcaattcattaaaccgggtgttggcggtgcatacggtgcaaaggaaccctggtacgatgctctgaacaatccgggcttcaaccaaatgaagtatctcaaaaacctgatgctgactttcccattcttcgaacgtgtacctgaccagtccatcattgccggcacaaacggggaacgctacgaccgcgccatcgctacacgcggcaaagattatctgatggtgtacaactacaccggacgtccgatgaaagtagatttcagcaaaatcagcggtgccaagaagaatgcctggtggtataccaccaaagacggcaaactggaatatatcggtgagtttgaaaacggaatacacaatttccagcacgatagtggctacagcagcggaaacgatcatatcttgattgtagtggacagcagtaaaggctatgtaaataaagaatgggacgaactacccgatgcacaacagcgatgggagaaaaagtaagtacaacgtcactacataaatgataattttaggcgcggattacacggattacacggattaaaggctgcgctattacatcgattcatcaaaaaatccgcgtaatccgtgtaatccgcgcctaatctttataacaggtttacaaattatcatttataaaagtaatcttgaactattactcaatatcataacgcaatcaatatgaataagaagatattaatatccctactttaccttctcatcctcgccggtacggcacacgcagccttgcgcatcaccgacctgcgaacagagcaattgaagaatccactgggaatcgatatccgccacccccgtctgggctggcgtatcgaatcggacgaacaaaatgtgatgcaaaccgcctatcatattcttgtagcctcctcccctgaactcctggcacaaggcaaaggagactgctgggattcgggcaaggtaaaaacagacgcttcccaatggatcacttatcaaggtgaaacgttgaagcgtaacaccccttactactggaaagtaaaagtctatacccatactaatgaaaccgactggagcgaacccgcctcctggagtatgggattactgaatgaagcagactggcaagggcagtggatcggcctggaccgccccgcccccggtgacagcgagacacaatggagccgccttgccgcccgctacctccgcaaagagtttgcactgaccaaagaagtgaaacgagccacagtacacattgccggaatgggactttacgaactctttatcaacggtcagcgcatcggtgaacaagtcctggcacctgcccctaccgattaccggaaaactatcctgtacaacacgtatgacgtcaccccccaactccaaaaagaaaatgccatcggtgtcatcctcggcaacgggcgcttctacaccatgcgccagaattacaaaccctacaagatacctactttcggctatcccaaactacgtctgaatctgattattgaatatacggacggcagcagacagacaatcgcctcggacatttcctggaaactaaccaccgaaggccctatccgcagtaataatgagtacgatggcgaagaatacgatgcacgcaaggaattaggagactggaatcggacaggctatgatgatacgaattggatacccgccgggcgcgtcagtattccctcaggaaccttgcgtgcgcaaatgatgccgggcatgaaagtaacggaaagcctgaagcctgtttctatccggaaacagggagacaaacagattttggacatcggtcagaatatggcaggatggctacgtattcgtatcaaaggccaggcaggagacagtatccgtctccgctttgccgagcgcttgcaaccggatggcgaaatttttacgaagaatctgcgcgacgcacattgcacggatatatatgttgtcagcggacgtgaaccacaagatgccacctgggctccccgctttgtataccacggtttccgctatgtggaaatcagcggttatcccaatgccaagaccgaagattttacagctgaagtagtagatgacgaaatggctcataccgggaccttcacctgctcggatgaaacactcaatcaggtattgcgcaatgctttttggggtatccgcagtaactacaaaggtatgcccgtcgactgcccgcaacgcaacgaacgccaaccttggttgggagaccatgcgatgggttcctggggtgaaagcctctttttcaacaatcatgccctatacaataaatggacacgtgatattcgtgaagcacagcgtgaggacggctgcatcccggatgtagctccggcctactggaattactattcggataatgtcacctggccggctacccttcccctggtatgcgacatgcttttcaccaactacggtgaccggcgcgcaatcgaagagaattatccggctttaaagaaatgggtatctcatatccgcgagtattacctgaccaaggaattcattattaccaaagacaaatacggtgactggtgcgtacctcccgagtctttggaaatgattcatagcaatgaccctgcccgcaaaacggatggtgcgcttatagctactgcctactatctgaaagtcctgcaactgatgcatcgttttgcaagcctgcaaggtttaaccgccgaagccgaagaatggggagcactggaaggccggataaaagatgccttcaacgcacgtttccttcatgtgaaggaaggtacttcccccgtacccggacatactttatatccggacagcatcttctacggtaacaacacggttaccgccaatattctgccgcttgctttcggacttgtccccaaacagtacatggacgaagttgccaagaataccgtggctaccattatcactaccaataaaggacatatcagcaccggagtcatcggtacacaatggctgctacgcgaactaagccgccgtggtcatgccgatgtcgcctatcttctggccactaataagacttatccttcgtggggatatatggccgagcaaggcgccaccaccatctgggaactctggaatggcgacaaagcaaatcccggaatgaacagtggaaatcacgtcatgctcttaggcgacctgcttccctggtgcttcaacaatctggcaggcatccgtgccgaccgttggaagcccggctataaacatatcatcttccagcctgcctttgacattcaggaactaagcaatgtagatgcctcctacacaagcatctacggaaaaataaccagccggtggaaaaagaccccgacacatctggaatgggacattgaactccccgccaacactacaggcgaagtatatcttcccggcgggcggaaagaaatggtaggttcgggcaagcatcacttcagtgtagatatccctacccggaatgtagctatcctgagtgacgagttcctatatgagaaggcctccttcccggaatgtcatggagccaccatcgtagaattgaaaaacggggatcttgtcgcttcatttttcggcggtaccaaagagcgcaatccggattgttgcatctgggtgtgtcgcaagccgaaaggtgccaaagaatggacctctccacaactcgctgccgacggcgtattttcaataaaagatgcgcaggcaaccttggcaggcattgattccacttgtactcctgtgacaaatgcccggggaaaactggttgcccgccggaaagcttgctggaacccggtactttttcaaattccgggaggtgatctgattctcttctataaaataggcttgagcgtaggcgactggactggctggctcgtgcgctctcgcgacggaggaaagacctggagtaaacgtgaaccgttgccggaaggattcctcggtcctatcaagaataaaccggagtacattaatggtcgtatcatctgtccttccagcagagaaggtggcaagggatggcgcattcatttcgaaatttccgatgacaacggcaagacctggaagacaacagaatcactggctgcggagctttccgtacttactcagcaccgtaaaaaaggaagtgtcaacgtagatgatctggaaggtggcgaagccgtcaaaggtgaaggtccaaaaccaatatatgcgatacagcccagcatactgatgcacaaagacggaagattacaagtattgtgccgcacacgcaatgcccggattgccacagcctggagcaatgataatggcgatacctggagcaaagtaacacttctggatgttccgaataataattcgggaacggatgccgtaacattacaggacggtcgccatgtactcatctacaataatttctcgacactacccggcactcccaaaggacctcgaactcctctctgtgtagctatttcagaagatggtataaattggcaacctgtgcttacattggaagacagccctatcagtcaatattcctatccaagtattattcagggaaaagatggtaggctgcatgctgtttatacatggagaaggcagcgagttaaatatgcggaaatagatttatcaaaacttcgataaaaattttccgtatatcaagcgaagcggatgtgccgaaaataaatctggcacatccgctcattttttcttctcagaagtttttgttatgattccttcttcctagaagtttttccttatgcaacgtttcgtcgctccttgtccattttccctttatggcgctgtcggtgcttccgtcacatctaccgttacagtcaccttctttgccgcatccgacagattctgtatctcaaaggttgccgccgcatttgccgggaacgatcctgtgggaaaatcctttgcattttggtccagtgtcaaggtatagtctatagcctcggtgctatgtccttccgtctt

SEQ ID NO: 6450 - DNA, 56528 bp, Unknown
  gut microbiota DNA sequence
gcacttactcgccgcacttgcttatgtaccaagttattttttaagcgttactgaataaaaagttacgcaaaatggagaaacaaatccatgatttcgttgttaaatgtgaaaaaaggcgtatctttgcaactgaacgtgcgacatgatatatcttgtatatatacatgtcctcttccgatgttagtaaaatgtggaaatttaatgaaccatcggacgagcgtagcctgtatcagttattggtacgggcttactcttccgtggttcagggtatccacatacctactaacagggatagagtaatgccccgtacctttataatataaagccattatagccgtatagggaatgattttaaacttataatcaaacactatatggctaattggttatctacaaagtcagtagctgagaaatacggcataccgaaagagcaaatccgggaatggattaggttacgttatctgacatgctcttctataggcacagaaccttatgaagacaatgacccactgatagatactgacgaacttgacaaagctctcgaatttaattcactaaaatcttatcctgatgataccatgatggaacgagtgcgaaaagagcatttgaattggctttatcaggaaaaagcccgtttggaaaaagtcaacgatgatttattagaggaaattcataagcacgcccgacgggaaacagaactgggagagaacttagagaaaatgatgaattatacacatgaaatcctcgaaattcatgagaaaatgatgaaagattatgagaataagatatccgggaaagggggaatttggccttttctttatcacttatttatcataaaaaagaataagaccctcatctaaccaatatatacatacctgttttttccaatccttttcatctcgtgaatacggagcccgcgatgagctccgtattctttttatagaatcgtataattgtactgagtgatattctgttttaattcgtatattagcaagtatagaaacatcgaaaaaaaacaattatacaatgaaatttattacaactattttctcagtccttttctgcttatccatacaggcacaactagtgacttatcccggtacactgagtaccgggatgccgcacaatgatgactataccgtacgcgtacgcatccccggcggcgaatggaaagatttgttcgaatacaacgtacaggtagatatggacaaagtgcaggatgcttccatggtgcaatttgatatgggaagtcccgtagaagtaatggtgaagaagaacaatggcactgtgcgcgaagcagccatatgccctttgagtaaaggtattgaatacaagcagatacaaaacgccattcttttcactctggaaaagccacaatatctctccattgagtttaatggtgaccgactgcacaacctgcatctttttgccaacccgatggagactgaaaaatatgaaaaagaaactaaaggagtaatgtatttcggtccgggcacacaccgccccaaagacttacccaacaatcagatacggataccaagtaatacaaccgtatatctggcccccggagctgtggtcaaggcaaaactcgtggtagacaaaaccgagaatgtccgcatcatcggacggggaatcatagaccacgctgtacggggcattgaaatcactgattccaaaaatatatggatagatggcattacagtaatgaatccggaccattataccgtatttggaggtggttccacaggaattacgattaaaaatctgaagtccttcagttgtaaaggatggagtgatggtatagatatgatgtgctgccgccaggtacttatcgacaaggtctttatgcgcaattcggacgattgcattgctttgtacaatcaccgctggaactggtggggaggttcatctgatattaccgtgcaaaattctattctttgggcagatgtggcacatcccatcaatgtaggcggtcatggcgatccggactcgccgacaggagaagtgatagagaatctgactttccgtaacatcgacatcctggaacatgacgaggatgacccgatttatcaaggttgcatgacagtggattgtggtgataagaatcaggttcgtaatattctcttcgaagatatccgggtagagaatattcaggaaggacgactgttttatgtaaaagtacgtttcaacgagaaatatgataaacagccgggaagcggcattgaaggcattactttcagaaatattacatatacaggcataggagaaaatccatcgttgattcaaggactggacaaagaacgaaccgtgcaaaacgtgacgtttgaaaatgtagtaatcaatggagaacggatgaaggacttgaaaggaatagtaaccaatgattttataaaagggattaagataaaatgaacaatcacggagaaataacagaaaataattgtcccgatgtaaccttatcactattttagcgtctcagattataaaccaaatgaaaaacaaataatggaattcatcaaatttttatgccttggcggcataacaaccactatgctcctgagcggatgtacccagaagaatattactttagaaggcaaagtaacgaatacatccggcgctcccattgtatataatatcactacagatggcatttacttaccgaacaagattgatactttacgcttaaatgccgacagtacgtatcagattaccttacctgtaaacgggaacgaaaagctgaccctttttctatatggtgagcgaaacttaggtagtatctatcttgctccgggaaaacagacgctcgatatcgatgcttccaaatccaatgaactaaacccggttgacggcttaacgaaagaaaatgaaatactcaggaaattggctgatctgaatgaaaacgtatttaatctgcgtgcacgccggggagatatctttaacgtcggcaaggacacggttgcctcatccgtatatcaaaagctgacagactacgctactacattagaaaacgaagtggcagaagtggacgatcagctcagacagagagccatacaagatatacgtatacaggctttgatggcatatatgaatcagtattttggtaactaccggagaggttccgaaacgctcaagaaggaatgggacgacgcttacgcccagatgttggattttgcaaacgtcggtcaggctgaaagcgtattctctcctgcatttgcagatgtcgtatcgaatatggcaggcatagatattttcatgaaacatgaaaggcgcacgaatgatgacaatgaacgcaatcaactgttattcgattggtataaaacaaatctgcaaggccgggtacaggaggctgcaatgggacttctcattctggaagatgaaagccgtgagtattttgcaactggtattcctgcattgtatgaggaattcaagacattatatcctaaaagcgtgctaatgccgaaattagaaacagcgatacaaaggaacaaagcgttcaatgaagccgaacttccgaaagatattcatatattgaatacggacagtgtacgcacctttaaggaaattactgacttatacccgggtaaagtgatctttatcgacgtatgggctacctggtgcggtccttgtcgtgcatcatttgcacacatcaaacctttgcagaaatatgctgctgaaaatgatatcgtgttattgtatgtttccatcgatactccccagaaagctgaactctggaaaaaaatgacagggcactataacttaaaaggagagcatgtcatcatcaacgaggctttcaaaatggaaatttatgagaagttcgggcggaacggtatgttgtcaatcccgcattatgccattgtcaataaagaaggagaactacaattcccatcggcagccagcccagaagatatggataagttgacggaacaactgaaagaagcctctaaataaaagattattaacgaatactaaggctcaccgaaatataacaaaaacagactgattccataaatcttataagatttgtggaatcattgttttaaatcccttatttttgagtgaagcttattcctcgttcgtattaatactgtaaaaaacaaaaaaacatgaatagatatagactgcttttttcgatcatcctcttgctgttcttctctccctgtttgcgggcaggggaatggcaatggtctgtgacccttgacggattcgtctctaatgaaacgaaccggaatcctacggctttcttatggatacccgctgactgtatgcagataaaagcaattattgtaggacaacacaatatgagcgaagaaactctttttgataatccccttttccgcgaaaagatgcagaagcttggaatcggctttgtatggataactcccggtatcgatcagcaatgggatgtatcgaaaggcacacaacagatatttgagaaaatgatggtctccctggcagacgtcagcggatatagcgaactgaaaaatgtccccatcgttcccataggccattcggctatggctacctatccctggaacttcgcagtatggaatccggaacgcactttggctatcatttccctgcatggcgatgctccgcgtacgaatcttaccggctacgggcgtgagaatctggaatggggacgtacccgtaatatagatggaatacccggactgatgattgaaggagaatatgaatggtgggaagcccgggtaaatccggcactggccttccgcatgatgtatcctgaaagttgcatctcatttctgtgtgacgcaggacggggacatttcgatgtggcagatgaaacagccgcatacattgctctatttctggaaaaagctatcaatcaacgactgacggatgaagtaacgaaagacggtaaagtaaaactgaatccggtgaacccaaccaaaggctggctggcagaacgctggcatcccgatcagaagaagcgagccaaagccgccccctattcacaatataaaggtgatcctcacgatgctttctggtattttgaccgtgaaatagcggaagcgaccgaaacacggtatacgcaaagccgtggaaagaaagaacaatatctgggttttgagcaaaacggcaatttactgacatacgacaagaagcagcatgtacgtgtacaaccccgcttcaatccggaagccgatggaatcactttccacctgaaagccgtatgtacggattccctgagaaccaaactatctgatgagcatgcagatgcaacaccgataatcagtcgcatctgtggaccagtagaaaaggtaaatgacaccacattcatagtatctttctatcggatgggtatgaataatccgcgccgtaccggtgatatatgtctgttggcaagccagacaggagaccggaagtataaaagtgctgttcaagaagtcagtatccgcatcccctaccggaatacggaaggacaaaggcagtatatattatttccaggattacccgatgtgaaagcggaaagcggttctttatctttaaaagccacaagcgactgtggactgcccgtctcttactacatcaaagaaggtccggctgaaataaaaggagaccaaattgtattcactcctatcccaccccgcagtaaatttccggtaaaagtaacggtagttgcctggcaatacggtattgcaggcaaagtacagacggctgaaccggtggaacgaaacttctatatattgaaataaacattataagccatgaaaacatattttctatttatatgtgccatctgttgttatcttacagggaatgcacattcgacggaatataacattttccagttcggagcttccaaagacacttctgtcgtacaaactcaagccatcaatgccgctattgaaaattgtcaccggcaaggcggaggcaaggttatcattccttcagggatttataaatcaggaacgattttcctgaaagataatgtagaactacatcttgaaagcggagcatacctctatgccagtgataattacgatgactttcctgtgcaaccacaagcatcttaccgttcacaaaaagatgccggtggctgggtttccctcatctatgcagtagatgcaaaaaacatcagtattaccggaaaaggtacgatagacggaaaaggaaaaggacgaaaagggcgtatcagcggattgggcggcgaccgcaacggacggcctcgtaacattctgtttatctcatgcaaagatgtgcatgtggaaggtattacaatgagaaattccgcactttggaatcagcattatttgaattgcgaagatgttaccatcgatcacataaaagtgtacaatcatagtaatggcaataatgacggaatagacatcgacggttgccgccgttttatcctttccaacagcattatcgactctgacgatgacggtatcgtattgaagagtacgggtacggctccctgtgaaaatgtaattatcagcaactgtattgtcagcagctttgccaacgccattaaatgtggaacagaatcaacgggcggctttaagaatatttcaatctccgactgtatcgtaaaaccaagccgtcataccggggagcggattctaaaatcaactccaagtggcattaccgccatttcattagaaattgtagacggcggaataatggatggagttaccatcaataatgttttgattgaagggactgaatgtccactttacatacgcttagccaatagaggaagacagtacccggatgatgcaccggttcctcccgtcggaagaatgcgaaatatccaaatcagcaatattactgcctacggaaccggtaatttctgttcttcaatcacgggtatcgagaatgcaaaaatagagaacatatatctgaacaatatccgtttcatgaatcgcggcggactggtggaaggtgcttttctgcctgatccggcaatggaaggaaaacgccacgatatagcaagcggaacgaaatggaatagatactggtcttctttcaaagaagtgaaggaagacgaaaagggttatccccagcccactgtatggggaaatctgccaagttatggattgttcatcagaaatgtggagaatatcacagtaaatgacgctacgttcatgcccgaaaaaccggacccacgtattcccgtgattgccgtaaatgtaggtaacctgcaaatgaaccgtatacaagtggatagccgaaaaactgacacagacgttttaatgcataatgtatggcaacataaaatagatgctcaactccgcatttcgggagagacggctgattttaagtccggtcgcatcgatgttggcaatggctcgctctattatgaagaagccggaagcggagaacctgtaatctttgtacatggccattcactggatcacagaatgtgggatgaacaattcgctgaatttgccaaagaataccgtgtgatccgttacgacttacgggggtatggtgcttcttcctctcagaccgaagattatcagtttacccatgtacaagacctggtgacactgatggattctctccatatccggaaagcacatatagttggcttgtcgttaggtggtttcatcggtgccgatatgttaggttggtttcccgaacgcatggcatcagctttccttgcaagtggaaatatacgtaagtcgaaaggacctagccaacctatgaccaaagaagaagctctgaaacgggatgaagaaattgccgccctgaaagtgaaaggagtcgacgtcatgaagcgtgaatggtttgaagggctgatgagttcgggaggtacccggaaagaaaggatgcgtcagcctttatgggaaatgattgatgactgggatgcctggcaaccattacacaaagaagtacgggtagttgcaggtctggatgcttatgaagccataaaaaagaatcatcccacagtgccgactttaatcgtggaaggcaagtcagccaacaaccgctattccaatcaaccggaaattctgaaatatctgccgaacggaaagctaaaggtgttggaagactgcggacacatgctgaacatggaacaacctgaagcatttaatgctgcattgcgtgaatttctgaaacaataaattcacgcaatacagataatgctataaaatatagaatgtttgtgtgataggttcggccgtttgaatcttaggttctccactcctgccatactgccacgccactaccgtaacttttaccggataaacagcacgcggaggaatcggtgtaaatatcaactgatttccctccactctggccggtccggattctacataaaagccaacaggcaagccactgtcggaagaagcttgtaatgtgacagactttattcctcgtttgacatcagccaacgcagcaaaggagactttctgtggtgctccatctatattgcgaacgggtatggtgatctgcgcctgctgaacaatcggtttatattccttatctcccggatgacgaacagcaaaaacaatatcagccttagaggatgcccaggaaatactccgattccattcgaccttgaaggtatggttgtgaattactgcggggcctgttatcatttcaaagcaaatggaattatccgctgcatggccaatgcgtgtacctacaggcaggtccgtccaattcttcaggcggggactatcaccgggaaccgtatccaggaaaacaggagtcagatgaaaagaaactccatctccctgaggcagaaataccgggtgaagttgcaaatgactgtcacgctgaactaccggcttaccttcttgcacgacacccactaattgcggcttcatgttccggaaacgggcttgataggcctgagtagtttctaccatttctttatcaaaaaaccagaaagcatcatccggattacctttatattctgctacaggcgcaggcatacaagtgggtggttgattctttttccaacgctcagcgagccaaccggttttagtaggatccacatgcccgtattgcaatgctttctttatataaagtgcgatatactcagccttaccgggcgaataagcaaaatggccttcggcaggacaagccaacatgctcaatggcaacaaaggatgttctttccgctccttcaatccctcattactccaggtatgtgcagattcatactcccccattgtttcaagacatgggatatagtcgatattacgctctccccagatatccagattcagccatttatcacgtacataaggccactgtccactgactgagatacaagctaatgtacggtcgggcatatatgcagctaaatagtagggccagctggcagctgccgaatgtccgataccaatcaatggagccgatgccaactccgtatatcctgaaactgacgccagatctttcagaaaaccctctaaagtttcccatgctccatctgtaaagtcgaatccatgattgaaagaaggacaaacccatatttgtgctacatccaattctgccatcttaatgcggaagttctcatcttccattatagaaatttcttccatattatgctgtgccacaagcacagctttcacgtgtttacatttctctggtatccataaataggctttggcatcaggatttttcggttgtttagcaaaattacgtaccggcacagcccactgccatacggcagtctgggctgagacagtgaacgtgattacaataagaaataccaacgaaaacaaaactcgtatattcatagtatgcttatcagatacttctcgtaccaccctatttcttgttttcacatgtttcatcacagtttctgttgtttataagtttttaaagatttatccttagtaacctcgggcactaaacgaatggcagaacctcccgaagccctcagattaaaatgcagcacagtcttggcattgacgcggaattttgagactctgactttcgttcgtgtaggaatagatttgtcgccatccgtatagatttcagccacataatcttttccggcaggcagaaaactcaaatcaaccggcaacgtccgtgcttcattatttgtaattgagcctatgaaccattcctctcctctccggcgagctacagtaataaactcaccgacttcaccttgtaaaaccttcgtatcatcccagatggtgtacacatcatcaaagaactttaattccggttcgtcctgtgaatccgaaggtttatcataccagtacatatattgcaggggactgtaatagacagctgctaaggccaattgatgcgccggtgtagtctggatggacttagaacggggaacaccataattatctttttcaacattcagtctgccaaagtcctgacgatagtaacatattgtataatcagctgctccggctacaaagcgggtaaaaggcaacgtaacattgtgcgtggcatccggaaattcttcattgccgcgaataccttcctgagtcatcagattaggataagtacgactaaagcctgtcggacggtattcatcatgaatgtctaccatcagcccataatcagcacactttttcacggcttcgtgcatccattttgtccacacctgcgaacctacctgcacaaacccaaacttaattccagaaattccccatgatttatacaaaggaagtatctcatccagctgttgctgcaaagcccgctgattaacatagagtataactccgatgccatgctgcttcgcataagcaaccacttctttcagattcagtgcatctattttcggattcctacgcggatcaagtgttacagtagtggcatctgaagccttatcatactcaaaaccataccaaccggcatcaaagtggatatattgcagattccgttttacagcaaagtctaccaaagcttttccaccttctgtggtcaaggtcacttcacgcatcacttttcccggtttaatccaggaagtatccttaatccgacatggcgaattaagatttaacaggatatcgttgtgttctaaaatctcacccggcttgtcagcacacatgattacacgccacggagtagaataaggtgcaatatcttctaccggaccatacatagccgatataatcgtattctttttagtcgatgacacattgaacttcgtacgtacataatctaccacttgcgcttcagccaggcagacatatcctccacctgccagtgtcagcagcaacggacggtccgactcgcccggccagctttcaagaggcagataagaatacggggtctgagctttaggggtaaaataggctttagtaccttcgggcatggtatattctgtatactcatctgtaatcttcagatattgtccgcccggaaaatggtaacggaaggcaattccctcatcataggcacggatatcaagaatcaacttatcacgtccgttctgacgattgacaagtattttccatgcattatagcagtctttaatttcacttctttcaccatagaccggatgccagatcgtatctttccgactactatccacagttccgatttcaactccatcccgccattctacatttgcattgattcccaataaggaaggttttactgtctgttttccgttccaggtcaaagaataatgtaattgtccaccgctatcactcaacgtaaactggtattttccatccggtgatgtcatattcacctccttgccctgtacactcaaagacaaagctacccataacactcctacaaataattttttcatttcagaattctactttatattattactttacatattgtacgtgtttcacaaaatcgccagtttgtatattcgggctatcagcacctattcttgtgccatagtattcgacattatcgaatatgataccggaaacatcatgccgttcatcgattccctgaatcagtacggctcctctttccgccttgcgatcactttctttgccataagtggtaatattacggaaagttacattatgaatataaggaccataagaaggaacaactacaaattctccataaccacaacttccgggaccacgtctgccaggtcccacctttatatcattcggagtgggtttctctatcggacgtgtacccactaactgaagtgcaggtttcagctttatcagattatacggaatttctccattaatcctgatattctcaaaacacaaattctccattgacatttctcctgtaggatgcaaccagaatatctgaacacggtcacggtcaggaaaatgaatcacatccacattacgcgctgtgaaattacgaaataccggacaactgctttccgttgccatacgaaatacattggcaaaatcaacccagaacacacagttctctactactatgttctcaaccggttttgattctctttctcctccggcacgggttatccccttcggagaaaccgaatcatcatctgtccgaaaaaaacaattccgaatcgtcacgttactggaattgcaaggatctacaccgtcatcattacctacacgggaacctgccaaacgaatacgatctatcaaaacccgatcacaattctgaggtacaatagtccaataataagaaccttttatgataatatccctcattaccaaattattgcagttcttagcatttatcatatagtcagtggggccggcattatgttcccaatcggaaccatctaaaattcccctaccgcaaattgtaatattatcgcctgtagcctctataccggcattgactaccgcaccccctgccagataaagtgtttgattactgcccagtctgatcaaaccgttttcaggattatgttccccaggaccaaaataaataacattcggatcattctttgaaggaatatctgtttccaattcattacagaatagaatcaacgggctgttacaaccatccggctcaaaagatatatcacaaggttcgttcagatggaaagtagcaatatctttattaacagaaggatgaattgcatatttatccggtaatatattcaagtgatccagagatagtttactcttaatcttaacagtcactgttcctgagaaatcaaaatatgcaatcgaatattttttatcatgatgctgtgttttcgccatataaacgggtaccgaaacgccatccacctctaccatataatcggaagataaagtctctcctttcggagctggatagctgataactttggcattgactgttaatattgacaatgcagctaacagtaacagatgaacaattcttttcaatgatgtttccataatacttttcatattttcaaagttagtaaattattgttttttgatgtatcatcttttactaaaagacgtatagcggcttgtttttactcaacacagaaagatttaaatccctttttcttttatataaattaggtaaatcggcagaatgaaacgttttatcgacatagtaatccatataaaatattacaatgccatgaaaacatttcatttttttccatggaaaagcagaatcttcccgatcctctttatcctactatcaatgtacaagccttcaacagctcaaactacccgtaattctcatcatgaaattgcagccaaagccagtagcaagaatgactgggaaaacgagaaaatattcgctattaacaaagaagaaggacatgtaaccttcattccttttgccaataccgaagaaatgagaaaagacgaatcatacacaatgccctggaagcggaataattcatcttactatcaacttttaaatggtcaatggaaattcaactgggcaaaagaaccttctgaacgtccggtaaacttctacaaaatgaattataatgattctgaatgggccgaaattcctgttccatccacctgggaatcattaggctatggaactcctatctatacaaatgttacatatccatttttgaataatcctccctttattcagccccaagatggatataccattgttaacgaacctaatcctgtcggttcctatcgtaaagaattcattttacccgtcgaatggaaggaacgtgaggttttcattcattttgatggttgttacagcggtttatatgtattcgtcaatggtaaaaaagttggttacagccaaggagccagcaatgatgcggaattcaatataactaaatatgtaaaaccgggaagaaatatcctcgcttgtgaagtctatcgatggacagatggcagttatctggaagatcaggatatgttccgcttatccggtatacaccgggatgtctatcttattggtgtacctaagatgcatgtacgcgatgtcatattaaaatccgacgttagtgacgacctgaaaacagccaccattcaagtaaagacagaattgacaaataagggaaatacagtcaataacagtaaaatcagagtatcacttatcaataataataagatatgcattgacaaattcgagatgaatgccggaaaagtaaaatccggggaaagtatttacctggatggtaaactttccgtccaatctcccaatttatggagtgccgaaatacccaatctttataatatcgacatcgaacttattgatgaatatggagtcgtaaaagaagcactcactcaacgttatggaatccgtaaaattgagttgcgtaacaaaaagatatacattaataaccaacttgtcattttcaaaggtgtaaacaggcatgatacacatccccgcctcggcaaagcaattccggcagaaatatacatgaaagacctgttattgatgaaacagaataatatcaacacagtgcgtaccagtcattatcccaatgatgtaaagttctatgcaatgatggactactatggtatgtatgtaatggacgaagcagatttagaatgtcacggaaaccgtgaacttcctaaaatagagagttgggcggctgcttttatcgaccggaatgtacgcatggtacagcgtgatcggaatcatccgtgcgtcattttctggtcaatgggtaatgagtgcggcaaaggagataatttctacaaagtatatgaagccatccggaccatggacgacagacttatccattatcagggatacaatgaatcagcagatatggactcatccatgtatccctcgatggaggtaatgatcaaaatggatacaacgaattctgaaaagccctatttcctttgtgaatatgcccacgccatgggcaatgccatcggcaacctaaaagaatactgggattacatcgaatacaagtccaaccgtatgataggcggatgtatctgggactgggtagaccaaggtatgaataaaccgggagaagcggataaccggtattattacggtggcagttttggtgacaatccgaataaagaagatttctgcctcaacggcatcataacttccgaccatgcgattacagctaaattactacaagtaaagaagatataccaatacatcaagtttgaattggaagaagaacttctgaaagtgaaaaatgaatatgctttctataatctaaaggatttctctttaatttatgatatctacaaaaatggtagacgaattaaatctgcaaaaacagaactgccattcacaccagcaggacatagtgcagatatccggattccattcaaacaactcatgattgataccaatagtgaatattatatcaatgtatacgttattctgaatgaaacaacctcatggggaaaagccggacatactatagcagaagaacagtttatcatacaaacacctgctacagcagcacatgcatccaaatcttccggtaccattatgctggcagcggacaaaaactggttacgtatcacagctgataattttgaaacagttttcaatacagatgaagcgcgcatgatacttctcagatatcataattcagatatcatctacggacatgaaggtcttacctacaatggttaccgctatatcagtaataataaacgtgattggaaaccaactgcttttgaagtgaaagatttcagttaccaattggccgaagatcatagttatgtaaaggtgatcacaaaaatggaggcaactatagataatataacagtcccatattgtgtaaactataccatttatgccaatggcacaatcgatgtagatgccacattcaccacaaatgaccatttcaatctccctcgattggctttacaaatgtccctatgtcaaagactggaacaagtggaatggtacggtcgtggtcctatagagaattattgggatagaaaagatgcagcttttctaggtatttattccaaaacagtatctgaaatgggagaaaactatggccgcccccaatctatgggtaatcgttgcgacacacgctggctggagatgaaagataaagccggttcaggcatccgtttttccggtgatgttccatttgaattcagcgcattgcactatacggacaaagacctgttcttagctcgttatggacacgacttaggcaacttccatcgtgcagagaccatattgaatattaatgccattcaaaatggtcttggaaatgccagttgtggtcccggcccgcttccacaatatctcattcaaaagaataaagaatataatttgaagttcagaatggaacctatcagatagttacctcgcatacatatgtaaaataagaggctgtccggtgacagcctctttatattatctaaaaccaatacctatttctctatcaatctacctttttataaatttcttaatctctgtagctgtcccattcgtcaacttcaataaatacatacccgaagttaaatgactcacagatatttttaaatccttcccagccaccttatgttctgatatcttatatccatttacagcatagaaagcataacctgttatttcatttcctgaaacaatcagataatcagtacaaagattaggggaaacagaccatgtaggagtacctgaagttacttcctgaatagaagttggattaatcaaaagcgtacgtactacccgttccgccatggcatactcatcatcaccttcctgatctgcataaatctcgcaacgacctgtatttttcagataaacgcgattaccctctacctttgctatatccggatcagaactggaaaacgaaacaggcagaccagaacttgccgtagcggataactcaaaactactatcagtcagactcttattcggaatagattcaaatgtaatagtttgtggttttagttcaatggggtatccccaaaattctacctcacttatattacaattactcttcgtacctgaagataaataacgcatataccgataagccttatttatatctacttcacgatgactcactacataatattccgtatcatacacatcaatacaataaaaagttacaggatcaataaaatccttattatcggctaactgaaaacaaccaccataaagccgggaagcataaccggaacgtggagcatatcctatgcgggaaactgtggcacgcatattactccctaaatctaagcctacccaagcattggtatccacatcagaatcaaagtaagttcctatgtttccatccatcgccttatcacaagtatttcccatacccccccatgaacccggagttcctattatccgggcagtattcagcaaccggagttctttcagttccgaagcaacaagagcgacagcagaagtcaaaggtccttctcccaccttattcgaagccgatactttataataatacgagccattcatatccggcaaattatcagtataagccaaagtgccgattgtagccaacttatcataagcaccattctcctccttagcacgatagactgtataactttcagcctcatctacagctttccacgacacataagctttagcgcttccttgcaacactctaagtctttcgggagttcccggtatggacacacttggggttttgactgaaactgttgcagtttctttgccgtctccactcacatttaccgtacgaacctcataataataatatgtattttcggacaaattcatatcagtatacaccgaattttcacaggtttcggtaagtacttcaaatggtccttcaggagagagagaacgactcactttataacaataggctccttctaccggtaaccattccagccgtgcacaagtactgttttcagcttccacctttaaaccagtaggtgccggtagttgtggatgtaaatcgtctgtcacagtaacctgatcaataaaagcacgcattgagctatatgaagcgacaaaaatacccgcataaaaatcaccggacatgtttatctccatagaacctacttcaaaccactttactccgtcttgtgactgataccctttaaagagattgccttcacgtactaacttgaaccatacttccagccaagtgtgggtatttcctttcatccaactggcattggcacccgctgaagcccgcggtgcaaaccagaccgtccgaaagccatcatccgctaaccctatcgatgccatctttgaattagaatccaaactctcacgcatcattatccctgtacgatccgatttatccccagaatttatagcatcgaacaaccgcatagtaatggttgaattgtttttcactggaacatacaaatatgtaacattatcatttttgccaccaaaggaacttcctgtaccataaactttaaacgtacgattattaaccggattataagatacttcggaagatatggaagcaccacttaaattcataaggctccactcttctggtagttctctccctgaacaagggatagccgaaacaacatccgaataggcaccagtacccgccttattcacttccgccacacgatagtaatatctctttcctccaataacagtagtatcggcataacaattggtagtattataactccaggtacccaccgtttcaaaaggtccttcaggaaagggagcacgctgaatcagcgcaccgttaatcacttctccctcaactgattgccaagacacaaccacctcctctaaaccgggaatcactctcacattcagtggagcagagggcaatgtatgttcgcggaaaggagattttgcagcatccaatgtatacgtaaaagctgtataccctggagcctcccagccgcaagctgtcaatccgcgtgcattgatcaccgctttcgtataaggagcatccaaacctttccttactgcataatgattatagataatttcattggcgggcatattcgataccacaaaagaattcaaactattgcaacgccagcgacaagccggataatagaaatagcgttgggcacaatcttcatccaatttccactcccactcatcataggcatggtcaagattgtacttacccatatattcaaatcccttcagtaataagttgtcctctaatccgaaaaggtcatctccttgattccatgccatttgacaaagctcagccgcactgcccggcccaatttcggcatgtggcgtatcacgccccatctcatttacctgataagtacgtggatttaccatttctgtcagacaacctcctccaacaccatgtttatagtaatcgacagcttcattatagattttttcatcatcgcagaatattccgatagccagattgcaggtattggaaggtccgtcccaaccagaccaacttccacaacctcctgactgcttacatgccggataaaaatactccttgcacatttttttaaaacgttcaatatcgtcagctttccagccgggatatgcacgaaccacctcagctacctgcaccattatactggcaggcaattgatacaattcaccggtaatcactccattcacagccgcagaccagtcattcagaatattcaccgcacactctgcatgacgttcatctccagtcacataccaacgtagaaaattatagtatgcagccaccccatcacgggccgcacgttgccgacgtccacttggtcctgaaacagactccgcaggagccgctttatatatatattgcgctttagaatcttcaatcatcagattccaaccttctatccaaggtgattcctttgctaatactttttctttaatacgatccagatcagcgcggttatgaaccccaccgggatgtacaaaagtacgctgagaaaacactgacattgggatgttcaataaaatgccaaataagaacatggcacatttcaacaatgtaaatttcataatattgtattatttaagatggttatttatacgatgtccgctgtataagttagcgaacatcgtatgctttataagaaaaaacgattggcaggactaaggtacctaatcaaatattaaaattattgttgaaagtgcgcttaaaacttcaatattttatcctcaccgttgcccgttcataaatcaccggcatcgctttcttattaacttccaaagcagaaggacgtttcatatttccaaaagtagcgtgtactttcggctgcccttctatccaaagtttcagtttcctattctcttccttttggatgataaataacttagaaagagaagcaaaataagatgtagttccacgtcgcaaggcactaccataacaaacaaagagatcttttgaatcggcagggtcagcaccttcttcataagtaacggcaaacatataagcatccgtaaaccaaccgtcagcttcaatccaagagttactatgcatcagacgtccatctgccaactggttaatatacaaatccgtcactttacccttgtttcggatacgcagtccgatccagtccttaccctcacgtctctccatctgaggaagttctttctcacccggagtgtctttcaaaataatagctgtcagccctttcacacgatccaccttggctggtagatgaaaagaatagtaattttctgttcctttcagatcttcggtaggtgcttccactacttcccagtaaaggtcttccggataatcatgaacaaaatcggacttcgccaacaagcgtggataaagcggacgtaccactatcgaggagttgccgtttgttatatccaaatcaataccttgtttcttggcctctccgcccggatgccaaagccactcaaagtgtccgatatcgtgcgtcttcaggtcatcaaccatataaatgacattatctatccataagaagtgacgaaagttacggctgaactgatcagaataaggtcctgtaccatctgccagtacatatttcacgttatcgccatccagcaaatgatgaagataaccacgtagtgtagaaccatgatactgctgctcacgcggctgccctttgccattgaacaatacaacgttatgcgcttgactctggaagaaataattacgataattagggttcggataccaacaattaccagcatctttcagtatatcgactcctttatgaaaaagaataaacgaattcgcatctgcgtgggaatgattccacgtatgcccggacttcactgccagcatcgtagcatctttttcccaggaagtacgcattgtggcccaaccgaaatcagaaaacaactgcgactttttcaactccggtacctcaggtgccttacttagattcggtgtatagagaaatcccataggacgattcataaaataaccgtcacgatgttgcccttgctccacctgattcatataccaaagcatattatcattccttatacccaacgcatacagcaacatcaaactgctttcagccgacacattcttatgactatcaccaaaattgagattatacaaaatcccggtacgcgggtagcatacatgcataaaataatcagaaatcttttccagttcaggtatttccggctgcctctcacccggattcatattcatccatgccaggcggaatttcaaagcctcctgaataccaaaattggcatagttcagactctcatacatgccaccggcatcatcaaatgacttcggcttttgctgaagtacatctccggcaaaactaaaccactcgggcaaggcttcattcaaaaatcttgccccttccttagcttccggtatctcattctgaaggctcaatgccaaaagaccacccatgcagacacaagaagtccaccaattatgccccatagaattcaatgcatgtatacgcgtaggttcaagcaaccaatctcccaacgaaggatctaaagcgaggcgtttcaaccctaatgcaatctctttccgctcggaagtagaaagatcgttgtaaatggcatcataagcaatggcagaaagatgcgccttatgtgacaatcccaaatcggcagtccatacgggaatacgcgcaagcatttcagcgcttccccaagtctttgcctgtatgacgtccagaagaattttctttatccgatccgaatacttcttctcgcctgtcatcagataagtcaatgaaagatattccacatcgttcagcccaccattttgcaactttttgtcggcagtttctttaatctgtttccaacattcggctacttcaggctctctggctattctgttctttaccgactgaatacgctcaggcgtataaagcaatgaaggatgttttactttctgtgcatatatcgtagccatacacagcagcattaaaaaggataaaacaattcgtttcatggtttatattgtttatattactatttccggacttactaacatacgaatctgacaacctatttactcaagttccagtatataactataactatatttcttatcaagtaggcgatattcagtatgcggatacataccccaactgttatctcccccaagcccacgctgtttcatatctacatgcagaaaaacgttcttttgtggaataacatcaattgtgtgctgcattttgcgtgtcaatcccggatcaaggtcttccggtgtaaaatgcaaggcagaaaaagcgataggttgcaaaccggtaatctttatgcccgctccatcgctatccagcaaagtcagccaacgaacatccgtcttattacccgtttcctgcggacgtatatattcataatactgattttcgactttatcatcataacaacctataaacgaaccggaacagcggtcaatataattttcctgaggtcctctgccgtaataacttaaattatcgtatggctgattcagttctattcgcattccgaagcgcggcagttccgggagtctggttccgttcaggtcaatacttccggttactacaagcgaaccatcattacgtatcagatattccatagtatagggcacctgaatatcagtcaacacccactcaatctttaccggcagtcctttttcattcttgtttcctactgtaacttctttgacataacgattgacatgagcagtgcgccatacgcctgccagaagaggcattttatttccgaaatcattatctgtcggtgcacgccagaaagccggttcaggatattgtttgataggtttcttaccgttcttcatatagtcgaacaacattccttttttcaaatctattttaccggaaactgttcccgattcaaaagaaagcacgttatccactaccttatacgtcaaattgccggaacaatcgggaagagaggtaaacacattaccccgtttcaattctaattgttctttcgccacctcataatgcgccggaaccaaatctgtcgcttttttcgtataagcatagagattcagaaaatactcattttcatccacgggtattgccggaagatccaaacgtacttctgcctcctgatgaggcttcaaatctattttaaagtctccggtagcaatattcttgccattcttaattatctcccaagtaaagtcatactcattcagattcgtaaaatcataacgatttttaattgtaataatacctttaccaagctctttttcattgaattgaatatattgatatactttcttcacttcataagcctgcggcttaggaataccattggcggatataatcccatcagtacccgtgttcagctccccctttttatcttccagccatttataactgcccatccgaccattgtacatccagtacacccggccgtctctcggttctgtcttcatcttgaacccttgatccataaagtcccatataaatccaccctgtaaattcggactatcataaatcacgtcccagatatccttgaaatttccattgctattgccttgcgcatgcgcatattcacacatgatgtacggacgctgtttgccagaatcacgatagccggtaatccttcccatattaggatacatcggacatacaatatctgtattccagtcttcccatgcctgttcaaactgcacaaaacgtcccgggtcatattctttcaaacgccggtattcatcatgaaaaacttttccgttaccacactcatttcccagtgaccaacctatgacacaagcatgattcttatctctctccaccatgcgagaaatacggtcgacatgggccgcataccactcaggctggtaagcgggatgcgggatggtatctttaaaataaggaaccgaacccattccatggttttctatatttgcctcatctacaatataaataccatatttatcacagagtttatagaacaatggatgattgggataatggcatgtacgaaccgcatttatattcaattgcttgatgagtttgagatcattcatcatgatttcacgattttgcgtatgccccaaactgtcattatgttcatgccggttgactccctttatgtaaacaggcactccattcaccattaatttagcatctttaatctcgatcttccggaatcctgttttatgagcagtcacagccaatttcctattattctcatccagcaaagtgagtacacaatcataaagatcaggtttttccgcactccacttcgctacattctttacggaaccagagaatgacacagtcgtaagttcaccgtctacatcgaacatcttttgttgtgtcagcactctctttccggcagcatccagtaattctaatttaagcaaaccttttttgaaagtattgccgctaaattcgcgaagatcaacagttgcctgaaagagaccattcttatatgagccatccaaatctgctttcaaaaaaaagtcccaaatggtaaacttcggataggcatgtagaaatacatcccgttctatacctgtcagcctccagaaatcctggtcctccatataactcccgtcatgccaacgatagacctgaaccgcaagcaagttttccccttctttcagataacgggtcacattaaattccgcaggggtcttcgaggctttactcatccccactttttgtccgttgacatatatttgcgcataaccgctgatggaaccgaaatgaagcattatttctctgtcttcccagccggacgggacagtaaatgtcttacgataggttcctacaggattatctacatcgatatatgggggattcggagaaaagacatactgaatattacggataataggttcaccaaatccctgcaattcccaattggaaggtactgcaatatcagtccaactttcgtcctgcaatttctcatgataaaaatagttatcacttttctctatagttggcgaataggtgaatttccactttccattcaatgacttataccaaggagaaagtctctcctcttctttcattgcatcttccggacgctcataaataaaaaaatcggcatgcggcttttccttattccactcatactttaccggattttcccattcattctgctgggcagaaacagaagaaccattcacaacaaacaagattactgagaaaattactgcttttactttcatttttattatataggtttacttatggtttatcaaatcatacaggtgacttcacttatgcaacgcttttatacctgccacctttacattagccccttgagcagtagggcgtaaactgactgttacaatattcggtttatcagtattcagccagcactcgggaatatagtattcagattgcggtccctgctcccaacaacggccaatacaatgcccgtttacgtaaatgaagccattgccattctgctctaatttcaggaagcaagaagtaaccgtttggccctgcggcaaatcaaatgagtaccgataccatttaagcaaagactcaccaactatatcccctaagtctacattctctttcatggaagaagaatacctgactccacgttcgttctcaagatatgcataattaagtggaagttctttacctttacaacgtacataggtagggccaatatgccaaaacttctctactgcccaattagtgtggtgatgtaatcccttgttttcaaacaacaagacaacttctacttttcttctgctgagcgaatcacccggaatacgataatgggcactttcctgcgtttctgcaaatataggaagtagttttccgttcacagaaaccagtactgtatcagcaacactcccgttcaccaccttcttaccgatacgccctacttcaagagtgcatccctcaaaagcatttgttttataatagacaaaatgacggccgtaaataccgtggttatcaatcgcttcacctttcttcaagtgtgtccattttgttggcaatttatcagcccattcaccttgttttttaagttctatttttgcaaccttgattgccgggcgtatctgaggatcaggaagttttgggaaccattccccctgtgtggcgcctgccggcagataataaaccatagacccgaacggttccaaagcaaaatcaagttccaagtcatccgtacgaattgttccgaaatgttggcgtgaacgttcttcagtacgtacgaaatagtagcgatctccatttttagcacagcgtaatgctaacttcactaatgtatctgttgtaatataatccaaagatactagatcggcacgggcaatacgcgtaccgtgttcattgataaaagtagataacccctgaaatctacggtaacgctcgttgacagacccgtcttcgccaatagcagctgcgtaatcataggaagtgacttgctggcgggccgcccaatcatcaaaattcgtaccccctactgccatgtagaagttcagtgcactgaatccgcgctgtaaagtatagagagtaatattttgtgtctgcacaggaggcagtccatcctgcttccaactcaactgccagcctaattcacaacaccatccaccttgcaattctcctgatatcaatggttttccaggctgtgttttcatctgcaaatcgactaaacggcctaaattcttctctatctgccagcgaggataactattcaccatatctaccactccattcaatataccagtttccacattgcgtgattcatcagtccaacacgtaataataggtacttctattccatatttacgagcaataaaagccaacttgtccagataatctttttttgcttcttttgggaaccaacggacacggttgaattcattctctacctgaaacaagataactcctttgccgcctaccggtttatgaattaactgatgtggcgcaacgaccctgcacacagcacgataccaatgttcattccagcgcataaattccggatcattactttgcaaccaaacatcaaacgcaggtttagcaggctttttctgcataatccattgtggaaatcctcccccactccattcggcacaaatatagggtccgggacgaaggattacataaaacccaaactcctcagccattacaagaaaatcgttcagttcacgcagatcaatctgtgattcgtctgttacagaacggggcatagtgcgttcatgccaattccaaggaatatacgtttccacacaattgaaccctgctgcttttagcttacggaaacgatcggcccacaagggttggggcacacgaaaatagtggaaagtaccactaaatataaaagtgtctttcccatccaactgaaaacagcggtgatcgtaacgaacacgatccggatgaaggaatacagtatctacaatagaaggataagtaccaatattcaataaacttgaatccacatcggttcggtgcattacagacaaatcggttatattttgtccaaccacagttcccattaaaagcaaaagagataaaaatgttactatttttcgcatattcagatgtatttttcaaattctaatcagttaaaaggatattcgattcactctcatacaatttattccattgaatcctgttcaaaaagtatctacgccgtacctgtaccgtacttgctccgtatcggctccgtgtagaggtacctctgagcggagaatgtacggagcaagtacagtccggatacggttcaggtacgcgaaagacaagaacaaatatcagtgtttactctctccatatccgatagtcttcaccctgaattgtggcaaatgttgtcaagtaatatcctttatcttgtgattgaaggtattctgcaccttccactttcacgggaacggatgtacggagcacacacttattccctaaattcgaacgaatccgagccgatttcagtgttcccttctcccaaactatatctacctcaaaattgccacgagccttgagtccctttactttgcccgaaggccagacaacaggaagagctggcaacaaatgcagttcttttaaatgactctgcaaaagcatctcggcaaccccggctgtagcaccgaaattaccgtcaatttggaagggaggatgggcatcaaagaaattgggatatgtacctccatgattcgtatttaaagtaggatcgacatatctcatgatttcacgaatcatcttataagcatgattcccatccaacaagcgtgcagcaaaatttatcttccatcctttgctccatcccgtcccatcatcaccacgtaattcaaatgttttttgggcagcttttgctaattcaggcgtaagtaatggagatatatcacgccccggatgcaaaccaaataaatgagacaagtggcgatggtgaggatcgttttccacatagtctttactccattcctgcaattgtcctttagctccgatctgataagggaaaagcttattttttgcagtaaccaattgcttgcgaaacttacgatctatatttaaaacttccgaagcttctatcaaattggaaaataaatctctaataatagccatatccattgtagaagcctcggaaacagcatatttctttccatccaccacaaacaaattttcaggagataccgatggagaagttattaaataatctcctctttccaccaaccaatccaaacagaacaatgctgcctctttcataacaggataagcctcatctgccaaaaattgcttatcgccagtgaaacaataatgttcccatagatgctggcatagccagtttcctcccattgtccagtttgcccattcaggacttccatctcctttattccccacaggattactaagcccccaaatatcggaattatgatgtgctacccaaccttttgcatgataaaactccttggctgtagcacgacctgccttcgacaaatctttaatccagctaagcaaaggtgtgtgcatttccgataaattggtagtttcagcaagccaataattcatttctgtattaatgtttatggtgtaattagagctccaaggaggacggaaatctttattccaaattccctgcaagttggcagctgtcccaccaagacgcgaagaagaaatcagcaaatatctaccatactgaaaaagcaactcctccaactggggatcataattaccatacgaataaagcttcaaccggaagtcggaaggtagttgtgcattcaccttactacccaccgtatctgtaagctgcaaacttacacgctcaaaataagaggcaaagtcgcgtatatgcgagtcttttaattcatcgaatgacttgatcgatgcttttgccaaatattgccctgcaagcattttctcatctttgccttcgcaagccggacatttatcgaagccattgaaacttgttgcagccgtccatatgacaagaatctcgtccgctccattaatatggataccttttttatctgtcgtgactgttccccccacaggaatagccttcagcaaagaacgaaaacgcataccactgcatccattctcatctaccctcatcatagattcacgtcccttgcgattataataagccggatcgagacgggctggtgctgcgccatccatagccaagcaattatcccccaaagcttcaactgcatccgacaatctgcttttcgtagtaaaatccaacgcaagttttcccttttggcttgcggtaaaacgcaggaccataactctatcaggagcggaagtaaacatttcgcgaacatattgcaccccgccttcccaaaaactggtggttagtatggcttcattcaggtccaactcacgtttatatcctaaataccaagctttcctatcaccaaaagactgcttaatttcaagatctcccaaaggaagaaaactttgagagaaatagccttgcatttttttactcaaagttcccgctgcagcaaaatcatctctcgacaacgcttcgcgcatttctgataagtaggagtaagcgtcgggattgacactctttacacaaggtgctccggtccataatgtaccttcattcaactgtatcagttcattttctactttaccatagaccattgcgccaatatagccattccctaaaggcaaagcttctacccaagtgtttgcaggcttttcataccataacctcagatgatcttgtgcatgtagcacgctacaacacgtgattgtcaataatagtatttttatattcttcttcatatccaataataatattctcttatttttctttatccataataagcttattccactattataaatacgactgtactcatcggttttactatgacagaagattctttaacaatttcttttgcaggaaagctaaccacttttttagcggtgggaatattcaatacaaaatccttattctgtgtgcagttcatccctatcagatacttaccgtaccgcaatgagtaaaactctcccctaccggcatatacattttcccaacctggttcgtagcggatgccttccggaatcttagcaatgggcaattcctcacctgtatgtgccgatttcacttcggggtaaaaatgacgggcatccgaaaaaaacaggttagtacgttccggccgtttataagtatacccactcggtgtaaatttgatatcttcataaatagtagctatcctatctatttccggagtaatataatgcactcttgccaaatagtttatagcgtagtttgccctccaatacaaagaggcatataatatttcttcaccattcttcaaggctatcgccccaacttcttcatcggcaaacaatgcatccggcattcctgaagacatcggaagtttatcctctctgcgaggttgctttgcaatcaattcatattcacctggcaggcgcaatagggtataagtggaattgagcgaactgtccttcattttttcccggacaacatgaaaaaactggttatcatccagcatctgctgcgcataggccaccgcaataggatcgagcgtagaagctgctgtcatcaaaggatccccttctttatccaatcctttttcaccataaagaatcgttcccggatactttccatggtcgcgccaacctattacagcctcagctaccattgctttatttccatcttcatccacagaaggatagcggaaataactacgcgcttttaagactttcaacaactgagcacgaatcaaaggatcacggctatccgtttctccacacacacctgtagcctcgtagacacgtaacatccaatgtagtatttctccatatccgccaacaaaaccaagttctttactaagtcctttagctgaaagttgaaagtagttgtcgcccaatggctccgaaggtccttcagacgtctcacttcccaaccatggaacaattcccatggattcatataaatattttaaagtttgataggcaggcaatgctttttctggcgcaataacagacaggaaccgattgacacaatataaattcagatcgacaatcagactttgattggtatattgccggcgatgtgtcttggcatagtccagacattctacacacatctgcgtccaattatcacgacgcgtccgtccattttccatcttttcatcgagtacctcgcgtacttcggggacaaagctatttaaagccaagcacaaaggtcccactgtgagccaagaatcgttataaactgatttaggatcctgtgaatagcggacgtaataccggtctgtagtttctattgttttttcagcaaccttcctgtcgtgatatactatggtccaaggttcattataagcataagaaagtacccataattcttcctgatccagtcggtcttttgccataaatttcttgagttcacgattgacatgtacttttacctgctccattacttctattccaggagctatacgtacaacaggcgaaggcatgacaccctgcttttcacgccgtgcaggaataaagcatttttcggtatgggtatatcctttgtacaatgcctttgcaggttccgtcataactttctgatattgatcgaatgtatttccatagcgggcaatccttccagtagaacgtatacttaattcaatctcttttttgccttgagtcatctgcagaggcaaaggtaaagtagtataggtaaaacgtcccggaaaaggtgcttcatcattagctatatccagcatatcataatctcccaaatggcggtaaccaatttgcttaccctcgcaaaataggattaaaatattactgttacctgaatcggaaccccaaaagcgagctgtaaagtaattctgcttctctgaatcgactttcatcttaaaagtgatattcccaccttcaacacgttctccctccacaggaagaaacaatcgtgccgactcgtttagcccgcccttaattacttctgtagcatttgtagcaaaattatgcttcttttccgactgtatgttgccgaaaataatctcatcaagtagtcctacctgcgaatacgctgaaaaagagactacactcattaaacaaagtataagaaacctgcccatgttatttttttatctatcaattaaaaaaacagccctcctcttccagtacaaaaggagggcatttcaaaatacaattattctaatatcatctgttcacggataatctgctcaccattccctatgtcataactataatataaatagaaacattgctcgtccggattatacacattgcgatatccatacgaccccgaagtatcattcggattatcgcttggaacaagagtggttacctttagccccccttctgtactgtaaggggacatagtaacagtattatcttcattgaccgtaataatcatagcattcttatttatagtctctttggtatcactggtactataaacctgaccaccaacataaacacgaattttattataagacaatggttgcactacttttgttgaagtaaaaaaagcagaaccaatataacctatagaattataaaacgtatttttgcgctgtgatgcatattgattctttttataaatacgatacaatacatttcttttatcctcatttatttcgtaaggactcgcctctttaatacggaatggaataaagtagatggaatcgaccgacaaattctccaatacagatgttttcaaagttataggcaatttaccaacctgatctttaaattcagtccccatttttatagtgacagaagaagatgataatatataatctacctcatttaatccatgggcgtacttatcagtctcatccctatagttgttataattatactccgtcaataattcctcatctttctccaccacaatattcacatccctatctatagggttagtgccactgacagcaaatgccagtgttttcatggcttcatcactttttgtcatttcatactcagcttgaaacacctgactagcatcactaacaacatagatttctttcttataacgctcttccttaaagaattcatctccattggaacagctactcaatacaccaacaaaaggcagtatcaatagccatttattatattcattacatatatttttcataacatattgctttatataattgtattatcattagttttcccaacctggattttggtccaaatcctgcacacgtcgtacctcagcttttggtaaaggtaaaagaattagctttttatcaacaattctgttacgattattaacctgatttaccggaataggagtttggtagaatccatatttatcctctcccaaacgcattccatatataccagctttctcagtctgctcgtaaataccccaacgacgcacatcaaaatagcgacgattctcacatgcaaattcaatcatatattcacgtttgatcatctcatccagattggtctcatccaccatatcctcagcagataaaccgggaagtcctacgcgataacggatctgattgaaatactttgctatttcagaaggatcacgagatacattgtaagtctcaggagaaaggtttcctccattaatagccggcagttcaatagtatatgatgtctttaaatgattcaaagcttctgcatatcctaacaatatttccgcataacgaatgataggataatatttggcaaccaaattacttcctgttccttttaaagcatccatgggatgtacccacttggtaagaacatatccggttccaggatagtcgatcacattgttaacagaggagtattttcctgcataaagatctgatcccggcacagtgttcatttcatggtaccacacattataaggaccatattggctctgtgtatttgattttacaaaccaatgacgaccggaaaaacctacagtagcataaaaacgattttcacgattcaaatacatactatacacccctgcaggtattagataaccggaaaagctttcctttacctttgaaaaattatcatccgttacagcgcccttagcgatattataagggtattcttcgctagcattcttgatatctctgccatcaaccatataataagcatcaaccaacttttgtgttacacaaagtccattatatccccccataatatcatttggtggaaatacatctgccatatgtcctttcaaatctccaaaacttcggccccatataaattcagaattcttactaccaatcgtttctccattaaacatttcactataagaacggtaacagtctatccctccggcaccatcagggaaattagcatccggcacattggaaggaagagggcgggccggttgcattggatcaatgcttacagtatgcagtttatatttattcatatcaataaccctcttacaggccgcagcagctacagcccactttctttcatcataagtttggctgatatagtttactccatcaatagaacgtttccagtctccataagtagtacgtgctgcattccctccattatacaacgggctggcttgctgcaaacgcaaacgcgcaatcagcgcaaatgccgcaccacgggaaggtcgtccaaaataactggaagcaagatccctcggcaagtactttgccgctttctccagctcctcacaacaataatccacacattcatcataagtagaacgggctttattatatgcttcaggttgttcattattagggaatatctcatcacctatcagaatacagggaccgtaattttgtatcaggttataataagcgtatcctctcaacatatgagtataaccagtaacttcttcatcctgtacagccgtcattttagcttcatgctttctactaagaatataattacactttctaatcacctgatacatagaaggccatatattcattgtctttcctgatatattatcagcgttaatcttgccaagtacataatttataccatctttactagtataattggtaaaagcttcatccgtagctaaggggccaggattgaaaggagcacgaaagacattactttcgtcaggaagtaaatcggatactccccacatgtattgtaccaaatagtcatattttacaaatatgctatcaaacttcatcgtatcgtcaaaaagatcatccacttccaaaaaattacatgaagtaaatgcacccggaagtgccagacaagatgctaacagcaaattccgaagaactttaaatgattttcctattttcattgtttcaacattttaaaattagaaagtaatggttgcttgaaaacttacacgtcctggtataggatatttacgaccgttacttgcagcctgatccggatcgaataaatccacagtatcccaggtatataaattattagcaataacagccaaatctatgttattaatgccacatttacgaacaaacggcaaatccaacgtataatataaactgagttcttgtaaacgcagatacctgcggtttccttgccagaaagtagaagtttgtgaattattattatttttaccataactcaaacgcggaaaaagtgcattcgggttctctcttaaggcagcaggaatagtcggatcataatagtcagcaggaatccaacggttggcaggattagctgcaatcgttagtatatttccatatttttcttcatagaaaggaatgtagccaacattatctttaccatcagtataagcacgataataggttgtattaccaatgccattgaacaagacacccactctcaacttcttccagcggaactccccgccaaatccgtatgataaacgaggataattggaataacttaacggtacccggtcatcgctgttgatcataccatctccatttacatccttatatttaatatctccaggcatatagtccccaaatgtttgtttcggactattatcaatctcttcctgatcattgaaaagtcctaaagcgatatagcctttttgataattataaggtctgccggaagccgaatagtattcatacttattatctgcttcttcaaaatatttcactttattcgtagagtaagtgaaatttccacgaatagtgaaatccatatccttatttatacgttgggtaaatgatatattaccgtcggagccccaactttccatactacctacattaccgtaaggcatacttaccaaacctacaaaatcgggtacttgcttacgttcctggaaaatgccatcacgtatatcacggaaaaagtcaatagtaaaatcaatttttccccagaggttaccttcaatacccaagtccattttcttggccttttcccatttcaaattatcagcaccaatcacactttcaacaattttaccatgcagatatctccaggctgtagcaccagaattgcttacattaatgctggtcagataaggaaaacgtttacttgaaatacggtcattacctaccaaaccataagaagcacgtattttaaaataattaacccatggcaaattattcttcacccactgatagttactgggaacccatccgagagaaacagaagggaaaaaaccaaactgattgcccgactggaaattttcagaacctgtataaccgaagttaccatcaatcatatatatatcattgtagttatatcctaatttagcagacaaaccttgataacgaacaggaatagctaacatactattttctacatctttaccatcaactttctctacagactttgaggccgtcttctcatcactcatttcataatgcacaagagctgtaaaattatgaacatctgcaaactgacgattccaagtcatggtagcctgtaaataatatttgcgatataaatcttgagactttgagtattgaacagtttccgctacactctgtctggttcctgccagatttccattggcatcacgatgatcataataccataattcaggaacaactttacgcgtttcatcaaaccattccttagaagtataagcaccttgcacattcaattttaaccctttagttatcatatccaatttctgatcaacactcaatgtatatacagaattagtataatcctttgtttttaaacctgtatgattcagatttacataaggagaagccaaatcatctgtacccgatgctgaaggcaacattccattagagtatacaacaggaatagaaagaggagtcaacttactacatgcagaccaaagtttgtcagtatcttcactgccaggtaagttattgattgtcttattagcgtttacaccaaagtataaagtagtggttttggtcaagttcatatcaatattagcacgaattccaaaagtattatacgctacatctttgaaatatcgactatttttatcctgtttatatgctgaagactcattggaatagttcagactaataaagtaacgagccacactaccaccaccctgtgcactggcataataagtttgttgccatgaagaattattcagcaaaacatcctgccaatccacatccgggtataaatccggatcaagaccatactgaatgatttccaattctttttgagaatatttaggatcatctccacgtacagccaatgcttcgttggcaagtttagcatattcatagcctccacaatattccggtagacgtttcaaccatgacaaagttgcattggcacgcactttaaactgcaacttctcatttttacctcgtttagtagtaaccaacacaacaccattggcaccgcgtactccatacatagccgttgcagaagcatcttttaatactgaaaaactttccacatcggccggatccacgtcgttcagactaccttccaatccatcgatcaaaaccaatgccccggaactatatccgaatgtaccaataccacgcacccagaattcggatatgttctttcccggttctccacttgattgcatcgaaatgataccggcaacacgtcctcccaaagcattagccaagctggttgcgggtaactgcaaactggccacatccacagacgtgactgctcctgtagcagaaatcttacgggttttcgctccaaaagcttcgacaacaacttcctgcaacatttctgtatccggattcatctttatcaataagttcttatcggctttcaaagcaagatattcaactgtagaatatcctataaaggtgaactgcaatttatcacctcgatcggcttgcatagtgaaatgcccatccacattggtgatagtcccgactccgggcttatctttcacatacacattaaccccaatcaatggttcgccattttcatcttgcactataccagacaatacaaacgattgtgcctgtgccataaccgccatcagacagctaaaaaggaaaagacacattttgagtcttaattgattcttcatttttaaatttacagattaaaaaagattgattataaaaacattaatttcattataacgcgattgcctgcatctgctatatagatatctccattgggagataaacaaatacctatgggccaattcagtttcgactctttcggacttcccgttgaaaatcctttctgtttaccaataccggcaacagtagtcatcatgttagttgctaaattgaactgacgcacacagcagtttttagcgtcacagacatacattattttttccgatgtttctggatcccgagtcagtaaaatttgttcgggattattcatttttgcaatggaagaatgaccatcctggaaatcgccaacgctacctcccataccaccaacgccacagacaacagtttcaaagccgggatcggaaatgtctttcgacagatcaagacaggtcactatattcttttgcttaagtgaacagtatattttcgtattgtcctcagggtctccacatatgaaattatcaacagctcctgaagggcacacccctactacatcgtaaacacgatcctcaaatttgaaacggaacaaagttccatcataggcacgacaataaacccattcttcacccttagcatctttggcacgtacgaatgaataacaccacattaaatctccatttttataaggacgataccctttggcctgatattcagcgttaggcgccaccaattgccgcaataccaccgcatagctatcgtaaggatcaacttcccagaaatagcccttccgcatagccgtgaaataaactttctgggtcaccttgtcataccaaggagctgccggttctcctgcatttccatctccataagcaataaatttagtcataaattcgttctcattaatgtaaacaaggcttccccctgtaccggtaacacgatggtttaaataaatgactccttcaggatctgctgtcaaattaaacatatttttcccaaattctgtagtctgaaaactaccttctacaaatgttgcattagtggaaccgacctgtccacagacatactgtagctgatagtttttctgatatttgaatgactgtttacaaaatacggtatctgttgtattgccatcgagcagcatacctattttacattcatcgcccggaagtttgggtacatgtattaatgcacgatcccctgatgcccctacaacaattgcttctttctgattaaaaaaaactctcagacgtttaggatcactgcccaaattttctccccgcagaataacttcatcaaaatatcctccagaatcgggataaatttcatcaattaccacaggcaaactagggtcatactctttataccctttgtcaccatcgttacacgagctaataaaaattagccccacgaccaaagctaaccctgacaggtagcatctcttaaaattcactttacggtttttcataacaataaattaataaatactttataattaaatagattgtttgatatatgtacggatctctttacgactaataagcaaatgattttcaactgtacgcggtgagatgtggagttcagtagaaatttcaaaggcggttttatattgaaagcgattcattgcatacacttttcttcgttgagaaggaagtctactcaatttctcctgttcgagccaggataattcttttgcataaagtttgttttcaacatcgtctacacttgtcctgactgtttccaacaaatatgcatttatttcttgttctttatagtaacgtcgcaaatagtctgtcaccaaattacgggcaattgtgtaaacgaaatattttattgtatcgatattgagataaaacatatcacgataagacaacagacgcaaaaaggtatcttgtgtcaaatcttcagctctttctctattattaattttattatagatgtaacggaatattaaatcgtaacaccctgtataagcatcagctattacctgatttgaaaggaccgcagcgtttttcatatggaagcattttaatgattatgactgcaaatataaaggagtaaaaagaaaaatattcttcctgtaagccacaatacatcccttccgttttagaagtacaaaacaattgattaatcaactatcaatcaacaagataagaaacaaaaagcatgagtctcaaataattataaaagacttttcagaggataaaacattgtttttacccccattgacataccctaaaaggacacacattgttataagaagatgattatttatactcatcttcttataacaatgcataaccgcaaatctacagttaattttgtttctcaaaagttttgatatactcgctcggataaataccgtttatttttttaaaataacgaaaaaaagaagtacgggaattaaaaccacacatttcaattaatgcattcagggtatacttggtgtgtgctcctttttctatcagaagcttaaattcggcaagtctacaagaatttacgaaatcataatatccactatgtaggtattgattaaataagtaagataaagtatagatggaagccccagtagcagtagctaaatcatttaacttcaggtcaggattaagatataatttttgagtatccatacatttcctgactttacacaacagttcttcacattcctctaccgttacactggtagtccgatatttcttttctccatcgatctcactctcctcattgacaggctgagatttaacacaccattttgtgatgctctgaatctgctcggttcttcttaaatagaaatagactccggctaacatcaatatgccaatcaaactaaaaagcccaatataatagattaatggtagagatatatagagattcaaagttgtttctgattgtggtgctcccatacgtcttactttcaatttgtaactccccggaaacagttcataaaaagttagagttgaattaccggtaagaatttgccattcatcatctttctctctcaaccgatattcataaaacatgtgtgaaggatcagtataagtcagtccggaaaaattaactgtaacattcctcctccacatttctaatcgacattcataataaccggccccttcgttcaatactagattctgcgcttctccatctaccatgatttcggatatagcaacagaataacgagtcttttcttctacgctctgccaattggctcctaactttagcaaaccatttgagttaccaaaccacatattttcaccatgatcggtcacaggagtgcaacttaaaaagattgaactgggaacaccgtcagcaaaactatatggaataaatgtatttttcttatcataatgatataaaccatcatttgttcctaaccaaagccagttctgtttatcttcaataacaaaagttatttcttttccttcaagcaagctattaggggcaagatatgcataatgattcatagataaatcagatataaataatctctctttatcaggaatgaaatacagtttatgttccgaatcctcataaacatactttatcttttctttatgtataaatccagatggaaaaacatctgcataaaccctcttcttgtatggatcccaaatcgccagaccattttctgtgcaaatccaccctttacctgttgagtcaaacatgatatcatatacattattccccggtaatggtgaattttccatcgtacaatgatatataaccttatcatcctgataacaatatactcctgaggaggtaccaatccacaacttattgtcgacatctgctttaacacaaaagatatgcccgttcaaaaagggtgtcttctcctgtggacgaaaatcctgcacactcatatccgaaggattgaatatatacagcccacctccatacgtacctatataatatttttccataaatgtagcgcaacacaatataatattactacgcaacagaggagtcttcaatgtcttaacatttccattcctttcatttatatagaataaaccattgcgcgagcctatcattttttcatgttcaccaatattcaaagtacgcacagctatatttttcgaatcgaaatacggaggaaaactatataccgaaaaagcacagtttttataataagtgaaattaagcccaaactgatataatcctacccacagtattccgtcacgatcgagcaacagagaataaacagaattcgaacgtaagctttccacttcattaggattattactaaaattctgaataatcttctgttgccgggtagaaacgaaaaagactcctccaccatcagttcctacatataataaatctttcccatctgtggagatctgatttatcacattgcaaccaatatccataaaacggctgaattgctttgtaaccgtattaaaacagatgataccttgttccatggtacctatataaagtagatctcctatacgtttaactgtacgataagaacaagataaatgtttaccgaaaagtggattaataaatagagtcgtctttctttcattattcagttccaccagatataaatcttttctggttaatatccaaagattatttttttcatctagacacatggcaaaaatagagttatctgctgtcaacggattattatctaaaattatccgttcccattctccggaatattttcgaatccataatcctgtttcacttcccagatataagttaccctgatgatctgaaattatttcacgcactccaccttttattgtatcctgacctatagggttcaacctctctgacttaacttcccataaccccatatcatttcctactaatattcgatgcccttctatttcagcaataacatttacccatttctttttttcactatttccatgaatcggataatgtttgaaacgaacaccatcgaaacgttctacagaagtagctgtacctacccataggaaaccattggagtctttataaagtgcactaacctttaaatcggatagcccatcagcccttgataaactacgaaaagcatatgtatttgccaaagccgaagaacagtataaaagattcaatagtataataatgatccatctaatgtcttgcatatagtataagattaaaaacgaaacaaagtaaaagaaaaaaaacgataaaaagaatcaattttgaaaaaacgaaacccaatatctggtcaatttctctgagtttcttattttcatcactatttttggtgtctcaagactaaaaccagaaatgaccaatatgcaatggggcaataatcatattataaaagagtaatagacatattattaaatgacgatgctttgttctcctcaaaagctatagatttctttactgaatatccttatcatgtaaacctcatatacccaagtaaatcataataaaaaggactatcttcgttcgtgaagatagtcctctaagtatcagttatctgttatacctattgccatcctggattatttcccaactcctgaccattagacaaagaattcagccaagttaaaggtatcggacgacgaatatacttacttaaaaaactctcttcagttaattgagtaggtataccgccggctatattcctggtatcccaattatatttcaaaactctttccgccaacttacgggttcgttgaagatcattccaacgaggtacttccgcaaaaagctccattgcacgctcatccaagacatcatctaaagttacagtacctgtatataaggataatcctgtttccgaagcattcttcgcagccctttctctaaccttatttatatagtacaaagcattagtattatcattatttttaacagctgcctccgcagcaattaagcaggtctcggcaaggcggaacatataaatgtcacgggttccggaagcattgccattttcattgtacactgtattagcatccttaaatttccaaactggcaaaaaagcacgggtattggaatttgtagactgataacctaacttgaaataatcgtcagaagacatatcagcaggatctcccgttggaaaattataaaccttatatttcacagcatctttatctgcctgagaccaatgtttaaatttactatccgtaggcacaggaaaatagatgacggtatctcctttctcaaacactccttcaatggcacctgtacactgaaaccagttcttacctgtatccctgccatcagtagaggttttcggatccccattcagcggactcataaacgttacagaagctcttcgatccttgaaccaatcatacatcatataggcaaacttagtaggaatggcagcagcatcgtcattactataataagaatcttttgaaagtcctgcccatccttctctataagggaacaagaaccatttaggccagttattcacattatggttggcacctgtagaaaatcccacactaaatatgatttcatcattagtttcattggattggcaatgtaccatttgaaaatcttccaatagcttatgaccggaattattaatcacatctaccgcatccttatatgcattttcaaaatcccgggagtctgcataactctcataacctctggtcaaatatactaacgcacgcaaatgcttggcagcagaagcagacatacgtccataatcactaccagtctgtcgggcaggcaatatacgtattgcatcttccaaatcactcaagatttgcgtataaaactgcgcaccatcggaaagctcagctgtcttgaccggagctaatggttcatgaatcatcagaggcgcctgtccccaattacgcacaatctcaaacaagaagagtgcacgtagcgctttagcctcagctactcgttgttccagcacatcatctgccaggccatcgggatcatcactcaacagaattactttatcagaacgatcgattgccgcattcgcatctttcagcgccgcatacagattattccacattgtataaacactaccttcgttagcatcatagttaaccgggtattgatttaaattagacaaccctatcgtattattctgtgtacatatatctgtaccaagacatccgagagatatgtattctttagagttgtagatcgtccttaaccgggaataacacccattaattaacccctcataacctgtttttgtctgaaaatactcatcagcagactggctggaataattcgtttcatcaagaaaaccagaacaggatacaaacccgcttatgaatgtcagggtcaataacccttttattagatatctttttactttcatagtactttattttttagaatgaaacatttaatccgaataatacattacaagttatcatatctgaattagatacttgctcgctgggttgttccggatcaaacccggagaaacctgtaaaggtaaacggattctgcactgtagcgtaaagcctcagattactcatttttatacgattcaagagatttttcttaaacgtatatcctaaagtaatataggataccttcaagaaatcggttttctgaacaatgtgtgatacacttttgcctgttgtattctgatctctgtaaggtcccatattcgacggctgtgcgcatgaattggtaggattctctggggtccaataatcttttttcatattacccagattagcattattattttccaatgcataagatacgtagaattgatttctcagtcttgctccagtctggaaatgcatatggaaagacaaatcaaactcctggtagcggaatgtattggtcatacctcctgtccagttaggaatacgagaaccattgataaaacgatctttatcattaattactccatcattattataatcactgaccttaaattgtccgggcttctgaccatacttcttagccgcctcttcttcacccaactgccatacaccaatagtttcaagatcccagtttaattgcactggttgtccaataaaccaacggttattataatctccctgcatccctttcaaacgatcggaataaacacccaaatcttctttgaaagccaagtctacgatttcattcttattataagataaagtaaaagttgtttgccaggagaaatctttcaagcggatattctcagtattcaacattatttcgaaaccttgatttctgactgagcctacattatcgcgtacactggaatatcccaaatgagttggtatactcttgttcataatcaaatctttcgtcaaacgattataatattccacagatcctgatatacgattatcaaagaagccgaaatctactccgacattgtattcagaggttcgctcccaacccaacttatcattacgaatattattaggataagtaccaataaccgtattggttccaaatgaataatactgtgaacctgcaatggttccattcgtggaataagggcttaccgtatcattaccggtctgaccataactcaaacgcagtttcagattagaaagccaatcaacactttgcatgaacgcttcttctttcaggcgccatgctactgccaccgacgggaataatgaccatttattgccatcagccaactttgaagaaccatcgtaacgtaaacttgccgtcaacatgtatttgtctgccaaagtataattaatacgccccaggaatgacataagattggattgtacataactggaagtcatggaagtcatctcacctccttgcaagttataccacaaagagttgaaagggagatctttggatgctcctcgcatcttctcatcctgattttgttgtaaagagtatacaccggtaaaatctatcttatgtattttatgttcccaactgtaacgaacaatattatcccatacccaatttgtatagttattcttatctaacaaattagtagcacctttggcagtcccctgcaatgctttagtccagacaccacgatattggcctatttggtcattcgtcatattagaggcaaaggaagatgtcagttccaatcctttaacaggagtcaacttcacatatacatttgaaagaatattcagcttctttgttttattaaattcattctgattagttatcaatggattgaacataccgttacttgtatatttccagatttcttcacccgttacaaggctataaggatgttgagtaggacgcatacgtaaagcatcgaccatcaatgaagaattaccagtatccctaacagaatgggtcatatatagacttcctccaaatgataaataatcattagcctttaaatcaacagcagcacgcatattatatcttgaaaattcctggggaaattgcataccatcttcaaagtaatagccaccacccaatgtatacttagccttttcagttccacctgtagcagaaatagtatggctcgtcataaatgccggtgatgtaatagcatctacccaatcataataatttctatccttagcggctttcaattcagacggatctgtgaaaatttcctcaagggttttatagttattattattaagtgctctggcattttccatagccaattgaacatattcatcccccgacatcatttcgggaacatgagtataattcctaaaacctgcatagccactatagctgattttagggtcaccaagagagcctttctttgtagtaaccatcacgacaccattcgtagcacgcgaaccatagattgctgtagatgaagcatccttcagaatgtcaatcttctcgatgtcatccggatttatgttatccaagcttgctccgggaataccatcaataaccactaacggagcacttgaaccagaaatggaacttacgcctctgatcttaatgtcatagccaccaccaggcttattgttgctcttcaaaatactgacacctgcaacagatccttgtaaagctcctatagcattcgcattacctccacgaaccaatgtctcagtactcacagaagaaatggcacctgtcaaatctgatttcttcatcgtaccatatcctactaccacaacttcatccagcaattcagagtcctctttcaaggttattctcaacgtacgattggagccaattgtaatttcctgagtctgataaccgacatacgaaacctgcaacttccggttgggagaaacatttaatgtaaagttaccgtcaacatctgtaatgatgccattggtggtacctttttccattactgtagcaccaataaccggttctccttgaacatccactacctttccggtaattttaaccgaattctgcaatacctcctgagttataggagatacagccataccatccacttgttctgcagccatttcacttaatggcaaacaggacaatgctaaaagcataaagaatttgtctttcttattcatagcatgcattttaagtttaacataaaaaatcacatttaattatttagtcaatatatcttcaatgaacatagattaaacgggaataaactttcattcactcaaacaaaagataattttcgctattttttttaggaacatagataagaatccacatattctcgtaacacgttgcgggcgatatatatttgattctctactgttcgtatcgataatcctaacttttcgctgatttccggattagagtactcattcttatacttcattacaaatatctgtttacatttaggagataacccttttatacgattttctactattacaaaaaattcttttgtcaaaagagtattgtgcccatctctattcaatgcagatataaagtcatttccagagacttcttcataatgctgttctatttgcttatgacgtatcaaatcaatacagcggttataaagcgctttgtagatgtatttcaatactgcaccttccgatacaaaataattagtctgctgtagcaaattgataaatacatcttgtacaacatcttcagcatacaattcctctcccatcgttttttcagcatagtgcacgaaaaaagtgtgatactttttataaattatctcgaaagagtaatttccaaccggacaatatccggcaatcatcaattgtgtattcataatagataagattaaggaagtatttataaattagccagtatagaacgtttctcttgtaatctcttaaaacgaattaatgcttcaagataataatagtccgcataaataatggatgcatcaacttctccaccacgaggcatatgacctaccgaatgtaacaaaaaagcatattttgtatctcctgccttataagcagaagatgataacatttcaagcatcttttctgcctggtcataataataatgtgaagagtcacgctcggttacataagtagaaagttccagtaaagcagaagctgtaatagccgctgcggaagcatctttaggttctccagaagacaagtcgggagcatcaaaatcccaataaggaattaaatcctccggtaaacgggataaataagcatctgctacttttcgggcaaagttcagaaaacgcacttctcccgtttcacgatataccatagtataaccataaatagcccatgcttgtccacgtgcccacatggagttatcgctcagcccttgatgagtcacaccttttataaaatgtccggtaatcgtgtcatatacggcaacatgatagcatgaataatctttgcgaaactgatatttcattgtggtatcggcatgctcacacgccatatcatatagacggcgttctcccccgtttcgggcagcccaaaatagcagttcaagattcatcatattatcaataatagtattatgaggccaattttccttttttaccatacccggccatgaaagaaaagtaccaacttcaggattaaacagaattgaaagagaatcagctgcacgtaataatccttctttatattccgtattacccgtcaaacgatatccattgcccaaactacacatcgtaatgaatcccatatcatggctccttgcttttctgtgagttacaggaagaatcttttgagtatagttttcagctgcaactttccacatattatcctttgtattctcatataaataccaaagaataccaggccagaaacctgaagtccatgaaccgggactggtgaaatgccaattaacatcatctccatcgatcgagttaggaatacctccttctgagccagaaggaacaatggccaatgtacgtaaagcctgggcctcacaataatcaatattggtatttactgaaaattcccggtcgaattgcttacaagcaattcccactacaaataaagaagcaagcaaaagaatggttttgtgtttcatgatatagcactttttaaatgaacaaattgatttcaacgacaacaaaattagtaagttggaattcttttcagacattctgagaagtgtaataggtaccaacctaaaggctgaaacgagtttctcaataaacagctatatttcaatattttaattatataaaaagaaagagtaccaaattattttggtactcttttcaggaagttatatttctaaaatgatatctttctccttaatatactctgcaggtgatttacccttcaatttcttaaatgaacggaaaaaagatgtccgggagctaaatccacactgctcagaaagaaacgccaaagtatatttggaagctgatttatcctgcacgcggataataaattcttccacacgatattggttgatataatcggtaaagtttatattcaaatataaatttagaacctgtgacaaatctcccgcattacagccaatagtattcgctacatcctgtaacttcaaatccggattcagatacatcttatccttattcatacattctgttaacctttgttttatccgtgatacctcttcttcatccaccctggatttctgatacttctccttctgtactccttcgacttgtactgtattctcacgcatatcctctttcattttcctatatttacccagcaaagcataatagctatagagaagtaccaaacatgttaaaaaacaaagtaccaccatccataaggtgaaagaaagtccccgtacaacttccaccttaaccgccataactgcacccggattagacgccgcccgtactttaaaaacatagttgccaactggaagattcatataggctacttgattgcctttcatcaaagtcaaccattccttatcatacccttccaaaaaatattcatagatatccgtatttacaacagcataattcaaggcagaaaacgtaaatgcaatattattcttatctgcaggcaaagagatcttctccataaatgaagaagaaaaaggcaacaattcatctcccgtctgaaggattctaccagcaacagctactgatgtaatggcaggaggtaatggaattacctttctttcatgtttaagctgagaagtatattttactaatcccctttcattgccccaccaaatagagccatcatctgtaatctgtacagggttattaaatatgtatccgggaatgccatcataaagagagaaaatcttgtgatgattatctttgatatacagtaaaccacgttgtgtactaaaccacagtcctccatcatgcggatcttcaataatactcatgaccgaattattgggaaggaaatcatcaactgtcagatgctcaaatttagtaaaatgctcatcaactttaacaactccctctttatcgtcacaaaaccatagatttttatgattatcctcataaatataccgtatgctttttgtaaacggttctatatgttcaggaaatacatccgacttgaaagtaccggttgacatatcatacaaaaaaacagctccattcgttcctatccagattctatcctttgaatctgcttttaaagtaaatattgaatttatggcaagagacgaatttctattattgtaatttacatactgtccggtcaattcattatagacatacaccccataagaactccctatccagtatttgccctctttatctctttcacatccggtaaatgaattttgcctgaagcaatcatccggtttaaagaaagacagtttacccgtctctgcatgcagcaaatacatgccaccaccataagttcctatcaaataatcttctcccaaaggtttaaccgacaaaataatatccgaacgtaatatcgaagattttatagtgtaatgtttcactatattctcttcttcggaaatataataaagtccgtcacgggtacctattacttttcgcccttgtttaccaatccagaacgcacgcacattcagattatgggaatcaaatttatccttaaaagaatagatggaaaaggtattcccacgcgtaggcgtataactcattccacccatgtaagtaccgatataaaggatatttttatctttcagtaatgaataaacagcattcgaacaaatggcatcttcctgtatagaatgttctattgacgttatttcttgtccggaagatgcttttataattttgacaccacttccattggttcctacatacaatgtatcattacctacaggtaccaaatccttaatacatccattacctatttgcggatatatggagaaaacttcctgcccaatatcaaacttcagcatgccttggtttgccgtacctaaataaatagtatttcccatcaaagccagacaactatagtaatttaatcctcctctaatattattctcaaacactcgtgatcttccagtttccatattataatggatcaatcctccatttgaagcgatccaaacactatcatcctctccatctacaatatccattaggccattcacagcagacaaggcattggagtccagcagaatctttctgaatacaccactttcatacagaaataatccacgtgaactaccaagtagtaatctccccttcttactcacaaaaaccacttttacagacaaagatttgccatctaaaacaatcggttcaaccgtctctgtcttacgattaaactttatcaatcctatatctgtacccacccataaatttacagaatcagtctctgctatcgaaaaaacagttctcccggaaaattgaggataagtcgtcacatttaccccatcaaaacgatccaatcccatctgtgttcctaaccatacgaaaccacgggtatccttatatatagcatttatcgtattatgggataaaccttcagatacagttacagaacgaaaaacaggagactgttggattgaatacagagataatggcaacaacaacattatcaccataaataaataacgaatgacaaatggagcaactctccctatataataatatgtgtccttcatacattcataaaaatcgatcattttctccttattattactaagaagtccgacaaacttaatgatttttttgatagaatgtatagttttgctcactaaaacttagtttaatctcatgatgcattatacgcagaattgtttttcataattaaactaaaaagtgcgatgtcgctttaggtaaatcggcacgtaaatacgctatatacatattgacttctatctaatatgtattaaccttattattttaagaatatgatgaaaaagaaatttattccgttatttattcttctcttttatatgctgaatataaacagccaagagtttactcatccgggcttactccattctgaatcttcattaaaaagaatccgggaacttgtcagaaatgagatacaaccggcttacggttcatttaacatcatgcgaggaatgcctgagggaaaagctgattattgcataaaaggacctttcgaaactatcagccgtgccggcagatatggttataccaaagatccttgtgaacgagattttaatgcagcttactacaatgccattctttggatagtcacaggaaaagaacctcatgcagacaaagcaatggagattatcagagcgtatgcaagtaccctaaagaaaatagaaggtccggacgatccgctttgtgccggccttcaaggatttatgctggtaaacgcagcagaaatcatgagatatacatatacagcagataaatatactaacggatgggatgcaaaagatacacccaaagtagaaagtatgttccgagatgtattccagccgatacttactactttctacaataccaaaccttacaccaacggtaactggggaattgcggtaactaaggcacaaatggcattcggagtatttctgaacgataagaagttgtatgaagacgctatagagttttttctgaaaggccatgataatggaactcttcccaactacgtagctgaatccggccagatacaggaaagtggacgtgaccagcaacatgccatgttagggttaggatgcctctcggaaattgccgaaatagcctggacacaaggcagagacctgtatagcgctttggataatcgccttatgaaaggttatgaatacttggccaaatccaatctgggctatgaagtacctttctttacctggaaagatataaccggaaaatattcaaactggactacgttaggggaagaaggaatgggacgtttccgctcattatttgaaatagcctacaaccactatgttgaacgcaaagggttagaaatgccatatacccaaattgtattaggcatgatacgtcctgaaggaccgggatttacttgtgataacccgggcttcggcagcctgctgttctatttgggaaaagacttaaatgaaaggaaagtccccggacaaataaatgaggatctttcccaactggaaggatggactttcaccaattgctcttataaacaggtggataatctaatgtcatttgtatcatccggagtaaatatgcaaaagaaaaggatttcctaccaggcaggaaactatccgtatattgctgtaaaggcacccaaaattccaacatccgcaaataaagactggttacaattaagctatagcgttgccagtgctccggaattttggaagttagattcggataaggctaaaaagataggaaaagatatctatgtattcaagattacagactatctgtcaaataatggaacgcacttcacagaaaggccaacaaacattactcttattctcaattttgggaatatcggtaatgaaccggtaattgtagaatggattcgctcatttgaaaagctggaagatatttgagtaatataaagtaatccgcggacaagactagttcatt

SEQ ID NO: 6451 - DNA, 751 bp, Unknown
  gut microbiota DNA sequence
attccaatcagtgacgaagccctgcaattaatcggctattctccggaaaaaaccggattagtatttaaaggattgaaacgaagttggacacagcaacccatgaaagagtggattcgcgaagccggtattaccaagaatatcactttccactcctaccgaagaacatacgcaacacttcaaggagcagccggcacagacatacgtaccattcaaagtaacatggcacataaaagtattaccacgacacaacggtacatgaaagttgtggacagcaacaagcgtgaagccagcaacagaatctctttaatccgcaagtaagaattaaggttcaaataatcccgtttttattgctcagaatatgatattttgcatcaaatcatactctgagcatattttttcttaaattctgaacaattatccatcgcaaactgcaactatttggagatctgcatatacatttgttttattgtaaaattcaaacaatatcagtttatgacgaatagtattaaaatcactcctcaaagaaccagtttcatactttcagcaagtgtcattctttactgggcaacagactcctatttatatctcaattgccatatcaacctgatggaatattccactccagttattctatacattacggcaatgatactcgcctgtggagtacttaagcatttcttcttccgattcattacaaagaatgaattgagtttgtcttttggcaagcaagtaaaacctcttcctgttgaac

SEQ ID NO: 6452 - DNA, 1913 bp, Unknown
  gut microbiota DNA sequence
aaacttttttgaaacaatttcgtaaatggctgattgataaggatgttgcagaacataagtttgaaagggagaatgaaaggagctggaagggggtacattattatatatgcgtgcgcgtgtagggaggtagattaactcacctaccacctcccccctacggggtactcctactcccaggaggaggagaaagggccaccgattcgcattattaaaggtattataggtaagctggattcgaaggaggaggttcttgcagaattgtagcagcatcaaagcagggacattctttgatccattcttcaggttcgatctcaccgttatggttcagatccggactcagatcacggtgtcccactaccctactgcctggatattctttcagcaaaagcattaccaggacacgcagggaatgtttctgaaaggcagttcgagtatcacaggaatgaccatttgcgtccaacccgccttcataacaaacaccaatcgagtgagcattttagccacgggtatgcgcaccggatttatcaacgggacggaggttcttgatgcttccatccttacgtatataatagtgatagcctgcaccggagcccccccggcgcaggtgatctgtgatcaagtcatattccgtatagcaacggtcagcgcgggtggcgctgcaatgaaggacgattagatcaatctttctcataagatattaaataaaggtcacgttaaatacacttcatcgccgtcatggcatgagcgctcaaggcacccaggacggcagaggcaatagcgatggcaatcttcaatacagtatccaaagataattttttcatgattattatagtttaggttagttattaatgcgaatcagctatcccagaggattttcattcaggccaccgtcaccaccggagttgccgccgtaattacctccatccgataatccgccttccttatcttccaatttctctaaggcaaaggttacatttgccggacttcgcgtagcagcatggctattgtttaccagtttcagctccttatccggtacaaaacggatattcacccgcttgatattcttcaccgtacactctgccgaagtagctactcccggacaacagaatgtcatgtaaaacgtactaaactgattcagtttcaccttgtttccgttagccagattttcctgaacctcctctacaagcgcttcaatcacatgtttcacatctcccttcgtcatcgcacagcttttctgtatgtcggttaaactgttttgcttcataattaatagtattaaaagaaaaaagcaccacacgaacaacgtcgtgtagtgctatgtttaaaatgacagactctatctgtctatgatcttaatctttttatattagaatgtcatttcacaatccatcgttctatatttctggtacgattactgaaatttacaccgatcttaaacaattgacggaaatcagactcaaaaggaagagcgtaatgcttttcttcaatctgccgcaaagcctcctcagcagtaccttcaagcttgaattccattacataaacgtacttttcagtctttaaaatcagatcaatacgcccttcggatgtgtgatactcagcttccgtatagaaacctaccaacttgaaaatgataaacaggacgttttgataatagagctccaaatcactaatcagttcataaggagtatcggcaaagaaactttgcaagcgacggaagaaagcatcaggctgcccattctctatctcacgaacaaatttctgtatctcaaacggagcttccgctttgtttacccgggtataaaatggcattaaaaatctaataaatccttcttcaacttctctgttcgggaagcctaaactatagatgccaaagcgagaattatatcctttgatagtcaaatatccactctgat

SEQ ID NO: 6453 - DNA, 2565 bp, Unknown
  gut microbiota DNA sequence
atgctgggaaatcttttggatgaatacatcgagggtaatttctacgttggaaacaatgaaaagattccacccgaaaaactcgaattggccccgtttatagaacgcatagcggaaaccaaactcttcctaaataatgacggaatccctatgtcaaagagtactttaaccaaaatggcagaaaaaatgtggcaaaaggataaaagagtacgacacaatgaaaagcataaggagaaatcaccctacagaaaagacagaaattaaaaagatactgtcaaaacagcaagacttacctttgccctcacgttaacaagaccaagtcagacctcaatgagatgccgcttcctcttatgcgaagcgacatctttttttatgttatggcatgagctcgaaaacgtaaccaacattattattaattaaatatatcgtaagatgaaaagacacgagttcaaaaatccggttccagttcgtgaaagaatagcggaaaaatggaaaaaacggttcatgttcgaaaaggggtattccgaagaatgtgcagaatacatggcacaaagattgattgacctcattgaccacatgcagtatggctatgcccttattgcctttcacaaacaaggcacaatcttcaaaatggtgaaagcaaccctcatgccctatgaaagtttctttcaccgattctatgaaatggagcgcatagaaagtactgtagtttactgggatgtagagtcacaggcttggagaagtttccagttggagaatttattagactggagccccgtctgctaatcattaatcacttatcgtttaatcactaaagaaatggcaatgaattgtacaggggtactgtatttccctatagctataagtctgctcgaaggagtagcaacagaattgatagaagcccggttcgggctgaaaggtgtagcggcattcataaagctactcggaaaaatttataaagaagaggggtattacctggtgtggaacaaagagcaatgcatgctctttgcccacaaattaggaaacgaattatcggatgaggaaatgcaggaaatcgtagaacttctgatagcgaaagacatatttgaccggaaaatgtatgaggaacaccaggtattgacatccgtacacatacagaaagtatggctggaagctaccaaacgcagaaaacgggacttaactcccctcccttacttccttatggaaaccaaagttcctaaaaacgggaaagaagaaaatgagatacaggatgtattgtttccaccagaaaatgcatgcaattccgaacaaagtaaagaaaagcaaagtaaagaaaaggaaaacactccccctctaactccccaaggggagaacggaggagaaggaacggagggctcttctttcgacatcccgggatatgcctacaacaagaagacacacaatctggaaggtttgatgttggagctgcaacaacttcatatcgtagaccgaaatgaaatcaatgccattctacggctatccgactatggaagactaggagggtatgtgtttaaaataatcagtagtacacgatggagtactgtactggcaaaaggaaaatacgtcatcgccgcactaagaaaagagaaaaccggaaacggctgataatcaaggttaatatcagcatttgccaaggctacaccctttgcctcctatagctacaccctttatgacaaagggctacaccatacgggcgaaagagtgtagccatcctaaagtacccgtcaaagcttacaaaatatacatcaatgtatatttttgaaataatcatatacaggtagtacacgaaccgttttatccccaataataaacttgtcatactgattaaatgacagcaataatccctcaggcagattaaaaaagttcaagtgcaaatataggtattccattctaaatggatactcctttccattctgaatggacaaaaaaatagcggctgacccacaaaaggagtcaaccgcgaatattaatataaaaacgctttcttgattagagagcacctacttctttcaatgcagcgttagttccgtgaacagccttagcgctagcagcgaatttttctttttcatcagcagtcagttccagttcaacgatcttttcgataccgttcttgcccaagataacgggaacaccgatacaaagatcagattcgccatattcgccttccagcaatacagagcaaggaatcatcttcttctggttgtgaatgatagactcaactacataagctcctgctgcacccggtgcataccatgcagaagtacccagtaacttagtcagagtggcaccacctaccatagtagaagctacaacttcgttcagtttttcttcgctcaacagtgtgctaaccggttgtcctttgtatgtagccaaacgagccaacggaatcatagtagtatcaccatgaccgccgattaccataccttctacttcgtttgcattgcaacccaaagcttgagacaggaaatatttaaaacgagagctgtccaaagcaccacccataccgataacacggttcttaggcagacccaaagatttcaatgccagata

SEQ ID NO: 6454 - DNA, 7619 bp, Unknown
  gut microbiota DNA sequence
tgtttattgaattattaatttattattttatttagatttatgaatttgtatgtaggtaaccttaattacaaggttagagaatcagatttgagagaagttatggaagagtacggaacagtagactcagtaagaatcatcactgaccgtgaaacaagaagatctaaaggattcgcattcatcgaaatgccggattctgcagaagcatctaacgctatcaatgcattgaacggtgctgaatacggaggccgtccgatggtagttaaagaagcattaccgaagaattaatcattctcagataatacgttattaaaaagagggatggatttctaatgaaattcatcctttttttatagttgatttactgaaaataataagcaaactctttgtcaatcaaaataaaaagtcctacctttgcagccgctattacgagatagtagcataattcaaatcatttatttaaaacattatttaaaatggcaacaaaaatcagattgcaaagacatggacgtaagagctatgctttttactctatcgttattgcagatgtaagagcaccacgtgatggtaaatttattgagaagattggtacgtacaatccgaacaccaatcctgccacagtagatttgaagttcgaccgcgcacttgactgggttatgaaaggtgcacaaccgactgacactgttcggaacatcttgtcacgcgaaggcgtttacatgaaaaaacacctgttgggtggtgtaactaaaggcgcatttggcgaagctgaagctgaagctaaatttgaagcttggaagaacaacaaacaaagcggtttggctgccttgaaagctaaagacgaagaagctaagaaagctgaagcaaaagcacgtctggaagccgaaaagaaagtgaacgctgagaaagctaaagcattggctgaaaagaaagctgctgaagaagcagaaaaagctgctgccgaagcacctgctgaagaagcaacagaggctcccgccgaagaagctcccgcagccgaagctgctgctgaataatagtaagcacagcacgattacaaaaaatgggattaaaactataaaatcctctccggttatgccggaggggattttttattgattatctttgtagctacatatttttacttaataataaaagcaatgaaaaaatttatctatctgctcgctgtggccgccatcgttgctgcctgtagcggaaacaaaggttacgtggtaaccggaactgtagagggtggagctgacggcgacaccgtatttttgcaaaaagtagacggaagaaatcttgtaaaagttgactccgcagttatcacaaaaggcacattcaccttcaaaggtgtacaagatactgccgtaaaccgttacgtgacttacagaccggcaggaaaagaaggcatattaatggactttttccttgaaaacggtaacatcaacatcaacctgacgcgtgataatgattccgctaccggtacgccaagtaatgatgcttaccaggaaatcagagctcaactgaacggtctgaacaaacaaatgatgactatatacgagtctatgtcagatactacactgactgacgaacagcgcgaagccaaaatgaaggaaatgaatgacctacaagaaaagtcaatggagatcaccaaggcaggtatcgctaagaatatcacaaacctcgtaggtgttcatttgctgaagaataactactactaccttgaagtagatgaactggatccgctggtaccgcagataccggctgaatttgcaaatgatgaagtaatcatcaaaatcaaagaaaatgtagaaaagatgaaagcaactgctgtaggccagaagtttacagatttcgaaatggaaactcctgatggaaaaccagtgaagttgtctgactatgtaggtaaaggcaaagtggtactcatcgacttctgggcaagctggtgtggtccttgtcgtcgtgaaatgcccaatttggtagaagcttacgctcaatacaaaaacaaaggttttgaaatcgtaggtgtatctttggatcaaagcggcgaagcatggaaagatgctatccagaaactgaatatcacttggccgcaaatgtccgacctgaaatactggaactgcgaaggtgcccaactatatgcagtaagcagcattcctcacactgtattgatcgacggtgaaggaaccatcatcgcacgcgggctgcacggtgaaggtctacaggaaaaattggctgaagtattgaaataatctttgtccggaaaagaataatcacaatcgagaatttattcttatagcataaactcccttgttacaaataggtgtagcaagggagcttttttgtatctacctactacacagagttttccattttgaacaacttttcaaaaccggctaaaacaaaaagttatccactttacattcatacatttctaagaatcaatcgattaacatattttagaccgacaaaagtttcccaaaaacaaaaacttatagataagtttatacctttgcactcccaattctaatggataactaaaaaattaaaacgagaccatgatacagactgtaatcaaaagagacggacgtgtagtaggcttcaatgaagagaaaatagtaactgctatccgtaaagctatgttacatacggataaaggcgaagatttgcaattgatacgccaaatcacagatcatatatctttcaagggaagtgcacaaatgacggtggaagccattcaggatgccgtagaaatggaactgatgaagagtagccggaaagatgtagcacagaagtatatcgcttaccgcaatcagcgcagcattgcccgtaaagccaagacgcgcgacatgtttctggagattatagaaataaaatccaatgacgtgacacgggaaaatgcaaacatgaatgccgataccccggcaggcatgatgatgaagtttgccagtgaaacgaccaaaccctttgtggatgactatctgctaagcgacgaagtactggaagccgtaagcggcaattacctgcatattcatgacaaggactactaccctaccaagagcctgacatgtgttcagcatccattggatcgtattttgacctgcggcttttctgccggacacggtgaatcccgtcctgccaaacgtattgaaaccgcaagtatcctagggtgtatctcactggaaactgcacagaatgaaatgcatggcggccaggctatcccggcattcgacttttatctggcgccctacgtgcgcaacagctatatcgaagaaatcaagaatctggaagagctgaacggaaaggattattcacatctatatcagaaagaacttacagactacctgcaacaaccgctggatggactgtctgacgagaaacgcattgtgcaacatgccattaacaagactgtagcacgtgtacatcagtcaatggaagcattcatccataatatgaataccattcactcacgcggtggcaaccaggtagtattcagttctatcaattacggcacggatacatctgccgaaggacgctgcatcatccgcgaacttctgaaaagcacctatcaaggtgtaggtaacggcgaaacagccatattccctattcagatatggaaaaagaaacgtggtgtaagctatctgccggaagaccggaactatgacctttaccagcttgcctgcaaagtgacggcccgccgcttcttcccgaatttcctcaatctggacgctactttcaaccaaagcgaagagtggaaggcagatgacccgaaacgctatcagcatgaagtagccaccatgggatgccgtacgcgtgtattcgaaaaccgtttcggaccgaaaacttcaatcggacgtggaaatatctctttctctaccattaatatcgtacgcctggctatcgagtgtatgaagatagaagataaagaattgcgtatagccaaattcttcgcaaaactggatgcaatgctcgaagtcactgcacgccaactgcacgaacgtatggagttccagaaaaccgcatttgccaagcaattcccattgctgatgtctgccctatgggtaggttgcgaaaaactgaaaccaaacgatacaatcgcctctgttatcaatcagggaacgttgggcataggtttcataggtttggcagaatgtctggttgcccttaccggcaaacatcacggagaatcggaagaagcacaaaaactgggagtgaaaatagtaacttatatgcgcgaccgcgccgaccaattctccgatcagtatcaccataattacagtgtactggctacgcctgccgaaggactatccggtaaattcacaggggcagaccgtaagaagttcggtgtattgccgggaattacagaccgggattactatacaaattccaatcacgtacctgtgtactacaagtgcagcgcccgccataaggcagaagtggaagctccgtatcatgaactgacacgtggcggacatattttctatgtagaaatagacggtgatgcgacacacaatcctgaggtcatcatgcgtgtagtggacatgatggatcagtacaatatcggatacggctcagtaaaccataaccgcaaccgctgtctggaatgtggatatgaaaactctactccgaacctggaagcctgtccgaaatgtggcagtacgcacatcgataagttacaacgtatcaccggttacctggtaggtactaccgaccgctggaacaatgccaaactggcggagctcaacgaccgtgtcattcataattaaaaattataaatttaaaattaaagagctgcgcaataacgaagcagccccttaatttcattccctcccaccaacctttaatttttaattcttaatttttaattgaatcatgctttctatccttgacattatagaagatactacagtggacggtccgggcttccggacctccatttatgctgccgggtgcccgaacagatgccccggttgccataaccctgaatcctgggatatcaaccggggacgctggatgtcgacagacgaaattctggcgaaagtgcttgccgacaattttgcagacgtaacattcagtggcggagatccgatgtaccaacctgagggatttacagaactggcatgtgccatcaaggaaaaaagtagcaagaacatctggtgctatacaggatatacttttgagactctgctacgcaacccactacaggccaaactattgcagtatatcgatgtactggtagacgggaaattcaaacaggaactacgggatgaaagcctgtgcttccgcggaagcaaaaaccaacgcttgattgacgtacaggcttcattgcaggcagaagaggtagtgacatacaattataatcccatacctcgcattgcttaataatcagtatgcttgagatgccgccatcatctcaagctctcctttctttcctccctcctttcagaaattcccataattataacttattatcatttctttctttcctcaaaaagccttacctttgcggcgcttttcaagaatagataatattaggataacattttaaagtatgaattcgccaaacgaattaaaagaaattacccggtttttactggagtatgctaatcgtcttatggggtccggcgtacacacttcacgcgtgatacgaaacacccgtcgcatcggaaagtcactggacgtagacgtgaaaatgagccttttccaaaagaccatggtggtaagtgtatgcgacattgacagcacggaagtctacaatgaagtagccattattcccgctttccccatcagtttcgaactgaatgctgaactgagtgcgcttagctgggaagcctacgacaatcatttacccctggaaacactttgggacaagtatgagaaaataatatcaagaccgaagatggacccgctttgtacattgtttctggtgggttttgccaatgcttctttctgcgccctgtttggtggcgactggacagcgcgtctcattgtattctccgcaacactcatcggtttctacattaaacagattatgcagaagaagaaaatcaatcattatcttgttttcattgtatctgcattcgtagcttccatggttgcttcttcagcgcttacgctggaaacgacagccgagatagccattgccacaagtgttctttatctggtgcccggcgtccccttgctgaatggtgtcattgatattgttgagggacatgtactaaccggctgcacccgtctcatccaggcattgttgctggtattatgtatttccgtaggactctcctgcactcttatgttaattagaaacagtttattatgatactcgttgatatacttacggacggcatatttgccgcagttgccgccatcggtttcggagcgatttcagatcctcccttgcgcgcttttccttccattgccttacttgccgctatcggccatgccctgcgtttttgtctgatgacctatctgggagtagatatcgctactgcatccctatttgcttctttcagtatcggtatgggaagtcttgttttgggaaaacgtatctattgtcccatgactgtgctctacatccctgcattgctgcctatgattccgggtatgtacgcctacaaaatagtattctcactcatcatgttcatgcagaatatgaaagtaccggaattgcaagaaaagtatctgatagacttattcacgaacacaatcgttacttgtagcgtcattttcatgttggcagtgggcgccactataccgttgttcttgtttatcaaacgggctttctccatgacaagacacgagaaaaattaaaagttgaaaattaaaaattaaaagattgcgtatggaagttttttggaaaacaatcgcacaatataatgaagcaacctggattttccaggtaattattacgattgcaggtatcctgctgaccgtactactttatcaaaaaccgacactgctgataaagcggttgatgaagggatatatggtatttttaaatagctggatttctatcgtctactacatgatctattgtggtgaccggaattacaattatatacttgccatattctggggtataattgcacttatctggctatgggacctcattacaaactatactccgtttgaacgttatcacaaatatgacaaactgacttacatactgtatgccatgccattcctttaccctctcttgtcatgggcacggggcatggaattcccaatgatgaccacctgtgtgatgccctgctccgtggccgtattcaccatcgggttgttactggcattttcacgcaaagtgaatctgcttgtaatacttttcctttgtcactgggcattgatagcgttttctaaagtgtacatctacaaaattcccgaagatttattgctggcaagtgcaaccgttcctgccatttatctcttcttcaagaattacttcgaccagaatctgcataaagaaacaaaaccaagtgccaaatataccaactggattctaatagcactctgtgtagcaattggagtatttctaagtatcacgatattgaacgaattagtgggctagagaattaaatatgaagtattaagtatgaagtattaagggccacgcatcattaatacctgat

SEQ ID NO: 6455 - DNA, 103600 bp, Unknown
  gut microbiota DNA sequence
ttttttagatataatctcattgattacattcaaatgaaatttttcataacgaacaagctattttgaataataaaaaataactgttgagaatttgcttttcataagttctgctagaacatggtagattctagtattaacacatatatttaagagagcttatggagaaaaaaattgttttatcattagcctgcctacttattggaattggcttggcgattgcgcaaactccaaaaacagtgacgggactagtcatttttgaagaagacaatcagcctattgtaggtgcatctgttttgattaaaggtacaaaccagggggcggtaacagatctcgatggtaagtttacacttactaatgtgccgggtacggcaaaaatactgagaataacttacgtcggcatgcagacgatagaggtgaatataaaaagcgggacgatgaaaatcgtgatgaaaccggatgctgaagttttggaagaagtagtggttaccggtatgacaaagatggataaacgactttttacaggtgctgcgaccaaattgtccagtgaagatgtgaaattggatggtttggcagatattagccgttcgttggaaggacgtgcggcaggtgtatctgtacaaaatgtttccggaactttcggtacagctcctaaaatacgtgttcgtggtgctacatctatttatggtagttctaaaccgttgtgggtagttgatggtatcataatggaagatgttacggaagtaagtgccgatgagttgtcttctggtgacgccgttacattgattagttctgccattgcaggtctgaatgcaaatgatattgagagtttccaaattttgaaggatggatctgcgacttctatttatggtgcacgtgccatggcaggtgtgattgtagttactaccaagaaagggcaggccggaaaaagtcatatttcctataccggtgaatttaccatgcgtatgactccgagatatgctgacttcaatattatgaattcacaggaacagatgggagtttacaaagagatgaaggagaaaggctggttaaatttctcggatacttatcgtgctgctcaaagtggtgtctatggtaagatgtatcagttgatgaatacttataatccggtgaccggtacatttgccttggaacacacagacactgcaatgaatgattatttgcaggaggctgagtacagaaatacagattggtttgatgcactattcagtaattctgtgatgcataatcattctgtcagtctttcatccggtacggaaaaagcttctttctatgcctctttaagtgctatggccgatccgggatggtataaagatagtgaggtaaacagatatacggctaatctgaatgctacatataatatttcaaaacagctatccattaatcttatatcttcggcagcctatagaaaacaaaaggctcctggtactttgagccaaagtgtggatcctgtatatggtgaagtgaagcgtgactttgatattaacccgtattcgtatgcgttgaacacttcccgtgcattggattcaaagacaatgtatacccgtaattatgctgatttcaatatccttcatgaattggataataactatatgaatctggatgtggcagatttaaagttccagggggagttgaaatggaaacctattacagggttggaattttcagcattgggagctgtgaagtattctgcaacttcacaagaacacctcattacggatgattctaaccaggctatggcttatcgtgctatgcccgatgctacggtacgtgatcgtaaccccttcttgtatactgatccggataacccatatgcattacctattagcgtattgcctcaaggaggtatttatcaacgtacgaactataagatgctgggatatgacttccgcgctactggaagttggaatcatgtatttgccgaaaaacatattgtgaatctttttgccggtatggagacaaactcttccgatcgtaataagacttactttaatggttggggtatgcaatatacgcagggcgaaattccgttctatacttatcagttctttaaaaagagcatagaagagggtactgactattattcattgactaatacccgttccagatcagcagctttctttgcaaacgctacttattcttatcagggtaaatatacggtgaatggtacttatcgttatgagggtactaaccgtttaggcaagagtcgtagtgcacgctggttacccacatggaatatatcagcagcatggaatatgcacgaggaggaattctttgagtcattgagaccggctttggcacactttgctttgaaggcttcttattctttgaccggagacccggggccgaatacggttactaactctaccatggtattaaagagttataaaccttatcgtccgtttgccaacattcaggaaagtggtctaaagattatagatttggcaaatgacgacctgacttatgagaagaaacatgagttgaatattggtgcagatatgggattcctggacaatcgcatcaactttgctattgactggtataaacgtgataactatgatttgattggtgtgatacagactcccggtgtcggaggacaaattcgtaaactggctaatgtggctaccatgaaatcacatggtgttgaatttacgctttctacacgaaatattcaaacgaaagactttgggtggactacggattttatcttctctcaggcaaaaaatgaagttacagacctggaatcggatgcagaagttattgacgtggtttccggtacaggatttgcacttaaaggttatccggtacgtgggttattctcgtatcagtttaagggattgaatgaagatggtttacctacttttattgatcagaatggaaacttgacgagtgatggtaatgatattgattttcaaagtcagaaactggattatctgaaatatgaaggtccgactgatcctactattaccggtagcttcggaaatatattccgttacaaagggtttaaactgaatgtatttatcacttactcattcggtaatgttattcgcctggatcccgtattcagtaacgaatatacggatctgacttctatgccgaaagagtttaaaaatcgttgggtactggcaggtgaagagagtataaccacaataccaacgattgtaacgaagcggcagagcgatactgataatcacttaaaaactctttataacgcatacaattattctacggaacgtatagctaaaggggattttattcgtatgaaagaaatatcagtttcttatgatttcccgaagaagtggttagagaaaatatttattaatgatctttctttaaagttgcaagctactaacttgttcctgatctattcggatgataaactgaacggacaagatcctgagttcttccgttccggtggtgtagcagctcctgtacctaagcagtttacattgactttgagacttggtatttaaaacattaaaagctaattagattatggaaaagaaatatatatattatccatttatggtattggcgatgactgtagcattgtcatcctgtgacgactttttggatgaaatgccggataaccgtacagaactggatacggaagccaaaataaccagcatgctggtatctgcttatcctgaaactaactatgcattgctggctgagatgtcatctgataatgcggatgataatggtggcacctggactgcgtataacaagttgcaggaagaagccgctacttggaaggatgcgacatataaggaagaagacagcccatattctttgtggaatgattgctataaggcgattgcagcagctaatgcagctctggatgctattaatactatgggaaacccgtcatctttggatcctcagaggggagaagcattgttatgccgtgcctacaaccactttgttctggtcaatatttttagtaaggcgtatagtccgaaaaccagcactacggatttaggcattccatatatgactcatttggaaactaccgtgtctcctgaatatactcgcggaactgtagcggaagtctatgaaaaaattgcagctgatatagaagccggactacctttattgaatgatgctatttattctgttcctaaatatcattttaataaaaaagccggatatgctttcgcaacacgtttttatctttattatgtaaaggatgataaatcaaactatgataaggccattcagtatgcaacggtggttctgacagaaaatccgacggcaatgttgcgggactgggctactgtcggagcactgagtcctaataactctatccgtgccactgcatttatcaatgtaagcgagaaggctaatctgttattatattcaacgagttcttcatggggaagaattcacggaccttatgggttaggagaaaaatatactcataatgatatgatagccaataaggagacttgtaagacaatctctatctggggtggttattccatgctttatttcagcataccgtcttatcagggacttcccaaagttattatgggaaagatggctgaatattttgaaataacagatcctgtgaatgatattggtaatgcccatgtgatgtttccagctttcacaactgatgaggtaattctgaatcgtgctgaagcctacacaatgaaaaaagactatacgaaagcagcagcagatttggatacatggatacatgctttcactaaatccacgaatactgtaacggtagagtctgtcaatgcattgtatggagaatattcagaagcaaccggtacgggtatgaaattttatactccgaaaactcctactcctaaaaaggcgctgcatcctgattttacggtagaatcgggtacacaagaaaaccttattcatgcaattttgcatgtacgccgtatattgaccttacatgaaggcttgcgttggtttgatattaagagatatggtttggaaatttatcgtcgtactgtatataacaatgaaattactgtgaacgatgaattgaaagcggatgattcacgtcgggctattcagttaccgcaaagcgtaataacagcaggattggaagctaatccgcgtaattaatcggttaattttaaaaagaaaaattatgaagaaatatttatatatattaggcatagcggcttcattgctgaactttacaagttgtagcgaagatgatctggaccctaagagcatttttgaagatcagccgacaagtgaacaaaatgattttgataaatggatcctcgctaactatacaatgccttataatatcgcattgaaatatcatatggaggatattgaatctaatcatgattatactctggctcctgctgattatgataaatcggtgaagttggcgcatatcgtgaagtatgcatggctggaaacctatgatgaagtggcgggtatcgactttacgcgtcagtatgtgcccaaagttcttcatttggtaggttccgctgcctacgaggacaatggaacgatggtgcttggtactgcggaaggtgggttaaaggttactttatatcttgtaaacaatctgaagatagatgcagattttctgaatgagtactattttaagaccatgcatcatgagtttgcccatatccttcaccagacaaagagttatgatccagattatgaccgtatttccgaggggctttatgtgagtggtgactggtatctggagtctgatgaagatgcgttggcaagtggtttcatttctccttatgcaatgagcgaacctcgtgaagatattgcggaagttacttctatttatatcacaaatacggctgagtattgggcgaaacagatggaaacagccggaaccaaaggtgctgaaatcatcaatcagaaattgacgattgtaaagaattacatgcaaacagcatggaatattgatatggacgaactccgtgacgttgttcagcgtcgtatgagtgatgttgtgaccggagaaattgatttggaaacacttaaataaatatgagaaatgatgaaaaaaatatattatattctatttttattgctcgccggattctgcttcaactcatgtgtaagtgaagaagaggacttatttgataagtcggcagctgaaaggatgaatgaagctttgactaaatataaagctattcttcaggatgatccgcagggttgggtaatggagttctatccgagcgaccgttcgatgggtggatatacttatactgcaaagttcgataatggtaaggttgatatgacttcggaattatctttaaattccagcagcggtgataaatggccggctggtacggtagtgacttcgtattaccgggttatctccgaacaaagtgcacttcttacattcgatacttacaatttgttgttccatttcttttcagaaccaagagggtccagtgatgtcgacggatatgccagcgactatgagtttgtgtttatggaagtgagtgaagaccgcattgtactaaaaggaaagaaatatggcaataagatggtcatgactaaactgactgagagtgctggtagctatatgcaaaaggtactggatatgcaggaaaaaatggcagccgtacctcgcatgaaaatggtagtgggaggaaaagaatatactatcagcatggtgggcaaattactttcctatacggatatgaaagaagatagctccttggaaaatatagacatggcatatatttatactccggatggaataaacctctatgaaccgcttacggtaaatggaattacttttcaacacttgatctatgatgatgctactggagctataaaagctacggatgcagatgtttcttttccttatcctacagctttggagcagttctgtgggacaacttctcaatggtacctttcttttgatatagctgcggggactggagatatggacaaggaactgatggatttattcagtaatgcttatgcaataaataaatcgacccagtatgaagagtttattggttggtatattggagcaaattctgcctatccgggaaatgatacaaacccatattgtatgggttgggaatctaattggttaggattacaggtttgggatgttgcatatggatataaaatgtctattatagatgaggcgagcaaaaaaatctctcttcaatccactgctcctggcattaactatgatttttatgtattcttagatcctatcatagagtatgttgacgcgcatagtccctatactgtggaatttgatgatgatcaaactcctactactgctaagttggttagtacagttgataataaggtctggtttagtttaaccaagcaatgatttattaattaaggaagatactgttatgaataggaaagtaattttatctgtagtggcctctattatagtgcttttagttggaatccctttctttatgtatggagaagacggatattcattcccacaagcattgttaatggttattttaatagatttgttgtgttattcaccggcaaatttggtgattgctaagaaatctgatgaaatttctgtcttgaagcaaatactgaagtatataatagtggtggcacttattatgttgttactgatattctttgatagtaaacattcttttgcggaatcgttgtgtattgcattgggagtaactttctttatttatctctctgatacaattattaatgcttcggttcgaaaacttttgaaaactaaaaaataaactgtttagcgtatgaaaaaaataaatattttatggatgctgataggatgcctgttcttggtaacgtcctgttcagatgatgatgattctgccgttgcatccttacaggtgataaagtctgatgtatctttcactgccatcgcaactaccggcactatagaggtacaaagtaattctgccattacggcggtaagcaatcaggattggtgtacggttactgttaacggtaatgtcgtgacagtggcggttcctacttatactggtcttgtaggccgaaatgcggttgttgaaatatcgaataccttagatagcaaggtgcgtgtacctgtgtcacaagccggtggagtatggtatgtgaacggagatgatctttacggactgtctgacgaagaaagtactataacgatccctgtgaagagtgattatgactatactgttgatatgccggcttggataaccggtgagaaagtaaaagaaggttataattttactttaacagagaatacgacaggaaatgcccgtaaaggaactgtaatattcaagagccaaaaaggaactaaagaaataacttttgttcagtttggtgtgaatgatattgcaggtacttatgaagctacttattctacttttggtgaaggggatgattgggtgagtgaaactgtgaaaatagaacttttgcaagatgaagaaaatgaagcggttttctatgcagacggtttgagttctataagaggagttgtattgcctctgaaattcgatggtgaaacctaccaattgagtgcccttaacggacaatatcttggatttatagaatcacaaaaatggtatctttataccatcgtgagaagtgaagcgggctatgtacatgcggacacatcattgtcctatccagctatagctgagcttgatgtagacgatgaagaattaatgcctttcttccctttcaaggataaaaagggattttcttttacaggagaaacagggactataaagagttttatcgatgctataggagtttatgtctttgcttctaagtctccaacgtttggtaacaataataatcttggttattatgatatttttaaagatctatcaataaagaaaataaaagcagatcattagaattctctctgacgaattaggtttaactttatgttgacctatagaagaaagccgtttctgtgaagaaacggctttttgtgtctactatcgtgtgtctttcataagagctgttgaaatctcgtcattctattgacatcctaacttcactttcttgtagcgtagttgaaatctgtagcctccacctttgcaccccgaaaggattcttgatttattttatcaattgaacagtatgaaagtgaaaagatgttttttagaatggagtttggtaagcaggcgttttgccgttgccctcacctttgttttagggggaggaatgttgcttgctgctaatcttgttccactgaaaggtgtggtaaaagatgcctcaggagaaccgctggccggcgttacggtgagaatcaaagacggaaagtcgggaacaatcactgatgtaaacggacattttgtcttggatgtagagaaagggaaaaaactgttactgagttatatcggatactcagaaacagaggtactggtaaaagatgaccaacaaatgcagattgtacttaaggaagatgcgcaacagttgcaggaagtggtggtcgtaggttacggtacggcaaagaaagtaaatctggtgggtgctgtggaccagattgatagcaagcagattgcagagcgcggcaacagtaacatttctcgttcgttgcaaggtatggtaccggggctgaacattacattcagtgacggtaaaccttcgcgtacgccatccattaatcttcgtggaacaggaagtattggtgcgggtggtagtgcccttgtgttgataaacggggtggagggtgacctcaactcggtgaatcccgcagatgtggaaagtgtatctgtactgaaagacgcttcatcggctgctatctatggtgcgcgtggtgctttcggagttatattggtaactaccaagaacgctactgccggaaagacgaaaatcaactataacggaagtttctccatgcatcagcgtacggtgaagacagaagatggtatcgttagtaatggtttgcagtggaccgatggctggtatacggcttatctggaaggtcaggaggcgcctccgggaggtatcaataatgtatttaagtactctaccgactggtataatgaattggtaagacgcgatgccgatccttctctggataaagtgcgtgtcaatgataagggggaatatgaatactttggtaataccaactggctagatatcatttataaagatcagaactattccactgaacataatgtcagcattagtgggggaaatgagcgtgcccggtattatgtgtcaggacgctactacaatcaggatggcatttataatgccggagacgaaaagtatacgcagtataatatccgttcaaaaggagaaatacaaatcaataaatctcttttgttggagaataatacagatgtcatgattttccgttcccaccagcccatggtgatgtacgaccgccagaatataacccgccaggcacaacatcagggatatccggtgactatggagaagaaccctgacggtacttggaccgaggcagccgtatatatcggatgggcaggttttgtagaagggacttcctggcaaaaggacaataaactggatgtacgcaatacaacgactttgacgtatacacctataaaacagcaattgatctttaaaggtgactttacttattacagtagcaagtccacccgtctaagagccgagaaccagtataattactatacaggaccggaaataatgggaacccgtaacacattcagttctctggaaaatatggattataacaaggaatatctctcaagcaatattaccggtaactatattcctaaattttctaattccgatcattacctgaatgtactgttgggctggaatcttgagcaccaggattataaaacgatacaaacttatcgccgtggtctgattagtgccactaaaccgagttttgctcttatggatggtgattattatactacgggacaaggcggaaatgagtgggcttatgtaggtttcctctatcgtttgaactacaattataagagtcgttacctggcagaagtaagtggacgttatgatgcctcttccaaatttcccgagaatcagcagtgggggttcttcccttccggatcactgggctggcgtatttctgaagagccttttatgaaatctacccgcaattggctggataacttgaaagtccgtgcttccgtaggtagtctgggcaacggtaatgtaagcccttacctctatctttctacaattcccattaagaaaacatctgttattctgggtgatgcattgcagacgtatgccactactccgaatatcgttcccaacagtctgacctgggagaaatcgacaacttatgatattggtctggatgtcgatatgctatctaaccgtttgtcgatggtgttcgactactatcaacgctatacaacggatatgtatacagtaggtcctaccttgcctgccgtactgggagccgctacgcctaaaggtaacaatgcagagatgaaaaccaagggctgggaacttgcgatcatgtggcgtgacaactttatactggctaataagccatttaattacagtgtaaaagctatgttgtgggatagtcgtacttgggttactaaattcaataatcctacgaaactactctccacttattatgagggacaggagatcggtactatctggggatatcatatcgaaggattatttaaagatcaggctgaaatagatgctcatgcagaccagtccaaactaaaagtatccgctacgaatattctgaaaccgggtgatttgaaatttgccgatctcgataaaagtggtacggtggataatggtcagaatacattggatgatcacggtgacctgaaggttatcggaaatactacgcctcgctatcagtttggtctcaatttaagtgccaattggaatggtattggtatcagtgctttctttcagggtgtaggcaagcgaaactggtatccgcatcgcgagtcagctttcttctgggggcaatatgaccgtccttacagctatatgctgaaggagcataccggaaataatgtatggacagaagaaaaccagaataccgatgcttattggccccgctaccgtggctatctggcaaatggctctacaaaggcgttgggtatccaggccaatgaccgctatttacagaatatagcttatgtccgtctgaagaatcttcagatagattatacttttaataagaagttttgcgataaactgcacttgcaggatttgaagatttaccttgccggtgagaacctgttgacatggacaccgctgaacaagcatactaaaatgtatgaccccgaaggtatcagtgccggtgatgcagatttccgttctactgccgatactgatggagacggatatggttatcctattttgagcagttatacaatcggtatcaatgtaaccttttaacacagaagatgagtatgaaaaaatattggttgataggtctgtatgctttggctctgacctcttgtgatagttttctgaattgtgagcccgagaacagtttttcttccgaaggctttctggagtcggaatcggacttacggctttatacaaatggttttctgcaaagtttcctgcccagcgaagaaacaatagcctggggtggtgaccagtatgcagacttttgtgcaactcgttcgtccactacttttttgatcggtgacacgtgggatgatacccaacaaggtggttggggaaccggcgactggggagatctgcgacagattaattattttctcgataatctgccgaatgctaaaggcaaagtaacggatgccatttatttacataatgaaggtgtaggacgtttttggcgtgcttatttctattatggtatggtcagaacgttcggtgatgtgccttggtatgaaacgacattggatgtggataatagagatgaactatacaaaccacgtgataagcgtgaggttgtgatggataagatattggaagatctcgattttgcctgtaccaattgttccacggataagaccttgacagaaagtagcacattgataacgaaatgggtggcattagcactcaaatcccgtatctgtctgttcgaaggtacctaccgtaaataccatacggagttaggattgcaaagctcggctgaaaaatttctgcgtgcttctattgccgcatccgaagaactgatgacgaaaggcccttataaattactgaatacgggagatgcggagacacagtatcgttctctgtttacatcggaagaactgaacacaacggaggtaatctggggtattgccttcaaaaaggatttgcgtatgcactctattacctggaaactattctcagcctcatttggtgcaaactggtcattggtacggccttttgtcaatatgtatctgatgcgcgacggtaatcgtttcaccgaccgtacggattatgctaccatgcagtatatggatgagttccagaatcgtgattgtcgcctgatgcaaacagttatttcaccatcttaccagcggaaaatcagtggtacggtgaagccggatgcacctaatttctctatgacatccaccggttatcagcttatcaaatgggctatagatgatgatgtgcatgtagggaaggctacggccaataattctattcctattttccgttatgcggaagtattgctgaattatgcagaagcgaaagcggaattaggagaatgtgatgaaacagtgtggaatgctacggtcaaaccattacgcgaacgtgccggagtggaagggaagatccctgccacctatgacccgtatgtagccgcttactttaaaaatcaaacaacggataaatgggtgttggaagtacgtcgtgaacgtggtgtggagttagcttttgagggagttcgctatgatgatatcatgcgctggaagcagggggacttgatcgaaaatgtatggcaaggtatttacattccccagaaaggcgaagcgtatgacctgaatggtgatggtataaaagatgtagctgtggtggataaagagccgccagccgatgagaagattaagggcgtgcaatatgtggtaattggtaaaaccaaccgtttgtccgaaggtgaccacggatatattgaatttggctttagccagggacgtaaatgggatgataagaaatacttgcgcccgataccgttgacggctactcagataaatccggctttattgcctcaaaacccaggttggtaatagtaactttaatgataaaaataaatagataacatgaaagtaaagaaagtattagtaagtgcgttccttttggcaacctgcctgatgaatgtacaggcgcaacgccggaatgaaattcaggttcccgatttagatggatacactactttgaagtgtgattttcatatgcacactgttttctctgatggtctggtttggcctacggtacgtgtagatgaggcttatcgtgaaggactggatgcaatttctctgacagaacacatcgaatatcgtcctcataaaaaagatgttgtggcagatcataaccgttcgttcgatctttgtcagaaacaggctgaaaagctggggatacttttaatcagaggtagtgagattactcgtccgatggctcccggacactttaatgccatttttctggctgactccaatccattggaacaaaaagagtataaagatgctttcaatgaagccaaaaagcagggagcatttattttctggaatcatcccggatgggcagcccaacaaccggatactactaagtggtggcccgagcacacagaactctataatgaaggttgtatgcatggcattgaagtagcaaatggccctctgtatatgcctgaagctgttcaatggtgtttggataagaatctgacaatgattggcacttccgatatccatcaacccattcagactgattatgatttctcaaaagatgagcatcgtaccatgacattcgtctttgcgaaagaacgttccttgaaaggcatccgtgaagcattggacaatcgtcgcactgctgcttattatcgagagttggtgattggacgtgaagacttgcttcgtccattctttgaaaaatgtgtagaaatagaagagatcagccgtaatgagaaaggagtgacgctctctataaccaatactacggatttagtcctgaaactgaaaaagacggcacatgatacttctctggtctattttcgggatatgacgctgaagccgcatacacgttatagtgtccgtatcggatttgataatagcatcaaaggaggagatatgaattttgaagtgacgaattttatagtggctcctgataaaggattggagtatactatttctctgtaaaaagggtttgttttgttaagttgcccggtcttgaaatatatcaggaccgggcatattgtatatgtaactattctatttccaagaggtcgctcatgataccgtctgagatgaaaataccctctctggttagctttaaccgatcgttatgtaactctaattttccattttccagataagaactggcttgttccaaacaatatttccaaagtcggtcgccaaacttctttttcagctcttcagtggatattccccacattgtgcgcagacctgtgatgatgtattcattgtagcgggtttgtgtgttcagttgttctgtttcgtgttggcgttgcctttgttctatggatgaaagatactgatttagtgaggctacgttccattcgcgtgagtctccatcaaaggaatgtgcggacgggccgcatcccagataagggataccttgccaataagaagtattgtgtcgggagtacattccgggtttgcagaaattggatatttcgtagtgttcgtatccagcggcagaaagggtgtctatcaatgtggagaagaagttcagactactgtcctcatccacttgagatacagagtgctgttgcagcattttgtaaagtggtgtaccttcttcgtaaatcagatggtaggctgaaatatgctctacatcaagactgacagcctgctgtaaatcctgtgcccaacgttgttcagtctctccgggcaaaccataaattaaatcgatgctgatattctgaaaacctgcttgccgacagcgttttactgcttctatggcttgtgtggcattgtgtcgtctgttcaataattgcagtgttgcatcatcaaaagtttgtattcccatgctgatgcggttgaacggtagagtgtgcaacattccgatatattcttccgtaaggtcatcgggatttgcttcaagcgttatttctgttgcttccctcattccgtaaacctgttcaatcgttttgaaaacctccttaaagtcttcctccgataactgtgacggtgtacctccaccgaaataaatggtttcaacagcttcccctttcagatattccttgcgttccgtcaactcccggcaaagggcacggatatattgcgatttcaattccgaacgtgtagtggaatagaaatcgcaataaatgcaacgtgtcttgcagaaggggatatgtatgtagatgcctgccataattatattgtttctgtagaagagctttcgtagctcttactttggcggcaaagataactattccttccgaaacttatatcaggggagagaaaccgtctttaccgtcccgtcagagaaataaatggttatagtgtctccggtctgtttaaaggactttacaggtgtcagttcctttttagtaaatggcttgccactctttttccataattgtagtgtgataaagactttatcaccggaatgagttgtggctgcattgattacagaacatttattacttaccggatgtagtccttcagtctgtacaaattccacttccgaccaaccctggagattgataagtgctgtttgataagcaccattatccatgcagtaggcagtgtatcctccggccttttgctcctttgtaacaatgggactttctaattccggtaatgaatagtgtccataacgtaattctgtcgtaagcgggaaagaaaccttgtctacacgcagaataccgttaggaagtggaatatctgccagacggaatttgattttcgggttcgtttcaagttctgcatcccggtagtaaattccgtcttcaaactttttgaatgtatagaggcgcaatacttcccattcttgtttgtcattcagtacagcatagttcatggacactttaccatctgggctgtctgccatccaggggaatgcagtgttataagacagtttattataattttcggtagaacggaatttctgccagtctttggcaaccctttcatggcaccatgcacgtatttccgaagtaccgctattgggatagttggtcactaaagtattggaaccttccataaacttattgtatactttgccggattgaaattctttttcccaagctccgttattctcaatagctgtccagaacggattatcggcaggcaataataatccaaggaacgcttttcccatccagtaaacgctgccacggcagctataaatctgtacggcaggctcaaaagccccataaaaccccagtgttggtacccggtcttccattaatgcaggattttcaaggaactggagcaaggtggaagaggcaatgcggcgcatccagccatagttgatagacggatcattgagccaccccatcagcgggaagggcacagcggcagctatacggtacgtaatactgcgtccatacatattcatttttccatcttcggcaaacatgtagggataattagggaccaggtcacggaagttgctgacaaactgtcgtccggcttccggattgaacttctcaccgtagtaatgcgcccaaatcataccatacatctgaaaagcccacatactataataatcataggccggactatcattataccatccatatccacgatattgtgccagtgatttttgcagcaattcatccatataaccgtctttgacctcataaccctgatctttgaagaaagacatgacgaatatattaaaaaaacgccagttagaaccgattgtaggcccgttgccataactaagcatcaatgcggcaagatcatctttctccttttgagtcaatggttcccagataatttcaggcatcacggtaagtgacagggcaagtgctccgaactcaacaagcgtctggcttggcccacctttgagatgctgaatatatccggacttcgacggatcactcatattgcgcaactgttgtcggtaataatctccgactttgattccattcagtaccagatccggattttcttttagtagcggaattgctacgaacatagtgcggcaaagtccctccaaattctccgttttattaggttttccatctgttggataactctttcccggctgtttcgggaaatgcatcggatcgtccggtgtgtgaatgtagctgaatgctccgtccagtaaataggttgcagcatcaagccaatgttggcgagtcataccggtgagaggactcaacttgtagtccggttgtactaaatgaaatacggaatcatttttagcctgtggcagggaggcatttacttttaatgaaactaataaagtaaatagtaataatcctccggtcatttttgagaatacaattttcatcattgcgtgtgtattacatggtaagaatattcttatttatttttctctgcaaagaaaaggtattctctgcaatgtaaacggctactttagtgccaaaaagggtgaaatttagatcaatattgtcttttggggcttatcagctccttatccgaatcgtatctggaccgtacttgctccgtacattcttcggtcagaagtacctctggacggagaaactacggacttggtacggagcaagtacatcccgggtacgtcccgatatagaattattgaaatataatattaccaatggataagatacttttagatatatttacgtatatttgtcgggctttattaattatattctaaaccgagttaaccatgaaggtaatgtttacaatgaaagaaaaaatctggagttttgtattttgctttggaatatttttccctttgatatgtcaggccatcgcaacacctaagccaaatactctggtgtttaagtcttcatccatattgaacagtttgcccagtaaagatgtgcaatctgtctatcaggatcgcgacggatatatctggatatctacccgtaatggacttttccaatatgatggttattctcttactacttataaatccaatctttttcgcactgatttgctgaccaataataatgttttctgtgtggcagaggatgcaaaacaccgtctttggattggtacttacagtggtctgaatgttttggacaagaaaacgggtgcgatacggaaaatagatcatccggagatgaatggtaatagtatccctcaagtcctgataaccagtgatgaacgtattctgtttgcaacagattggggagtgtatgagtatcaggaagataaagatgatttcttatgccatggtggcgaaaatacagggaatgtgatgcccaggactgccatcaaatctctgtttgaagatgaccggggagatatttggattggaacatgggatgcagggttgtatcgttatgagaagaaaaccgggaaatatttcagatacccgcggttgaatgaacaaaactctgctcattatgtatttcaggacagtcagaagaatatttgggtaggtacttggcgtggcggtttggttttgttgaaagatgcctaccagccggataagaccacttggattacttatcggtatgatgaaaagaaccttgccggtatctcggatgatattatctatgcgttatccgaagatcttaatactcattctttatgggtaggaacccgtaaaggactcagtgtacttccgttgacagggaattacacgggtgctgagactttcagtaattattatcccagtgaatcggatagttctatagccagtgacgaagtggcttcccttttgcgtgatcgtcagggactgatgtgggtaggtatgattggtggaggtgtaaacaaagtgagtactcgaaaagctgatttctattgggatcagttgttggaagtcaaacggatgctgaagactacttcggttcgcagtattttgctggatgatgaaggattactttggctgggaataggaacttatggattaggggtgaagaatcgtcaaaccgggaaattcacttattatactcaaatgcctgaattcgaccgttatcgtggtatttctacggttatgtctatgatgcaacattccgtaacgggacatatttggattgcagcttatgacggaggagtttatgaggtagataagaaggcgcctgtggcacagagggtgaggaattattatgctcaggatgcgccgtggttggcaggttcctgtgtttttcatatctatgaagactcaaagcacaacctttggtttgctacgcgtaatggagtttcaatgcgtacaatgaatggagaagcggtgcggctggatactttgcaagtaggaaatagccagatgagaaacgttccgactatgtatatgaccgaaggaaatgacggagatatgtgggtggcttccaatacacatggagtttttcggcttcattgtgatgaaaaagggagctataccgtttcatgttattctgctacgaatggaaagctcaacagtgtgtatgccgattgtctttacacagatgccaaaggacgcatttgggtaggaacaggaggcagtggactgaatctgtatgatgaagcaaccgacacttttcttccggtacatgcgaaatggaatcttccgggagatgcggttgtcagtatcaggagtgataaagagggtgatttatggttgggtacgaatgccggattgataaaacttgccctatcggataacttggaaagtgcgacattccgtttgtacaccacagtagatggtttgcaggacaatatatttattcgtagtgcccaggcggttgcagctgacggtgaaatgttcttcggcggacaccggggatataatagtttttatcctgagaatcagcaggaacagcctttttcttcttctgtgatagtgactgacattaagattttcaatcagtcatggggaaatctgccagctaaagagcgaatggagatttcagaactttcacccgcttttgcagatgagatacagctggaccattggcataataatttcagcatcgaattttcggcattggagtatgctaatccggagagaaaccagtatgcttatcagttggcaggtttcgattctgactggcaatatacgggtggggccaagcgttttgcttattataataacctgaagcccggaacttatactttccaattgaaagcttctaatgccaatggcatttgggatgatgagatgctccggatggaagtcgttattttaccgcctccctggaaaacatggtgggcctacaccttatatattatatgtgtttgtgctattatctattatactttccgggtgatacgtaatcgaatccgtttgcgaaatgctctgcatttgcgtgagatggaacaagctaaggcagaagaggttaatcatgctaaattacaattctttactaatattactcacgagctactgactccgttaaccattctttctgcttcggtggatgagctgagacggaccgcacccacgtataaggagcaatatagagtgatgaataacaatatcaatcgcctgatacgtttgctgcaacaaatccttgaatttcgtaagtcggagacaggaaatcttaagctgcgggtttccgaaggtgaccttacgcaatttgtacatcgcagtctggatagcttccgcccgttgatgaagaagaaagatattcagtttcagatttcatgttcacccgatcctttcaacgcttattttgatccggacaaacttgataagatactctataatttactgtctaatgcttctaaatataatcgtgccggtggtctggtcagtgtggaactgcttgaaaatgaagaccgaacagcacgattagtggtgaaagacaatggccccggtatatcagtagaagcccagaagaaccttttcaaacgcttttatgaaggagattaccggaagttcaagactattggaaccggcatcggtttgtcattggttcgcgatttggtagtgctgcatcatggcactattacggtagaaagtgaagaaggaaaaggtacattgtttattgtaaacttcccggttcttcgtaattcgtatgcggaggaagaaatagaagaaagtctgccgacagatgcggaagaagcaaagcaagaactcttatcagatgagtttggcgaaaatgtctctgatgatgatagtgaggaacaagccgagccgactgctatccggtcttcgtactctttactgattgttgaggacaatgaagagttattgcagttaatgacgaaattgttgggtgcggattatatggtttacacagctaataacggtaaggaagctatagatgtggtagagcaggaagagatcgatctgattgtttctgacgtaatgatgcctgagatggatggcattgaattctgccagtatattaaaaataagtttgaaacatcccatattcctgtagttttgctgacggctaagaataaggaggaagaccgggttgaggcttatgagtccggtgctgatggctttatcagtaaacctttcaatctgagtgttctccatgcacgtatctccaacttgcttcggagccgtgaacgtatgggaaaggacttcaagaaacagttggtatttgaagctaaagaattgaattacaccagtgttgatgaggatttcctgcaacgggctattgattgtgtgcatcgtcatttggatgatccggattttgatcaggcgaagctgttggaggagatgtatatggctaaatcgactttcttcaggaagttgaagtcattgaccggtcttacttatgtttcctttatccggaatattcgtatgaaagcagcctgtcgtataatggaagagaagaagaatattcgtatttcagaattggcgtatgctgtgggttataatgatccgcgttatttcagtaatagttttaagaaagagtttggtatgcaaccttccgaatatatggagcgctttacttcgaatggcacagtggaagatgatgttccggaaacatagagcatatatttattaaccatcttgtcttttatactgcaagaacaacttccggaaaatggaatgttgttcttgcagtcttattgtgttacttacccgtttattcgttttatacatttcttttaaaactctctcacatttgaaaacttatgtagaataatgtttcatttcatgtagaaaattgtgtcatgagacaaattagcatctgtttgggctgttgtagaaggcatattgctttttgcccccatacttttgtgtcgcaatcaagaatgaaaatgatagagttttttttagttcttgttgtaaataacaaaccaatgtttaatcttaaaattaatgagaaacatgaaaaacaaaagaggcaaattgattacagtactttttgttgctgcaatgtctgttagtctttttacagggtgtagtgacgatgctacaattactggattggatgaaggtgcattgcctgaattggcatccgacacaagggctgttacagatgagttgatcgaatcagattcaatcagtaactttagtttattagctgcaactgaatatagtgatgcagagttaaagaaacgcataaggaatgggtggtggaaacagtattcttatactttgccgaatggcagagtaactccggaaatatcagagtatactgattatacgcagaatatatatccggatgctactacattattctttgttgggagtgaggtattggaaaatgttaatgtacaattctctcaaataggtacaactccatactattatgaagaaattaatactggattttatgagtttaaggttgcttatcctgttccggtcttttttgaattcgtaagtaagaaaacaggagagataattgatactattatctttttccctagccgttctgtccagtaagggctatataatgagacttaataattaaatatatgtttaatcttaaaattgttgctaatggaaaagcaagaaaatttctgtaaacgacaggctcaaaaattatgtcgattatttccagttgcaattttattgtttttgtttttatctgtccctcttaagggatatagtaacgaagctttctcttcagaaggcatgcagcaaaatacagtaaaagtgactggtacagtcaaggatactaacggtgagccaattattggtgctaatgtgatggtggtaggcacagccactggtgtcattaccgatattgatggtaatttcatgttggaggttcctgttgggggtaaattacaatttagttttattgggtataaggaacaggtagttcctattaaaaaaggtattagtctaaatatagtattggaagaagactcgcaaatgttaggcgaggtagaggttgtagcttatggtgctcagaaaaaagtatcaataacaggtgctatttcttcaatgaagggggatgatttattaaaaacgccagccggttcaatttctaatattctttctggtcaggtgacgggtatttcttcagtacaatactctggtgaaccaggtgctgatgcggcagatatttatgttcgtggtgtagctacgtggcaagatgcctctccgctgattcaagtagatggtgtagagcgtgatatgtcgcaaatagacccgaacgaaatagaaagtattactgttttgaaagacgcttctgccacagccgtgttcggtgtacgtggtgcaaatggtgttattttgattactactaaacgtggtgccgaaggtaaagctaaaatatcatttacaacttccgctggtgtcaatgtccgtacgaaagaattggattttgcgaattcctatcaatatgcggactattataatatgatgaagattaatgatggagaacagccgactttcacagatgagcaattggttgctttcagagatcatactgatccgattatgtatccagatataaattggattgattattgtatgaacaaagcttcatttcagtcacagcataatgtgaatatttccggtggaacaaataatatgcgctattttgtttctacaggtttgtttacacaaggtggtatgttcaagaaactgggtgcggataacaatgcgaattttgattataagcgctataattatcgcgccaatcttgattttgacgtaacgaaatctactacattgtctgtcaatattgggggacgtgtagatacaaagcgtacgccggagtctggtgaagaccaaaatcagctgtttcgtaaactttactgggcagttccttttgctggggcaggtattgtagatggtaaacgtattgtcactaatcaagagtatatttctttgaatatggtggatggcttggaatcatattatggtaagggttttcgtaatacgacgactaacactttgaatctggatatgatccttgatcagaaattggattttgtaactaaaggactttcccttaaattaaaaggatcttataattctagttatgggacaactaaagttgcaagctcatccaaagcaaaatatactccggtaattacggaaaatggcattgcgtatcgtaaagaaggctctgatactcaaaccagctatagtgaaggcggatacagtaaggcacgcgactggtatatggaattggctctgaactatagccgtaagtttggtgatcataatgtaagtggattattactttataatcaatctaaaagatattatccgggcggtacttatgattatataccttctggttatgtggggcttgtagggcgtattacttatgactggaaatctcgttatatggcagaatttaatgccggctataatggttcggagaactttgccccggagaatcgttacggtttctttcctgccggttctattggttgggtattaagtgaggagcaattttttgcacctttaaagaaagtcgttggctattttaaagttcgtgccgcagtcggtatggttggtaatgacaggatgggtagcaatcgttttttgtatttgccgggtaaatattcttatggaagtggtgatggatattattttggaacgaacgtaaataataagaagccaggtgcatgggaggccagtcagagtaatcctgatgcaaaatgggagaccgctgtaaaacaaaactatggtattgattttaatatcttaaatgagcgtttgagcgtttctgctgattattttatcgaaaaacgtcgtgatattcttgtttcacctgattacttaccgggcattttgggtatgacactgcctgttgttaatgtaggaaagactgaaaacagaggttttgaaatacaggcaaaatggaacgataaactgaatgatgatttccgctattgggctaatttcaatttgtcatttgctcgcaataagatcattttcaaaaatgaagtggcgcagaatgaggaatggatgtatgaaaccggacgtcgtataggttcgcgttctatgtataagttttggggtttttacgatgaaacggctgataaacgttatcaaacagaatatggaagacctattgctgatcacggaatgacattagcacctggtgatgctgtcttcgtagatttgaatggtgatggggttttgaatggtgatgatgcaacccgagatatcggcttcactgatattccagaatatactgccggattgaatttaggattttcttggaagaattttgatttctctatgcaatggacaggggcttggaatgtggatcgtatgttaagtgaattcagacgcccgctgggtgatacaaacagtaaagctttgttgctttatcaatatgaaacaacgtggcgttcttcggaggatacatttacggctaaattcccacgtgcttcaaactcacatgcgtccaataactatagaggaaccgacctttacttgattaatgcaagttatctccgtctgaagaatgtggaaatcggatataattttgattttccatttatgaaaaaaatgaaattggataactgtcgcttatatattaatgggtataacttgttgacaattacagggtttgattggggggatccggaatctcgtcagagcgaccgtcctaattatccgttgactcgtgtatttaatatcggtttgaaagtaggtttctaaatccaataacttttaatagagatttaagatatgaaatatttaactaaatggtttataatggcatttgtaggagtatctatactctttgcatcatgcgtagatcaaataaagtttggtgatagttttcttgagaaaccacctacgacaagtgatttgaatcaagactcaatctttggaaaagctgattatgctcgtgcttttctttggaatacttatagcaaaatgtatttcggtttaccttataattggggcgatgtgacctctaaaatgaataccggggtatttgaagcattatcagattgttatcaaagccataatggatgggatggagtgaatcgacattattatcctggttcatatactgctgccaatgaaacaggtagtgatactcgttttggatatttaaaacaggattgctggcctgcaatccgctcttcatggatgtttatagagaatgtagaccgcgttcccgatatggaaacagacgagaaagagcggttgaaggctgaggctaaatgcattattgcttcccgttattttgacttgttccgtcattttggtggactccctattataagaggtacttatggggtggaagctgaatatgaaataccaagaggtactgttgatgagacggttaagtttatggtaggactgttggatgaagcttcttctgcaatgccctggagcttaggtactgaggaggataattggcaggggcgttttacaaaagcggctgcgatgggattgaaatgtaaaatattactgtttgctgcaagtcctctgttcaatgataatgaaccctactgtacagagcctccccaagaggcagtaactaatttacaagtctggtatggtggctataatgctgatttgtggcaacagtgttggcaagcttgctataatttctttgaagaaaatgcgaaacagggaaatgcctattctttgatacaggctaaagggacatcgggtactgattatcgcgaggcctttaataaagcctatttcattcgtgaaaacaacactgaattattgatttcgaccagagtaacaggtaaatatggtggtgagtggtggcactattggggaactaataatgactcagaagaaggttggcctaacaatcgtggatatactccgactttagagtttatggaaatgttcccgatgagtgacggtaaagcttttgatccagaggttatgcttgcagatggagctgatcctttctttgagaataatgatcggaataaacctgtacgtgatcctcgtttgtacgagactatgttggtgaatggtgcttcttatgatagccgcggtgctgaattgtggttaggcggacgcgataatctgactgatacagaaaaggaaactaataaaactgcaacaggtttccgtctctataaattctggaaagaaggaaaaggaagttttaatggtacttatttagagtggccttatttacgtttatctgagttatatttgatctatgctgaggctatcttgaaagctaagaatgacttggtgggagcaatcgcgcaggtggatattgtacgtggacgtgttggcttgggaggcttggctgagtgtaatcctgacaagcatttaacttctaattcggatgctttgttagaggaaatcttgcgtgaacgtgcatgtgaattaggttttgaagatgtgcgtcttttcgatatgattcgttataaacgcgctgacttatttcagaaaaaacttcatggattaaaagtttatcgtaatgatggaagtggcaaaaaaccgtggtcaggttcggatggtaactctgcccaatacccatggcctacagaatttacttatgagccttttgttcttagtgcacgttcttggtggactaactttagccctaaatggtacttgtctgcattccctgttgcagaaatcaataaggggtatggactgacacaaaatccgggttggtaacagaaataaagaacaaccgttaaattagaaaagaacaacatgaaaaagtataaaatagtaattttagcaatatttgcttgcgtttctctgaaaggctgggcgcaagaggaaggaaatgttgtcggtaaagtgattgacaaattaggtaatccggtagaaggtgcattgatttctgttgaaaacaattcgcttgtacaggttacgaccgatcgcaaaggtcagtttgtaattactgctgataaggacaatcttttaaaggtacgtacaggaaaggatgatgtgaaaatagtacctgtagcagatggaaaggaaatgacgattgttatggatttctctgctgaaaaagtaaattatggttttggactgagccagactaatgctgaaagcacaggagctgtttctacggtatatgctgaccaaatagataatcgttccacttttaatgtgggtaatgccttatatggtaatgtaaccggactttatacaatgcaaaaaacgggcgatgtatgggaacagatatcatctatggctatccgtggttcgaaaacattgagcaatcaaggcgttttgttggttgtagatggattggaacgtgataatgcttatcaggcattaaattatatttcaccggaagaggtggaatctgtaagtattttgcgtgatgcggcggctgtagctctttatggttttcgtggagcaaatggggttgttaatattgttactaaacgtggtaaatacaagactcgtgagattaatttctcttatgatcatgggtttaactatcagacccgtatacctgaaatggcagatgcttttacctatgccaatgctatgaatgaggctttggctaatgatggtaagtctgcacgttactcacagaatgaactgaatgcctttaagagtgggcagtatccatatctgtatcctaatgtaaattgggcagatgaggtgttccgtgatcagggaactactgatatcgctactttgactttccgtggtggttctactaagatgcgttattttacgatgctgaatctgcagaataatcgtggttttatcaagaatgcagattctaatgatggatattctactcaggctaaatattccagagcaaactttcgttcaaatttggatattgatttggcacctaaaactcgtttgcaggcgaatatttccggtgtattgaatgagttcagcagaccgagttctgctggtgataatttgattggtaaactttatacagttccttccgctgcatttcctgttaaatcagaacaaggtctgtggggtggtaataacacttggagcggagattataatcctgtttatctggcacagggacatggatatacgaagggacatacccgtgcgttatatgcagatatgaaattaagtcaggatttatctgctgtgacaaagggattgggagcttcaatgcgtatcggttatgataatttagcttcttactgggaggattatcgcagaggagaaaaatggggaatgcagactgtatcacgttgggaagatggcgtacctgtagatttagttgatgttacgggaggtgcggttagcaatgcttccggttcttctaaactggactggcaatatcgttctttcaatttccagatgaatgtggattggaaacgtcgttttgacaagcatgatctttatagtatgttgttatacacgtataaatttgatgatagaaatgggaccaatgtgacattgtatacgcaaagtgccggttggtatactcattatggatataataatcgatattttgcagattttacattgatgttctctgcctctaataatctggatcctaatagccgttggttaccggctcctacagttggattgtcatggattatttccaatgaagattttatgaaaaatcagagtgtgatagatttcatgaaattacgtgcttcgtttggtattattaatacagataacactccatatcaaggttattggtatgataaaatgagtagcagtgcaggtggatatcctgtgaacaataactttggtggtgacagcgggtggagtgaaggtgcattgccttccttgaatggtaccctggagaaggcctataaatataatgtcggtttggatgtgtcgttattgagaggcttgacatttactattgatggattttatgaaagacgttcagatatttgggtaagtgcaggcggccagaattctgctgtgttgggtatcacaagcccttataagaatgccggtattgttgatagttggggcacggaattaggtgtagattatagtaagaaattaggtgattttaaattacgtttaggaggtacattctcattcaaccgtagtgagattattgaaaatctggaagagcccaaagcctatgattatttaagtgcaaaagggaaacctcttggacagatttggggattacaagctattggacattttgtagatcaggcagacattgataatagtacacctcagcaatttggtccggtgaaaccgggagatatcaaatataaagatgtgaataatgatggtgttatcaactctaatgatatgatacctatgggatatagtactgcttggcccgagatttattatggttttaatgtcggtttagaatggagagggattggtttcaatgcttattttcaaggtgtaagcaactatactgctttattgaattccagtatttatcgtccgttgataaacaatacatccatatcacaatatgcgtatgacaaccgttggacaccagagaatccttcagctcgttttccgcgtctgacaactgaggctgtagagaataatactcaaaccagttctgtatggttgcaggaccgttcttttttgaagttacgtaactgtgaggtatattataatttaccgtcttcttggctggataagattaaaatgagaacggcaaagatttatgtgagaggtactgatctatttagtattgataaagttgatattacagatccggaagcgattggagatgtttggcctgctacccgttctatacacattggtttatcgttaggtatctaaataacagaatttatataaaaagaattacaatatgaaattaaagaatatatgtttcggtattgtttgtacagtagcattggtcggatgtacagataagatggactatcacgaatataccaactacggtaaggagtatgtattttccgacttcggacgtacagctgcatttgtgaataacatttattcctatttggattatgatctgctgggaacaacttcattggcttctgcttgcgatgaagcagaaatggcattaaactattctaatgtacttgattatacaaatggtaattggactgctctcaatcctaaatctcaatggaattattacactccgattcgtgcagctaattacttcttggagaatggtttgaatttggaattctccgacttgatacttaatcaggattatgaggcgcagatgaagcgctatggacgttatcaatatgaagtacgtttgttgcgtgcatactactattttttattagtacgtgcctatggcgatgttccttttacaacgaaagtactgacagaggcggaagccaacagtttggaacgcacgccggcgtcacaggtctttgactttatcataagtgaatgtgatgcagtagcaccccaattacctgttgattattccaaactggataatgatgccgcaggtggtactaaccctgaagcagggcgtgtgacgcgcggtgctgcattagcgctgaaagcgcgtgcatcactgtattgcgctagtaaattattcaatgacagtgaaaatcgggacttatacaaaagggctgcaacagccagtttggatgtcattaattactgtggggagaataatataactttaggtaaatatacggatctgtggggggctgataattggaaggcctcagagatgatttttgtgcgtcgtgttggcgatactgacgatccggaacggacaaattttcctattggcatggaaaacgctaaatcaggcaattgtcctactcagaccttggtggatgcctatgaaatgaaaaatggaggtgaacctaatcagaaagatccctatactggaagagatcctcgttttgctatgacaattgcggtgaatggtgataaatggcccaatacaaatcccaatccgttagagatctacacaggtggaagagacgctgctccggtgccttatgcaacgcctactggttattatgtgaagaagtacgtggatggtgctacagatattagtgctagtacgagttctggtggcaaacgtcacagttggataactttccgccttggagaattcttattgaattatgcagaagctacctttaagtattttggttctgctgatattaaggatgcggaattgacaatgactgcgcgtgaggctgtgaataaggttcgtaaacgtactggggtagatatgcctgattttcccgaaggtatgagctccagtgatttctggagtcgatataaaaatgagcgtatggtagaattagcttttgaaggtcatcgcttttgggatgtacgccgttggaaagaaggtggttttactagtatcggcagaatgctaatcactaagaattctgatgattcatttacctatactcgcagtatcaaggcattggtttgggatgataaaatgtatttctatccgataccggatagtgaaattcggaaaaatccgaatttaaaacagaatccaggctgggataaataaggtatgtaaatttcaaaaatagaagattatgaaactaaaatatatatggattacaacaggtttattagcttgtattacaggttgtgatgataaactagaaacatacgaaacatcagggggagcaaatgctcccactgctattgcaagttcatctgttgattctgaagcattaccagggcagataaagttggtatgggacgctcctgcagaaaatgcttatgaatatttacaggtaaaatatagagacccatggacacaagaagagatttgtgagattgcttctaaatatactacagagctgacaattgataacactcttgctcgtttcggtgattactctttttatttccagacttttaatgtaaaaaaccaaggtagtgaagttacggaaataaaagctaagtctggagctgctcctattacagttcaagagaaatcaagaaaagagtttgcattatctgccagccaattgagcacaaatgcccaagagcctagtgaaggacctatttctaatctggtagatggaaatgtgaataatttttttcatactcgttggagttctccacagatagatttgccacattatattcagatagactttaaagaagcacatgagaatttctctgtctattatcgtacaaggggtgatgatacgtggactaccgctgcacgtccatcttctgtagaacttcagattagtaatgatggagagtcgtgggaaacattgacaaccctttcgggtctgcctacaggtcacggtgatgaatatacatcagaatttgtaatgcctggaaagagttttacctattttcgttttaatgtaattgcgacttcgagtaatactaaatattttaatatggcagagtttaaattctatgatgtagaagttgaagtctatgacccggaaacagctcctttggattaattttaatagagggataagaatatgaaaactaagataaaaaattgggcagttctttgtatgattgcttgttctgtcatttttgccgcttgtgatgatgataaagactttagttacaaaggaaatttggatttaaacttattaagtatcaaacaggctcgtgatttgtgggatggaacgaaatgtaatgtaactacgagtattaagcaacctttagtaggagaagaacaaaaggtagatgaatttaattatcggttgagcttgacactgtatcagaaccggcaggctacaaaggatgccactgtagacttggcaatagcgtcagattctttgaataaagctattgctatggctggtatgtcttctgcttatgctatatataaagatgttgaacttctaccggaaggatattacaatttctctgcaaacaaagtgacactgaatgctggtgaaaagcaatctgaagaagtggaactgaatgttgattgcagccaactgataaaatgggtacaaaatgaacgtggaaagagcgttacatttgtgctacctgtacagattcagaattcaacttcttatggcataaatgataagacaaacacgattatgtttttctttgatgtgacctatgtatcacctgaatacattgctgacggagaaggtgtgcctgatgatcatgaattggaaggcggatatagattggtctggcatgatgaatttaatggaacaggtgcacctaatactgacatgtggagatttgaagaaggattccagcgtaatgaagaagatcagtggtataaaaaggataatgcagagatgaaagaaaatgcattggtctttacagccaagcaggaacgcgtgaagaatccgaactacaatccgaatgcaacaggtggtaattcttggaaacagactcgtgaatatgcggaatatacttccgcttgcgtggtagcccaaaacaagtatgctttcaaatatgggaaactggttgtacgcgctaagatacctattgagcaaggtggatggcctgcgatatggtctaccggtaactggtatgagtggccgctgggtggtgagatcgattttctggaattctataagaacaagattcatgctaacctttgctggggtggaaataaacgttgggatggttcatggaattctgcaaattatcctattactgatttcacgtccaaagatgcgaagtgggcggaaaaatatcatgtttggatgatggattgggatgaaaaatacattcgcatctatctggacgatgtacttctgaatgaaaccgacctgagtacaacctataataaaggtgaccatggtgccggagagggtggttatattaacccttactccaatgatttggaaggttttggtcagcttatgatgttaaatttggctattggtggggttaatggaagacctatagaagcgacattcccacttgaatatcgggtagactatgtacgagtttatcaaaaaaaataaataaaatctttaattttgtattccgtattgtccctatgaacctaacagaacattggggcagtacggaatatttgtaaaataggtaatagtatatgaaatatataaagtatttgggaggattcttattattgacaattatttgtcttcctctattatcgcagactaaagaacggtggaaagatgttaataatgaatatatcaacgcccatggtggcggcgttttatttcataacggattatattactggtttggcgaacatcgccctgaaaacggcttcactaccgaagtgggagtgaactgttacgcatcttccgatttacagaactggactcataagggtgttgcacttgccgtttccgaagaacccggtagcgatattgaacgtggttgcatcatggagcgccctaaagtgatatacaataagaagaccgggaagtttgtaatgtggttccatctggaactgaaaggtcaaggttatggccccgcccgcgcggctgtggccgtcagtgacaaaccggagggaccttatcgctttgttcgttccggacgggtgaaccccggaatctatccggagaatatgcctgaggcagaccggaagctgacatggaacatgaagaaatataaaaagtggtggactccggagtggtacaaggccgttaaccagggactgtttgtgaaacgcgatatagaaggcggacaaatgtctcgtgatatgactttatttgtggatgacgatggtaaagcttatcacatttattcttcagaagagaacctgactctgcatattgcagaactgacagatgattatttgcagcattcagggcgctatattcgtatctttcccggtggacataacgaagcaccggccctattcaagaaagataatatgtattggatgattacttccggatgtaccggttgggatcctaatgaagcccgtatgttttcagcgtcttccatttggggaccgtggaagcaacatcctaatccatgccgcggacagaacagtgagaaaacctttggcggacaaagtacgttcgtattggagttgccggagaaccgctttatatttatggctgatgtatggaaaccgaagagtctgatgtattccgggcatatttggttgcctatacagtttgatgaacagggtgttccgtttattgagtggacggacgaggtaaatctgtcggctcaatcggagtggaaattggtatggagtgatgaatttaatacagacggtcttccggatacgactgtttggagttatgataatggctttgcacgcaatgaggaagcccagtggtatcagaaaggcaacgcttactgcaaagatggaaagctgattattgaagcacggaaagaaaaaggacgtaaaaatccttggtatgaggccggaagtaatgactggcggaagaagcgggagtttattgagtacacttcctcatgcatcactacggccggcaagaaagagttcctgtatggcagattcgaggttcgtgccaagattcccgtgagcggaggggcatggccggctatttgggctttgggcagtggtatggaatggccttcgtgtggtgaaattgacataatggaatactatcgtatcaaaggtgaaccgcatattctggcaaatgctgcctggggaactgactggcagtggaatgcaagatggaatagtaaagcgattccttttactcattttacagataaagacccggcgtgggcggataagtttcacatctggcgtatggattgggatgaaacggccattaaaatctatctggatgatgaattactgaatgaaattcttttgagcgaaactgttaacggtaccatcggaaaaggaacgaaccccttccgcatgccacaatatcttttgctgaacttggctcttggtggcataaatggtggcgaaattgatgataaaggtattcctatgcgttatgaaatagattacgttcgggtatatcagaaatagtttaagacgggtgaatctaagtttattgaattgtcactatgatgctgaatagttgatttcaatgacgtaatgtgtgtttttgtctgttattaacaacgagtctttccgtggaatagagccttctggaagattctacctgtcttttccctcaattcagaccgtctgtttaggaaaaacagacggtcttttaccttccaacaagcggtcttttactctaaaacataccatgtaatttcccaaaagacttattcttttttccgaagggctacaccatagttccaaaagggtgtagtcttgttgactgaagggcgataccatccggcataaagggtgtagccttgctttttacaggcaatattttctctatttcggtggaaataggaaatggactgaaagaagcatttttttagatattgtcaataatgtcttctatagtgttttaacttcgaacttatcattgtctaattgtctggtatttctttctgtccgtattcttttgaatttacctgataaagaatccttgcgtttttccgtatgatgccgtggtcggtacggaaagaaaagaatgtgacagggtaggattatcaatttgtcattttgttaattcctcatctatattcatttacatacatgccacagtctgaatcagtgattggttggtgtgatagtgtagcactcctgaaaataatcctatcgaacaaataagatagttttagaactttttatgtatatttgccggagttgattaataatatttgctaactaacaactatgaaagaaaagatcaggagtttcttctttatcttgggggtattgtttcctatagtatgtcaagctatggtagcgcccggacctaattctttggtatttaaatcttcatctgttctgaatagcttaccaagtaaagacgtgcagtcggtatatcaggaccgggatggttatatttggatatctacccgcaacggactttttcagtatgatggctattccattactacctataaatccaatctgtattgcccggatttattaacgaataacaatatttattgtgtggcagaggatgcgcaacatcggctatggattggtacttacagcggactgaatgtgctggataagcaaacaggacagattcggaaaatagatgacccggaaataaatggtattggcatatctcaaatattggtgacaagtgacaatcgcattttatttgctacagaagggggattgcttgaatatctggaagatagcaatcgttttttagcttttaatcaggataataccgatggcgttttcccaaaaacaactgtaaagtctttgtttgaagatgatcggggggatatatggattggtacatggagtcagggattgttccgctatgaaaagagaaccggtaaatactggaagtacccgcaaatgaactccggtaactcagctcatgttgtctttcaggatagccataaaaatatatgggtaggaacctggggagcaggattacatttgctgcatgatgcttataatccggagaaaaccacttggacaacattcacccatgatgaaaataggtcgggtacaatttctgataatctgatttatgctatttccgaggatctcaatacgaattctttatgggtggggactcgtagtagtttaagcatacttccaatgcggaatgtggagacgtcacgcttttattttgaaaactgctattccggtgaatcggaaaactctataacaagtagtgaggtcgcttctttgttgcgtgacaggcaaggtattatgtggatagggatgattggtggcggtgtcaatatggcgaatactcgtaaagcaaagttcaaccttgatcgtttatctgaagcaaaacggatactcaaaagtaattctgtccgtagtattttgttggatgatgaagggcaactttggatgggaatcagcacttatggctttggtgtggaagatcgcaggaccgggaaatttactcatcatggtcaaatgcccgacttcagctcatatagagggatttctacagtgatgtccattatgcaatctccctctaccggacatatatggattggagtgtacaacggaggagcttatgaaatagataaatcagcccctgttggaaagcgcgtgaaagcacataactcttcgaatgctccatggatgtgcaattcctgtatctactatatttgtgaagactccaagcaaaacctatggtttgccactaagagtgggatttcgatgcgtgcggcggatggaacttcggtacgcttcgattcattgaaggttggagacgtggctgtgcgggatatggtggtcatgcaacttgttgaaggacgtgacggtgagatgtggttggcttccaatacacatggagttattcgcattcagggtagtgggaattctttaagtggatatactttttccggctattcggtttccaatggaaagctgaacagtgattatgcaaactgcatttatagggatattgaaggacgtatttgggtaggaaccggtggaagtggattgagtctttatgatgctgtggaagatgtattcctgccggtacataaattgtggaatctgccgggagatgcagtaaccaatattcagagcgataagaagggtaacctttggttgggaaccaatgtagggctgttgcgcctcactgtgccacgggatttgcagaatgtaacttatcgcctttatactacttctgatggcttgcaggataatatatttaatcggggagcgtcatttgttgcttctgacggcgagatgttctttggagggcatcgggggtataatagcttctatcctaataaacaagatgaacaggttttttcttctccagttgtaatcactgatattaaagtgttcaatcagtcctggacagctctctctggggaggaacgttccgaaatatcgaatttgtcaccaagattcacagataaaatagtcctgaactataagcgtaacaactttagcatagagttctctgcattggagtatgccaatcccgaaaggaatcagtatgcttacagattagatggttttgatgcaggttggcaacatacagatgcatcaaaacgctttgcgtattacaataatctgaagtctggtacctatactttttatgtgaaatcttccaattctaatggtatttgggatgagaatgtacaaaccgtaaaagttgttattctgcctccgccttggaaaacctggtgggcttacaccttatatataataatacttgtaggtattgccggatatatctaccggattattcgcaaccgtattcgtttgcgtaatgcattgcatctgcgtgagatggagcaggcaaaatcagaagagataaatcatgctaagctgcaattctttacaaatatcacgcatgaactattgactccgctaaccattatttcggcttctgtagatgaactgaaacagacggcacctgcttataaggaacaatatgatgtgatgacacataatattaatagattaatacgtctgctgcaacagatattggaatttcgtaaggcagagacgggtaatctgaaactgaaggtattgcagggagacttggtactgtttgtgcgccggagtctggatggtttccgtccgttgatgaagaagaaggatattcatttcactattcaaagcagtatgaataaatacttagctttctttgatccggataaactggataagatactatataatctgctttcaaatgcttccaagtataataaacctggtggtaaggtgggaattgaacttagctgtgatgaagcgaatggagtagtttgtataatcgtgaaggacaacggacctggtatcccgaaagagtcgcaaaagaacttgtttaagcgtttttatgaaggagattaccgtaaatttaatactatcggcacaggtattgggttatcgttggtacgcgatttagttgttctgcatcatggttccatatctgtagagagcgaagaggggaaaggaactgcttttaaaatagaattcccggttcatcggtttgcttattcggaggaagagatagatgatgccgtgactctgttggattcggatggaatagatgctgtgcaggaagatgtggtgattgaagatattcagacaagtgcattagaagataacgttgtttcggcagaacagaatgtggcagaaaagagccacaccttattattagttgaagataatgaagatctattaggcttgatggtgaaacttttgggtactgattataaaattcatactgcaactaacggcaaagaagcgcttgaaatcgtagaatcggaagatatcgacctgattgtatctgatgtaatgatgccggtgatggatggtattgagttttgcaggagtattaaaggaaattttgatacttcccacattccattaattctgctgactgctaaaaaacaggaagaggaccgtgtggaggcctatgaatcgggagcggatgcattcataacaaaaccgttcaatttgagtgtacttcatgcccgtattggtaatttattgaagtcacgtgaaagggttatgaaagattttaagaaacaactggtgttcgaggcgaaagaattgaactataccagtatggatgaagacttcttgcaacgtgccattgattgtgtaaatcgccatttggatgatccgggatttgatcaaactcaatttttagaagagatgaatacgacaaaatcaacctttttccgtaaattgaagtctctcaccggattgacttatgtttcattcatccgtaatatccgtatgaaagcggcttgccatattatggaagagaaaaaacatgtgcgtatttcggaattggcgtatgcagtagggtataatgacccgcgttattttagtagtatctttaaaaaggaaatagggatgcagccttctgagtatatggaacggttcacttcgggaggaacgattgagggagagtaaaacccggttgaggaaaggtgcaaaaaatagaggcgtatgtgccattcatcataattaaatcattttgaaacatttctacgtattgcttacgcttatgcggaataactttgcttctatgaatttgaaacaataagacttgtttcgttcgcagaatattaatcttaaaagttattacgtatggaaaaacaaaagcaaaaaactggattgtgcaagatgatttcagcttggataatttgcatagttctggtgatgagtgtgccgatacaggcgcaaaatttacttaccggttgggacgatacagctggaactccttatgacgccggttggcgggtcgatgaaagtatctctattacttggggaaatctcgcagcttcttctggcaatcgatatcgtataaatgtaggtagtcctgccagtaatggtacagatcagatgttgtatataacagaggtggataccaagtacggttatccggtaaagccggtggaaaacaaattctatcaactttctggtaaagcgtggcgaagaaatgggggatctggaagtgcaaccttcaatttttattttgctgacgatctgttggcaacaaagcctgtttcaaaaaaatctttgactctttcgggaaacaatgtagtaaatacattcaatagtttacgttttgttgcaccggagggttttacgtcgggttattttctttgggatgttcatgttaatggtgggaactggaatgaggctggcatctggcttttgcaacttactgaattaggtaatgctgtttccgtaaagtttgataccaatggaggcagttcagtagacaatcaatattttttagagggggaatcttatacgataagtaaacctgccgatcctgttaaagacgatggttctccttttgatggttggtatgccgataaagaatttactataccttacgacttctcggttgctattactgctgcaacaaccatttttgctaagtgggaagatgcgagtgtggtaaaaactcagctacaaacgttgatatctgaagtggaaagtgctaaagaaggtggtacggaagccggaataaactatctgcaaactgttatcggagaagcgcaggcgattgtcgataattccggttctacaatcagtgatttcacaacagccattagtaacctaaatactgctcttgctatttaccgtgattgttctttaaaggaactgttggtggagaggagcattattcccggtttctcggctacaacttacatatatacctatgatcttgctccgggtgcttccattccaacagttacggctacggctgtagcttcggttgcatcggccagtattaaacaagcatctgccattccgggcagtactgtggtaacagttacggctggtgacggttctacacaaacttacacagtaacttttagagtaaattatatggctgcttgggatggtaacggcatggggacaactacagatattccgagcaactttggttggaagtgtagtagtgacgtgacatgggtgaatgcagataatagtaacgacacttatgcatataggtatagagataattttggcagtggtgttggtcgtgtgattacccatcctgttaataataatgtcttttcttttccggtttctctaaccggaggtaaagtctataatttcacttgtcgcaactcaaatgtaaacggtacctgtaccactatgtttggcatcaatatgtcgaaagatgcaatgggtagaatgttgaattcccaaagtaagacttctgcgaagtggaactcactatcgacatttaacttcaactttgcggcagcagtgtccggcacatactatatggtatggcaaacgacaaatggcacagatagaaatatagctaccgatttcttacttacagaagtgggcaatgccctcaatgtatcctttaatactgatggaggaagtgaagttgctacacaatattttgtagaaggagaatcgtatgtggtaaatcctcctgttgaacctaccaaaaacggctatgtatttagtggctggtataaggacaatacttatacatcactttttaatttcaatattccagttctggagaatacaatcatttatgcacggtttgtaccggatggaaatcctaccatgacgagccttaccataaacaatgaaacgattgccattcaatctgctaaatatatgaatattacagttaatggaacttctgaattacacatttcaagcgaaagtccgctggtgggcagtaatattaatcttgcttcggacaatgcctggctctatcttgaatctgttaaaccttcggaagttacttccaattatttgagttctataaaaatcaatggacaagctttcaatgcagaaacggatcgtatagccatttacggaagtggtacagtgattattccccaagggaaacaagtttcaaaacatgctctgatagcctatacagaaaataattatggaggtgaatccatggaatttgaagtggagaaatactatcggacagccgaacttggagctactttcgataacaaaatccgctcattcagactgaagaaaggttattcctgcacgcttgccaataatcctgatggtacgggcttttcacgagtgtacattgccagcgatgcagatattgaagtacccgaaatgcccgaaggattagaatttgtttcatttgtgcgtgtattccgttgggaatgggttagcaagaagggaatttgtaacggcggacttgctgcaatcactaattcttcctggtacaatgactgggctgctggtggtgctacggataatcctgattttgaatatgttcctatgcgtcataatttaggttgggactcttttgaaactatcaatacaaggaacaatgtatcccatgttttgggttataacgaaccggatcatactgaccaggcgaattgtacgccgatacaagcgattaggcagtggcctgagctgttaaaatcgggtttacggcttggatcgcctacacctgatgctattagaaaagattggttggtcaaattcctggagttggcagatagtttgaactatcgtgttgattttgtggtgggacacatgtattggaatgggcaatcgggacaaaacctgtataatggagtggtggatgcttgcactcgcctgtatggaggacgtccgatgtggataactgaatggaacaacggtgccaactggacaactgaaaactggcctactaattcgggacctcaaagagatgcggatttgaacatcatttatgatgaggatggaaatgaaaaaacagtgaccagaccgttgtcgcccgaaaatgcggcaaaacaagctacgtggatactggatgcgctgaatgggcttgaacgttgtgaatatcttgaacgacattcactctataactgggtacaggatgcaagagctatagtgctggacaataaactgactcctgcggggaaaaactttgcagcatataaatcgaaagtgggcttttcaaaagcgcgggagtatacccatacctggaaaattgctcctcctcttcccagctatactttgtcgaaagactataagtcgataactattagttggtatgatcacaatggagagacgggtaagaattacacattgcagaagagtgtggatggtggagaatggacagatgtaaaggtctttattgcagcaactgacatgaatcctgataatcctttggtctatacatatggaagtacgatttcttataccgaagaaattgattgcacatcgaaggttgattaccgtgtcatcgcgttgagttataaagatacacagtcttcttattcacgtacagcaagtgtgaccagagatgccgtacccgataaacctatcttgcaaggtgaagcactctcttctaaaattataaaattgacttggagtgctgtggataatgctcgttcttacagattggaacgtgcggaaagtgcaaacggagaatatgtggaaatagcaaacctacttactggtacaacttatatggatgagaatttagcagtgaatactccctattattataggctttatgcgctgagtacagcagctacagaaccggtttctgatgttttaaccgtaagtacgaaggcattggctgttcctttggcgataaacggactgcgtatagcagcaggggacgggcatttgactttaacttgggatttcgcttatgatgctaaatatagggtattacgtgccgaggagaaggatgcttcatatgaacaaatagcagatgctattgagactacgcgctatgtggataatgggcttgttgaaggtactacttattattataaggtgcaagcctataatactgccggtgatggtccggaaagcgaaatactgtcagctatacctgttgccgggcaacatgtatatctttcgtttgatgaaaatgcaggaacaacagcttttgatgcatggggtggatatcatggaacactggtgaatggtgctgaatggactaccggtaaaacaggaagcgcagtagcactcaccaagagcaaaagttcttatatacaattgcaggatggtgcacttagcagtttggaagatttcaccattaccacctggattaactttaacggaggaatagggcgcttgtttgattttggcaccgggacaggcacatttatgatgctggcaccggctacaactaagatacgctataaaataacatgcggagctggtacattcgatatcaccattccttgtacgataaaaactaaggaatggatacattttgctatgacacaggcgggtacttcggttaagttttatctgaatggtatctgtgtgggtacaggcgaaaatgcggataaaatttctcctaaggatatgggaataactacacaaaactatttgggtaaatctcagtggtcgagcgatgcgtattgcgaccatatctatgatgatttcaggatatataataaagcattgtctgacttggaagtggcaaaactggctgatgctatggtaactgtttctgtttataaaggcaatagtaccggagaaacagtagaagtatataaggatggtagtggtctggctgacatactaaccggcaatgctattgccgtagtggacgatgctgatggtattaaccttccggagggacagaacaacgttgtcgtaaagaatgcggcaaacacttattcttgtaccagtttattgcttacggataaacagcctttttattcgcctgtcagttttacggctacatctgctgtctatcgacgtgacctgaccggatatgtatatgccgatggtacaaatggttggagttctcttgtactgccttttgcaggaaccttgtatgccggtgaagatgccaagaatccttttattagtgatgatgacgcatccggaaattactggctgaagagatttgccggtaaaacaaacgaggctatgaactttgaatatgcaagctcaattgaagctgatataccatatatcatagctttgccaggggaacgctggggagtggaaaatagtattaaagataaggaaatagagattcgtggtacggatgtaactgtatcagccactaagggcattgctaaagttacggcagatgattatagctttaatggaacttatgcagttgttcaacctgtcagagctcattatagactaaatgctgagggaaatgctttcattaaatatgatgatggagctacagttgaacctttccgctgctacttgcttccggatgtagaatcgatgtcgatgccgaaaagctttagcataggtggtggaaatggcgaaattaccggtttagagaatgggactaaggatcatgctggcaaattacgtgtgtattcggaagctggcaatctgaaaattgtttcccctaaggtaactatagttcagattcatggtgtggatggagtattggtacgtacggtacaattacaggaaggtgtgaatattgttactggtcttgctcccggtttctatgttgtggaaggtcagaaggctgtgatatattccaaataaaataaagtgtaaattttaaaatgaacaagtatatgaaaaaagaaacttatgtgaagccaactgtcgagttgatttcgatggagaatgaaggttgtgtcatgactggcagttttactggtggcggacagataaatccgggtgcacgttctggttatggacgtagccggggaagaacctacggaggaaattcaaactctgtcagtgacctagaacaactgattgaggatatactgacaatagataaatagtcagattgttgaagaatggtgcattattgatgggagaatgtttcatgcaccattcttcaacatctctggcatttttgtaatgccgcaatgtatttcctttccatacatttgccatgcagttcgggagccaggcatgcagtttccggattgaagatagagaacttatattatttttttaatcttaaaaattatacgatggaaaaacgaaagatttcctcaagagcaggactaagcaaggtactttttaccttaatggtctgtatgactctaatgatgaacgtcccatatctgggcgctcaaaattcccaagttacagtaacgggtaaagtagaggacacgatgggtcctgtgattggtgccagtattgttgagaaaggcgtagcttctaatggaacaattaccgatattgatggtaacttctccattaaagtaaacccgaatgctacgttggtagtgagttttattggttataaaatggtggaaattcctgtaaaagggcaaaggaatgtgaaagtgacactacaggaggatagtgaaatgctggatgaggttgtggttgtgggttatggtcaaatgcgtaaaaaagacctgaccggttctgttatccagattcgtccagataaattagcgaatgaggctcccaagactgtgcaagatgtattgcgtggtacaccgggtttgaatgtcggttacgatgcttctgctaagggcggtggttctatgcagattcgtggtcagcgttctgtatatacggatggtggacataatgatccgttgattatccttgatggtatgcagttttatggtgaactttctgaaattaatccgaatgacattggtcagattgatgtattgaaagacgcctcttctgctgctgtttatggtgctaaagctgccaatggtgttattattattacgactaaaaaaggtaaatcaggtaagccgactatcaattttactgctactcttggtatcaatacaaagagtgaatatcgtgatgtttttgatgccaacggctatatgagatatcgtgaagattggtataagaaagatacttatgccactgacccttttaccggtgtttatggagcgtatgcagccggacaatggaaaaacaagaaggatgagaacggtaaagatataataggctctgatggcaaacccttacaagaatatatatataaccgtgctgccggttattatgataatcctgcgaatttaggtcggtatggtatctccgttgaccaatggagagcgttcacttcaaatgagagtggagaatcggacgccagtatttatgcaaagcgtttaggactggaagatggtgttttagctaactatctggccggaaacacgtacgactggtacgatcgtactttccggacaggtatcaatcaggattatacagcgagtatttccggagccggtgatcggatgaattattatatgtctatcggttacctaaagaatgagggagccgtgagaggcaatgattacaatgctatccgtgccaatttgaaggtgaatggcaaagtaaccgactggttggaaataggaacgaacgttaattttcaggatcgtagtgacggtgatatttctgtaaatcttggtacggattactgggatgccaatatgttgcgaaacagtccttactctacttatcgtaacgaagatggtagctattgccaatatccgatgggttccaataagaagtggggctacaactatgactttgagcgtcagtatctggatctggagaagggctatactgtgttgaatactattttcaatgccaaagtaaaattgccttttggaatcacttatgatttcaatatagctcctcgttatcaatttttctatgatcgctactttatgtcagctgccaaacctgattctaatccggatagccagggagtaaatcgtgaacaaagtaaacgttttgattggtctttgaataatactattacatgggattatacattggctcaaaagcatcactttattcttactttggtgcaggaggcagaagaacgccgtttttggcaggataagattaacgcacgcaagatattaccctcggatgccttgggatttcataataccagcaatggtagcaagacgctgagtagtttttcttcaaatgatacgcacgaaacggctgctgcttatatggcacgtctgttctattcttacgatgatcgctatatgattactggtacggttcgtcgtgatggttattgcgctttcggtgctaacaatccatgggctactttcccttctatatctgctgcatggaattttactaatgaaaagttctttaattgggagccgatgagtaccggtaaattgcgtgtctcttggggtaagaatggtaaccgttcgttgaaagacccttatattgctcttgccaatctgggggccggagcaggggctacaatggggtatttggttgctaatggcggtacagtagatgttaagtatttgggtatggaccgtttgtctaatccgaatctgcaatgggagaaaacggaagctttaaattttggtttggacttcggattcatgaatgatcggatcacgggtagtgctgaatattatattatgaagacgcatgatatgattatgggacaacgtctgccgggatttaccggatttggaagcattactaccaatttgggtgaagtgcagaacagaggtttcgaactttcattgaataccctgaatattcagaatcgggatttcgaatggcgctctactttaagcttctccatctataagaatgaaatcaagcatctttattatgaatatgaagacgtgctcaatgaagctggagaagtaattggtcgcaaagagatggacgacacaagcaacggttggtttattggacaatccattggtactatctgggattatgagatggatggtatctggcaggctgatgaggcagcagaagctgctaaggtaggacaacgcccgggtgatccgaaagtagtgaaccactatactgctgacgataaagaagatggcacaccggtttacaatgagaaggataaagtgttcctgggtaagaaaaatccgcctatccactggtcgttccgtaatgagttcactctctggaaggaccttaatatttctttcagcatgtattcctatatgggacataagactctggaaggttattatctgaatcaagataatggcggttcattgattacttataacagcaatactttcaagaagagatactggacacctgaaaatccgactaatgagtatgcacgtctcgatgcctatggtccgaatggtgctaagggtgtacagaagttgcacaatcgttccttcatccgtctggacaatatttctgtggcttacaccttgccacaagcgtggacgaagaagatacagttggaacgcgtaaaactctttggtactgttcgtaacgtagcgacttgggcggcagactgggaatatgcagacccggaaaccggtggcttggctactcgtacctttacattcggattaaacttaactctttaaactgttgaaacaatgaataattatattaagaataagctctctaagggggtattgttccttacaggaatagcagtattcagtgcatgcactgacaactttttgaaaccggatcctctgtcgttttatgaacctgagactacatttgctactgaatcaggtttggaggccgtattggctatggctgaccgtcatcttcgcacttgggcattccactatagtagtggtgactgtaatataagcatacctcttggtacggaatatctattttctgaactttctctgtatggcaaaactgatggtacagggggggtatatggtaattttgccaatcaactacaacctaccagtggtttgaacaacggtgatgacaaccgaatcatgtacttctggaatgaaggtttcacgggtattaagcatgccaacactatattgtcctttatagataaagtgactgcgttgagtgaggaaacaaaaaatgcctataaagggcgtgcttatttccatcgtgcttaccgttatttgaacctagtgatgcagtttggtgatattcctttggtaacaaagacactggaagtacctaagcgaaactatcggtctaccaagaaagaagaaattctggatatgattacccaggatatggagaaagctgtggagtgggtgcctgtgcagaatgatacccgttacattggtatggtgaacaaagaggcatgtcgccagctgcttatcaaatgttatttggcaacgggccagtttgaaaaggctgagaagcaagctgacattttgattgatcagtcaggattatcactgatgacagagagctttggtaatgcaaatgatggtggtgaaccgaatacctggaagattacccgtaacgtgatctgggacttgcatcgccctgaaaacaagatgatcgctgcgaataaagaggtcatcatgggaatgcctaactgtacggacgaatcatttgtgaactttctatctatgcgtattttcggtccattctggagtgacggtaacctgaaaacacctgatagtaaaacagctggtgaacgttatgcacgtaataatggcaaatatgaagctactactgactttacacgtgcttttggtcgtggcattgccactgttcgtgctactcattttgctcaacatggactttgggtagtgaacggtgtggaagataaggaagatctccgccataactcaaaagttggaaactgggtaaatatggaggacttgacttacaataacaaggattctaaatattatggtcagaattttatgctctattcacctgaagatgtttggggggtagataaggatggtaaacctgttatcacaactcataaaggagctttactctgtaatgatacaattcgtgattggtttgatttccctcactacaagatctatttggaggatgtgcgcaatgaagctaatatgggtgccaatgactttcaaggtgcagccggttccggtgctaatgcaaactggtatctgtatcgtttggctgaaacttatctgctgcgtgctgaagctaagtattatcaaggtaaggatgctacatcagatgtaaatgaagtacgtaaacgtgctaaatgttcacaactttatgcagttggaaccgtgactattggtgatatcatgaacgaacgcgctcgtgaactttatctggaagaatggcgcaatgtagaattgacccgcgtatctctttgtctggcgttgagcggcaaacctgatgaatggggaaatacttatagtaaagacaattgggataaacaacaaggtacggataatgttggcggaagctactggtatcaacgtatcattcattattctttgtataataaaggtgacatcgtttccaatggcaagactctgaattattatatggataagcgtaaccttttctggccggttccgaatagtgctattactgcgaataataaaggacagctagctcaaaattacggttacgatggatatgatgctagtgtaccgatgtgggaaacttgggaagaagctgttgctgatgaggataagagtgaataaccaggttggaggatttctataggtttagttcttaaataaagaggttgggtctaaagtactgtgcttgtagaggcgaatcgtcattcgttcggaatacacaaagtgattttgacacaacctcttttcttttttaagatatgaagatatgagtaagcatttgaatataacaggatgttttttattcctttcttttttctttcaaaccattctttccgcacaaaatacttcgattggtacgaaagatattgtttccggtgaagtctggaaagatacagacggtaatgttattaacgcccatggcggcggtatcctcttcaacaacgggaaatactactggtttggagagcaccggccttcttccggttttacaacacaggtgggagtgacatgttattcatcaaccgatttgcgtaactggaagtacgaaggtgtagctttggctgtatctgacgaagtgggaagtgatatagagaaaggatgtatcatagaacgtcctaaagttatttataatcagaaaacaggaaaatacgtaatgtggttccatttggaacttaaaggaagaggatatgggccttcccgtgccggagttgcagtaagcgacaccccggcgggaccttatcggtttatccgttcagggcgcgtgaatcccggtgtctatccgctaaatatgacacaggaggagaagaagcttacctggaatccgaaagattatgaatggtggactccggagtggcgtgaggctgtcaataagggaatgtttgtgaaacgtgacctggaaggtgacggacagatgtcccgtgatatgactttgtttgtggatgatgacggcacagcctaccatatttattcctcggaagagaacctgacactccatatcgcagaattgtctgatgattatctgagccataccggaaagtacattcgtatatttcccggaggacataatgaagcgccggctatatttaagaaggatggaacttattggatgatagcttcgggatgtacaggatgggaaccgaatgaagcccgtttgatgactgcttcttcaattctgggggaatggtcgcaattacccaatccttgtgtaggtaaagatgcgaaaattacttttggaggacaaagtacctacatactgccactaaaggatggtggatacatgtttatggcagatgtgtggcgtccgaaaagcttgtcggattctaggtatatttggctgcctgttcgttttaatgggaaaggaattccatttatagagtgggtggataagtggtgagtgtggagtgaaaatcggccattttcctatagaatggtcgattatataccctttttgaaataattttagcagttcggtttatctgaaaacgaatatatttgcaacgatgaaaaacaacttataattgaatatcatgaaaacgtggaaatatttgtggctactgttgattgtagcgttgctggttcccctcaatgtttcggcaaaaaagaaagcggaaaaagtaaagtctgatcgtgaactctgggcgggaattctgtaccagatggcagcgcctgtactcagtaatatgagcgaaggcaagttgcaggaaaatatgctggtagagttgagccctacatgggacggtcgtgataagcgggtgacttatatggaatgcttcggacggttgatggccggactggctccgtggctgtcactgcccgatgatgatacggcagaaggaaaacaacgcaaacaattgcgtgaatgggcattaaagagttatgctcaatctgtagatccggaaagtaaagattatctgttgtggcggaaagaaggacaacccctggtggatgccgcctatatagctgaaagttttttgcgcggatatgacgctttgtgggttccattggatgatttgacaaaacagcgttatattgctgaattccagcaactgcgtcgggtggatccaccctatacgaattggttattattctcttcaactgttgagtgcttcctgaaaaaggcgggtgcccagacggattattaccgtatcacttcagctttgcgtaaagtcgatgaatggtatgtaggagatggctggtacagtgacggagaggatttcgccttcgattattacaatagttttgtgattcatcccatgtatgtggaatgccttgaagtgatgacaaatggcggaaagcagaatatctggaatgtgaaaggtggaaactttccgaatgccttgaagcgtatgcagcgttttggcatgatattggaacgttttgtttctcccgaaggcactttcccagtatttggccgttcgattacttaccgtaccggcgtactgcaaccgcttgccttgctgtcattgcgtggctggttaccaaaagaattgcctgccggacaggtacgtgcggcaatgaccgctgtcattcagcgtatgttcggtgataatcgcaacttcaatgcggaaggctatctgacattaggtttcaacggttcccaacctaatatatcggattggtataccaataatggcagcctatatttggcctcacttgctttcctgccgttaggattgcccgctgacgctcctttctggacagatgccccgcaaccgtggacatcaaagaaggcgtggggtggagaagacttcccgaaagatcacgcttattaagaaataagttatcatgaacagatacattctctttttctttctgattctctcgacacttaccacgctccgggcacaacagtcccggctcgtggaagtggggaatgggtatagccagacatcagttaacactactgtcttcagaaacaattcacttgtgacgcagggagacgaacagtatatcagttactatgacggcgacggctatctggtgctcggtaaacggaagttggactctgaccaatggacactgaagcggacacaatacaagggaaatgtgaaagatgcccataacataattagcatgatgctggatggcgaggggtatttgcatctctcattcgaccaccatgggcataaactgaattattgccgtagcaccgccccttatacgctggaacttggagataaggaaccgatgactggtgtggatgaaggtaatgtgacttatccggaattctatccgttgaatgggggagatttgctgtttgtttatcgctccggctcttccggacgggggaatctggtgatgaatcattattctgtaaaggagaagaagtggaatcgtgtacaagatgtgctgatagatggtgaagaccaacggaatgcctactggcaactctatgtggatgaacaaggcacgattcacctatcttgggtgtggcgcgaaacgtggcacgtggagacaaatcatgatctttgttatgcccgttcttacgataatggtgtgacctggtacaaagcaaatggcaagaaatacgatttacctatccggtataataatgcggaatatgcctgccgcatcccgcaaaactcagaactgatcaatcagaccagtatgagtgccgatgcaagcggtaacccgtacattgccacgtattggcgtgatcctgacagcgaagtaccgcaataccgtattgtgtggcatgacggacagatgtggcacaatcgccaggtttcgaaccgccatactcccttttctctgaaagggggcggtacgaagatgattcctatcgcccgcccgcgtatcgtagtggatggtggcgagatattttatattttccgtgatgaggaacggggaagccgggtatcgctggcgcacgctgcggctgtaggagtaggtaagtggacgtttaccgatctgaccaacttcccggtagatgcttgggaaccgtctcacgatacggaattgtggaagcaaaaacgtcgtcttcatctctttgtgcagcacaccaaacaaggtgatggagaacgtagggtagagtttgcccctcaaccggtatatgtgctggaagttgtaaagcctaagggcgattgaaagccttacataagatgattctgttttcaacgtgatgaaactctattttcacaaaggagaaacaatcgtttcagtacgatgaaacattggttccgccatgttggaaatattgtttcaatagagagaaacagaatgaaacattaaacgctcagacaattagtatagtaaatagataaagaatagcaagagtatgaataagtatttagtaaacatcctgattggggctttttgctggagtggaatgtccgcttgtgcatcccccaaggatgaggccaaagagattgtggatattatttataaagtgaataactactggcaaactcagaatcctgagcacggacgctctttctgggacaatgcagcttaccatagtggtaacatggaagcgttctttctgaccggtgactccgatttcatgaactactccaaggcttgggctgaacataatcaatggaaaggtgctaagtcggataataaagctgaatggaaatacagctatggcgagagtgacgattatgtgctttttggtgattaccagatttgtttccagacgtatgccgatttatacaatatagaaccggatactcaaaaaatagctcgtgcccgcgaagtgatggaatatcagatgagtacggataagaatgattattggtggtgggctgacggtctttacatggtgatgcctgtgatgactaaactatataagattaccggcaatccgctttatctggagaaactgcatgagtactgggcatttgccgacagtctgatgtacgatccggaagatgcgctttattatcgtgacggaaaatatctctatcctaaacataaaagtgtgaatggtaagaaagatttttgggctcgtggagatggatgggttttagctgctttggctaaggtcctgaaagatttgcctgaaacggataaataccgtcaggaatatatagaccgttaccgcgcgatggcaaaagctgtggcagcctgtcagcagccggaaggatactggacacggagtttgcttgatccggaacatgcacccggaccggaaaccagtggcactgctttctttacttatggtctgctgtggggtatgaataatggctttttggataaggctacttatcagcctgtagtagaaaaagcctggaagtacctgacaactgttgctttgcagccggatggacgtatcggctatgtgcagcctatcggtgagaaggccattccgggacaagtggtagatgccaattcaacagctaactttggagtaggggctttcttactggcggcttgtgaaatggtacgattcctgaattgattattctattttttttccagaagatacaaaatggagtttgtcggcattggcaagctccattttggtttaataacctgggtaaaactttgttttttaatgaaatgacacaaaattattccctttttgcatgattcgtggtagtatatctcttattttatgtgtatttttgacacccaataactaacgtgaattttatgaggaacactatgagacattttgcagttgctattagtttaatgttggcaatgacattgccttctttttcccaacaacatcctatcgttgaaaaagattatgtggcttatttgtttacctactttacaggtaaccacatcagtgaagaagctgtatgttatgccgtaagtatggacggatatacatattgggcactgaatgacggcaagcccgttcttgattcaaaagtaatcagttcgaccggtggtgtgcgcgacccgcatatcctgagaagccaggacggtcataccttttatatggtggtgacagatatggtatctgacaatggttgggattcgaaccgtgcaatggtgctgctgaagtctaatgaccttgtaaactggacgcattccatcatcaatatgcagaagcgttataaaggacaggaaaagctgaaacgtgtttgggcaccgcagacggtttttgatcctgaagccggaaaatatatggtgtactggtctatgcagtatgccggtggagccgatatcatctactatgcatacgccaatgatgactttacagatctgattggtgaaccgaagccactcttcattccggagaataagaaatcatgtatcgacggggatattgtctataaagatggcgttttccacctgttctataagacagagggacatggaaacggcattaaagtggcaaccacccgttcactgacttccggccaatgggaagaagaaccggactacaagcagcaaacaaaggacgctgtagaaggagccggtacatttaaactgataaatcaggataagtatatattaatgtatgatgtatacatgaaaggcaaatatcagtttacggaaactaccgacctgaagaacttcaaagtgatagacagtgaagtgaagatgaatttccatccccgccacggaacgattattcctatcacgcgcgatgaattgatccgtatcacggataaatggggtaagcctgccgaattgggtgcaataccgaataaccctgtactgcccggatttcatgccgaccctgaaatcttatactcaaacaagacaaagaaatattatatctattccacaacagacggacaacccggctggggcggatggtacttcactgttttctcttcaaccgacctgaagaactggaactatgaaggcgttatgctggatttgaaatccgaacaggtaccttgggcgaatggaaatgcctgggcaccgtgtattgaagaaaaactcatcaagggagaatataagtacttcttttattatagcggcaatcctgccaaaggcggaggaaagcaaatcggcgtagcaatggccgactcacctaccggaccgtttaccgatctgggacagcccatcattacagactctcctgtaggacacggacagcagatagacgtggatgtctttaccgatcccgtatccggtaaaccctatctgtattggggtaatggctacatggccggcgccgaactgaataaagatatgatttccatcaagaagaaaacacttacggtaatgactcccgaaggaggaaccttgcaggattatgcattccgcgaagctccttatgtattttaccgtaacggactttattattttatgtggtcggtagatgacaccggttcacccaactatcatgtggcttacggtacatctaaatcgccgttgggacctattgaggtcgctaaagatccgattgtactgattcagaatccggagaaacaaatctacggtcctgcacacaatgcagtgttacaaattccgggtacggatgagtggtatatcgtttaccatcgtattaataagaacttcctgaaagatggtccgggcgtgcaccgcgaggtgtgcattgatcgcatggaattcaatgcggacggaaccattaagccggtagtgccaaccctttaattatatgactattaaaataccagagaaacattatttgatcatgagaaacaaactgaagggattagcttttttatgtatggcggtagccttgccgctgacagcacagaatgtaaccgtcagcggacctgacggtaaattacaactaacagtttcgtgcccggaagggcaggaagcatcgtattctctcacctataacggaaaacagatgttggaatcatctccgttgggtctggagaccaatgtgggagatttcgcgaaagcaatgaaactgaccgggcataaagaaaggaaaattgataccgtttacacgcaatcgcgtatcaaagcttccaagatacactatcaggccaatgaattggtatgtgcttttgccaatgcaaaagggcagaagatggacgtaattttccgtgtgagcaataatgacgttgctttccgttatacgttgccccgtcagggcgaacggggaagccttgttgtgaacagtgaagcgaccggcttccgttttcctgaacagactactaccttcatgtgtccgcaaagtgacgccatgataggctggaagcggacaaaaccgagttatgaagaagaatataaggcagatgccccgatggatgtccgttcacaatacggacacggatatactttcccctgcctgttccgcgtaggagataatggctgggtacttgtcagtgagacgggagtagacagccgctattgcggttcgcgcctgagcgatgtgacagaaggaaatctgtatacggtagctttcccgatggctgaagagaataatggtaacggaacagttgctccagccttcgctttaccgggttctaccccttggcgtacgattacggtaggtgaaacattgaaacctattgtagaaaccactgttatctgggatgtagtggaaccgttgtatgagacggaacatgattatcagatgggacgtggtacctggagctggatactttggcaggacggcagtatcaattatgatgaccaggtgcgttatgttgatctggctgctgcaatgggctatgaatatgtattgattgataactggtgggatacgaagatcggccataagcgtatggaatctctcatcgactatgcacaaggtaaaggagtggatgtattcttgtggtacagttcaagcggctactggaatgatatcgagcaagggcccgtcaacatgatggatgatccgattatccgcaagcgtgaaatgaaatggcttcaggagcagggtgtgaaaggtatcaaagtcgactttttcggtggagataaacaggaaaccatgcgtttgtacgaaggtattctgagtgatgctgacgatcatggtctgatggtaatcttccacggttgtacagtgcctcgcggatgggagcggatgtatcccaactatgtaggcagcgaagcggtactggcttccgagaatctgattttcaaccagcactactgtgacgaagaggctttcaatgcctgtctgcatccttttatccgtaattcggtaggctgtatggaatttggcggtactttcttgaacaagcgtttgaaccgggggaacaatggtggaactacccgtcgcacgacggatgtattccagttgtcaacggctgtgttgttccagaatcctattcagaattatgctttggcacccaataacctgacggatgccccgcaagtttgcctggactttatgaaacaagtgcctactacgtgggatgaaacacgttttattgatggttatcccggaaaatatgcagttgttgcacgtcgtcacggcaaacagtggtatgtagctgccgttaatggtacaaaagaagtactgaagttgaaactcgaattacctatgctggcaggagagactctctcattctataatgatgataaagaactgcaaccccagttgcaaactctgaaactgaaagctgacggcaaacttcaactgaccctccaaccgcaaggtggcgccgtactggttcaggactggaaaacgaatgagaaggaaatgggggcttatctgtttacctatttcaaagacgatacacatagtttatattttgcagtcagcgatgacggatatacatttacggatgtaaataacggtcagcccattatcgctggtgatacgattgccggacagaaaggtatccgtgacccgcatatctatcgtgcaccggatggcactttctacattgccatgaccgacctgcatatctttgctcagcagaaaggtctgcgcaacaccgagtgggagcgtgatggagccaaatatggctggggcaacaaccgtggttttgtcctgatgaaatcaaaagaccttgtaaactggacacaccatgtggttcgtattgacaagactttccccggatatgatgagatcggttgtgcctgggcacctgaactggtctacgatgaacatgcaggcagaataatgatctactttaccatgcgcatgggcaatgcacggaatatgctgtactatgcttatgtaaacgaagccttcgacggtctggaaacggaaccccgcttattgttccaatatcctgatgctaccaaatcagctatcgatgccgatatcacgaaagtaggtgataagtatcatatgttctacgtagctcacgacggaacaccgggtatcaaacaagctgtttcgaaatatatcaaccgtggatatacttatctgccggaatgggtagacccggaaccgaaagcctgcgaagctcctaacatgtggaagcgcattggcgaagacaaatgggtggtaatgtatgacatctatggtatcaatcctcataatttcggtttcagtgaaaccactgactttgtgaacttcaaagatctgggacacttcaacgagggtgtgatgaaggcgactaacttttcttcaccgaaacatggagcagtaatccacatcactaagaaagaggctgagaagctgagaaagtattggaaaaacaaataacccgataaataataccatgaacagattgattagatttttaagtgtatgtttacttctgtcttttgtcttccctgtgcaggcaaaggtggagggcgtgacgaatgaaccgaatcaggtgtacctcttttcctattcgaaccgtgacggacgcagcggcctgaagtttgcctggagtcccgacggagagaagtggtttagcgtggccgatggatttgcctatgtgaattccgacttcggtccgtggggacgggcaaagactatgttcaaaccccatttgatgcaaacccgtgccgatggcaaatggcattgcatctgggaagctacgaataccggtaaggcacttgcctatgtaacctctcccgacttgcagaagtgggaagcacagagttatttctctcccgaagaacgtagcaagtatgagcccaaagatgtgtaccccaccactcagaagaaggtattggtgaatggttccgaagaagaaggctgggtgcaggaagttccctatactaccgtgcagcagatcatccgctatgccgaacataagaaataccgccagtcactgaatgccgaacgtactgagcaagaccctgtacgttttgccaacctcaagcctgtagaggctactatccaggtgaatgcaggtcaggcgaaagaaatcagcaagcatctgattggtattttctttgaggatatcaactatggagctgacggcggcttgtatgctgaactaattcagaatcgcgactttgaatataccccgaccgaccgtggtaacgatcagaactggaatagtactcactcctggagtgttcagggcagtgatgctacattgagcattgcaacggagaatcctattcatcctaataatccccattatgccgtcttcgatgtgaatgcagctgaacaaactgcattggtgaatgctggtttcgatggcatagccttgaagaaaggcgagaaatatgatttctcactctttggtaaagtacttgagggtaaaggaggtaaggtacttgtgaacttggttgataaagatggaacaattataggacaaactgccgtaaatgtaacatctaaagattggaaacaacggaaagcagtcctgacagccacaagcgatgcggcggctgcatctctgtccattgttccccaggctgtcagcaagtatgcgctggatatgatttccctcttcccgcaaaagaccttcaaaggtcgtaagaacggacttcgtgccgatctggcacaaacgcttgccgacctgcatccccgtttcgtacgtttccccggtggttgtgtggctcatggcgatggaatagataatatttatgattggaaaggctctatcggtccgttggaagcccgcaagccgcttcgtaatctttggggataccatcagacacgcggtctgggataccacgaatacttcttgttctgtgaagatatgggtgcggagcccgtacctgtgcttgcagccggtgtaccttgtcagaactctggtacctgcgctcaccattccaaggatgaactgacttgcatggggcagcagggtggcgtgccgatggaagaaatggatcaatacatccaagatgttctcgacctgatagaatatgccaacggagatgcccgcaaaaccgtgtggggtaagaagcgtgcggaagccggacatccgaaaccgtttaatctgaagttcattggtatcggtaatgaggacatgattacacctgtcttcgtggaacgctttaagatgatattcgatgccgtaaaagcaaaacatcctgaagttaccgtgattggtactaccggtccgttctacgaaggtacggattatgaagtaggttgggaccttgctaccgaattgggtgtaccgatggtagacgagcactactatgtagaaccgggttggatgatccacaaccaagaatattacgatcattacgaccgtagcaaagcgaaagtttacttgggcgaatacgccgcccacttgccgggacgccccaataatgtggaaactgcgcttgccgaagctctctatctgactgccgtagaacgtaacggtgacgtggtagaaatgacttcctatgctccgttgttggctaaagatggtcatacacaatggaatccggacttgatctatttcaataatacggaagtgagacccacggtaggctactatactcaacagatgtatggtcagaacgctggtaccgaatacctatcttctacggtaaaactgaataatggttgggatgccgtgaagaagcgtgtcggagtatcagttgtgaaagacgttaataccggagattatatcgtgaagttagtgaatatgcttccggtggaagtttcttcccaggtgaagttggacggagctactttggtaaatccttcggctacaaaaactatattgacaggtgattcgaaagacagaggagctaaacccgcttcttctgatttcaaggtagaaggaaatgacttttcttactcaatgcctgcttattcgtttacagtgatacgtatccatcagaatattgaaaagaaaaaataagatataataatgagaaagttaactgccctttttgctttgtctcttgctttgagcatgcaggcacaacaacatgtgatgaccgtcgacgtttctaaaccgacggcaaagatacaacctgaaatgtatggcatctttttcgaagatatcaacttcggtgccgatggcggtctgtatgccgaactggtaaagaaccgttcgtttgaatttccacaacctttcgtgggttgggtacctttcggtaatgtaaccgttcaggatgcaaatccttgttttgatcgcaatcctcactatgtacgtgtagtgaacgacggccgcttgctgcgtgccggactggataatgaaggttaccgcggcatcggtgtgaagcaaggcgaagaataccgtttctccgtttatgcccgcacgccggatgcgaagccgatgaagctctccatcgagctcgtcaactccaatgcacagaatctgttgaagaaagaaatcgaagtcagcggcaatgactggcaaaagctgacgacggtgctgaaatctcctttcacagacgctcatgcccgcctgcgtatcgtcctcgaaacacagggtacggtggatatggatcacatctccctgttccctgtgaatacttggaaaggacgtgagaatggtctacgtgccgaccttgcacaagccctttatgaccttaaccccggcgtattccgtttccccggtggttgtatcatcgagggtaacagtcttgaaacccgttaccagtggaagaattccgtaggtcctgttgaaaaccgccctctgaatgaaaaccgctggaactacaccttcaagcataaagccttccctgactatttccagactttgggacttggttacttcgaatacttcctgttgagcgaagacctcggtgcagaacctcttccggtaatcagctgcgggctctcctgccagtacgaaagcaacgaagtggtcccgatggatgaactagacccgtatatacaggatgcactcgacctgattgaatttgccaacggccctgttacttccaagtggggaaaggtgcgtgccgatatgggacatcccgaacccttcaatctgaagatgatcggtattggtaatgaacagtgggacaaggtttatgtagaacggctcgaagctttcacaaaagccatccgtgcgaaataccctaatgtgaaggttgtaggtagctccggcccgagtgccaacggtgataaattcgattatctctggcctgaaatgaagcgtatcggtgtagacctggtggacgaacactactacatgaatcctgattggttctttggcaatgcgtcacgttatgacaattacgaccgtaaaggtccgaaggtttttgccggagaatatgcttcacacgatcattctacgaagaaggataacaacttcctcgccgccctttccgaagctgcctttatgacgggattggaacggaatgcggatgttgtccatctggctacttatgcgccgttgtttgctcacgtagacgcttggcagtggaatccggacttgatctggttcgataacctgcgcatgatgcgcacaccgaactattacgttcagcagatgtacggcatgaatgccggtaccgatgtgctcagcctgaagatggatggcaaagcagtagcggggcaggacagcctctatgcaacagctgcactgaatgcacctaccggagaaatcatcctgaaactggtgaatgcaagcagtaagcctgccgatgttcagatcgatttcaatggtttgaagaaacgtcagttggttgccggttcctgcacttacttacagaatgacaattggcgcactgtaaatacgctggaccaggaagcgattgttccccgtgtacgtccggtgcaggtagaagggcaatctctgaaactgaaacttgaaccacgttcgtttggagtgtatagattacagtagcttgtagctgattgaactctattcccccttttttgaactattattccccctaaaaaaagttcattcaccctatctttgtagcggtatgcagaaaatattcttcgtaccgctacaaacataataattttatatccatgaagaaacatcttattaccggactctttgcagccctggctctgactgcaaatgcacagtcctttaaagagtggcttgatccggaaatcaatgccgtgaaccgtgctcccatgcacactaattactttgcctatgaatcggcagatgccgccatgcaaggcaagaaagcccaatctactaattacatgactttgaacggtacctggaaattcttttgggtacgcaatgccgaccagcgtcctaccgacttctggaaagtaggtttcaatgacaaaggctggaataatctgcaagttcccgctgtgtgggaattgaacggttatggcgatcctatttatgtaaacaccggctatgcctggcgtaatcagttccagaacaaccctcctgaagttcctacagagaacaatcatgtaggttcttaccgtcgtgaaatcattgttcccgccgactggaaagggaaagacattatcgctcatttcggttctgtaacctccaatatgtatctctgggtaaacggccgttatgtaggctatagcgaagatagcaagctcgaagctgaattcgacctgactccttatttgaagcccggacaaacgaatctcatcgctttccaggtattccgctggtgtgatggaacctatctggaagaccaggacttcttccgttacagtggtgtgggacgtgattgttacctctatgcccgcaacaagaaacgtatccaggatatccgtatcactccggatctggacgaggcatacaaaaatggttccctgcgtgtgacgctcgacctgaaaggcagtggtaatgtgaacctggaattactcgatgctgccggcaaagcagtagctacggaaacagccaaaggtagcggcactattttgatgaatgtggaaaatccgcataaatggacagctgaaactccttacctctatacactgcgtgccactttgcaaggcagcaacgaagtaatccccgtaaaggtaggcttccgtaagatcgaattgaaaggtgaccagatattagtaaacggccaagctgttctcttcaaaggtgccgaccgtcatgaaattgatccggatggtggttatgtcgtatctcccgaacgcatgatccaggatatccaggtcatgaagaaattcaatatcaacgctgtgcgtacctgtcactatcctgatgataacctgtggtacgacctttgcgaccaatatggtctgtatgtagtggctgaggctaatatcgaatcacacggtatgggttatcgtgaaaagacactggctaaacgcaccgactatgccaaggctcacatggaacgtaaccagcgcaacgtacaacgcggtttcaaccatcccagtatcattttctggtcattgggtaacgaagccggtttcggacctaactttgaagcttgctaccgttggatcaagaatgaagattccagccgtgccgtacaatacgaacaggcacacggaaacgaatttactgacatcgactgtcccatgtatgctgattacaagcacatggaaaaatatgggcaacgtacagatgccaagaagcctcttattcagtgtgaatatgcccacgctatgggtaactcacagggtggtttcaaagaatattgggatttgatccgtaaataccccaacctgcaaggcggttttatctgggacttcgtagaccagtccgttcgttggaaaggtaaagacggtgtaactatctacgcttatggcggtgacttcaaccgttacgacggttccgataagaacttctgtgataatggtctgatcagtcccgaccgtgttcccaatccgcacatgtacgaagtgggttactattaccagaacatctggacaactcccgctgacctgaagaacggcgaagtgaacgtgtacaacgaaaacttcttccgtgacctttccgcctactatctggattggcaattgcttgctaacggtaaagtaattcgtaccggtcgtgtagaagacctcaacgtagctccgcagcagactgccaaagtgaaattgaacatcggcaaaacctgcgaatgcaaagaatggttgctgaatgtaacttatcgcctgaagaaccgcgaaggtttgctccctgccggatatgccgtagccaaagaccaacttgtactgaacccctacaaggctcctgccatggacctgaagaatgtggaagttgtgaatactcctaccgttgctcctcaaatccaggaaaacgactggcgttatctgattatcaacggtgataacttccgtctggaattcaataaacataccggttacctgaatcgctacaacgtagcaggcacggaattgatgaacgaagatgccgaactggcacctaacttttggcgtgcacctacggacaatgatttcggtgcaggtttgcaacagaaattcgctgcctggaagaacccgggtctgaagctgacttccttcaaatgggaaacagtagacaaccagactgtggtacgtgcagaatacgaaatgaagaacgtttctgccaaactggatcttacttatgtaatcaataacaagggtgctgtaaaagtgactcagaagatgactgccgatccggaggctaaagtttctcatatgttccgtttcggtatgcagatgcagatgcccaagacttttgaaactgtagaatactatggccgtggcccggtagagaactacagtgaccgcaatcattgtacagatctgggattgtatcgccagagtgtggatgaacaattctattcttatatccgtccgcaggaaacaggtacaaagaccgatatccgttggtggaagcaactgaatgatgccggacgcggtttgcagattgtagctgacgctccgttctctgcatcagccctgcactatactatcgagtctttggacgatggttgggagaaagcccagaaccactctcccgaagtgaaagaggctaatctgacaaatctctgcatcgacaaggctcagatgggcttaggatgtgtgaacagttggggcgcatggccgttgccacaatatcagttgccttatggtgactatgaatttacgttcattcttactccggtacaacacggtatagaaattgaataagtaaatctatctcaattttcctcctcccaggaggaggggaattgagatactctttattatactcattattattatagcatgaagaaaagagaactattactccttttattctccttgtgttctgtccttgtatctgcccagcagaaagtcccaaaccgtttccgtaccaacatccctctcgattccatccacctgagtgacccatgcatactggccgataagaaaacctccacttattacatgaccggtaccggcggcctcctctggaaaagcaaagaccttgcccgttgggaaggcccttattgtgtagcagaaactgatcctgactcctggatgggccctaaacccgaaatttgggcagccgaactgcacgaatacaatggaaaatattactatttcgccacttttacgaataacgccatcaagattgataccgtaaaaggaaacgtcatcccccgtcgtgccagtcacatcctggtcagtgataaaccggatggcccttataaacctatgaaagaccccacttacctgcctgagaatatgcctacccttgatggtacattctgggtggacaatgacggcaaaccttacatgatctattgtcacgaatggctgcaaaactggaacggtacgatggaaaagatcgaattaaagcccgatttaagcggttccatcggcaaaggaaagattcttttccgtgccagtgactctccctggagccgtgagaagatgggggacaaagttttgcccaaccgtgtaaccgacggaccatggcttttccgcacaggtacgggccggttaggtatgatatggacaagctgggtattccaggactatacacaaggcgttgcctattccgaaagcggaactctggatggaccttggatacaagagaaagaaccgatcactccacctaacttcggacatggaatgttgttccgtactttggatggtgagtggatgatgtcggttcatagtcataaagatgtgaacgggcgatatattcgtattccgcacctgtttaaagtcgatttgtcgggggataaattagttgtaaagagattacatgttcctatttgagaggataatcctcagataaaatatggtcaggtacaatcataacacaatcatgagtagtgttatgaaaagaatttcggaaatcatggaaatagcagatttattcttaattttgccatgaagaatctaagtgacctgaaaatatgaagacacataaaagaaaagaactgaaatccgcagaaattctggtttttgtgatacttttggtatgtcacgtttttcctttgcaagcaaatctaacagccgtacggaatttagataatggaagtggtctgcaagatccgaaagtaagttgcatcatgaaagactcaaaaggatttgtttggtttggtactttaaatacgatccaacgttttgatggcgtacaatttaagtgcttttattttccagaacaggtagagaaagtttttgtaattaaagagatagagaattctgattttttaataggaaccaataaaggactatggaaatatgaagccaaatccgaaatccttcttcgtatatttcccgagataaattttccggttcgttctttgtgttatataaatggcaaggtatatgtgggaacttctaatggcatatatattattgacaaagagcaaaaactggaacatcttcggattaccgatgaaatttctgcatacaatcagattataggtgcatatgctacagctaaagatatttggtttctctctcctgaagggattattgcttacacattatcaactggaggtatccgtgtttatggtaaggatgttaagttcacatctaaattatcatgtgtagttggtaacgacaaattgctttatatcggtaccgttactcatggagtagtgatatttgatatgctttcgggagagtattcatcttttcttccgtcggtaggtaataatcatgtttcagccctttctttgcgtgacggaatattatgttgtgggactttagggagtggcgtcttttttatttctctgcctgaacaacaaattattcattctatatctgcaatgcccaatgataatgatgaatatctgacttcagatatgatatcttgtctgttgctggataatatgaatgtgttgtggatagggagtaccagttatatgggagtagattatctgcaattccgtaataaacctttttacccttatagatttggaaatcaagaactacgcaacaaggtgtttaatagtttgtattttgttgatggtataaaacttttaggaactccgaatggattttattatatttgtgcatcaaagtcgcagattgaatatttcccttcttctctggaaaaaaacagtttcggatatacttccgctttcatcaaatataatgatgatattttaattggaacaaggggtggaggggcttataagttggacaggcacactttgcagttatctaagtttactgagactaacctagatgtgaattcctttgcaattgacaatcaaggatatttatggattacaacattgaatgggctctattgctataataagaatttaaagatagagaaagtatatacaaacttgaattctaccttggtcgatgataaggtgaattacttgtatatagatactaaggaaaggtgctgggtagctacagataaaggattacaattcttgaatactaaagagggtattttctcagacgaaagtttgccagccgaattacatgagttaccgccggtaacttatatgacagaagatcgtcaggggaactttttgttttgttttaataaaaaccgggtgtttatttgtgatagcacttttaatcatttacgctatgtgtgtactcccgaagatgctggttatctggggtattctatacgcgaggttttacaagataaagctaataactattggcttgtcggatcacgtggggttgtaaaaggagatagtgccctcaatcatttcaccttattttcttctactgaaggattgccggaaccttattcaaatgatggacaattatgcggtgatactatctggctggctactgcaaaaggtattgtttttgctgatattcattctgtacctcagtctgcccctactgttatctctgattttctggtaaatggtgtatctgtgttggctgaatatggagaactgatagaaaagagaggggttattgccttacctgaagaccagaatactctggatattacttttgccacgcttacttatgatgttccagacttgatgatatatgaatatcaattagagggatatgataaagagtggaaaatattgagaggtataaactcgatcaagttttctaacttatcccccggagagtatacctttaaagtgcgtaagcaaatggatgagaatagtatgcagagtttccaaattagaatccgatcttctttatctgcatggctgtggttaggatttgccttgggtggagttttaatagctggtgttatttatactattgaaaagaaacggcggggaaaaaagactattcaggtgaagccacttcataatgaagaagagaagtaccgctttaataaaaagataagtgacgaagaagcgcaggtcttaattagtaaactgaaaaattatatggaaaaggaacgggcttttttgaacccggaacttaaattagcccatgtagcggacgccgtaggtacttctactcaaacactttctcaaatttttaatgtaaaccttaaaacacgctattatgattttgtcaatgagtatcgtattgatgaatttaagcgtctggtcagttctaatgaaaaggatcgttatactttgaaagcattggctggattatgtggttttagttcatatactacttttttccgtgcttttaaagaaactaccggtattactcccaatgaatatatgcagcaagtagaaccaacgggcagataatggtaatacacttcctttttccctttttcagtggttacttttattgcatacgattgtttgcaatcgtgttgtgtaatttgcaaagttctgaaaattaatgatttaatttgaataatgtttcatacgaatgaacggaatataatagcctgtatttcgtatgcttttgtgtcttttcatgcttaattttgttgtcggtaactgatataagccggcatatcagtacttcttttaggtacaatttaaattaatatttatgaaacgacacagtcaaatgttatgtttattcaggaggctttggatagcttgtctgatgctatgtattaccactttttgtgtgcatgcgcagaatgcaataacgggtacggtaaaggatgtagctggtgaaccgattatcggtgcaaatatattggtaaaaggcaccactaataatggtacgattactgatatcgatggtaatttctctttgggagtaccggttggaggagtcttggaagtttctttcatcggttatgtaaagcaagaggtttcagtcggtggaaataagcatataaatattgtattgatagaagatgctacaacacttgatgatgtggtagtaataggttatggtacgaccaagaaaagtgatctgacagcttccgtggcttctgtgaaaggagatgttattgcagcttcggcatctaccagcattaccgatgctttgcaaggtaaggtgccgggtatggatattcaggcatcgcgttatgaaggtgatgaccgtggtattcgcatacgtggttcacgttcactgaatgccagtaatactccgttggtaattgtggatggagtacctgcttcactggacgtggtgaacatgaatgaagtggcatctatcgaggtcttaaaagatgcatccagtgcggctatttatggttcccgtggtgctaacggtgtaattattattacgaccaagcgtggaaagacgggtaagacaactgtcagctatgatgctttctatggaatcagcaagccacattttatggatatgatgcaaggagagaaattcgtgcaaatgcgtagggactcatataaaattgccaataacttatggggacaggaagtgagtgacgaaaaaatcttctcgaacgaagaacttcagatgattcatgatggagaatattatgactggcaggatttggtatttcgcgatggtgctacacaaaagcataacctgtctgtatcttcaggcaacgaaaaaacaaaattcagtttgagttttgcttacgaaaaggacaagggttacaatcagaacagtgaagcaaagaagttttatttcacctctaccgttgaccataaacttacttcatggctcgatctgggtgcaacgatgcggttgcgtaagcgcaacagtagtggcttcgctacttatggacaggcattattttatggaacacctttatcaaaaccttatgacgagaatggagatctgatcatgtatcctaatccgcaggaatccagtgtaagtattcttgcagattatgtggacggacagtatgccaatgatacggagaatacaagcatgaatatggttttctctgcaaatgtccatccgttacgcaatctgtccttgcatagtaatttcggatatacatatagtgatacgaaaaaaggattcttttatgggagtgaatcttttcaggcaaatggtgggttgaaccgctcaggtaaaagcggtcagaattcatatacggtgacttggaataatacgctaacctatgataatgcctttaatgagcatcatatcactttggatgccataactgaaatacagaattatcaatatgatgaaatgtcggctgagggcaggaatttggatgtggagcagttgctttatcacaatttgggtactaatactgaaaatcagaagataggcagcggttacagtaattgggcattagcttcatttatgggacgtgtgcgttacgattatcagggaaagtatttggctaatatctcagttcgttctgatggatcgtctcgtttggctaaaggcaaccaatgggctacattcttctcaggaggtctggcgtggagaatttcagaagaaccgttcatgaaagacattagctggatttctaacctgaagttacgttatgcctatggaacagtaggtaatcaagccattgatccttattctaccttggctggcttgggaagttatggttatcagttcggagaaggaggaaaaggcatttatgcttatcgccccgataaattggtaaacaagaaattgggttgggaaatcactaataccaataatgtaggtttggacttcggattgttcaacaaccggatttccggttatattgagttttacgatacccgtaccaaagatctactgatgcagcgtagtattcctttgaccaccggcttttcccgtatttggcaaaatattggtaaaacacagaacaaaggtattgagctttctttgaatggcatattggtggacacaaaagatatccagtgggatatgaacctaaatatgtctgtcaatgagaataaaatcataagcttgacgaatgatcaggatgacatctcaaacaaatggttcatcggtaagcccattaatgtaatttatgattatgaaaaagcaggtatctggcaaaccaatgaggcagaagaagcagctaaatatggttgtaagccgggagacgtgaaaatcagagatctgaagcaagatggacagattacagctgatgataagaagatcttgggctctactgatccgaagtatattgtttcattaggcagttcgttcaagtggaagaatttagatttctccttcaatctttcaagcaggtgggattatgtgttctatgatgatgcgtatggatggcacgtgatcctgactggtaccagatgggtgcccgatgtaaactactggacgccggataatccttcaaacgactatccgagagccgatgcaacctgggccgatcaccgcgagttgtgtggttatatgaaaggtgactatattaaaatgcaggatatgacattggggtatgattttcattcattgctaaagcgatatatcccggtgagcaaagcacgtttttatgtacagttgcgtaatgctttctatctgtatagggcagctaaggaagatgtgattcctgaatctccctctatagaactgacagtaccgaagagtattaattttggtgtgaatctaactttttaaaatcagaacgatatgaaattcaattataaattatattcagtttgtctgtccttattaatgacattctgtggatgtgacaactttctggaagaaactccgaaaggatctattaatgatacgtatgcacagacagaaaaaggtgctgaggctgagttactttcattgtaccagattaatactgaacttctggaacagtggttcatggtaggagaactgggaaatgacctgatggcttatgggggtaatgtacgtgactattggaaagggctgattacttataccgatacatacatgattgataatggcagtaatgaaggtctttggaaatggttgtatgtggcactttccactatcaatacgagtattaattcaattaatgctgcagactttcattcagaaagcagacgaagtgaacttctttcagaagcccatgccctgcgtgctttctatttgcatcagatagttgaaatctatggacccgcagcatattatgccgagacacctattaccagtccggaagagatagaagggactcagccggggattgctactttttataagcgtattttagctgatttggagattgcagatcagagtttgaaatctccttctgaagtacggtcgtcaagcttcggacgaatggatcagggcattgccaaggctattcgtatgcgtgccctgatgtctttggcggcttatgacgaggcattgatcggtgaagttggaatgcaaagcaaaaggcactgttatgaagaagcggtgagcgtggctacagaattaaagaataactacgggtataaattagaaaatgatttcagccgtatcttttcaccggataatactgaaaatggtgagataatctggtccatacaatatggtaacacaacatttgatgctcagaacaattttatccaccgttattgggtctcacaggtaaatcgttcggtacggtcttattctaaaacaatcaatggcttgcaggcgcatagcgtattctacggacgtgaatatcgtgcagtgatgcctacctattattttatcaatgtattcaataaatatgataaacgtcgggatgcgactttcatatcaggctattgccgtacggacgattggaacgaactacccgatttctcagacactttattgattcgtgcactcgatgttcttcctcaggaagttaaggcggcttatgagagtaggggaattatctgtgatgatatagccgatatctatgatactcagacgggagcagtcttgaataattccaatgtacgcagttgtgccaataatgtgataaaatggttggataccagtcgctcaactgcaaaacaggaatatgcttataaggatgctatactgattcggttgggagaagtttatattacgctggcggaagcttatattcgtttgggcagagaggatgaagctgcacaagtaataacggagcttcgccaacgggctttgatacctggtcatgaagaggcattgactgtgaatccggaagatatagatataccatttattctggatgaaggtgcccgtgaactgggaggagaactttttagatggcagatgctgaagcgtgcattggataaagatgccttttgccaatggattaaggaaaagaatcccgacacgaatccggataatggcgcaaacggtataggaattaaaccctatcacattaatcgtccggtgcctttgtctaccattaatagttataaagttctgaatatagagttcaggcaaaatgaaggttatgcacaataatataaaaaaacaaaacaatatgaagaaaattttattacttgcaatttcgattctaataggtgtgtctatcaaagctcaaaatccgccgattactccggcgtgggcctttgaacatatagcatgggaagatagcattaatacaacagaaggcgctaaagctttggttgaggggtatttgcaacgtgaaattccggtaggggctgttataattgatagcccttggagtacgacttataatgattttaattgggacacgcaacgctattcagacccgaaggagatgattcattattttaaaagtaaagatgtgaaggtacttctctggcttacgggagcggttaatataaagtgtaaggatacccgttttcagaaaagcgatacgtacgacgaagtcgtttccaagggatatggcataaataagagtgagccacatatctggtggaaaggagaaggcgtacatattgattttaccaataaggaggcggtggactggtggtataagcagctggataaagtttttatcgacggagtttacggttggaaggttgaccagggagaattctggtttggcgatattctcgacacttctatcgggcagatgagtaatgaactgttccgtccttattattatgatgcgatgtatgattatacggtgaagaaaaatccgcaaggcatcattatcgctcgtccttattctcatcagggaggttatgctgcgagtgtagaaaagatgaatatgggttggtgtggagacttctccggtgactggaaaggtttgaaactgcaaattcagaatatttatcagtctgcaaaacgtggttatggttcaccggggtgtgaggttgcaggctttttcatgaagcgttccaataaagagcagtttgtgaggtatgcacaatttggttgtatgactgcttgtatgattaatggtggtgaaaatggtgctttcagcaatcatctgccttggtggcatggaaaagatgtggaagatatctatcgttattgtgtcgtattacacaatgagctgattccttatcttttctcaactgttgtggatgcacatttgtatggtggttctttgataaagaatgcttcttatgaagaagaaagtcatcaggtaggagattatttgtttaccaaggctattacgtcagatgataaccatgcatcgtttcatcttccttccgaaggagaatggattaatttctatgatgggaagaaatatgctccgggcagtctgattgaggaagcatatccattagagcgctttcccttgtttgtaaaagcaggggctattctgccactgaatgtaaccaatggactaaccggactgggagatgcttcaatggcagggcgtagaactgttatgatttatccgaatggggtcactacccgtctgttacatctaccatgcggagatggcattgagtatgaagattgtttggtgacttacgatgaacagaaaggcaaactgcaagtccacagtatcacatcacagaaatatactcttattttaaagaatatgccatctgtgaagaaggtgaagaattctgtttcatggaagtatgatgctgcaaaacaagaactgcgtattgacgcagagggaaagaaactaaatatagaagttttcttgtaactagtgggtatagactactttgatgcatggaaaaagtgtattttgactgatttatcaccttttatgaaacaattgtgctactactgaatagaaatttcaccctatctttgcaacatcgacaataggttatagattaacataagattggtattaataaacaaagggtagttttttaagtcacagttttcagtaggtagtatttatagagagcggacattctttcaagtagagaggatgtccgtttcatttttcttctctatagtagatttatcattcccggttgattgaaaatacagcatatcaagaagacaatttactctttcgtacgtatggtttgtttgatatattccgatggtgccattccatattcctccctgaagcaggagcggaaatatccaaggtcattgaagccgcttgcataggctgcttctgaaatattatgcccttcttccatcagtaaccgcaaactgtttttcaatctgattttccggatgagttcattgcctgacattccggtcaggctcttgatcttccggtagagtgtggaatgactcatgttcattttctccatcatgaaggacatgtccatcttttccatgtctatattctcctctacgatggtggtgaatttagtcaggaattcttcatccagcttatttagtttgatggtttcttcctgttgttccggtttcaactctttggtgcggttggctactataagtgctagctttttgcgggattccagcaggttgtgtacacggctgttcaacagtttggcactaaagggtttggtcagataggagtctgcaccactttcgtatccttcttctttatcctggatggaatctttggctgtgagcaggatgacggggatatggctggtgcgtatatcttccttcaccagcttgcagagttcgatgccgtccatttccggcatcatgatgtcgctgatgatgatgtccggaatatatttctgcgcttgctctaagccctccttaccgttcgttgctgtcaaaatgcggtagttgctgctgaaagaagtggcaatatattcgcgtatatcgtcattatcttccactaccagtactacagggcgggtatcagcctcttctttttcttcttccaccgtttccacgatttctgccttttcctgtgcgagcgtttccttttcctctctgtgtagtgcattcgggtacgtgttttcagtcagaagacggaaggtgaaagtagttcctttacctatttcacttttcacttggagtgttccttcgtgcaggtcggcaagcgactttactaaagcaagtcctatgcccgtaccggatgcctgatgtttcccctttgcctgatagtaacgatcgaagatatgaggaagtgcctcagcatctatgccatatccggtatcgcttacgatgatttccgtatactgatttcctccatcatcggctgaacgcaggatcaggttgatttctccctctgaggtatattttatcgcattactcagcagattgttcaatatggtggaaatgacatcggtatcgaaataaatctttgcgtcttttactgcaatattgatgcggaacttcactttctcattcctgttcagctctttatagcgcaatcctgtttctgtcaccaggctactcagattccctttcgctacggtcagtttccggttttgcgtttctgtcttgcggaattccagtatctgattgataaggttcaacaatcgtagtgcactgctgtgaatgactttaatcttattaccgtagaaagccggtattttcggatcattaatcaggtcctccaacggaccgagtatcaatgtcagcggtgtgcgtagctcatgcgtgatattggtatagaagcgcaggcgttcgttattgagctcctgttcgttctggctcttcttcttctccagttcgagtgagctttccaacagcaacttgcgtttgtagaaacggaaccaactgtagatgcccagcaataccagcaggatatagaaaatctttgcataccacgtcaaccatagtggcggatggatgtatactttcaatgttgccacatgattgtcgtcccattcctgatttctcaaacgcgcctttaccttaaaggtatattcaccgggagaaatgttgcggaatgtaatctggctctcgcctaaagtattggtccatgtattctccaagccttctatcagatatgcatactctacctgtccactttgtgaataatccgatatggaaaatgtgatccggaaagaattttggtcgtacggtaaatcaatgtgcccgtttgtaattggaatcaatgcttcggcccggcgactttctatctggttattgaggtgcctgcattccatgatctgtacaggggctacttggcggtccgtagtcaggctctgcggattgaagtaacagacaccgttcagtgaggcgaagtagagagtaccgtccggtgtgcagcaggctgaaccttctatgaaatttcccatcggtatcccatcccggtaatcatagttttcaaattgctgtttttgcttgttccataaagaaatgccattgttggtactaatccagatatttccttgtaaatcttcctggatactgcgtacgaaagtatcttcaagcccgtggctgtaaccatagagttcaaactcttccggtttactggtatcttttatataaccaattccattgcgggttgctgcccacacaccaccttgcgagtccataaagagatcattgattccgttggttttgaacccattgctgtgatctaaccgcgtaaccactttataatctttgtcgaatattgttattctgccaccataagatcccatccataaccttccttgccggtcgcgtaaaatgccatatatcgatttatcggacagttcccggataatatcttcctctttccgtatgattccgtctttataggtgtatatgccgtattcggcacctatccacatggttccgtcgttgtctttgaaaaaggaaagaatgtctatgttgctcatgtcgagctttatacgttctattcgattgcttcttgtatcgagtttcagcaggccgtcatcgtatattccaagcagaaaagtgccaggagtcatttcatggagggaaaatacttgtccgtaaggtctggataaatatttcgtgatgtcgaaacttttcagttgtttattgtctttaaatacaactgcctcattttctccacccagccatatttctccttcactgtcctgaaatagtccccaaaccggtttgtttttctgtttatctttgccttgggtggtgtagggaagtacatggaagataggttgggtatggctgataaagtctactccactgctataattacctatccatatattgccaaacttgtcttgcaacaggcttcgtatatttcctgatgaaagtccatgtttatccatcgttgcagtgatgttatagaactgtacgttttggggagatttgaaagtgatgttatgcaaatcgagtatactgattccgccgatgtcactggctatccataaggtgccgtcttccatttcctttatgtcatatatatggtcggctatcagtgaatgtggattattggactcatgtttgaagatggtaaattcatctgtctttgggttcagtaatccgagtccttgatttgtacccacccagatattctccagatggtctttatagattgtataaacgctgtttccgggcaggctattggggttctctggtatatgtgagaggttgcggattgttttgttttccaaatcaatgatactcaatccaccttgtgcgtgtcctatgtacagatgcctttctccgtcatcgaaagcgcaccagcttgacggttttagttcccctttgatccgatctgataataaggtgtatttctcatcctttttgttatagtgtactatctgtcctgtgtgggcaacaatccatattccgccatcagaagcaggagccaagtatgagacattgttgattgcaatatcttctgagggtatgcatcttctgatttgctctgtagagcaatcgagtatatacagtccactattacttcctatccatagttcatcttcttcttcatcgtagagtaacgcattcagcgcatcattccctaatttagaattggtacttttgtaagtagtaaacttaagtccgtcgaaccggttcagccccagtacggttgcaatccagatacatccccgtttatcttgcgcaatgtcctggacataattattcgatagcccatcttctatacttaggtgttgtaatatgtaaggctgcgccgtgccgcttgttgtaaaaagcagcaaaaacaatagaatcaatagggatgaatgtcgttgcataatcagtttggttatgaatttgtctttgcaacaaaaatacaataaattcgcgttacagctatcccaaacaggtgttttgcccaatctgtccttgctgtttgacgaatttacctttgtatatacaccttatgtgtgcctcgtccggaagttgtaataccactttccggattctctgcccatttccttaactctacagaggcggtagtgggtcgcagccctgttagctggacataattcctgaccgtcatataaggatgtccggtaagatattgctttgcccgttccaggcgttcttccggtgtgtacttctgcgatgaacggcggaatttctgttgcgaacgttccagatcacagttataattggtattgtgaatcaatgatttctctgctctgaagttgatgctgcctactacgatgcttctcgcatttcttcgggtgctatctgcttctccggtttcccgttctttgtctatgcgcagagccagtgagggaacaaaggttcctattccatccaactttaccgatttcccttgtcccatttggtaagccagttcatcggccagttcctgtagcagacctttgatgtcacctctggtaaatgaactcttttcggacagtatctttgtgatgtaatccgtacttgcttgtccggattgtacgaggcggggatagagtatgcgtttcccgtctttgttcggcaggttcatctcctgcatttcatattcagccataatatagatttatttagtagttatatgtttcctgtttgttccgtatagggaagaaacctgctctctattcgtacaaaacttattttctctttatacaaaacctgtcaaagttaataaaaaagtatatttatagtctgcgaatataaaaatgtaatttacgaattcatatttgtagattacgaatatataaatgaagctgcaatttatagctttttattcgatgccgcaaactttcctttgcattattaggaactttctgatgaagagaagagaactttttcattaacatgggacaacttgattgtatattgaccattttcacccttctcttctcccgatatctcactgcttgttccgaagtcaaacccgtacttttgtctgtctccttttggtatgggagtattgtaatttaataagtcttttatcatttaaaatcagtagaagtatcatgaaaacgaaccttttcgtaaacagaactacaatttgtatgaagtctgttattttattatgtatggcgctcttacttccttctgccattgcaggcaaggggaaaaactctcagaagaaagtaatttcttatgtagacacttcactcaacggttcacagaagtatgtgctgagagtggacgacaaacctttctatatgaccaatgtacaggtgcgtttcgacaaattgcgctaccgttggaattgggatatagccacctgcgaaagattaattaaagaaactgccgcactgggattcaataccctttccatccctattcactgggtggaagtggaacctgctaaagaccaattcaactggactactctggatctctacatgggactggcacagaaatataattttaaggtagaaatactttggttcgggcagaacagcggtggacatgtacaatggctgaagcccgaccaattgcgaactcccgattatgtgatgcactctccgaaagccggtgatttccagtctttctctacggcaggtagttctaaagaaactaccagtgaatttacgatccggcgtgatatctcagactataccttagacttgaatgataagaagctatgtgcccgtgaggcctatgttttaggaaaagtcatggagtatatcgcccgctgggatgcggagaatggagccagacataccttgatcggtgtgcaactaaacaatgaagtacgtagctttccgtcatccactattatagaatatatgagcgaattggggcgggctgtaaaagaatccccttactcggtatggacacggatgaactgtacgtatgtcgatctccactccatactttatacgaatgaacaaatgcgttcaacaaccggtacttatatagactttgtaggtatcgatacgtaccgccaccatttccagacggaagacagttttgcggaaagtacacgtactaatgtaccttatatgggaaagaattttcgtatgattatggaaataggggctcgtgtacccaatatagctcagttgcaccttgctgctttgtccggtaataatgcttttgattattatgaattgtgcggctcggacgacttgggaatttttgtacaggatgagaaagacggtttcgcacctcgtggtatctatctggaagatgtgaagttggttaataaaatgctgaatagtgtcatggtagatatagcggtgaatgccagcagatacggtctttttgtgcataactggaaaggtgattcgctgatgcctaccgtaggagtcgaaggtatctcctttactccgggatatattaactcacaggcggttagcatccttcgtagcggtagtgagatagtgctggctacttctaagggtggagttttctcctggcctgattctctgaatatcctatctgcaagtaagggatactttgacgctcataataattgggtggacgaaggtactgttgatttccagacggataagcggaaacacattgttacgttggatgcgggaatttgtcaaactgttcgtttggttcgtgctgcgcaaccgatgccatctgtggtttgtcctgcggagcacatggagtttggtgggggtgtggtgttggaagctgatgcggaaaattgcatcggtttcaccggagctggttatctgaactttccgttggcaggtggatatgctatctggaaagatgtggatggaaagaatggaggacagaaaactatcagattgcgttatgccaatgggaagtcgcaagtcgctactcccaacctgatagtgaatggagtgcagaaacgccttcgattgccttctaccggttcgtgggatacgtatcagtatgtggaagttgctgccgaacttaaacctggaacaggtaatgtgattcgtttggagtccagatgggatggcgccggacatgtggctgaacttcagcttatggaagaataaagttgtattgagaatagagagtaattaaaaaggtgttacctggcgacgggtaacacctttttaataggggggtaactctgagagaattatttattagtaatgtatctgtccagttccttcagtaaggtagtatctatactgtcgtaggtgatattttccgtgattatattctcaatattttccacccggtttacgctgtcggcaatgcaacccacatgtatgtttttgagctcgatgtcttttaccggtagttttttatctcctctcatttcataaatcatctttgcagattcgcaagtgatgttattcatgtggataccttcgatacgagtgatgcgttcttcataggtgggaaccagatctctccattgatacagaacatccgtatctatttcaaaaactctcagcgtgcctcccgtctttatgttctccatataaatgttctctacaaaggcaccccggcgatggttggtctttataaagaaaagccggtggacagagtttggagcagtacagtcgtgcatgtagatattacggataccgccggatatttcgctgccgactccaagtaatgtttgtccatcctgaatggtgcaattgcgtatcacgatattctcggtaggagtattcagacgccatgcatcgcggtttcttccggcttttataacaacggcatcatctccttgattgaatgtacaattctctatcaggaagttgcgggtcatttctaagtcgataccgtcactgttgtggccatgggctttcacattcaggttgcgggcaatgccaccatcgcacatatacatgtggatagtccagaaggggctttcgcgaatcatgaaactgtcgagcagtatattcttgcaacggttgaagtggataaggtgcggacgcagatggttttctccctgagccatttgacgttgttctaccggtacgtcggtagatgccattgtataaagttctttcaaggcattcatgtggggttgaggacgtttgaaccatactttccacaaatccatgtggggctttagcattccttctccggtgatggctatattttcacattcaaaggcatagacgagtggtgagtagttgtaacattccatcccttcccatgaggtcattactgccggcaggtaatcttccggattatccgtgaagcgaactactgcatctttttccaggtggaggtttacattgcttttgaaatgtatgggacctgtcagccattcaccggcaggaatgaccacacgccctccaccgactttattgcaagcttcgatggctttactgatagcttctgtgtttatatgtttccctccttcgatggcaccgtaatccgctatggagtaatctttctcaggaaagatacattctttgatcggttccatggggaaaggggcagccactttaatttcattgtaagatacctttggagagctacaggaaataaacaggagacatacaaaacttacaaggtataaatgatataccacatagtgctttttcataatagttatattttaaattagtaaatgatacttttaataattaaatatttgattgcaaagatagagatgtctggagtgtttaaatagagggagattgtgcatttaatgagggtaaattgggcatctttcaaattttcttaagattctcttgtatattcgtgtctagagaatcatgaaggttgaagtaggatattgggcaaatagggcaaagaagccggggaaatagttcagtgaacaatctcccctcctatttgacaagtctaccccttcctttttaatatatcactcttacatttgcatcgttatcttttcaaaaaagtaacgcagggattattaaccttatattcatattaaaacgaaaaacaatgaaatcagattcatttagaaacaatcggaaggcactggcagccttgctactttgtagtagtttcattaccgggtgtccgttggcagtgatggctgagggcaatgagactaatctggaagtggttcaacaacaaatcaaagtttcaggtgtggtgaaagatgcaatgggcgaacctgttatcggtgccagcattcaggagaaaggaacctcaaacggaattattactgatgttaatggtaatttctcgctttccgtaaatcagggtgccacgcttgttatctcttatattggttttaaaactcaggaaattccggttgtggcagggaaaatactggatgttaccctgaaagaagataccgagatgctggaagaagttgtagtagtaggtttcggtacgcagaagaaggtgaacttgaccggttccgtaggtattgctactgccaaagaaatagaatcgcgtccggtaacttctgcaactcaggctttgcagggtttagtaccgggcttgaagattaccaccagttccggacagttagaaaaggacatgaatatatctgttcgtggtacaggtactatcggttctggttccaatagctctccattgattttaattgatggtatggtgggcgatattaatactgtcaacccgcaggatatagagaatatttctgtattgaaagatgctgccgcttccagtatttatggttcgcgtgcaccgttcggtgtaattttggttactactaagagaggaaaggaaggtaaagtgtctgttaactataataatagcttccgtgtctccagtcctatcaatatgccgaagtcaatggactcttattcgtttgccgtcatgatgaactatgcagatgccaatcgtggtatcaaaggctcatattcggatgaaacgatgcagaagatgattgatttccagaatggaaagtttacgaatggagaagtcggattggatgctaaaagtgagactgcctggcaagaccgttggactcagggatatgctaatacagatatctgggatgccatgtataaagatcatgtgttttctcaggaacacaatatcagtgtcacaggtggtagcgaaaagatgtcttattacgcttcgttcaattatctggaccagggaggacttctcaacttcggaaaagaaaatttgcagcgtttcaatacgacagcaaaaattaatggaacattgacaaagtggttgaaattcaactattctacccgctttacccgcaatgatatttgtagaccaacgagtcttacggatagttatttcgatggtttgggacgtactaactggccaaacatgcctatttatgaccagaacggtcacctcaatcatgacaatcctcgtgcgctggcagaaggtggacaaagaactcaacagacggatcgtcattatcatcaggctgcctttatcatagaacctgtcaaaaactggattacaaatgtagaattcaattatagtattaaagaagagagtactaaagcggctacacttcctgcttacaattatgacccgaagggggataaaatagtaacgaacaaagattcaagtttaaaagaaaacgatcagaaagaaaattatctgaatctgaatgtttatagctcgtatactcatactttcgcagataaacataacttcaagttcatgggtggtttccaggcggaagagttcaaactgcattatttcgacgttaccaaatacggattgtatgtagaggatgaagacttctgggagttcgatctgacatctgggttgagcggtaaaggtgaagagaagacgacaggggtgaatggttattcaagagaatgggccacagccggtttctttggtcgtttaaattatgattttatgggccgctatctgttggaagttaatatgcgttatgatggtacttcccgcttccgccgcggcagtcgctggcaactatccccttctttctcggcaggttggaatattgcacaagagaagttcttcgctccggctaccagtattgttgatcagttgaagttacgtttctcttacggtcagttgggtaaccagaatacaagctcatattatcctacttatcgtgtgatgtctttaggtgctgcaaatggtgcttggatacagaatggcatgcaacctaatactgcttcggtgggtggcttgattagtgaggctctgacttgggaaaccgttcgcacatgggacattggtttggattggggattacttaataatcgtttgacaggttctgctgattattttgtccgctacaccaagaatatggtgggaccggctaaccagatgcctaatacattgggcattgaggttcctaatacaaacaattgtgatcttcagaccagaggttgggaagtttccctttcttggaaggaccgtttgaataatgggttgaattatggtgtaactgtgtcactttccgatcaggttacctatattgacagttatcccggtaacaagactggttctatcagcacatacatggctggcaaaaagacaggacttatttgggggtttgaaacagtaggcattgccaaaactcaggaagagatggataaccatattgcttcattgcctaaaggcggacaagacgccattggttcgcagtgggcagcaggtgacatcatgtataaggatctgaatggtgatggtaaaataagtaaaggtgcaagtacatgggatgatcatggtgatttaaagattttgggtgatagcaatcctcactacttttatggcattgacttgacagccaactataaaggatttgatttccgttgttttctgcaaggtgttttgaaacatgacttctggccgggcggctcatcttatttctggggtgttcgtggtggttattccaaatggtataccattggtttggaacagcataacaattatttccgggatcagccgataggattggcaggttatgagttaccggttaatctggattcttattatccacgccctatcacttcacctgattccggtggttcaagcttcggtgcaaagaatcagcagactcaaagccgctatatgcagaatgcaggatatatgcgtctgaagaatttacagttaggctattcgttaccgaagtctgtggtagagaaggtgggtatttccaattgtcgtgtttttgtatcgggtgagaacttgttaacgttcacctctttatcttccatattcgatcctgagacttgtgttggcggttggggtggtaatgcttaccctttgtcttcgacttggtcattcggtttaagtgtaaccttttaatttgatagcaaatcatgaaaacaagaaatatatttttagcattgatagctacggctttgagcggggtgatggtatcatgtgatgatttccttgatagagaacctacttcacaacttgcacctgagacattttttacggatgcctcacacttacaggcttatgcggataagtattattccagtgttctgcctggtaattccggtaactcctatggtatttatgcgaatgatcagggaacagataatcagattgcggcaaatgctcccagttatttctgtaccggagagtggaaagttcctaatgcttctggcgactggtctttcactactatctatcatttgaacttcttttttgccagtgttttgccacgatttggtgaagatttgaacggatcgggaaatacgattacgggtgaactgaagagtattcgccattatattggtgagatgtatacattacgtgctttggagtattttaaacgttatcaggcatttggtgattatcccattgttaccgagccattaacggataatatggaaatactgactgatgctgccaaacgttctccgcgtaatgaagttgcacgtttcattctctctgacttggataaggcagcgactctgatggatggaaaagatttccagactacacgtatcaatcgtgatgtggctttactactcaaatcgcgcgtggcattgttcgaggctacttggctgaaatatttcaaaggttcggcatttgttcccaacggtgaaggctggccggggaaaacgaaagaatataatgccaattatcagtatccgagtggaagcattgacaatgaaatcaactggtttttggaagaggctatgactgcttctaaagaggtggctgaaaagtataaatcgaacctgactaaaaatacgggtattgtgaagcaagatctggcaacaacagagaatccttactttgcgatgtttggccaggaagatttgtcgggtgtgaaagaggttttgatgtggcgacaatatgtgcaaggattgggaagcggacatgatgtagctttagctgcagatgaaggtaactggggtgtcggtgtaactcgtggctttgtacagaacttcctaatggcagatggtttgccggtttatgcacatggtacatatgcggacggtgatggttattatatgggtgataagacaattgctgatgtacgcaccaaccgtgatagtcgtttgactgtcttcctgaaagagccgggacagaagaatgtgttaatagagagtgtttcaggacttactaatatttggctggacgagccttatccgaaaattacggacggtgctgtgcagtatgcttatactaccggttatgcactgcgtaaaggtggagcttgggatagtaaatatctggttcagaacaagtgtttcctgggtatccctatctatcgtgcttctgaagccttattgaattatatggaagccagctatgaacgtaatcagactttagataatacagcccgtgaatattggcaacttcttcgtcgccgtgctttagttagtgataatattgatgctactattgctgctactgatttgaataaggaagctgagaatgattggggagtttattcggcagggaagattttgacagataaaactttgtataatattcgccgtgaacgtcgctgcgaatatatatcagaaggccttcgctggatggacttatgtcggtggagagcaatggatcagatgacggttacgccttatcttcccgaaggtatgcatctttggaatacacctatggaacgttggtatgatgactcaaaaggtaatactacacttgtctatggcactgacaaagcaaatgtgtcttcacccaacgatagcgaatatctgcttccatatcgtaaaactgctaaccagttagcttatgagggttttgtttggaaaatggctcattatcttgatccgattcgtattgatcagttccaaataacatctactgatggtaagaatattgaaacttctccgatttatcagaatccatattggcctacaactgcggatatggcagcagaaaagtaaatgacagacaagtaagattgtttttccatataatttaagagggagtttctatattccctcttatttatacattctttatgtaacagaagtagattggttggtaaagtagactgatgatgaaactctgtttgatttcaacttgtgtaatggcgtgaatagatattagtttttattttttaagaaattgataaggtatatgaaatatgtattattagtgtggctcctcattggaggaataggagaggggatatattgctctgcccaaaatgtggagaaggttattcgaaatggcatgccatggtttgatgatcatggcaatattgtcaatgcgcatggtgcttgcattgtagaagaaaaggggaggtattatctgtttggtgagtggaaatcagatgaaagcaatgcttttccgggattttcctgctactcttcggatgatttggttaactggaagttcgagcgggtagtcctgaccgtgcaaccggatggcatattagggcctaatcgtgtaggtgaacgtgtgaaagtaatgaaatgcccttctactggtgagtttgtaatgtttatgcatgctgatgatatgggatacaaagacccttatatcgggtatgccacctgtaaaaccattaatggcgaatatcagttgcagggaccgttactttatcagggaaagcctgttcagcgttgggatatgggaacttttcaagatacggatggcaaaggatatttgctgattcatcatggaccgatatatcggttgagtgatgattaccaatcaatagagatggaagttgcgcatgtgaaaggctcaggtgaatcacctgctatgttcaagaaagacggcatttattatatgctttattctaatctgaccagttgggagaagaatgataacttttatttcacggccccgaaaatagaagggccttggacaaagcaaggcttgttctgtccggaaggaactttgacttataattctcagagcactttcgtttttcccttgaagcgggggaatgatatcgtacctatgtttatgggagatagatggtcatatcctcatcaagcttcagccgctacatacgtttggatgccgatgcaagttaatgggacaaagttatctattcctgagtattggcagtgttgggaccttaataccttgaagccggtggatatacttcgtaaaggtaagcaggtatctatgaaaaacataaaacctgctgtgggctggactgaaaacagaggatgttttgtctcaaatgcaaaaggcagtgtattagctgtatctttcagagggactcatgtagcagttgtcgggaaatctgatagccatagcggatatgcccgggtgagtgtattgaatgcgaagaaggatacagtatattcttcgttggtggatttttatagcaaatattcagaaaaggcaatccgtattatgacaccggaaatggagaaaggtaattatacattgttggttgaagtaacaggtataaaacctgtgtggacggataaatcaaaaacaatctatggaagtgacaatacttttgtgactatagatgatatttattacttttgaaaaaaatacaatatatgaagataggtattttaggcttattgtttcttggggttacgcagatttgtagtgcacaattcagtctccgttctggtcaatcggtaacagtggcttgtgataatacggaaaagaaggtggtacaaactgctttacagttgtttgcacgtgattatgaaactgtattttctgctcctgctactattagtgttaaccatggcggaattattgtaggtacagttgataaaagtcctttaatagccgctaccggagtagatatatcagatttaaagagtaagaatcaggcttttctcatatcagtattgccgggtggaaggttgttggttgcaggaagtgattcacatggcactgcctatggtataatggaattgtcccgtttgataggagtatctccttgggaatggtgggcagacgtaacacctgagaagaaagaggcttttcacttagctgccgattataagatggtgcagtctccttcggtagaataccgtggtatctttattaatgatgaagattggggattgatgccttggagtagtttgaattatgagccgtggtataaacccggacgcataggcccacaaacaaatgaacgtatttttgaattgttgctccgtctgcgggctaatacatactggcctgccatgcacgaatgttcggttccatttttcctcactcccggaaatagggaagctgcagaaaagtttggtatttatataggtgggtctcattgtgaacctatggcttgtagtactgccggtgagtggagccgaagaggaaaaggtgattacgactatgtgaaaaatagtagttcggtatgtcatttttgggaagaacggcttaaggaagtttcggggcaggaaattttatatacggttggcatgcgtggtgtgcatgatggacagatgcaaggtgctaaaacagtggaagaacagaaagctgttttggaacgtgtgttgaaagatcaacgtgatttattacgaaaatatgtgaataaagatgttgaggctattccacaagtttttatcccttataaagaagtgctcgatatttatcgtgccggactggaagttcctgaggatgtgacactcatgtggtgtgatgataattatggctatataaagcattttccgacggaagtagagcgtactcgtaaaggaggaaatggagtttattaccatgtttcatattgggggcgtccacacgattacctttggttaggaacgtttagtccggctttgctatatcaacagatgaaagaggcttatgatcgtggcatacaaaaaatatggatattgaatgtaggagatatcaagccgatagagtatcagacagagctattcttggatatggcatggaatatcgatcaggttatcgaagaaggtgtgtctggtcatttatgtaattttctgaagcgtgagtttggagaagctataggtgaagacctattgccggttatgatggaacattatcgtttgtcctatatccgtaaaccggaatttatgggaaatacccgtgaagaagaataccatacgaatgcataccggattgtgaaagatatgccttggagtaggtcgtacatcaataagcgtcttgaagattaccaagtcatttcggacaaagtagaaaagttggcttcacgaattcaacaggatagacaggatgcttatttccaattgataaaatacccggtacaggctactgctgaaatgaataagaaaatgctttatgcacagtttgcccgtcatggggagatgaactggaataaaagtgatgctgcttatgatagtattgcttcgctgacccgcatatataatataggtatacgtaataatgctaagtggcaccgtatgatggatcatcagccgcgtagattgccagtatttgagccggtagacagatcatcggtcgaaacacctatgttagaggattccccgggtttatataaatggaatggagcagaatattcggcaggtgatgcagtgtcttgtgaggggcttggttatgaagaaaaggctgtcatgcttgaaaagaacaaagaattgtcttttgattttggcgaatgtcccggtgattctgtagaagttgaaatccggttattgccaaatcatcctatacatggaggacagttacgcttttctgtttcgatagataaaaagaatgctcagacagtttcttacgaaactcagggacgtagtgaggaatggaaagagaatgttttgcgcaatcaggctatcagacgagtggttcttccggttaaaaagaggaagaagcacaatttgactataaaagcacttgatgaaggagtagtgattgatcagatagaaatgtatcaattgaattagtaaatctatggaaacatctaatttaaaatcaagcagcatgagtataatgctgcttggtgttttttttctttctatattatactcttttaagctaatgaccaagattggacattaaatgtattatctgttggtcaataagggattatagaaaaaatgtacttctttatgtacgataatacatttaattgtacgtagctccatacgccgtgcctatgaacttacttatttttactgaaaatttcttagtatgaaaaatctgaaaataaaactactgtttgcactctgtgcgatattactcttttcagcctttataacggaaaagaaagacgttatcacgatctttatgataggcgattctaccatggctaacaaaagcctgaagaacggtaatctggaacgtggttgggggcagatgcttccctgttttctgacggaggatgtcgcagtggacaatcatgccatgaatggacggagttcattgagtttcatcaatgaagggcgttgggatgcggtgcttgccaaattgaaaaagggagattatgtgtttattcagttcggacataatgatgagaaagcttccgaaaaactgcataccgatccgggaactacatttgatgataacctacgtcgtttcgtaagagaaacccgcgaaaagggagcttatcctgtactgtttaattccattgtgcggagaaactttcctcctgaaggggtgacggagcctaaaggaagttatgaggtggaaggaaatgtgcttgtggatacgcatggggagtatctgaattctccccgtagggtagctgaagaaatggacgtgccttttgtcgatctgaataaactgacgcatgatctggtggtagatatgggcgtagaaaaatcaaaaagcctctttatgtgggtacctgcggggatttatgatttttgtccgaaagggaaaatagacaatacacatctgaatatttatggtggaaaggtagtggcaggcattgctatggaagctgttgctaagattgttccggcactgaaaccttatgtccggcactatgatccggaagtgtatgtggccgattataag

SEQ ID NO: 6456 - DNA, 13493 bp, Unknown
  gut microbiota DNA sequence
tacttacgatgacggtctagaagaacactatacgcttgttttcccggaaatggaaaaagtaggtttcaagggtactttctggatatggggaaaagggatagggaatgtggcggaacagcaaggtaagccacgtatgacttgggtacaaatgaaggaaatggcctgtaaagggcatgaaatatccagtcacagttggtcgcatgccaatctgaaaaatatgagtctgaaagaagtgcaagtggaagttgaccggaatgatagtattcttcaggcagaaataggtgaaagaccgctgactttctgttatccgtttaattcttataatgaagatgtgttgcggattgcttcaaaagatagaataggtacacgtacgaagcaatatgctataggtggtgaaaaatcaaaatcaacagttgagtcactggataaatgggtgaaggaacttatcattgcaggcgactggggagtcacgatgattcatggtatttcggtgggttatgatgcttttacttctccggatatattgtgggaacatttcaaacgggtgaaggcgcaggaagatgatatatgggtgggcactttccgtgaagtggctgcctacgttaaggaacggaataatatccaactggatgtgacgaagaaaaaatcccattggatggtcagcccacgtttggcattgaatcaggagttatttggcgaacctttgacaatggtggttgataagaaaggaaagagtggagtaaaagttttgcagaatgggaaagaactgtctgtccgggagcaggacgataaaatgatatttgattttaacccttatggaggaagcattaaaatcagtttttgaagaaatgtatagaatatagctttgaaaaataaattgaaatatatgaagaagggatttataggtttagtttttctttgggtgacacagatttgttgtgcacagtttagtctgcgctccgaccaaccgatcaagttggcttgtgataatgcggaagagaaggtagtgcaaaccgcattgaaactgttcatacgtgattatcaatcggtattttctgcatctgccgccgtagatgcccggcaagggaatatcatagtaggtacggttggaaaaagcccgttgctgaaagctgtgagtgcggacgtaagtgctttggcaggcaagaaacaggctttccttttgcaggttctgccggatggaaaattgctggtagcaggtagtgattcgcatggtacagcttatggtatcatggaattatcccgtctgataggtgtatctccctgggaatggtgggcggatgtaacaccggagaagaagacttcttttgtgctgtcggcagagtatcagacattgcaatctccttccgtggaatatcggggtatatttatcaatgacgaagactggggattgatgccttggagtagtcagacgtatgaatcgtcggatataaaaggacatatcggtccgaagacgaatgcacgtatctttgaattgttgctgcgtttacgtgccaatacctattggcctgcgatgcacgaatgtactttgcctttcttcctgacggaaggcaacaggaaagttgcggaagaatatggtatttttataggttcatcgcattgtgaaccgatggtgtgtagcgctgccggtgagtggcgccgtcgcggtcagggtgattatgactatgtgaataatagtgcgtctgtttataaattctgggaagatcgggtgaaagaggttgctcaacaaggtaatatctatactttgggtatgcgtggtgtgcacgacggacagatgcagggagccaaaaccgtagcagaacagaaagcggtattggagcgtgtgcttaaagaccagcgcggactcttgcagaagtatgtcaataaagatgttacagctattccgcaagcatttattccttataaagaggtgttggatatttataatgtcggcttacaggtgcctgatgatgtaacgttgatctggtgtgatgataattacgggtatatccgtcacttcccgacagcggaagagcgtgcccgcaaaggaggcaacggtatttattaccatgtatcttactggggccgtcctcacgattatctttggttgggaactttcagcccttatctgctccatcaacaaatgaagctggcttacgaccgtggcattcagaagatgtgggtgttgaatgtgggtgatatcaaacctgcggaatatcagatagagcttttcctggatatggcgtggaacatcgatgaagtgaacgaaataggagtcactgcccatctgaaatcctggttggggcgggaatttggaagtaattgtgccgaggaactgttgcctgccatggaagcacattaccagctatcctacattcgtaagcccgaatttatgggaaatacgcgtgaagaagagcgcgatccgaaatacaaggtgattaaagatctgccttggagcgaacagaccattagtgagcgtctgagatcttataccgtcttgtccgatgttgtcgagagaatggagagtaacattccggcggacaggcaggatgcttacttccagcttgtgaaatatccggtgcaggccgccgcacaaatgaaccggaaaattctgactgcccagcttgcccgtcactctaaggctgactggaaacaaagtgatgctgcttttgacagcattgtatccttgacgcagcagtataattcattgcagaatggcaaatggaaccgtatgatggattttcaaccccgtaagttgccggtattcaagcgtgtagagcatactgccgctaccgagcctatgatgacagaccggaaaatgctctgcaaatggaatgctatggaatgtacgtatggaaaacctgttccgtacgagggcttaggatatgaaagaaaagcggcgggtatccgtaaaggttcctctctgaccttcgcttttgatgattatggaaaagattctgttgaagttgagatcaggctattgccaagtcatccactggatgagaaacagcttcgtttcgctatctccgtagatgaggccgttccgcaaacggtatcttatgagacgaaaggacgcagtgaagaatggaaagagaatgtattgcgtaaccaggctattcggaaagtgactttaccgattaataaacaggcttctcataagttggttattacggctttggatgaaggagtggtgctggatcaggtgatactttattaagatctcaccacagagtagcacagagtcccatggagttcattcatttgattttaaatcaatagaactctgtgggactctgtgttactctgtggtgaatcagattagtatttgaagttttcccctttcacataaatcttgaaatccttgatgccacccggtacttcgctttccattcggggcaagcattggaaacctgtcaatgcatgactggcgcccagatcgattacaatcgtatgcggataaggactacctttctctgtgctccaataggtggattcctgaaggtcgaaagtcttgtcggcagagcggttgacgtgagccacgtcttcgctgtcggcatacttcacaatccaaggctcgcgggacagacggctaccatccttgtccaagaaatacatttcggcaatacaagccaggtcttttccatcctgtgagtttaatgcttcaatgcaaacatagcgtccggtaacaggtttgttgaatttaacttcctgccagccgttacccggcttgaaacttcccgtgaatacaggcttttcacctgacaagttcaggttttcgccttcattgcgatgtgtcaagggtttctgtacaagcagctggtcaaggagcggttcacttaaaccttcggacttagcttctttagggcctacgatatcgaaaactacgatttcattctcacctttcttcaaccagcatcccggtacataaagagtctgctgaggaccgatctcccagatacggcctagtgcataaccgttcacatataccagtcctttgccccatgtttcgaagttcaggaaagtatcgctcggtttcttcacctggaatttagcacggtaaacacccggaatacgttgcccgagacggtctgtcaatgactctatcggctggaacttcatgccctgatagaattcataggtatcttcaatgttgaaaacttcccagttcttcaggtcgcaaacgaaaggatatccgttgatgtccatagaaagttctacgtttttcgtgattcctttgaagtctttgatggcacgaccgaagttgatgcgacccatggcctctaccagaatatcaagtctggaacctttgacgcaggcggggagtaccaattgcttttcaccgtttcttctgtcgagtttgccgatgtatttcccgtctacgaatacctgtgcatagtcgtgcgcatcgttcactgtgagggtagcgggcgatttcaattcaggcagggtagtgcggtagaggatgcttccgaagccctggttgtactcttccatggtgcggatgttttcatccttctttgctgcgggcaggttctcgaacaatggtgccatttctgtgaatctgaaagcagggatgctgataggtttgatcagtgcaggtactttcgcctgtttctcaccatccatgtatttcgccatggcttctctcagcgcccaatacttaggagttgtctgaccggattcactgataggtgcatcataatcgtaagacgtcacatcgggagcaaagccgggagagttggcgcctgcccagtgtccccagttcgtacctccatgtgtcatatacaggctgaatgaaatgcctctcgataacatatcgtcgatacctttgatcatatcagcggcaggacgggtttcgtggttggcaccccatttgtcgaaccaaccgctccagaattcagaacacatcagcgggctgttgggacgaagttgtttcagtttggcaaattgctggtcgacgttggcacctgtaccgaagttcatggtccagatcagatcatcgagtccgttcagggtgaagttagaggcccagtcgcattggaacagggcgatgtcatttccaaagttggcacgtacgatgtctctgatttgggatacataacccttatcttctccgtaagatccatattcgttttccacctgtaccatgatgatgggaccgccattggcaatcgtcaggtttttcacttgcttggctacggcttcttcgaacagagctacacgttcaataaagtaaggatcggattcgcgcagacgtacatcctttttcttaagcagccaccatggcagaccacccatttcccactcggcacaaacatatggtccggggcggaggatgacatacatatcattttgctggcacagacggcagaattcagccaggtcgttttgctccgtaaagtcatatacgccgggttgcggttcgtgagagttccagaatacatagaggcagacggtattcatacccagtgctttgcacaacttgatgcgttggtcccaatatggtttcgggatgcgtgggtagtgcagttcggcggctttaaccacaaatggtttgccattcagtaggaaagttcctttgccggcttcaaaacgaccttggtcagcaaagctgtcgaagttccatttgtcacgccagggaatggtgattttatcaccttcgaaggagaatggaagccatacataacgtgagttttccaggtctttcttattccagcggtcgaacatggcaatgtacatgtctttcttgcccataactttctgcacgtaagtgctttgagcatagaatgtcttgtcggcatctgttccggtacaagggttgccgattgttttccattcacccataatggagtctgctactgccagttcagcctgattgggatcccaaccggtacagccggaagagagcatgtagtattttccgttacgcttgaagacggcgggagcttcgcggttttccttgacgaagttacgggtatagcgtccgctcggtctttgataatcgtcagtcaattcgctgatgtacagcgttgcattgttttctgacgaataaaagtggtaggcacggccatcatcgtctacgaatacggtttggtcgcggctcatggcaccgttggggcggaaactgcccagataggtgaattctccggtaggggagtcactgatggctactccggcgcatgccttgctgtagtcggcactttccacgtgtgcccacatcacgaatttcttggtttttgggttataaatcaccttcggacgttccagtaccttgctggtgtgcaggtcgtggccttggtcgtccttcactgcgggaagcacgatgccttcgaacttccagttcagaaggtctttggatgaatagcagctcacgccggttacatccgtgcggtaacactcccatgtagcccattcgggtaggatggttttaccttttttgtactcaccgtaccagtagtacgttccttcatggtagaggataccgccgccatgtgcattgatggggttaccgtcggtgtcgttccatacttcacccggcacgatggcattgttggtggttacttgtttttgggcttgcgctgtagcagctccaaacaaacaggcaacaattaatgtcatactccagaaaatgtttctcatgatttgaatggtttattgttagtttacgaattaatttctgttgcaaagataagaacgacttatcatttaatgttccacaaataattcaatataggtagacagatgtttcaatttaatacgatttataatttatatctttgtagtcagtaaacgaaattatagaaaacattaacatgaaacacttacaatggttattggcaactgcctgtatgcttgcggtttgtctgtctgtctctgctcaaagtggcaagaaagtaaaaagtatctcgcctgaaaaatgggtaaaatcgaaagtctggagtgaaggtttgaaggcgaagccccattcttctacgaatttagcggaattcaaagcgcagtacgaagcgaatccggaacaatggaaggcggcttttcgctggttggcgtcgcacgacctgactactatcgagaagggaaaacatccggtagaaggaacatcacttgtggtttctgttgaagatagtaagaatgaaccgttagagaagcggacatccgaatcacaccggaaacatatagatttgcagtatgtggtgaaaggaacggagcgttttgcattgctggatcatgagtcttcaaaggctaattgcgaatatagtgagaaaaaagatgttattcactatgattttaatccggaaaaaactacctttatcgactctgttcccggtgagtttttcttgttcttcccgtccgactggcatattgcaaagatagctacggataaggaagatcaggatataagggtgatcgtgattaagttggattatatgtgatacacgcgcgtacctatattataataatagcctcatcttatgaaaataagtctattgataaaagtaagggtgtagtcgtaagattgcgccctttcttgtgattaggaggagagatactttagctttgtcaggctcttgtttgtcccattttgtttcttcccactgaaacaagagtgccttgcctaagaaacaaaagtttcttccctttgaaataaaagtttcttgcctgagaaacaagagtgccttaactgagaaacaaaagtgacttgcctatgcctttcgagatgagtaggcaccgggtttatttactccttcgaaatgccgttgctttatcaaccagaaagtggaagaatctggcagatatactgtcgcctgctactgttaatgcttccgggtggaactgtactccccaaatgggctttccattgatattttcaatggcttcgggaatgctgtccgtggcccatgccgtaatccggaaaccgggtgctgcctgcttcaccgcctggtgatgatgcgtatttgtgagaagctccgtttgccccgtaatctgagctattgcggagccttgcaggagatgaatcgtatgtgtgggcacactactcggttctttttgattatgtcgtacggtagtgtccgggtattgtgccggtatgtcctgatagagtgtcccgccgaacgctacatttatcaattgctcacccctacagatacctaacatcggtacattgcgctgtgctgcaagacgaatcagggcgatgtcgtaaacatcgcgtagcgaatcaacctcccccagttgctcgataggttcttcattataataagaagggtgaatgtcagcccctcctattaatataattgcatccagccggctgacgatatccgccaaaaccgtactgtccgttgtgatagggatgagcatcggagtgccaccggcttgtatcacagattctgtgtaagtcattcgggcagtcgaataatcattggggtgggagcaggatatgccgatcaatggccgttgcctgtgcgaggcaccattggattggcatccgctgaacaatagaagaatcaacagcgtggtggcggatagcagtgctttcattgtaagtttaaagattagtgatttatgctgtaaagttaagaaaatctttctgttagtcgtgatgtgttacataacatagtttagtaacactatcgatttattgcttttcttttgataaattcataatttgcgcctcacaaaaattaagggtatgcgaaggcatactgagttattcattttaaatcttatatatcatgaaagtatatcagacgaatgaaattaagaacattgccctgcttggcaatgatggctcgggtaaaaccactctcacagaagcgctgctctttgagagtggtattataaaacgccgcggcagaattactgccaagaatacagtcagcgattacttcccggtggagcaagaatatggctattctgtgttttccaccgttttccatgtggagtggaacggtaagaaacttaatattatagactgtccgggaagtgatgactttgttggagctgccatgacagcactcaatgttaccgatactgcaatattacttctgaatggccaatatggtcctgaagtgggtacccaaaatcatttccgatatacagaaaagttaggtaaaccggtgatcttcctggtgaatcagcttgaccatgagaagtgtgattatgatatggtactggagcagttgaggtctgcttatggttcgaaggtagttcccgtgcaatatccgttggctaccggaccgaacttcaattcgttgattgatgtacttttgatgaaaaaatattcgtggggccccgaaggtggtgcacccaccattgaagatgttcctgcagaggaattggaaaaggcaaccgaactgcataaagcgctggtagaagcagctgctgaacacgatgaaagcctgatggagaaattctttgaacaagaatctctaacggaagatgaaatgcgtgaaggtatccgtaagggactggcttcacgtggcatgttccctgtattctgtgtttgtgcaggtaaagatatgggtgtgcgtcgtttgatggaattcctgggtaatgtggttccgtttgtaaacgagatgccgcccgtacacaatactcgtggcgaggttgtggaaccgaatccgaatggacctacttctctctatttcttcaagaccgctgttgaacctcatatcggtgatgttcagtacttcaaggttatgagcggtaaagtgcacgaaggcgaagactttacgaatgctgaccgtggttcaaaagaacgtatcgcccagatttatgcctgtgcaggtgccaaccgtattaaggtagaagaaatggtggccggtgatatcggttgtactgtgaaattaaaagatgtgcatacaggtaatactctgaatggtaagggtactgaaaaccgtttcaactttgtcaaatatcccaattcaaaatattctcgtgctatcaaacccgtgaatgaggccgatacagaaaagatgatggccatattgaaccgtatgcgcgaggaagatccgacttgggtaatagagcaatccaaggaattgcgccagactattgttcacggacagggtgaattccacttgcgtacgttgaaatggcgtttggagaataatgaaaagttgcaaatcaaatatgaggaaccgagaattccgtatcgtgaaaccattacgaaggcggctcgtgcagactatcgccataagaaacaatcgggtggtgcaggccagtttggtgaggtgcatctgattgtagaaccttattacgaaggtatgccgctgcctgatacttataagtttggtgcgcaggagtttaaaatgaacgtgaaaggtaccgaagaaatcccattggaatggggcggtaaattggtatttattaatagtatcgtaggtggttctattgacgcgcgtttcatgccggctatcctgaaaggtatcatgtctcgtatggaacaaggtccgttgaccggttcgtatgctcgtgatgtacgtgttatcgtgtatgatggtaagatgcacccggtagactccaatgaaatttccttcatgttggctggccgtaatgcatttagtgaagcattcaagaatgcaggaccgaagatccttgaacctatctatgatgtggaagtatttgttccgtcggatagaatgggtgatgtgatgggtgacttgcagggacgccgtgccatgattatgggtatgagtagtgaagccggttatgaaaagctgagtgctaaagtacctttgaaggaaatggcatcttactccacagccttgagttctttgacaggaggacgtgcttcgttcatcatgaaatttgccagctatgaacttgttccaagtgatgtacaagataagttggttaaggagttcgaagctaagcaagctgaagaataaaagacttcacttcgtctgtttttataatttgttaaagccgttactccctcagaacgaggggtaatggcttttttattaacactgattaagaacatgcgtaaatgtgaacgggaatgattaattttttattaaatttgcaaaccaaacacacgctgatttgttataatgctcgtaatgcaacttaaaaaactcttttcggttaatttacgagaacttgcggttaaatcaggttaataggttaggagtgttaattagggagtgttaattttgtgactatgaagaagtcaacaatatggatattaggcatcgttatggggttatctttcctcagcctcttgtatctgcaaatcagctacatagagaagatggtaaagatgcgtaacgagcaatttgatgaatctgtgaagcgtggactgatggctgcttctaaagaagtggagtccgctgaggttgcccgttggttgcgggaagacatctctgaggcagaaaagagagcgtgggaattgactgagcaaggacaggcattggtgcagacacaacggtttacggtgacgtcgccggatggttccaagtattcggccatggaacttcagacgatcacaaataagccgtcagagctgccgagagcgatgatttcgcgtaagcatggtgctaagacgattcctaaaacagctcgtacacaaattgatttaatgaaagaacgttatgtgtaccagcgtggcttgttggatgaagttgccttgcagatgttatatacggcaagtagcaagccgattgaggaacgcatcaactttaagaacctggatcagtacttaaagtcgggcttggtagataacggcattgatctgggatatcactttaaggtgattgaccgggatggacgggaagtataccgttgttcggactatgtcgatgaaggtagcgagtattcttactcccagcctttgttcctgaatgatccacctgcccgtatgagtatcgtaaagatacattttccgggcaaaagagattatattttcgactcgatcaactttatgataccgtcgatgatattcacctttgtgttgctgattacgtttatcttcacgatttatatcgtgttccgccaaaagaaactgacggagatgaagaatgactttatcaacaatatgacgcatgagtttaaaacgccgatatcgaccatttcgctggcggcgcagatgttgaaagaccctgcagtgggtaagtcgcctgccatgttccagcatatatcgacggtcatcaatgatgagacgaaacggttgaggttccaggtggagaaggtactccagatgtcgatgttcgacaaacagaaagctaccttaaaaatgaaggaactggatgccaatgagttgattaccggtgttatcaatacattcaccctgaaggtagaacgttataacggtaatatagagtcggaactgaacgcaacagacccgaatatctttgcagatgaaatgcatcttacgaatgtgattttcaatctgatggataatgcggtgaagtataagagaccggatgccgatttggaattgaaagtgaagacctggaatgaaccgggcaagctgatgatttctattcaggataacggaataggtattaagaaagaaaatttgaaaaagatatttgaaaagttctaccgcgtgcatacaggtaatctgcacgatgtgaaaggctttggattgggattgtcttatgtgaagaagattattacagaccataagggaactatccgggcagagagtgaactaaacgttggaactaaatttattattgcattacctttacttaaaaattaatgatatggacgagaaactgcgtattttattgtgcgaagatgatgaaaatcttggcatgcttttaagagaatatttacaggcaaaaggttattctgcggagttatatcccgacggtgaagctggatacaaagcttttctgaagaataaatatgacttgtgtgtgtttgacgtgatgatgccgaagaaagatggtttcactttggctcaggaagtgcgtgctgcaaatgccgaaattcctatcatcttcctgactgcaaagacactgaaggaagatattctggaaggctttaaaatcggtgcggatgattacatcaccaagccgttcagcatggaagagttgacattcagaattgaagcaattctgagacgtgtacgtggaaagaagaacaaagagagcaatatctacaagataggtatgttcactttcgatacacagaaacagattttgtcaacgcctgaaaagcagacgaagctgacaacgaaagagtctgaactcttgggtttgctctgtgctcatgctaacgaaatcctgcaacgtgactttgctctgaagaccatctggattgatgataactacttcaatgcacgtagcatggatgtgtatatcacgaagttgcgtaagcatctgaaagaagatccttccattgaaatcatcaacatccacggaaagggatataagttgattacaccggaaccggagtcttgatagactccttgcataaaaacaaaaaggggttgtgtcaaaacgttggcacaacctttttctataatttatagtcctgttatcttttctttt

SEQ ID NO: 6457 - DNA, 614 bp, Unknown
  gut microbiota DNA sequence
tcaacagccaatggtttgagatattcgacaactatttgccccatgacgaagtacaaatagaagagtttcataatttgggaaataaagagtatcaggttgtattcgatggttttcacaacatatctcccaatttcgtatataacgtcagctatgccaacggacttaccattacaacgaattaaattttaccatcatgaaacataacaacttacttacatcattcactctattatctcttttgtgtatcttctgcacctcatgcaacgatatggaaatggcaaaaaaagcgtgcggcacatgggaaagcatccgcatagtcgaagaagacggatgcaaagagaaaacctattatgatttcggttctgtgaaagggagtattcctggaggagacttaaaagaaacaacctacttcaccgaatgtggagaagttgaagacggacaagaatataatatgcaatgcaaaagtatcattgaaggtacatggaagatagaagtcggtgacatctatttcacttacgacctgtcgactctgaaagtcacttttgaggggattagtttcccgggcgcagatagattatccgaatctcttgcacaaagttttattaaaaactatg

SEQ ID NO: 6458 - DNA, 1130 bp, Unknown
  gut microbiota DNA sequence
ctccttatattttaccttgaaaagcttttctgaacctagtacagaattgcattaatttctgtgaataaaattagtacttccataaatgttcttcttcgtgcataatagttttatctaccatactaaaggatgaccattatgcgtaaaaagacgattgatactatccctgttctgacagacgaaataaaaaacattttaaacactttttccagaagccgaaccatgcccgccagtctcacaaaccgtgccagtattgccctgatggcaagtgaggggcttacaaaccaggaaatatccgcccggctgaacatgcactataacagtgtggggggctggcgcagccgcttccttgaagcacttccccatctccgggaagtccaggaatccgcaccagacaaactttctgacgaagtcaggaagattttttcggacaggccccgtccgggctgtccctgtgtttttacacaggagcagatcatgaagatcattgaccttgcctgtaaggcaccttccgacttcgggtatgaagtaagccagtggagcctgaacctgcttgtgaaggagatccgcagacaggggattgcacaagacatttctgcgaaatcggtaagccgttttttaaaaggaagccagattaaaaccccataaaatccgttattggctccattccccggaaaaaagcgagaacccggaaacctttgctgctaaagtaaatgagatatgctccctgtatcttggcagcacagaccttatggaagaaaatacctgcgttgtgtcaacagatgagatgacaggggtgcaggcgctggaacacaaatatcctcataaactgcccctgccgggacaggaggcaaaaatggaattcgaatatatccgccatggcactacaagcctgatcggtttcttcgaagtcgcaacaggaaggatattcccgccatatttaaatgagacaagaggcgaggccgatttctgtgaagcagtgagccgggtagtggaaactgcaccggagaaaaattgggtctttgtttgtgacggcctgaacacacataaatcggaaacccttgtcaaatatgtggcagaagcttgcggcattgaagaagatcttggacaaaaagggaagtccggtatcc

SEQ ID NO: 6459 - DNA, 357 bp, Unknown
  gut microbiota DNA sequence
atgtcaaatatgtggcagaagcttgcggcattgaagaagatcttggacaaaaagggaagtccggtatcctgaaaagcctgcagagcagggaagacttcctgcatgatccttcccaccggattcggtttgtatatacaccaaagcactgctcctggatgaaccagatcgaaatctggtttggcattattaaccgaaagctgttaaaacggaaaagctacacttccctagaggaaatgaaagaaagtatccggcggttcattgagcagtacaaccttactgcccatgcattccgttggacttatgcaggggttccgctaactatataattcacagttatttaagcaatactgtactagt

SEQ ID NO: 6460 - DNA, 4268 bp, Unknown
  gut microbiota DNA sequence
ctttccaatgcaagcggctctatagtttgctccgggtcatctcctctctcgtcatttgccgctatttgtacattgtaaatggtaaattgtacatgaatttatctctgtacacgtccgcttgcatctccacctgccaatgcttcaacttcttctaccgataccagattgaagtctccattgatagtatgcttcaaagcagaagcagctacggcaaattcaagagccgcaccctggttaggcttcgtcagcagaccgtggatgataccaccggaaaaagagtcaccaccacctacacggtcgacgatcggattgatatcgtaacgtttagattcgtagaattcttcaccgttataaatcattgccttccagccattatgacttgcagagaatgattcacgcaaagtagaaataacatatttgaatccgaattctttagccattgccttgaagatacccttatagccttcagcatcagtctttccaccttctacatcagcgtcgggtttgaagcccagacagagctctgcatcttcttcgttaccgatacaaacatcaacaaactgcatcaacggcttcatgatggattgtgctttttctttcgtccagagtttcttacggaagttgaggtcaaccgataccgtaacgccatgacgttttgcagcttcgcaagccaattttgtcagctcggcagccttatcggagatagcgggagtgataccggaccagtggaaccaatcggcaccttccatgattgcatcaaaatcgaagtcagctgcatctgcttcagcaatggcagaatgtgcacggtcatagattactttgctgggacgcatagaagcacctgtttcaagatagtagatacctacgcggtcgccaccacgggcaatgaaatctgtttttacaccatatttgcgcagtgcgttcacagctgattgaccgatttcgtgtttcggcaatttagtcacaaagtaagcgtcatgtccatagttggcacagctgacagctacatttgcttcaccaccaccatatactacgtcaaatgaatcagactgaacaaaacgggtatttcccggagtggacaatctcaacatgatctcgcctaatgtaacgactttctttcccataatcttattatttttttaatatgtgattaatttataactttcaatttgtcattttaaggtcaaaaaccaccttaacaacttgatactatggagagtaaactaaaataaggttcgttcttcatagccttcgtgtgcgggcacaaagatacaacaattttcgtaattacaaaaattgtcatatatttgtgtcgaaaatattaagattattattgtgtgcggacacaagaggaagtacaatttaccatttacaatgtacaattgggctatgcagatgaaagccgagacaggcaatgacctgcaaaaagcacagatgataaatggtaaatgcataaatgaaaacttgtgaaatgcgtaaatgataaaacgtaaaattgtaaattgtacatcgtaaattgtaaataatctgatggcagaaagaattagaatcaaggatatcgccaaaatggcggatgtatcggtgggaacagtagaccgggtgatacacggacgcagcggagtatcggaagccagccggaaacgggtggaggaaattctgaaacagctggattaccaacccaatatgtacgccagcgcactggcatcgaacaagaaatatacattctcctgcctgctgccgcaacatgagaaaggcgaatattggactgccgtagaagccggtatccaagacgcactggtagcgtattcggacttcaatatctccgtgaacctctcctattacgatccgttcgattatcattcattcggagatgttgcccggaatatcttggaacagaaaccggacgggattatgttcgcccctaccgtaccgcaatatacgaaaccgttcacagaggaactgaacaaacattctataccttatatatatatagactctaatctgaaagatcagcctgccctctcctttttcggacagaattcgcaccagagtggatattttgccgcacgaatgatgatgttgcttgcaggcggggaacgggaaatcgtaattttccgcaagataaacgaaggtattgtaggttctaaccagcaagagcgccgggaaatcggatttcgtgaatacatgctgaagcatcactccgattgccgcatctgggaactgaacctgcacgccaagcgagacagtgatgacgcacagatgctgaacgattttttcagaaaacatccgaacgtaaagaatggcatcactttcaattcgaaagtttacattgtcggagaatatttattgaagcaacaaaaaacagactttaaactgatgggatatgacttgctggaacgcaacgtgaaatgcctgatggagggcagtgtatcctttctcatcgcccaacagcctgaattgcagggattcgatggtatcaaagcattgtgtgactacctgattttcaaaaaggaagtaccaagagaaaactttatgccgatagacttgcttacgaaagagaatattgaattttattcaaataaataataaagtaattatggaaactaagtaccttaaaatcaaccctgcagataatgtagctgtcgctatcgtgacactgccggcaggagaaaagctcacggtggacgggacggaaatcactctgagtgaggaagtgcccgccggacataaatttgcattgaaagactttgcagaaggcgaaaacgtcattaaatatgggtaccctatcggtcatgcacgcacgactaagaaacagggggattggatgaatgagaataatatccagacaaatttggctggactgctggattatacatacaatccgacaagcgttacgctggatattccacacaaaaacctgacattcaaaggctatcgccgtaaaaatggcgaagtgggaattcgcaacgaggtgtggattataccgaccgtaggctgcgtgaatggtatcatcaaccaactggccgaaggtctgcgtcgggaaaccggcggcaaaggagtggatgcgattatggcatatccgcacaactatggctgctcgcaactgggagacgaccacgaaaacactaagaaaatcctgcgggacatggtattgcaccccaatgcaggtgcagtgctggtagtgggcttaggctgtgaaaacaatcagccggatgtgttccgtgagttcctgggagaatatgacgaagaccgtgtaaaattcatggtaacgcagaaagtaggcgatgagtacgaagaaggtatgaaactgttgcgggaactgtatgaaaaagccagcaaggacgaacgtgtggatgtacccctgagtgaattgcgagtaggcttaaaatgtggcggatcggatggtttctccggtatcacagccaatccgctgttgggtatgttctccgatttcctggtggcacaaggtggtacgagcgtattgacggaagttccggaaatgttcggtgcagagaccatattgatgaaccgttgccgcaacaaggaattatttgaagaaactgtgaaactgattaacgacttcaaggaatacttcctttcacatggcgaaccggttggtgaaaatccgtctccgggaaacaaggcgggcggtatctcaactttggaggacaaagctttgggatgcacccagaaatgtggcaaaagctacgtggaaggtgtattgccgtatggtgaacgtctgaaagtaaaaggattgaatttgttgtcagctccaggaaatgacctggtggcagcaacagcactggcttcctgcggttgccacatggtattgttcaccacaggacgtggcacaccattcggaacgtatgtgccgaccatgaagatttccaccaactccacactggcaaagaacaaaccgggatggattgatttcaatgcaggagttatcgtagaaaacgagccgatggaaaagacttgcgaacggtttatcgattacattatccaggtggcaagtggtgaattcgtgaacaacgagaagaaaggttacaaggaaatcgcaatcttcaaaacgggagtaactttgtaaattaacaattgacaattatagagatagagggcgggcaaaaactattttgctccgctctttgtttttttataattttgcagcgaataaatggcttatcctggtacagtaatgaattcaccacagattaacactgattctcacagagtttaatcaattaaaatcagagaaataaaattctgtg

SEQ ID NO: 6461 - DNA, 1567 bp, Unknown
  gut microbiota DNA sequence
gtaattccgtattacaatatatattaaaatgacaaatacagcgaataaacgaaaaggtggatggtgggcactgagcccgctggcggtatttttatgcctttacctggtgacttcattgattgtaaacgatttctataaagtacctattacggtagcattcctgttgtcatcttgctatgccatcgcactgacgcgcggattgagtctggaaaagcgggtgtatcaattctcggtaggagccagcaataagaatatcatattgatgatatggatattcatccttgccggagcttttgcacaaagcgccaaacagatgggagcaatcgacgctacagtaaacctgactctgagtattctgccggacaatttattactggcaggaattttcatcgctgcctgtttcatttcactttccatcggcaccagtgtgggaacaattgtagcactgacgcccgtagccatcggactggcggaaaaaaccggtatagatctgccatatatggttgccattgtagtgggcggttcatttttcggagataatctctcttttatttcggacacaacaattgcatccaccaaaacacaggattgtgtgatgagggataagttccgggtgaactttatgattgtggttccggcagcactggtcgtattatgtatctatatattccagggattatcaatatcagcccctgcacagacgcaagtgattgaatggataaaggttatcccctacctcatcgtattgggtacggcagtggcaggtgtaaatgtaatgttggttttactgctggggattctcagcacaggcatcataggcatcattacaagcggaacagacataagcacagctttcttcgactggttcggcgccatgggaacaggcatcacgggaatgggagaacttatcatcatcactttacttgcaggcggcatgcttgagaccattcggtataatggaggcatcgatttcataatctcccgcctgacacgtcacgtaaaaggcaagcgaggtgcagaactgagtatcgccgcactcgtcagcattgccaacctatgcaccgccaacaataccatcgccatcattaccaccggaccgatagccaaggacatcgcccaacgctttcatctggaccgccggaagacagccagtatcctggacacgttctcctgcctgatacaaggtatcattccttacggggcgcaactattgattgccgccggattagcgggaatttctcccatcagcattatcggtagcttgtattatccgtttacaatgggaatatgtgcattgctggcaatattagtgagatatccacggaaatattcgtaaaaaatctcccatatccaataaaaaatgaaaatatcgaaaaaaaatatggtaaaagatgatgcattattaaaatagaatgcgttactttgtacccgaacaataagaaagtttattcgatttgattatttcacgtatgtatttcctctacattgagtatttccatctctgacctaacaacttccaaaaactttgtttattgaattattaatttattattttatttagatttat

SEQ ID NO: 6462 - DNA, 13648 bp, Unknown
  gut microbiota DNA sequence
cgggcttgggaaagtctgggctttgcgcataaaaaaaggttgtgccagcattttgacacaacctcatacacaattttatccgatatggatagcccttttatgaattaaaagtcaccagctcctacaccattttcattaaaagcaatgatagaaaaataatattctgaatccctattgaaatagcgggcctcgtattgattgtcgtaaaccaccattgaatgggtaagtttttctttctgtgttccccaacgtaaaatgtatcctgttacaccttcttgagaatcccatacaaaacggtagatacgtttgtcactctcatcacgcgtagcctgaaaacctgttacggcaacgggcactttaccatcaccttgtccgaagatacgcaaatcaaataaggagaaagagccttccatatcttttgaattgcagattttcaggtattgcattttcgctggtgtgaccagagtatgtaatttgtgaggagcatcttgctgattcttttcttcatctaccagacgagtccatttatttccatctaccgatccttcaatataatattgatataccaccggtccatggggagcatggatattgaaattatgatctgcaaaattaacctgaatagccttcacatccataggctcgccaagatcaatttgtaaccattcacctttgttaccagtctgtgcagcccaccaggtctcgacttgctcatcattagccaattccggttcgtaaccttcaagagaagaagatgcagctactttcttcttatacgaaagtaggttccaccccatgttgatatcttctttttcgaagtctactttcctgtcgggaatacagaagggataatctgcaaaagtagtaagcgcatacataccgtatttatcagaaacaactaccgggaataatcccaaacgacgttcgaaccagtgacgaacagagatagtcatggaagctacatgccagtaatttccatatttatccttgaaggtatgtccatgtccggcaccaccaataaaaccaccgggtttgaaagagaaaggattatcttctacatactcaaaaggccctaacggattatcgcctacatagttaccatcaccataaatacggtattgagtaccgggagcggcatactgtaagtaataccgtccattatgcttcagcacacacgggccttcattccagccttggcgcggttcttcattattcttaccgggaacttcccaaccatatttatcacaattatgatgtatcaaagctttaggttcaccgatagcgcggaaaccatctttgggatccacttctacacctacaatcggatcgacatccgaacatccccaataaatataaactcttccatcatcatccttaaagaaggccggatcatgctgacgataagtcaactttgtatccacttcttcccaagcatctttttccggatgagcattcttataaatccgggtatttccactggaagcggtaaagtaaagtgtatcaccataaacaagaattgtaggcgcataatcctccatagtcggaatagttgtacaaggaatatattcccactttgccaagtcttcggagcgccaataaccaccggacttggaagcaaacatataataatatcctttaaaatattccagtaccggatcggcagcttcacgccgtgactcttcattcggttggaaacgataattcaaatcaataggatttgtcacaatccgatcactattaaccgtagtccgttgttccgaagcacaactggccaacaggcctgacagcaaggctatactaactaattccgcaatgcttttcatggtagttttatattaagtttctttcctttatactccacattcacagtatacgattcattatccaatcccaatcctttcagattatctacaacaacgatacggaagttacgattttgcaacatgccatcatagctaccctgacgaggatgaatagttaactgcctatccttgtcactccacgtcatacggacagtggtatatttacctttttcgtaattatagttatcatcctcgtcttcatataaggtaaattccccatcggcaccgggatagatgcgaacctgtagatcatcccatgacttctcggttgcaaactgaacggaaggcccggcaggaatgatggaacctgctttcacatataatgggatgatatcaatgggagcttcacgactaatctcctgcccgcccttttgcttttcacctgtccaaaaatcaatccattgcgtaccctcaggcagatacagggagcgtctctttacttcacttattaccggagctaccaatatggactttccaaacatatactcatcgcctatatctgtaacctttttatcttccggaaagtcagagaacaaagcacgcatcagacttccaccattagaagtaacctcccatgaggttgaataaatataaggtaataatcgatagcgaagattaatcattttctcttgcgcatcgaaagcccagtatccacgttcaccaaacataaatatttcacggggagtgtttgtaccatgcgaacgcatcattcccgtaaaagctgcaaactgcatccaacgcacatacaattcatggaatgccggatctttcacaccttccggaaactttctgccagaaaagaaaccaccaatatcagaattccaataaggaatacctgtcaatgagacattcaaggctgccggaatctgattacgcaacacatcccaatcagaaacaacatcaccagaccatgcctgggcggcataacgttgctgacctgcaaaagcagaacgagtcagaataaaaacgcgtttatcggaagtctcctgtctttgatgatcataaacgccgcccacgcttacaagtgggaaagcattacgcactttacggaaagagcccagataagtttgaaaatccaagtctccttctttcgccggactatgttccggttcggttgcatccagccaccaaccatccattccgatgctgaacatatttttattcatatatttccaatagatatctctcgctatgggatcataagtatcatataccttcacaccattatcctgcggaaaagtttcatgtatcatcaacttgttcagagctttcaaatcagcatagattccggtagcgggtccaaaagaaggccacactgaaataatggcatgggcattcagatggtgcacctcttccatcattttctttggatcgggaaatttcggattacgaaattctaccgcattccaatctttatggtcttctccccaataacgccaatcctgaataatgccatccagaggcaccttcaggtcacgatatttcgcaacaacgccaaccagttcatcctggctgacatatcgctctcttgattgccaaaaaccgaatgtccaaagtggaaacatgggagcctgtcctgttaattcacgcaatccagccactactttatctgctccaccgccataaacaaagtaataatcgcacaaatcaccaacctccgaatcaaaagtcattccttgtgcattgtctgtaaaagtggtaggagaatagttatcccaaaacaacgcatagcctttgatggaatggaccaaaggaatacatatttccgtattcgcctgttgcaagaaaagagtttgattacgctgattcatctttccctgctggtgctgtcccaaaccataaatagcctcatcactatccaacaagaaagtttggcgaatccgatatgtagaattacctgcatcattgaaagaagtgaaacctgtggaggaaggtttttctgccaacaattccttcccgtctttagtcgcaaagcgaacctggttctgaatgatatccagcaaaacggtcagttcggaagtagtaagtattacctgattatttgcctcctgtatcttatacttcaccttttctggttgcatcataacagataacgactgtttttccggcgcttgcccaagaggatacttcttcacacgaataatggaagaagaaaagcactccagttccacacaggcagcttttgtctctacttttactccatgtgaagtacgcaatacagattgtcccattatgggaacaatctgtatacacaggcatataaatgctaacagtttcttcattatatcaagtttatatagacaacactttatatttagtggtgaacagcacatctccgtcattattcttatccacactgaaaggtatcagtttctcttctcccggagccagttcataatgcacattctctcctgtcttcttacctccaacgtacatttctatcttaccagtatccatcagagtaccattgttcttaacagatacccagattgtcttctgatttttcagcaagttctcttcaactttgaacaatgacaaaccgaaatctgcggcaaattcatgagtatattcaagcataccggacaatcctttctttgcatccgcataacctacactatcttttatacggtcttttgccacatactgagggctaactccgccgactaatatcttaaactctcctttctctactactctgtccatacgatcattgagtaatgagagttcataaggtgtcagttcaaaagaaactgtctttgactcacccggttgcagatgaacacgagtgaaatctttcagctctgtaatacgcgttttcacgctggcatacatatcagttatatacaactgaacaacttcgtctccggcacgttgccccacattcttcacagttgcctgtattgcaacattaccattatccttttcctgtatcttcaaaccggaatattcaaaagaagtgtagcttaaaccatatccaaaataataaagaggataaaattccatgtctgaatactcataacgacgaccggaagtcttaaagttataatacagaggaagctgacctacatgacgcgggaacgtcatcggcaaacgaccggctggattataatcaccgaacagcacatcagccgtagccggaccaccttcttgtcccggtagccagttaacaagaatagctttacatagttctgacgccttagacaagttgtaaggacggcctgcctgaagaattaagattacaggtttgccggttgcacaaacggcttccaataactcctgttgcttacccggtaaaataagagtggcataatcatggttttctccggaagtcttgtaaacatctgtcgttgattcactggtagagcaatctcccaaaaccagcactactacatccgactgagaagctgctttcactgccttgggaatatccgtcccattcgaacttgtaaaatcacaaccttgttcataaaccacctttgtctgcttacccaccgcttgtttgatacctgtcaatacagatttcaactgaccgggtaaaagtttgggagtatagtcacccggctggagatcatccgctccgggacctactacagcaatcgtacgcatatctttagccaaaggcaatatgttatctttattttccagcattacaatagattcgcgtgctgcctgacgtgccatttctttatggctgtctgagttccatcccggatatatcttattccagtccaaaggtttattcggtgtcttctcaaacagttcgttacggaacatcatacgcagcatggtgcggcaaacctcatccaggttttccatattgatacgtccgtcttttgcagcttgtatcacctctttgtcattgtaagtatcaccacaattggtagcgatgcctgccgccagagcctgattagcggcttctatcttatcttttgctgtataatgtttacgggcagtcagattaccgatagcaccgcagtcactcacaataaagccgtcaaatccccattcctcacgcagaatactatgcaataactctctgcttttagcaaccggcacacctagataatcagaataagccatcattacagattggcagtcatagttgcgaatcacatgacggaacggaaccagatgcacctcacgcatttcacgttcggacaaaccgatatcatgggaatcacgtccgcccaggggggcgccatgcccaccaaaatgtttcggagtagtaaacaagcctttagattgatatcctttaatccaggctccaccaatttgtgataccagcacagggtcttcaccaaatgtctcctcacaacgtccccaacgtgcatcctgtgccacatcgagtaccggagaccatgcctgcatagtacctgctgcaagagtttcgtcaccaacagccatagcaacatcttctgtcagtttcttattccaggtggctcccattgccaatgcttgcggaaaaatagtagcaccgctaccgtatgagaacccatgcaccgcttctacttttgtaatgggcggtacatataaatgaggaatccccgggatcccccatccctcacgaattaattccatcttgtcttccggagtcattacactcagcagactttccacacgttcttccaccggaagcgtcggatccatataacgaagagatgttttctctccttttcggtctttcagcactttatctgccaaaagtaccgctacctctttcaccgaaaaaggtttcacacggctatcgcctttaaatgccagtcgaacgtgagcaccgtatttaggtgaaaacgtgacctgcatttctttcgcactacccttcacctgatagtctaccggaactcccagattcatcggatcataagtaacaaatacactcatcagttgcttcagttcttcctttgatacaccctgcatctgaaggttaagttcacacacatcaccaggagtctgtatggtaaacatcagccactggtccgccttcagatcctgaccattcacttcccacatcgttttcggatctttatcaaaagccagcgaggctttctccagtttggttgatgccgacactgataagatatcacttggctgttgagccattataaaagagcaggacaatatacctgcaaaaagaaacaagtgctttttaaaattcatactatcagatattaattttactctgtttgatgttgcaaagtaaacggtaacctattaataaaacagtgaaactataattaatgaaacattaaaatccgcttaatgaggctctttaagcgaaaaagagaagtcctccccgaagaattgtataatttagtaattgcttttcaccgaaaaatattacttttgtccaagctaatacttcattaaggaacttcagaatgaaaaagacactatctatattcttccttttatctatatgcttgaactcaatagcccagcttcctgaatatggcctgcatatccagtcctacccacttcagaactccgagttcaccagtatggcattagaagatggaaagcccatagataccaaaggagaaaaagtcaccctgaactttaacctttggatcagaccggataatgtattcggaaccgtgttccgaattattacaaatgacaataaaaatatagatttaatgtacagcgtgggtgagaatgacaggcgtttccccattctggtcaccggagatgccgtacatcccatccaaaaagaagcaagacgtgaaacctgggtttcagtcagcctgacttttgaccccaaagacgggaatataacagtactttacgacagcacacaaattaatgtcaactatccggcattaataggtgcacaagaaatacgcattgctttcggttattgtcctttcgaagatttcgtgttagatgatgtagcttccgttaacctgaaagatatcagtctgaaacgcgggaaccaggaaatccgtctatggaaaatggcgcgtcataatggagacatttgttatgatgaaacatctcataagcccgcttccggcaagaatacacagtggattatcgaccaatacattacttggaagaaaatctattcacaacattttgccacctctccttccattgcgttcgatcccactgtcgccacgttctatatagccaacgataataagagactatacgtttttcacgcagatgaaaaaatgacagattccatacgggtgaaaggtggagaattcgtagcaaactatccgaaccagcttatctacatcccccaacgccatcagttactatcctacaatctgaatgaaaatctttattcggcattcgattctaatacccagagttggaaaggaacgcaggcccccgtcgcggaacatgactattggaacaatacgctcgtctacaatccctccaactcctcactaatcagctttggcggatatggacattatcactataacaatagactactaatcagttacccgtatgaaaacacaccgcaacggtatatcaatctgactaatatccatccccggtattcctccagttccgctcttgtggacagtacactttatatcttcggcggtcgtggttgtccgtccggacgccaggaattatctccccggaattattatgatctttattcggtcaacttactcacccaacaggtcaacaaactatgggaagcccctcaaaatccggatgatggtgacttccaacctggcgagaatatgatttatgactcggaaaaagactgtttctatttcttctgtacacaattaggtggtatcctgatgagaatcgatacaaaaacgccacacttcgaacccatgtcattgcccatggggctaaaattccctggacaatatctatacagtaatctatattattccccaaaacagaagaaactatatctggctgtacaccaggccgaagtcagcggaaaagcagatatagacatctatgaactgaattttcctcctattcccgtttcatcattcaaacagtccgaagtgtctgaagcccagactgccggtagcaataagctctatgtttggctatgcattatcggaggtttgcttgctatcggaataggaactctttattacagaaaaaagcgcaccatactcgcccggaatgaggaaagtaaatctcagaagacaaatgtgaccgacaaggctcccaatgctctccagggacaagagaagccggaaatcaagattgatatgcctatcaacatgtccgtccccacatttcataactatgacttctccaggaaatgcatttgtttctttggtggtttccgtgtcattgacaaggaagggaatgacattacattttcctttacccctaccctcaaatacttattgatattattgattctttatacgggaaaagattccaaaggtatcattggaaacaagttgattcagttgttgtggtatgataaaacggaagaatccgctaaaaacaatcgtaatgtatatatgagtaagcttcgcagtctgctggacaaagtgggtgacatcaagatattgaatcagaatggcttctggagcatacaatttgagaatggcaccatttgcgactacctggaggctctccacttatacaacaagaacaatagtcaggatctggaaaagctattggagctgttattgcgcggtatgatgcttcctaacattgagactgattggatcgatacattcaagaatgatttctccaatgacaccatcgacttgttatgccgattattaaagcaggaggatctttcggacacgctgaaattgcagatagcggacaccctattccagcatgactacatcaatgaggaagccctctgcataaagtgccgcattctttgccaacagggaaagaaaggactcgccaaaaccgtttacgatgctttctgtaaagaatatgcagcttcattgggaactacatacaaatattccctaatggaaatcattgatgaacagaacaagaactaacgtaccggttgcttcatctccaacggtatttccttacgcaacattttaccggcctggcccaccagccacaaataatgatcactaccaatgccttcctcaatgggtacaaatgtactggcacctacgggaacctttttagcacatttaaagatagccgtaccttcatctatctcatcaaacatagctacataaagcatttccgcaccttccttcagagctccggacaactgcttccaaaggaacgaacctttgttacgcggtatctgcacactgttctcatgccccttcatattacgccaggagaatccagggaaagccaaaggtgcataatccactttattctttctcgcccactcgatgtcacctttaatcagtttctgataacgaggatacgagtcttcattataccgtcctacaaaccagggcatcacaacatcacaccgttttatcaactcatgcagacgagggtccgattcggtatctccactcaattcgcgccagtgtgtaggcactcccagcatcacactaaagccctgtgccttcaaaccattgataatcttttcggcttcatccagaccgtaacggcggtgatcattgaaacctaccccccagaccgtaaccagcggttttccattatgatacagataggagggattcttggcatgatctttcagagaatgacgtttagccacatcggtaatatctttcagcaaaacatcctcatcaccgggacgcataccacttaaatcatacatgacacaaatggcacgctcgtatttattggcggctttcatggcagagttcaaaacagtattgaaatgcttcaaaccactctcaccacggatttccccgacaaaacgctgcataaacacaccatccaatccatattctttcatccatctgaaatgagtatctaccgtagactcatcgtgcgaagagaaagtataagcgggcattccgtctgcaaacttgaactccgtcttatacagttttttatactccgacacttccggccagaagtcaatcgtacaagaaccggggcgaaagccatcgtgtccggtatagtgataccacccccgattggcgccatcatcaggggcattaaaccacccctgataaccggccatcaccaatcctttgtacgaattgtactgtttacctgcagcctgcgccgtaatacctattgaaaacaacaagcatacaataaaccaatttaatctttttaccataacctatttctatttcttattcgtaatatcgattgtcagaatgctctgtgcaatgtgtacttttctcccggttgtgtctgtatatcatactcataaatcttatacaagagaggatattgcgcccttaatccggcagcgaccagcggttccttaatagctccgcgcttcatcaacggattcggattatcccccttcgcttccttaagacctgtaccttccaacggcacatacgaacgtatacgcagattgccgccaatgcgtgaagttacggtagccgtagtcaattcaccgccatcccaatccatgtccacttcaaaagcaccgcgggctaccagaccttttactctacccttgttccaatcctgaggcaaggcgggcaataaatgtaaagcctcgtcatgactttgaagtaacatctcggctacaccggcagtgaaaccgaagtttccatcaatctggaaaggcgggtgtgcgtcaaacatgttcggataagtacgtccgtcaggattatccttttccaccagtttcaacatattcttgataatcttataagcatgatcaccgtcgagcagacgtgcccacagattgattttccaaccgatagaccaccccgtagccatgtcaccccgatagagaagtgagcgtttagctgcctggaaaagctgcggatgcgcatagggggaaatctggttactgggataaagcccgtacaagtgggaaacatgacgatggtcattattcggatcatccacatccgccagccactcctgcaactggttatgcttgcctatctgcataggcggcaaacgcttaatcatgctttgcagactatcccgataggaggtattagcgggatacaacagttgagtagccgacagcacggaagtcaatgcatccagcacaatctgggtgtccatcgtacatccggcagtaatcattgtaccggttcccggagggccctgttcgggagacatagaaggtgcacagaccatccagccatatttaggatgttccaccaggaaatccaggaagaaatcggctgcccccttcaaagccggatatgctgttttcaggaatgcctgatcgcctgtataaagataatgttgccacagatgttggctcagccaagcaccacccaacggccagacatacgaagcaccatccacaggtccggccatacgccacagatccgtgttatgatgtacggtccatccacggcattcgtacaaggtgcgtgctgtgctttgtgccgactctgacaattctttcaccatctggaacagcggttcatgcatttccgggagatttgtcacttctgccggccaatagttcatctccgtattgatattgatggtgtactttccatcccacggagccaatagttcatgattccagatgccttgcagtccggcaggctgtccgccgggttgcgaagaggatataagcaggtaacgcccgaactggaacatcaacgccaccaaacccaaatctttcctttcattgaaatgcttgatacggtaagatgtctcctcttgactggaggggccgatgttcagagagacacgtccgaaaagcttttgataggcttcttcatgagcagtaagcgcctgggcataaggacgcttcatggcttttgccagaaactccgttacccgacgggtttcattggcacttacatctttataattgacaaagttggttgcagccgtcacataaatcacagcagcatctgcacctttcacttcaatgcaatcattggtgacattgactttacccttctccgcctttatctgtgtgcgggtttcaaaacggatagctccaggaatgccttcgtgcgcagaaccatgtccggacaacaggaggcttttgccattcttctttatctcgtactctttatacggggtactatatctggttgtaaaattgactgcaccgggtttatccgcctcgatacggatgatcaaagcattatctaccaaagaagtgaatatggtacgggtataattcacttcgcctatcttgtaccgcacggatgcgactgcccgttccaagtctaaatctctgcgataattggagtaatcggcatgtccgtcaaattctagcatcaaactgccaatcgtctggaaaggcatgccatgctgcccggtaaagaagttatcagccataaccttttcggcttccttctcacgtccggcaaaaataagttccctgactttgggcaatacaccgaatgccttcggactatcgttgcgatgaggaccaccgccccagacagtctcctcattcaactgtatctgttcgttaaccactccgccatagaccatggcgcccaaacgtgaattacccaaaggtaatgcttcggtccatactttggcaggttgctgataccagagttttaagtcatcagctttagccatcaagcagcaagcacatacaatgcacagacctatcaaacggtttttcatgattctttaagtttatgttttccgaatgcaaagaaaagtgcgacacattaataatatcaatgaaaagacattaatatcgacttaaaatagaattaataaggattaatgtcgaaaataattcatttttt

SEQ ID NO: 6463 - DNA, 1745 bp, Unknown
  gut microbiota DNA sequence
ctttccgttatccctgttttcgtgatgttactgctatatatgcggggagcaagaaccgcacattaacggttggtcctgaaaatctctacaaccctttaaagaatggtgaaccggtctatctctgttccgccagctttatggactgggctcccatcgggtggtgtctctacgacaagcgtctgggcgctgtctttgaaaatgtggagggacaggttgtcttccgtttgggaacttatgaaaacggcagtatatacccgcaaagcgatcctttcttgcttgatagggaaagcggtgaagtacggtttttcccttcgggcggtagggaggtcgaagttacgctgctccataaatatgaactttactttgaaccttttgtccgacgaatggtaggcggtgtgtttgaaggtagcaatgactctcatttcaacaggaaagatacactgtttatcatcaaggaattccccgagcggctttggaatgttgcacgggtaaatagtgcccggtcttaccgttatgttcgctattatggtcctaaagacagctattgtaatatttcggaggttgctttctatacatcttttgctgacagtgtccctttgaaagggaagattatcggtacaccgggatgtaacggattggacgcttcacatgagtacacaaacgtgtttgacggcgacccttatacttcctttgactatatccagcctacaggtggttggtcggggcttgatttgggtactcctcgacgtattgaaaagattgtgttcactccccgcaaccgtgataattttattcgtacggacgatgagtatgaacttttctattataatgatggggaatgggcatcggcaggtagggtccgtcctcattccgattctttgctttataaggttcctgaaggtgcattgctctatttgaaagatcatacccgtggaaaggatgaacgtatatttgaatataaagatggaaaacaacagttctggtaagaaaaagaaaggggtgtcttgggttgttgacaagttcctcaacctgttcctgatagcttgtggagtagtggtgatatggatactgcttcaggtgactagtatcgctactttcaagattccttccgactcaatggaacctgccctgcttgccggagataatatcttggtgaataaatgggtgatgggtggacgcatttttaatatttgggatgctcttgaagggaaagaagtcaagatttcccgtttgccgggattgggaaagatacggcggaatgatgtgttggtttttaattttccctatcctgcacaatgggacagtataggcctgaacgtgatgtcttactatgtaaaacgatgtgtggctttgccgggggatacgtttgagatcaggaaggctcactactgggtgcgtagttgtgaaacgtcgttgggaaatgtggagtcacaggatgcactgatgcgtatagtagcaaatggcagagaaaaagattatggaatagtgatgagtgggtatccttataatggattggtggactggaatatcgtgaacttcggtcccctctatcttcctgcaaaaggagatgagatagagatgaaccctaaacatgctgtcctatatcggaatgtgatagaatgggagcaaagaaagaaacttttcctgtatggtgatacggttttcctgaatgatagcgcgattcatgcttaccgttttaaagagaactattattttgttgcaggcgataaggtgatgaattccca

SEQ ID NO: 6464 - DNA, 17331 bp, Unknown
  gut microbiota DNA sequence
tgttgcaaacatcataagtaaaaaccataacatttgcacattgattaatacccctccagctataaacataatagctaaagctatagacatccattcttttttaattgtgcaaatgctaaagattatataccaatagagtaattggactataacgccatgattaatccaaagactaaacaaacctccatttgcttttatccctggaaaatgaactacagactggtcgtaatccacaccataaccaacccacgactcaaattgattcaatgtaataaacttaaatgcttgaatggtaggaatgattcgactagctccacttccatcagttctaataatagcctgttcatctaaagttaaaagtgcgggtacaaatttctcgatacgcgtaaaactactcaattcaaagtgttctgcaactatggtaatgagaatcaatcctactacaatgtaaaaaatagattttaaatcgataaaccttagtaaaaatattgcgccaaagaataaacctgttgtactaccacacataatcaatgtaaatagaaaagcaaatattaatagcttattctcatgatagagttcatttaaggattgcttatatccttttgcataatcggataaacaaatatggacatatagcattagtactatcattcgggcagaccaagatggttctgcgcctaaagtatttaaacgaggaaagccatgatttatatctatattgattttattgaaaataggaagccctgtaaaaaagcatcccaattgtataattagtacaatagcataagcatatataatccagcgaatcagtttcataaacatctctgcattaatatcgcttgcatataaaatcctcagatatgacaggaagaagcatacatacatacttgtataaatcagtgtagaccacctcatcgtctgaaaatgaaatgcgaatggaaatgcaatcattaaaatgagcatgcaaaacaaaggtatatcatattggggcaatagtttaggcgtaattataagcattaaaggggaaatgctcattactgctagtaaaagaatgttctgctttgctgcattcatcataaatgcaggatatatactcaataaaaggagtaaaaatactactaaacgtgtacaataaattgataatgtactctggttcatttacctattaagaatttgagtttacaattaatatattcagcaataggatattgtaatgccatgattataaagaagcaaattaaagaattccacccctgtaagggcactccccatattatattaactatccaaataaatagttccattaagatagaataatgaacagccattaatatgattgaattcttcccccaatactgtaaatatttcaatagtatattttctttagctatacatagaaagagaaacaggatagctaggggctcaataaacgaaaacaactttgctatacatattaataaagcacttggaagattttcatcaattggcgtgttcaaatataccagagtagttaaaaggagtagaactgcacatcctaaaagatacttctttttaacggaatattgattcacatatcgagaaacaagataacttgcagtaataattgtccatgcagaagcggagctagacaaaaccagtaaaggcatctttattagggtaaaattaaaatctgagagatgctgttggaggtgtttttgaaacattgataaaagtataaacgtgattagtcccactaataagcctacataagtacaccttttatttctaaatgttacaaacaataattcgcccccaaaaagaacaggtaaaaaccataatgtacctatgccacgaaggactatagatttatatatatccctcaaaacgatgtcaaactcatagtgtcctactaagtaaaaaagaaaatctaccaatattaaaataccagtaaaccataaataaggcacaccaagagacttccatcgtttttggatgaatacctttagaactgtcttattagcagctttcataccatgaacccatccgctcgtaacataaaaacctgtaatcataaacattccgatagatatattcagtttattaggaaagataccattttcaatatgaagtaaggttatacatataatgcataatcctttcatccaatctatagcatcaattctattttctgcaatacgttgttgtatcatgatttgatctttagaatccatttacgtaatttactacttagtaaaagcaactgtaattgaacaaagttataatcgctatggtagcgatttttgtaatcgcggctgtcacataacagcataaggcggcgatagggatttcccttctgcgacttaatatgcctatgaattgcagaaacatcagacatataatataacttcatcccagcaaccttaacttgatgagctaaaatggactcttcacaatataagaaaacatgttcatccaagaaagatatttgcttaatgaaacctatcctaactaacaagcaacatccagaaaggacaggacaataaaagctattttgatggttcataactgttgataatgctttctgtgagcaaacaaatttcagcatttcaaaaggccacaaaagttcattccaaaagctgacataatttaaggggttttgatgtaatccttctgaatttacaatatcacttccacacgccacaatttcttcatcctcttccatcttcgccaccattttggcaagatagtccttctgtggaaactccatatccggattggctatcaaggcatacttataacctttctgtgcggcatagcgcaaaccgatattgtttccggcattgtagccacggttttcgtgattttcaattagtgtacactgttgcttgctacacagcttacgtaaagtcttaacatcgtcttcacgggaacagttatccactactacaatttctacctccacttccttttgttgtttcaggaaggagatgcactttgagcaatcagtggaactgttgtagtttaatatgattataggtatagtcatcttttttattttagaatctaataatgatttaggacctgctgttttttgatgatatttttaaatatttatcttagagactatcgcgtcaatatcggtaggtctcgtgttgaaaaataaatgattgagattttatcatattgttaaacttcttaattcagataaactctttggcatatctaccaacgatgagaaacaatctatgaaagagtgcatctcatcttggatatatgcaccatacatattaatatctaataaattgagtatagatattgcctttattttgaataataacttagctgtaattaataccgtagacgaaaaactaataatagcttttatattagaattagagactaatatgctttctacagaacaaggaatatcaataaattcacatcccaacgaggcataccttattctatagtcaatctctcttgggtgcggctttaaaaagatttttaccccttgcttatgtagttcttctacaatcttttctaatgtgttcacatcactattaccttttatctcactcttcaaataagccattgtgcataatataacagcaccattcaaattggggagaccattgcctatttttttcttactttcaaattcagaaacggtatccctatagagagaggtagcgattacattctcatgaaaatttcctgaagttatttttaataaatttaaattgatccaatttgtgtgatgttcaaatcgttgttgtaggattttgtcaaaggactgaaatagaaatgaagctagtaagctaagtctctttttattctttgcattcactgtccaaatatgcttaaaggtatttacagctgggaaataagtcgaaagaccttcttcaactttcatcaagcggaaagaatgggacttatgtagatgtgagtgaagacaaatgaataaatctaaatccaaatgccaaggggatgctataaaaacaagatgtttgtccacataatcttgattattgtatcttgccgtagcttgaaatctgttgaattgtttattcaacaaatacaaaggctgtgtattgaatattgctgctaattgatagaactcgcaacaatcattgacaaaattctgctcatctaaaatataataaatcttgccttcttttaacgcaggcttaataaaaactaaacctttaacagtccttccttgagacctaatgtacttaatggcacaatcaatgccgtgagcatgccacggagtaacagcagtaccaataaagttgatgccgttacattctaccaacgaaggtatttggtctattgttatttgacgcatattcattatgaaagaatcatttcagcaaattctctgacacagccttcacctccttttttcttcattaagtgaatgccttgaatttcgattatagatggcattgagtcggccggacaagctttcactctcactgcacttagtaactctttacaattaacatcatcaccaatataggcaacctcgtttagagtaatattaagttgcgcacataaatcctgtgccgcagctaatttgcctccatcccgcttaccttgaactaaatagtcaactttcagcttttttgcccgattctcaacaatttttgtattttcacttgtgatgatgccagtctttattcctgcttcttgtagaagttgtaaccccataccatcacgagtattgaactttttgagttcttcactactctctccataatacattccaccatcggttaatgtaccatcaacatcagtaagaaataacttaatctgtgaaaaggattctttatgtttggaaagcacatgtttacgcataagattttccaatatcatccaatcgtcaggctcatcaatctccatggctgtatattccggcatctcatagactccaatatgaccactcaaacgattgctactttcaagaatatttttaattgtattgatatagaatgcgccattttccatcagcattccggcaaaattctgacgacgtggacgattccgataatcataattcatactagtaccatcttcataccaaaagaaacggtagcttcgcacacaagtaagcatagaatcaaactcacctttagaatactgagtaagtgcctctgtaaaatgtgatgtttctgttaaaggtgaagtagcttgaactaacataaagatgtaattctcttcaaggtttgcttggtgaatatattcaagcatgacactctctgtacttgctgtatcacaagcattttcagcagagcgatggtagataactgtttttttgtaagattgtgctaacactgtttcctcaatttctgcattatccgtagccacaataatcttgtctacagccgaacagctttcaagagcttctatgctccagcaaactaaaggtttgccacaaaatggctttatattttttagaggaatagatttacttcctcctctgacaggaataaatgctattgttcccattttaacaataatttattaattggagttgttatacttgtatatagagtgacaaaaaaatgccgacttaaaaaataagacactagaattgaaacagtagttgctattagcaaatcaagatagtcattatctatatcaaacaaatgtcctataaaactatatatgtattcgtggaatacatataccaatatgctatttttaccaatggtagttaagaatgtgactttgttaggaagtacacatacgaccatcaatacaattaatgttgcaaaaccaaagcaaaggaatttgatgaattcttcattgatatattgatgataaaaatgtgggcgaaacctaaaatagatatttccattcatggttaatgctataattccaattatcccaataacaccaccagcaaagaataataccttactgtatttctgataaaaatcaactggcacatagtatcctaaaagaaacatgggaaacatggaaaatgcaatgcctaatgcacagtattcgtaagcatcttgcaaaaacaacgatgctacaaagcttacaacagaggctatcagaatgggatatcggaattttattatatgaggtaataatagcaccatccaaaacagtgcccccagataccacataaatcctttaggtagaaatagattgaacgtctgaatattccaatctaatccatgtcgtatttggttaaaaaaaactgacaaaatagagaagaggacgtatggtatcaacagattctttattgccttgtctgcgcgcttaattggattttttgacaacatccctgaaaagaagaaaaatgctggcataatggtacaatgtatcagcattttaaattcaatcgatatattattaatggttaatatggggggagtatgagcaagcaaaactaatattataaacaagccttttgcattgtctattttatgattccttatatttgagggctccattatattgattaccacttaatttggttctttttaagtttattgcgttgaacctcttcaatatctaaaatctctttctctttatatgtcaaagccttagctactgcacggcaatcacgagctaatttgcgtacaccatcaggttccaaagaagcggcatgatcagttcctttccaagtacggtctaaagtaaaatggcgttctatccactctgcgccaagagccactgcggcagaatcgacagcaatgcctaaatgatggccggagaaacctacagctttaacacgacttgcatagagttcacatagccgggtaagttctaacaaacaaatatcttcaaaaggaaccggataaccggaagtacaattgtagatgaccagatctttgttacggcctttagattcgaagaactgaataatcagttcttcctcttcatgagtagtcattccgaatgataagtggatttctccactaaaattgtcacacaagtattccagaagtcttttattaagattacatgctgaaggcactttaattaagttaggtttgagtgtacaaatctctttagcagaagtaatatcccatactgaggtagaatatgcgatgccaaactcgttacaccattcttgtaactgacgatgttgttccagtgtaaactctaagaaatcacgatgttcgccataggttttaccataggagttttctggatgtgggtgtggagcattatactcctctggagtcagcaattcatggttacatctcttttgaaacttaactacatctgccttgcagtaagtggcagcagtcataatcagctccttggcgatgttcatatcacctttgtgattgcagccaatttccgcaataatttttggggcgttcataagatatatttttaaattaaattgattttttttgatataatcaatacgctgctaaacacatacttaaaatgaggtacatagagtagcaaccataatatgagtgtttcttttttatttaggtgttttgtaatctctctatatttttgcttatacaagggacggttatgagttagacctgataaggttatatacaatctacccttttgatgaagatagtccatccatacacgatatatggtacgttgagtatctatatcttgcaacagattagataacccaactaaagcatacaagacagactgtttaccccatgaccttttttgaggtagacgttgtatagccaaaggtagttgaatagcaacaatagaagaattctgtacaccaaacaggtaacgggcataccaattgtatccatagtacttacttacatctagtcccgaagttctattataagcttctcgctttattagatttactgtaataaaatctggaccattaatatgatcagacaaaaactcagatacattctgatagacgttaactgatactgggtctatcttacgtttatcacgcaaataagcacgtgaaaaatcataatttgctacaagtctattgaaataaaatagttcagtgcttggatacttctctatcaagtgtaacaaataagaaacggaatagggcatcaatgcatcatcatcacctactaaaagaatatattctcctgaagtcatattaatagcttcacagaaattctggtccaaatagggggtattagtttctcttctgtcatacttaataactgaagggtattctaattggagagtctgaattatttcatatgtattatcagtagaagcattatctctaacaagaaattctacataaggaatgtcttttagttgttctgcaatgctcctcacgccagattcaatccattgacctccattaaaagtaggaataattattgaaattctataattgctgccactctctttttttgtttttgtatattgcataagcccaaggtagttcaataaatgatataataacggtataaccacagacaaggccagtcataccaaagctacttgtacatacaaacgcagatacagcacataatgccgctattataactgacataaccaccaaaggctcacgtttatagcatctcaaataattggcataagaggataaaatctggttagatataatagaaaaacataatagatacagcggcatgccagatataaatcgattagaaattctaaaagggaaaaatacatcaatatattgtaatgtcactagaaataaaattataatcaccaaacaaacagagagcatctgttttaaggttttctgaaacagaatatctaataattcatatcttcgctgtgctatataagttgagtaaattggtattttggttgacatccaactgaatgcaaaggcttgaatggcgttaacaacttgcattgtcatacccatctggcctgcaacttctgctcctacatactgaaaaagaatcggattaaaaagttgatagatgaaataaccacttacccaactcaatgccactttccattgaaggggaaaaatttcattcttataactgacagtataggatgattgaagcttccatatcttttttagctgacaaataatgtgttgcttgtttaaatagattagtcctattacgacggaaactaaagaggataatgctaatgcataaagttttatacctagtataagtcctaaccatacagacagaggcataaatatagattgcaaaaaacgaatcttactaatttctttcacacgttttaaacccattacaatagcatatacaggtgaaagaaaaagattgatagatgatagaaatgataaaagaatccaaggtaacatccaatctatatgacaatcttctattcttgctgatgaatgcgagaagaaataatatccagctatcgtaatgactatccaaaacaaagtagatatccatgcaaatattttagtgcttaatcgtaaaatagacgccaatcttgaagcatactcattcggccccatagcattgtaatcactatcataagttagatgagcattctcatgagctgcaaattgagttattacattatggagtcctaactcaaaaaacacttgtaatgccagcaaactgctaaaagtaaaataataaccttgctcctgggcagataaaaacgtgcctataaaatagatagagcctaaacctgtaagaccttgtactattctccctcctgaagaataggctattgacgcatcaatacctatttgtttcaatttttgttttacataattcattttgctagtagcataaaatggaattctttaaaactatagtttgatactcaccaatcatagatttcagtttggaaccatctaaagccaaatacaacatcttttcgtcggagcgagacgtagagccaaagcaaccgttaggaataggctgattcaattgagagaaaatagtagataccacctctttaactgaaaggatatcggtactttctaaattatagataccactaggtaatgctttatttattgcgtgaaataaagcgtttacggcgtcatcgacatgtaaatactggcgtacttgtgaacccgatgtaaaatgcagagtttttgactgctggattgaatgaatcgtatatggtattaacctattagagtcctcaccttgaccataaatcgtaggaataataaaatgccaatgcttaaatgactttttataagagtttacgaatcgggaaaaaagccgttttgatacaacataatcattgggagatggtgaaattgaagtcataacctcttcttctgaaaatttgtttttatgattagtttcgcccatttcgaaaacagatccaaacgacacaacaactcctttgaaatcgagcatacgcaatgaattacataactccatgggacgaacatgattcaatagatagattttatctatgccttctttcagacgactttgtatgccggcaccaacacagtaaataatgaaatcacagtctatcagcttcgatgcatcaatatgttgagcttctaaatctatttcttggtactcattataggagtaattacgaggctttgaacgacctaatactagaatagaaaccttgggctgtgattcacacgctttacctatagctgtagatagaaagctattgccgcctattatgcaaattttcatttctttagaatgttgaaaaaatgaatttgatctatacaaagatcatagacatcttgcttattatactttttataccaatccgatgttaaagctatgcattcgtctaaatttagccggggtttccatcctaacttagcttttgctttggtaatatctaacatcaataaattggcttcatgcaaggcctcattcggattagaaatgtcaataagttcgccatggtcataatgagtaatcaatttggtggcaacatcccaaacggttgatacgctgtctgattcggggccaaaattccatccttcacaataatacgttggaaaattccacattttttgtgccaacaatagataaccactcaatggttctaacacatgttcccaaggtcttatagctctaggactacgaatacgaataggaacattggactcaagtgagcgaatacaatcaggaatgatacgatctaatgcccaatctcctccgccaactacattacctgcacgtacactagctagacttacattatgtttagttccataatcttttggattaaaaaaacttctacgccaagattgaatcgctatttcgcatgctcctttagaagatgaataggggtcataacctccaaatggatcgttttccttataacctgtaagctgctctttattttcataacacttatcggtagtaatcataattgctactttaacactttttgcagaacgaatagcttccattatatgaatggttcccataacattcgtagcatatgtctcagccggaatgtcatagcttaagcgtaccaatggctgagcagccaagtgaaatacaatctcaggttggtaatcagaaataatatctttcatcttttgagcatcacgtatatctgctcgtatatctgctagaattttttgacctataccactcaaacaataattatcacgggagttgtacggatcttgtccgactcctatgacttccgcacccaattcatgcagccaaatggaaagccaagaacctttaaaaccagtatgacctgtcactaagacccgctttcctttatagaaattatcaaatgtattgtctatcattgcttctgttttagtcgattgaataggctatagtatcagatggattatacaatttatctgtatatgctaaaagaataaaatcatttgttccaatattttctaatgtatgtgccacgttattaggtatgaatactgtaatggggttatctaatgacatcttaatatccatacgttcatgagtttcaatatcttccaacttaagaagagctgtgcctgctattaccgtaaaccattctaatgctttaggatgataatgtcctccctttgattgaccgggttttcccatggtaaggtatatttcaccggtatgagttggtaattgttcttcagtcccatttatcgcttttaaaaaccaacctctttcatctgaaattaaacggcgattcagtactttaacttgttcaatcataatcaattatttgaatccgccctgcaaaggaattggaacttgacgttcccattttttccaaggagcaacattatctgtcagcagttgttcaagaagatttttttctctaatattatccatacattgccaaaaaccacgatggatataggacatgagctgtccttctgcagaaagtctaatcaaaggatctttctcaaatatggtattatccccctcgatatagtcaaagatatttggctctaaaaccatatatccggcattgataggtgcgccatctttgatattcttttcacggaaagatttcacagaattatctgaatcgatatttaatacgcctttatcttgtgcctgaacaaccgcagttaaagtggctttcttaccatgggatttatggaattcaatgagtttgttgatatctacatcgcagactccatctccatacgtcatcaaaaaaggttcaccaccaacatactcttggatacgcttgatacgacctccagtcatcgtattataaccagtatcaactactgttactttccaaggttcaatttgagaatggtaaattgtcatttcatttttaccttgtctaaaatcaaagctcacatctgaattatgcaaaaaatagctcgcgaaccaatccttaatatattcttgtttataaccagcacaaataatgaattcagtatgcccatataactcatactctttcatgatgtgccacaaaataggcataccacctatttctatcatcggtttaggtttgaattgactttcttcgctaatgcgtgagccaaatccacctgctaataatacaactttcatagcaatagcaattttgtagcaattaaataattgctgatataataattacataccaaccatccatttaaatcgatttgctttaagtcgtttattaaacaatggtagtattattataattgataagtggttgataattaatgtgacatgtgggttgggaatatttaagattaagtccctttttgccctattgctttctcaattattcgtgggagcctgttacaagtgtctttatcatttataaagccccatcccatactcaaacggactctcaaaatctcccaataatggatgcttcgtatctttctcactcagtatcgctttatcagccggtattttccagtctattcctatgccttcatccaagatgctgattccaccatcggcttgtggagtataatagttgtcacatttgtattgaaatacagctacctcactcagtacagcaaaaccatgggcaaaacctttgggaatgaagaattgcaaatgattatcttctgacaattctacagccacatgctcaccgtatgtgggcgatcctttgcgaatatctaccgccacatcaagcacgcggcctttgacgacacgcaccagtttactttgcgcaaaaggcggcttctgaaaatgaagccctcgaagtactccgtatgatgacatactctcattgtcctgcacgaaattcaccttgtgcaccttctcttcaaattcccgttgggaaaaagactcgaaaaagtagccgcgttcgtctttgaaaaggcgtggctcaatgatgaccaaaccctctacatttgttttttgtataagcattgtttcttataatagttttaaatactaaaaggttacattctctaaattgcctcctttattttcctcctctcccttgcctcatcagcatattattaatctgttgtctcacattgtccacctttgcccccgatgtcagtcgggaagcgaaaggaagaagaacctcgatgaaggtgcctttcaccaccgtgtccttgcccacgcggggttcgctgagcatgatgctcactacacccgccagatcgtgggcggtggcgcattcgcccagaagtcgggtgtactcatgcacttttttcacgtcgggcacgtaggtgaagagaaggcactcggcatcgttcagactttcaatgccctcggtttcttcgggacggatggcgacctcggcaaactgatcgccgtaaaaattctgaacggcggtagcgcctgtcggggctatcatgttcgtaccgccgaatatctttatctctatttccggtttgtcgttcatatttatattttctctctccattctatttaattattttaatgataaatcaataagcactcaatgattataaatgcttagtaaatggcttttaatgcagtgtataggatgaattatatcctgtatctttgttgacataaatcagttaaatataaaatatagttttaattaaatcagaatcaatatcatgaaagaatctatcatgtcttttttcaacgctcccatcaccaacaaagtgccttccggagtgtgtagcgtagcggggcttcatgcctatatctcctctgattcccatctgaaggagctgacacaaagagtaagggccgatacggaaaacgataaagcattccgtggaaaaaagcagactttgctgccctacgtcacgcctgccggaattttttcgtactgtcgggagcagtgcatcatggtgccgtccggagactttgtgatagacatcgaccaccttgcctctgtcgaagaagccgcaatgtggcgcgatcgactctttactgacgaagtgctacaacccgatcttgccttcgtaagccctggtgccaaaggagtgaaactctttgtaccttaccggctgaatctcacagatacactggaacactcgttcgacaatgctctacacaccgcctgggactatctggaatggcgtcacggactaaaggccgatactgccaatgccgatatgtcgagagcctgcttcctggcatacgatgaagaagcgaagtgcaaaatttagggtaagttacaaattacgaattacaaattacaaatcctatcatcgtgaacgaacttgacattatcgaacagttgactattgccgcagaacaggccggagccaaccttgcacctacgtatcaggaatatatgccacttgccttcgccattgccaacagttgcggcgaggcaggacgcagtttttttcaccggctttgcagtctgtctgcgaagtatcggcaggccgacgctgacaaactctacaaccacgccttacagagtgggcgagggggtaattccttaggaacggtgtttcatctggctcagctggcaggcgtgcgtttcgacaagaaacttgcaaacttgcaaaacttgcagcccctcctcacacccacccacacgtacgtgcgagaaaacgatgtggaaacctccgtctcgctgccctgtttcccggaataccggtggccgctcttccttcaacaagtggtggactgcggtgaatcgcccgcccaaagggacatcctgctgctgggagcactgactgtattcggagccaccctcaaccggctgttgagctttgtctatggccgcaagatcaaatttccgtgcctgcaaacctttgtcatcgctccgcccgcttccggcaaaggagcgctgacctgggtgcgccggctggctgaacccctgcacgacgcgctgatggaatcgtacagcgaaaagatgaaagcctatcgccttgataaagcgcaatgggacatgctgggcaaggagaaggcaagcaagcccgaacccgaacagccttgcatgaagatgttccttattgcgggtgacaactccggagccggtatgctggagaacctgatggatgccaacggtgccggactgatatgcgaaaccgaagcggacaccgtgagcactgccatcggtaccgactacggacactggagcgataccctgagaaagagttttgaccacgaacgcctggcttacaaccgccgcaccaaccacgaataccgggagtgtaaaatatcctatcttagcgtattgcttagcggtacgcctgcccaagtgaagccgctcattccctcggcggagaacggcctgttctcgcgccagttgttttactgcatgcctcccattcgtgaatgggtggatcagttctgcgaatccggtatcgactacgaccgtatgttcaccctttggggagaacgttggaaatgcctgctcgatgctttggcggctgtcgtaagcggcatcaacctgaaactgaccgaagagcagaaagaggaattcaacgttcacttttcacgcatattcggtcgtgcgggtgcggctcatggcgatcccatgaaaagtgcggtggcacgtatcgccatcaacatctgccgtatcattggcatcgtggcattgatgcgctcgctcgaagccttgttaatggcaacggacggcatcggccgtactgctgcggaaaagccggcggacgaccttgtaaaagcgctgaaatcatgcccgggcttgttgccttcaccccacattccgcatgagaacgtgcaagatggcgtggtacctcagttcgatctcaccgtcaacagcgatgattttcatgccgtactgtcactcacggaacctctgtatctgcattcgtgtcatatcctgtcgttccttccggcgggcgactccatgcaacagaaaacgtcgcaggaggcattcctggatttgttgcctctcaacttcacccgtagccaggcccttcaagcgggtgaacagtatggaatacctgccaacacgctcgactcgctgttgaagcgaatgctgaacaaagggcagctggtgaaaagcgggcgcggagaatacaggttcaaatgaaacgtcgttcggaaaaaggatcccattcgcttcacgcacgtgtatgtacgtgtgtgggtgtgagggggctgcaagaaatgcaagtttgcaagattccgctttttttttctccaactgggaaaaaaaaattctccagttaggaaaaaatattttcccagtataggaagaaaaaactcccatatccggaacgcctttaattctttaatttttaatttctcccaccatgtccttccatcccatctccatgaagaagagcgaactggctctactttactttccggattcaacatccgctgtggccaccaaccgcctgatgcgctggatttatgattgtcctccgctgatgatggaactggaaaccgtcggttatcatcgttcgcagaagttgctcacatcccggcaagtgtcgctgattgtccgccatttgggcgacccgtaaggcgaaacccatcggaacccatcggaacccataagtcggtttccggtccgtcctatctttgccacagattattaaccgaatcagttgacgggatttattctttctgatgtaggaatgaataagactcaccacag

SEQ ID NO: 6465 - DNA, 9000 bp, Unknown
  gut microbiota DNA sequence
ctcataaccctacagaacggaataaaataaatttcgccaactgattaactaaattattaaacttatgggaatcaaagtaaaagcccgtcagaccaaactgtcggtaggtccctcgaaaggggagtatcgtttcatcatgcaggcagaaatctacagcacgctgaagcaggaaaaagtcatatccgaagcctccatccgctcgggaatcccgaagggaagccttcaggctgcctgggaagccattggtgaggttgtcaaggcatggaccaccgagggacattccgttgccctgcccggagtgggtaccatgcgcttcggcctgcaagccgcggctgtctccaaagtggaagatgtaggtacgggactcatcaccactcgcaaggtcattttcactcccagtaccaccatcaagcaggaactgaaggatacctccatcaacatcacttgttacgacaaggacggaaaagtcatcaaacaggtgacttcgtccgacccgggcaatgtggatgatgaaggcggaaccgacaatcccggcggaggcggactggacgaaaatcctttgggatagaattattcaaaattaataattaacaattaaaggctgcgcggtgcgtgggcgaagcgtatgaggtttcgcaagcgcacattgcgcagcttatagattatagatcataaattataaataataaatctcatgaccgactctgcaaaaaagaataaaatcacctgggtgtccctgctcaatgccattatccaggcagccattgcggctcttacggcactgggaataaccagttgttcaaccgccatcgaatgtctgttgccatgatacaggaaacatttcccatgattgtgggcgaggaggaagtgcttaatgagcgcgaactcctcgtccgggtggaaagcggattgatgatggactccaccgactccgtatgctatatcattctgcactgttccgccacacgctgtaacagcgactacaccgtagaacaacttttgcgcgaccatcgtgcccgtggcttccgtactatcggttatcacttttacgtccgtcgcgatggcaccgtcagtcagcatcgccgactgctcgaagtgggtgcccactgccgtcctttcaaccggtgctccatcggtgtatgctatgaaggcggactggactcggaaggacatcccgctgacacgcttaccccggagcagttcgaaaacttggaacaacttctgacaaagttgctgaaactcttcccgaaggcgcaactcagaggccatcgcgacatgccgggaagtgtgcccaaagcatgtccctgtctcgactgccaatccgtgttccgagccattctttgaaatgttttgaagaatgcatatcggttcctgtcaggtcgtacatccctgctttcaacagggatacggcctttttttgtatatatgtgccgtatgctcccgtcagtgacggaaggttcaactggaaagcaacctgttcttgcttcaacatacagtagtaggacgtgcccatatatagataacgttcggggtgtgccagtaaaggccggtagcccttcgtctgaatgcgtttcaggacgggcagcaggttcatgggcggagtgaaaccggtggtttcaaccagcagataccggtaaccgccttcgtagatcggaagcagatcgtcggcctccagacgctccgcgaagaggttgtccatcatgtattcagcggccagattcagttccaccgtaccgcaataggcatcttccggcttccggaatttctctttcaattcttgaaatcgttctctcagcccggcgttggtattgggtatatcctccatgatatggggagtaaaccacactttgcggactccttggtgtttcatctccgcaagaatctgaagtgactcgttcattgtcttcacgccatcgtctaccccgggcaatatgtgggagtggtagtcggtcatttcgcaaaggatgccgcttgccgcgacgggctgggatttagaaaatggccacatgagttttatttatctttactgccataataggaagcataaccgtaatggtatccgtagcgatagccgtaacgtcctccggtactttccgttccgttcagtatcatggagaggtttttaaatcgttttccggtatacatattttccagttcggaaagcatggaccggtccagcaagccggagcggactacgaaaatggtgcggtccgcccatttttcaataatttgtgcgtcggctacgatgtcaacaggaggacagtctatgaagatataatcatattccggtcttaatgcctctatcagcatagacaacttgctgtcttccagtagttccgttggattgggaggtattgttccgataggcaggatgtgcaggttcgtgtatcccttgtaggacactatgatttccttccagtcttcaatctgattgttcaggtagtcgcttaatcccttgttcggagaatcgacataagaagagacggttctgtgccggaggtctccgtcaatgaccaggattttcttctttttgatggcgaagcttatggcaatgtttatggctaggaaactttttccactgccgggattgaatgaggttaatacgaaaacatgttggttgttgtccttgcttgccatgaaatccatgttggaacgtaacacacggaatgcctcgttgatgatgttgcggttgccctcattcaccactatgattttcatgtcctgccgcttccggtgcttgaattcccaccattttttctttgtgccggagtattggggaatctcgcctatgaatgggatgctcagattttccaggtccttccgacctcgcactttggtattcatgttctccttcatgaagatgcctactgccggaaccagtaatcctacggcaaatgccaccaacaggatattcatcttgcggggagcggtaggaaacatactgccgcgcggagcggtaatcaggcgggtgttgtaggcggtaaatgcttgtgagagttcgttttcttcacgcttttgtagcagatagagataaagttcttcctttactttctgctggcgttccaccgacagcaaatactttgcctggttcgggttggatgccaaccggttggtggtagcctcttcctgacggcggagactacgtatttgggtattcagtgaaacgatcagattatcgaccgactggataatggttcgctgcatactctgtagggaactggccatgttctttaccaacggatttttttcgctactgttggctatcagtcggttgcgatccagcaccagattgttatattcactgatttgcgtttctatattggcgctgacaatacctgaattggcgggcaacgtttggtccaactgttttgtattcagttctctgcggatatattgggcggtggagagctggttgttcagcgtcgacagttctttgttgttctcagcggactgcgccatgtagagactggatgccgcctgtacgtcgggtagcaagtgctcgcttttgtagctggagatattttcgtcgacatgccccaattcgctctctatcacgcccaggcggtcgctaatgaactgcgaagtgctgacggcaatctggtttttgtcccgaatccagttctcattatagacttcgatcagggtattcaggatgtcttccgctttccggatggaagtgtcattgatgctgaggttgatgatagtggcatcttcgttacccagttcagcgaccagtgcatttgaataggtatcgacggcagcgcgcacgcttccccggacgtaccggatagatgtgcctataaaagcgtcggtaaactcttgtgtaggggatacgatcatgatcccggcagaggtctgtatggagtcgcccatttgggcggagagtgtttcgcctatgtcttctcccgatatttcaagttcggagatggcaaacgcctcttttgaagagaacttgatggtgaaacttaatggcacttctattttgtcgcagaatgtaatggtgacaggagatactttgtacaaatctacgttctttaatcctttgcggatggtaaaggtttcgttcaatcctagccgattgactacctctgtcatcagtgtgggcgactttaatgtcagcaactcgttgttgatgttggtattggacttgaagatacccaaatcggaaaagtcgttcatagcgctggtagaagagctgctttttgagttgtccttgacgagaatggcagcggtacgggtgtaaatagggggagtgctcagcaggtacaacaccgctatagtcagggtaatgaacagggagatggcgaaccagtaccatttgggaacgaacatgctccacagatcctgtatccgtataaagtcatcggcgggtttgccgacaggcgttttcttttcaaccataataataagtaattatttaaacagcaatacacccagggaggtgaggaatgatccgatgctaatccataatcctacgcttttcacgctgttttcattcagtgtggattgtccggcacgtaccttgttgggctgcacatataccacgtcgttctgcttcaggtaataaacgggagatttgaacagatcgcaggagcggagatccacccagtgcgtcacccgttctcctttttcttcacggatcacgaagatggcatcccgcttgccgtagatggtaaggtcaccggccatgctgatagcttccagcaaggttatatagtcttttgagatactgtattttccgggagtcttcacttcacccaggacggagaagctgaggttcataaactccacggtgaccaccgggtcgttcaccaagttctcctccttcagtctttgttttaccaatgcggcaatctggcttcgggtcatgcccgccacagtgaggtttcccaatacgggaaagtcgatggcacctttgtcatcaagcgtatatccggaaatttctccgttgttgttgctgttgttcagtcccgtggaacctaccctctgctgcacgcgtgtcaggttgaacaaagccgccagttcggggtccttgctcgacactacgatggatatctgatccttgggttgaacggtgatgtcctggggtggggccaccgcttcggggctgtttacctccacgtcctgaaaatagattatctctttcgatgtgttgcacgatgagagcaacgccaacgaaaatagcaagtataaaagatgatttttcatgttttaattttaatataaaatagaaatatgaagtataaggtatgaagtattaatttttttggtgttcttttgtaatttttgctgtgatgtagaagtgcatcgctgtccataccgctacgtccagcaggaacagtacggtgacggacaggtaagaggctaagagtgtattggcaataataaaaagccaggcgatactcaggatgaagcagagtgcctgatgttgagacatacccaaggcgatgaatttatggtggatatgatttttgtcggggagaaacggaggttgatggttgcgcaggcggtgaagcactacccgaaccacgtccagcattggcaccagcaggaaagagaaagccgtcacgatagcaccgggaaagagttcttccttgacgggatcggacatactgagatgaatggccattacagccagcaacagaccgatagtcaatgagccggtatctcccatgaacactttccgtccgcggcgggtctgtccgaacatattataatagaagaatggtatcagtgcccccaaagctgcaaaggagataaaggcatacaaccaccagtgtagacagacgaacatgcaaccgaaagcgaagaatgctatcatgctcaatccggaagccaggccatcgataccgtctataagattaattgcattcatgatatagacaatgataaagactgtgaatggtatgcccacataatagggtaattcgtagatgccaaacagtccgtagagattgtcgaaacaaaagccggaggctaccaatagaaggccacaaagtgtctggatgataaatttggcacggtagcgcatacctatcaggtcgtctctcattcccatcagatagagcatgaagaggcagctgaatagggtgagcagacaagtggattgttcccaactgagtaaattgctgtctgtacagagattatggcaggcaatgacgagcgaaatgggcataatgatacacggaaaaaaagcgattccccccagacggggaatgtgcgtcgtatgcaactttcggtcgtccaacggatcgaaaagtcgccgcctgaaagctatcagcgatatcttgggaataatcattgcactgagcaggcagctgacggcgaatgccgccaaagtttcaaaatagcaggttgtcatttctgaaggatttgattaggtgagagcttgtttaaatgtattgatttatatcttcctgagaaagcattggggaatataggcagttgccaccgcacacacaccttgtattgccactatcaggcgacgatttcctttgatgcggtgtatacagccttctgctcccttgaatggaccgtccgtaacaagcacccgttcaccggtgctgtactccatggggacgtcgccgaaatagtccagccctttctcgccggaggaagtgacaagcatgaaaattttcatttcccgttcaggaatagctattggcagtttttgccaattgacaagacgggtatataggaggactcggtctgtcagtttctgctgtaacgccagtgcttgtttctctgtggaatagaagaacagcagggaggaaatgatcggttttcgcacgtactttttcactccgccacgttccacaagaattctttcacaaggaatataggtctcgattttgtctctattcagcgagtcttctatctcaaataccttattgtaaaagactttgaatgcataccaatgcataattgaagatacctcttccatatttgtcgtatctcacctaaaagatattccttccattcctgcgtatcggagtatttctgatcttcaaagcaactctgatgcgcagcaagcaaggttaatccaattcttcgttttgtctgtcgatttttggaactcggaacttctcctgacccaggagaaggtatccgtaaccctgtaattgtaccgtttctaagtaagaaacggcacgacgttttaatgcgttgaattcctgtaggataaaaaatatctttttatcctatttttttaggttttgtagattcggtacgatgtatggataatttttttagaatatatctatcgagttctatattagcatctgttttaaatatctattcatttcttttttgtataagtagttgcttattgtattaaaaatcaatattttatacttgtcttgagagtaaaatataaacaaatatttatagcattatgttgttttattcttttatttgttatatctttgcgccgtaattttaaggtttcttacttagaaacgttacgacataatgcctctaaaatttcttcattggccttgtctatcagtgaattttctacagaatccaagtatatgagtgtagtcttctcggaagtgtgtcccatacctgcacttatgacggacaacgggatgttgtgtttgcgtgcaaccgtcgcccagctatgccttgcggtataggaggagagatgtagattttctcctgtcaacttccccagtttcttcaatttccggttatgataacccagcgccgtctgatattgtcggaaagcctcttccggatcattagatgtaataattggaaaaaggtagggactgttgtggacaaatggctcgtagcgctcgataatctcttcaataagaggctctatgcgaactgtgaggcgctgtcccgtcttatggcggacataactaagtattcctccgcttacatcctcctttttcagataggcaatgtctacaaaagccattccacgggtgcaataactgaaaataaacatgtcgcgagaaaaggcaagcggagcagaatgtgtcaggtctagtttttgtaaacgaaccatgatatcttcgggtacggcacgtttgcgggtacgctctacaccggtataaacatttcgaaaaggaaatgtttgttccatttgattccggcttatcaccttattatatgcagagcgcaaagtccgcatataaaaagaactgctgtttttgctcacttttcgtatccggagccattgttcatattccatgacaagtctttcgtctacctgcttgagtggtctgtctaagcctcccaggaagtcggagaagctgttcaatgcccgttggagattgcgggcatttccccaccggccatcgtttttaagctcatcgatcagggttgccaaacaagacagcactgtgtctccgttttcattcaaagtacgaaagcggtcaatgacatccgctaaagtgtagtctcttccttctccgtcccattcgcatagaatccgacggatgcacagcaagtctttttctatttgctgttggtagcgggccgacaacccattgttgtccgcttcagctatgaatgtttctttttctgcatcccaccaatggggaagtacgcgcattcgggtggttatctgcctgttgctttgcttgtggcatagctggtaatagattgtaccggcttttccctccaccgatgattttctgaattttacttttacagtcgccatagttttattatcaatttatagaaatatatattatgtacgacaaaaaataaggcaatctgttttatttgtttcctgctggtatccatttgttaaaaccggataaatcagaatattcctcttttccggataggagggaaggaaaaaacaaaaaggaggaactattgctcctcctttttcccaatattaattaggtatttttaatgatgctgttcatgcgggtgctgtatgctcacaaaagatatataatcttacttaccttcttcttgagagaatatctgacctcttgaaactgttaatcttttttttatgttattttttgaaaggat

SEQ ID NO: 6466 - DNA, 3427 bp, Unknown
  gut microbiota DNA sequence
tacgctggtaaattatcattttcctgcccctagactgcatcttttcgtgtcttttgtgcaatatttaattttttctttttacatttgtgctgtataacacagttttgcagcagttatggtaaaaatgaatttgtcagacgtgaatgttccggagctgatagccgatatgtgggagcccctgaatgaagaacagcgggaatttctcgctaaccattttacgctccagaattataagaaaaatgaagtcattcattgcgaaggtgaaacccctaaataccttatgtgccttctaaatggaaaagtcaagatttataaggatggtgtcggtggcagaagccagattatccgcatgattaaacccgtcgagtatttcggttaccgtgcttatttcgccaaagaagactacgtcactgctgccgccgctttcgaaccttctctgatctgcctgataccgatgagtgctatcactacattggtgacacagaacaatgatcttgccatgttctttatcaaacaactatccttcgatctgggagttgctgacgagcgcactgtcaacctgacgcagaaacatattcgtggcagattggcagaatcactgctcttcctcaaagaaagttatggattggaagaagatggctcaactctcagtatatacctttcgcgggaagatctggcaaatttgtcgaatatgacaacctccaatgccattcgtacgctatcacaattctctactgaacgtttaatcactatcgacggacgaaaaataaagatcatcgacgaagaaaagctgaaaaagataagtaaaataggataaagaatagtagcgtctccccccccttgacgacagctaccccctttttccctgttttgcccaatttataaacttaacacacatttatgtcatgaaaaaaggattaagtgctttgctattagcaagcctgctgtgtgcctcttccggctgtcagcaaaatcaaaaagaagtggtgaacgagtacaacatcgttccgatgcctaatcagatgactccccaagagggacgtttcttactgagcaataaagtatctgtcgtcacagccggttgcactcccgaagtacaagccattgcggacagcttgattgcgcaaattcagttgacctccggtatttctctaaaaaccagttcacaggagaatccggaacaaccagacatacgcttcgttacggaagaaggtatgcccaaggaaggatacaagctttccatcgcaccgaatgagatcaccctttcggcatcacatcccaacggtttcttttatggagtacagaccatgtaccaactgctgccacccgccatctacggaaaggcaactgtgaaacgtgccaactggtctctgcctgctgttgaagtagaagacgctccccgttttccttaccgaggcctgatgctggatgtctgccgtcatttctctacgaccgattacatttataaattcatcgatatgcttgccatgcataagatgaacaccttccacttccacttgactgatgaccagggatggaggatagaaatcaagaaatacccgaaattacaggaagtcggttcgaagcggaaagaaacgttgatagattactattttgtcaactggccgcaaatatttgacggcaaagaacatggaggatactatacacaggaagagattaaagatatagtggcttatgcagcaagcaaatacattaccgtaattccggaaatagagatgccgggacatgccattgccgcacttgcctcctaccctgaactatcttgcagaccggatacgacgtatgaagttaccggtacatggggagtattcgaagaagtcttctgccccaaagaagaaacgttccaattcctggaaggtgtactggatgaggtgatggaattattccccagttcatacattcacatcggtggtgacgaatgtcccaaagatgcatggatgaagtgtgcacattgccaaggactgattaagaaattaggtctgaaagatgataccactccgaatgccattgacggtaagaaacatacaaaggaagaaaagctgcaaagctacttcatcacccgcatggagaaatatctcaacagcaaaggacggaatatcatcggttgggatgaaatcctggaaggcggactcgcacccaatgcaactgtgatgtcctggcgtggtgtggaaggcggtatcactgccgccaaagcgggacacgacgcaattatgactcccagcccgtatgcttacctggaccagtatcaggaagaacccgaaaccgcaccgactaccatcggcggatatcagacactgaaaaagacctatagttataatcctgttcccgatgacgctgacgaactggtgaaaaaacatatcatcggtgtgcaaggtaatatatggaacgaatacatgcaaagtgatgaacgtcgtgactatcaggcattcccccgtgccgtcgccctggcagagacgggctggacacagaacaaccggaagaactggaacagcttccggagtcgcatggtagaagattttgagcgtatggatgccatgaacgtaaaagcatgccgcaatttcttcgatgtcaatatcaatacgcacgtgtacgacggcacattgaaagccgtgttggaaacattctatccggatgccgaaatcagatataccacagatggaagtgcaccgactgcaaagtctgaactttacactcagccattcacttgggaaggttacattgatttgcaggcagcagctttcaaaaacggtaaaatgctggggaaagtgaacggcaagaaactgtatgcaaacctgataagtggaaagcaatacaccaccactcctcattggggttggatgagcggtgacattttcggagagaatgatatattaggcgcagataccactacgttgggattgaccaatggaaaacgcggtaatatcgcttccttcacaccatgggtagccttcagcctaaatgaaaagaacaacaatgaactcgtattttccgttgatctggaaaaaccggccactatcagtaaggtgatattcggtacactctataatcccgctttccgtgtactgcccgcaagcgcagctcgtgtggaagtgtccactgatggcaaagaattcaaggaagtagctcaggcctcctatacccgcgaatatcctgaacatggcaggaagatgttcaccgatgtactggaatttacgccagccgaagcacgctatatcaaagtgactttaaaaagtggtggtacattgcgcaatggcattgactgccggaaagattcaccgggagatattattccttcggatttatatgtagatgaaatagaagtatattaataatgcaaatcaggggttgaaagaagttcctttctttccggttatgaatataattttaggcgcggattacgcggatt

SEQ ID NO: 6467 - DNA, 19493 bp, Unknown
  gut microbiota DNA sequence
ccgaggtcttcaccacataccagcatacgggtggattgcgtcagttgcggcaacttcttcatggcttgttcgcgccagaactcgttgtggcgatgatagtaatactgatcgtacaaacgattgaatgctgccttctcccaatcattcagagcacggtaaatgtaatcgtgttgtacgccgatgcgcggatggaatttgtgcgggtcttcacggtcgggcacaaacagtacgtcactgattaatgcgtacaggccgtcgcgtatccagatgctgtcttcgtccgtctttccggcaaagtaagcctctactttgcgctgtgtgtcgaactcgggacgcatgcgatatatttcccatgtttccgtaggctctatgaaggtctgctttacataatcagtatgcgggccgaacatttgtccgaggaagtattcatggatatagggtttcgtgaagaaatcttcgcggaatgccattccgtagccttctatttcttcgcgcgtcattggcagggcgggaacaaactggcccagcagtccgtgtacggcatgcatcgggatttcccaaatgcggaagaagcccaggatgtggtcgatacggtaggcatcgaagtattccgacatcttgcggaaacgcttcatccaccaggaataaccgtctttctccattacgtcccagttgtaagtagggaagccccagttctgaccgttcacggagaagtcatcgggtggtgcgcccgcttgtccgttcaggttgaagtagtagggttctgtccatgcttctacgctgttgcggctgatgccgataggaatgtcacctttcagtactacaccattggctcgtgcgtgttccgttgcagccagcagttgcaggtgcaggtggaactggatgaagaagtagatggcgatatgcggatagtcggcagattccggctggcataacttttctatttcttctgctttgtattctgtgaatttcggccattcgcggaagttgggtgtcttgtaggcatcgcgcagatagctgaacacggcgtatggctgtaaccattctttgttgttttcgaagaacttccggaaggcatcggatgccagaacttgttcgccttcctgtttgtatatcaggcggaagaactcccattttgtctggtttactgcttcatagtctacggtaggcagggcattcagctctttctgccgtttgttgaattcttccattgcctttttgtccttcaacgtacccatctgtttcagatcggcatacatggggtggaacgcataaatggatatgctgttgtacggataagaatccgtccatgtatgtgtcatggtggtgtcgttgataggcaatatttgtacggctttctggcgggtaagcactgcccagtctatcatctgtttcaggtcgccaaagtcacctacgccgaagctcttttcagagcgcagcgagaagatgggcacggctactccggcacctttccagtcgggtagggcgaagtaaacgtaacggtcaccgatcaccagtgtttcgttagcgcctatctgcggatcggccatgtagcggttggggttgttttcccatgccacggcacgacgctctttcttattataaaggatgaatttatactccagcgggaagctgattttcgatgcgtctacttcaacctgccattccgggaagttggcgtcgctcatcagaacggctttatccgcatcccaatctcccagaactttctggttgccgcaaatgcccagacagtgatcattgtcgatgcatggagcatacgccttgatcaataatcctttcttgtggctctttggagcggcgttacgttcgggatgtgcaagcagggactccgtgaaagcagacgtgtagaagtattgctgttcgggcagattcttccagcagtcttgcaggcggtagactttcttcttgtcagccgatacatagagcgtgcggggaaggctgttccactccgtacgtgtatctttgccgtcgcgataaatgtgataactgtattgtacgatgccgttttcaggcgcttgaatgtccgcatctaaagtccagtgaatgccatccactgtttgtaaaggtatggctttaccgggctgattgttacccagttcaagaatagatcctaagactctaacctcttcaccccaacttgtgcggtactcgatatgaaaagatagtatcatataatattagatttagtaatagctgcattgattatgcaagtatagacattattccgcataatcaagcagctaccgctatctaagttttttaaattcctatgcaaacgtttgtgcttgcatttcgcagatctgtttttatccgcaacgtgaagctccgcaagtggtacaaatgaggcaaccttcctgatatacaagtgtttcgttgccgcagttcggacatttcttgcctttggcttctgtgccgtccgttatgtatttcttcaatgcgcgttccacaccgttcttccaggtattgatgctttcgctgtccagttgcagagagccgaccagcttgataacctgttcgataggcatacgataacgcaatactccggagatcagtttggcgtagttccaatattccttgttaaacttttcggacagaccttcaatggtgactttatatccgcgtttgttctggaactggaagtcgtaacgcttgctgccgtccttgtccaccttcttaataatgtgtccggaagtaacgttcttcggcagaataatgccttcatcgtcatcctgaagaccggtgaagatttcgtaaggatgtccgtccagcaaaccgacgaatgccacccacttttctttattattctggaaacgtacgatgtcggcatccagaactgtcgggcgggtttctactaccgtaggcggtttgcaaggaggcatttcttctttcttatcgctcttggcagaaatgagtacgcccgaacgtgagccgtcacgataaaccgtacaacctttacaaccggatttccatgcctctacatacaggcggtttaccaggtcttcatccacatcgttcggcaggttgatggtcacgctgatggagtggtctacccatttctggatacgtccctgcatcttgactttcatcagccagtctacgtcgtttgaggttgctttataataaggtgattgctcaaccaatacgtcgatctcttcttgtgtgtaacgtttggaaggattgtgtccttgcgcttccatccatgtaacaaatttggggtggaagacaatatattcttcaaaagcatctccggtttcatccacgaagtctacgtgtacgttagtgtcgttcggatttactttacggcgacgtttgtatacgggcaagaatacaggctcgatacctgaggtagtctgagtcatcagactggtggttcccgtcggtgcaatggtaaggcaggcaatattgcggcggccgtatttcttcatatcctcatacaactggggatctgcttcgcgcaaacgattgatgaacggattattcttttcacgttcggtatcgtaaatttcgaatgcaccacgttcttttgccatttccactgatgaacggtaagcactcagggcaacggtcttgtgcactttttcagagaattcggtagcttcttccgtaccgtaacgcaatcccagtgcagcaagcatatcaccttcggcagtaatacctacaccggtacggcgtccttgtccactcttcttataaatcttgtcccacaatatacgttctgtatgtttcacatcttcgctttcggggtcagcatcaatcttttccatgatgcgttctatcttctccaattccagatcgatgatatcgtccataatgcgttgagccaacgctatatgtttctggaacaattcaaagtcaaagtatgcatccggtttgaaggggtttactacataagaataaagattgatagccaacaaacggcaggagtcatacgggcacaagggaatttcaccacatggattggtggaaacagtgcgatatcccaggtctgcataacaatcgggtacggattcttttaatatggtatcccagaacaatacacccggttctgccgatttccatgcattgtgaacgatcttcttccacaaattggttgcattgatctccttctgcacagttggttcagcggcattgacaggatattgttgaatatatggagtacctgtgatagcagcggtcataaatgcatcgtccagtttcacagatacattggcacctgttactttgccttccgtcattttagcatcgatgaacgcttctgaatcgggatgtttgatagatacacttagcatcagtgcgccacgccgtccgtcctgagcaacttcacgtgtagaattggagtaacgctccataaatggcaccaggccggtggaggttaaagccgaatttttcaccggagaacctttcgggcggatgtgcgacaaatcgtgtcctacaccaccacggcgcttcatgagttgtacttgttcttcgtctattttgaagatggcaccataagaatccgcctctccatctactccgatcacgaagcagttagacaaagaagctacctgatagttgttaccaattccggtcatcggacttccctgcggaacgatgtacttgaagtggtcgagcagatcgaatagttcctctgcacttaatggattagagtatttagcctcgatacgggctacttcattggctattctccaatgcatgtctttcggagacttctcgtaaatatttccgaaagagtcttttactgcgtacttgtttacccaaacacgcgcagctaactcgtcgccctgaaaatatcgtaaagattcttcataagcttcctcgtaagaataagtttgtttttccacgattcttttttccttagatttattttttaataagtaagagtgtagaagtgatacctatcattaacaaatgcgattgcaaagctaagaatgttttttattatagcaaaataaaaacagaataaattatgaacaggctatgagatttccatttttgaataatagattgctgatttataaaatattagcattgttgtgtgaacaaaaagtttccaaaaaagaaaattgtttttagactttgattaaacaggctaattgattttagaaaacgtagataaactttaaactcgttatttgacaacaaattgctattctttttctatatttgcaaaaaaataaaagaatggaaatcctaaaacagagaagaacaatccgcaaatatcaacagaaagatatttcttcagatttgttaaatgatttgcttgattctgcatttcgagcctctacagtcggaaatatgcaggtgtacagtgtaattgtaacgcgtgatgcagaacggaaggctaggttggcaccggctcacttcaatcagccgatggtgaaaactgcacctgtggttttgacgttttgtatagacctgcgccgttttactaaatggtgcgaacagcgaaaagcaactcccgggtataataatttagagtggttcgtaaccggctctgtagatgccctgctggcagcacagactttttgtgtggctgcggaagaaaaaggattaggtatatgttatctgggtacgacgacttacaatccgcaaatgataatcgaagccctggagctaccggaattggtatttcctattacgacagtgacggtaggttggcctgctgaggagcctgcacaggtagatcgattgccgctggaagctattgtgcatgaggagacgtatcatgattatactcctgaagatatagatcgcctgtatgcctataaggaatctttgcccgaaaataagcaatttatttttgaaaacaacaaagaaaccttggctcaagtctttacggacgtgcgttataagaaagaagataacgaagtaatgtcggagaatctttggaaagtaataaaaaagcagggtttttaaccctgcttttttaatgatgcttggatatcatctatttctgcgcggaaagttttgtctacttcccgtaattctttaatggttttgcaggcgtgcaatacggttgcgtgatctttgtggcctattaatgcgcctatcttagccgtcgaaaaatctgtataggatttagcgagaaacatggctatctggcgtgcctgtaccacttcgcgttttcgtgatttagtatggatggtagcagtatccagtgagaaatgcttgcataccacgttgatgatgtcatcaacggtaatagatttactttcactttttactaccttccgtacaatgcgttgcgtcagttccagatcaatttccttattatatatagtagaatgtgccatgatggagatgacgataccttccaggtcacgcacgctgtcacccacattttctgcaatataatcgattacttccggagggaactgtaaaccgtcacgatgtatcttattgcgcaggatgttcttgcgtaattctacggttggtctttccagttcagctaccataccccatttgaaacgggtgatgagtcgttcttccatgccttgcaataatacgggagcacggtctgaagtcaggataagctgtttaccgttttggtgtaagtgattaaagatatgaaagaatgtattctgtgttttggtaacaccggcaaattcttgaatatcatcgataatcaatatgtcaattgattggtagaagttgataaaatcgtttgtagtattgttacgtacagagtcggtatattgtacctggaacagatgtgccgatacatatagcactctcttgtccggatagagttctttgatttttgtgcctatagcatttgcaaggtgcgtctttcccacgcccgatgctccatagaaaaacagcggattgaaaattgttttcgccgggttttgagcgacagcttctgctacgctgcgtgaaagtttgttgctatagccttctataaatgtttcgaagttgtattcaggattcagatgaggatctaaatctgcaataggagcttgcggtatttctctgccgattacctttttctgtggaataatagtgcggggagtagattcgagattgacggtagtacgtgaactcttatccaccataacattatacaataacttggtgccatcaccaataactttatatagagttttacgcaacaagtcaacaaacttgtcctccaaaaactcatagaagaactggctgggtacctgtacgaccagcgtcttgtcctcatattttaaaggtatgatggggagaaaccatgttttgtatgtctgctccggaacattgtctctgatgatttcaagacagcggttccatagcccgacatgatttaattcactcataacggctttaaatacatttattaattaagcaaaacttctacgcatgcaaaattcgcaatcttatttgagaaaaacaaatgtgttttttcttgctttttatctaaaaacaataatctctttactttcaactacttatcttgtttcatgtaaatagccccacagggaggctattgcatttttataagtatctgtcttatagggtgatatataagaaaggaataagttttttaacttttcaaataatctgacagatgggaatactttagtttctacatggacttactgaggctttttcttccaattctgtttgctcctattatttagacttattctatttaaagagatttttcctacttatcttttttgccgaacagggagaaatgaacataccttttcggatgtgatttcaggtcttcaagaaggctggcagcattggctgttgtagcattcaaattattgtaaagcgatggatcgtttaacaacaagccgattgtattgtctttcctgcctaattggtctgtaatcatttttgcatttgctaaagtcgaatctattctggcaaatgcggcagcgtaatctatttctttcagattatcactgacagtgacgaaattatctcctatggtgttcagctttttagtaagctggggaatatctttactcataatggcctgtaactgtctgctggtgacttccatgcttgccattgtgttttgcacgctgtgcagtgtaccgggaattgccgggtctccaaggattgtattcagtgaagcaaggatagagtctagcttgggaagcatcttttctacctgaggcatgatggtggctacctggtccattacaccattgttgacattgccttgtagggtatcacctgtcagatacttctcgcgtggattattggcaagtagtaagttcatttttacaccacccatcagttcggaggctaattcggcggtactgcctttaggaatacgcagttccgggtctacatctatttccgctaccacttttcccggttcattgtagtcataataaaggtcgcgtacaatacctacacgaaagccatcggcaaagaccggacttgatttggtcaatccattaatgttatggaacttgacgtagaaatagttggtaggcttaaacatatgaatgcctttcaggtagttaataccatataccaatatgcagagagcaataatgcccgcaattcctattctaacttctttagtaagatacttcatcatgatgttatagtcttattatttatttcttttctttttaaattcttcgatagcagcgctgacgcttgtcttctttccgtttttgaaagcaatgataaatgcgtctttgaattttggtgctatctcccgtttagttcgtaataccttattataatcggtcgatgcaccgtatgtgtatttacaaagtccgccttcctgataatactctacacctttcagcccttttagtcgtttgtcattggcggcaagcggacgggaagaagtaagtatctgtattttaaacactggagcagcactatcggtttgcctgtcagctactttttctgtattttgtttggtttcggtgttattggaaacgggggatgcaggtatctcttcttctaccctaccggcatccgtatcctccggtagtagggtgcggctgcttcctgtcatccgtatttcatgttcacgtttataagacaggaaagcacggaatattccgttggcaagtgtggtggttcccgcttccgaattgagataacgttcttcttccggattggatatgaaaccgagttctaccaggatgctgggcatggcacttgctttcaatacaaggaacccagcctggtgtacaccacggtctgcacgcttacaggtatggcggaattctttctgtaccaatgaggcaaggtgtacgctctgagacatgtatttatcttgcatgaattcaaagatgatataagattcggctgagtttggattgaatcctgcgtaccgcgtcttgtaatcactttcgtataaaattacggagttctcccgtttagcgacttctaaattggcatccgacttggctaaaccgagcgtccatgtagaggctcctttgactgttttaccgcccgctacggaattggtatgaatggaaatgaataaatcagctttagcattattggctatttccgcacgtctgtcaagtgggataaatacatctctttcacgggtatataccacttttacatcagggcaattcctttttatctgtttgcctaatttgagggcaacattcaggttgatagtcttttctttggagattcggcctaaagcaccagggtcatgaccaccatgtccggcgtcaataacgacaacgaagtcttttgcttcgatgctggtagtgcaaaaaggagagatgaacagcccgaagcaaatacagatatataatatgtgtcgtttatatagtttcatacccaaaagtcgttgcaaatgtagtggaaatttatagaaaactcacgttttacatgaagttttgttacttttccccaggatttgtgagagatttctttaaaacagactaactttgcacccgcaaattaaatagaaaaaaggtatgttagttcgttttcttaagaactggacattgccactggcgatgctttcaggtactttgggatactttattctcgcaaatgtctctttcttggcgcctaccaaaccatatattaatgatttgattgcgtatattactccactgctgatctttgcccaactgttgcttactttttgtaaagtagaaaaactgaatgaactgaaacctaaagcatggcatggctggttgctgctgtttcagacaatttcatgtctggcaattgccgctttgctggtatgctgtccgatggatgaaatatatcgggaagtatttgagggggcgatggtttgtgtgatttgtccaactgctactgcagcggctgtcatcactggcaagttgggaggcagtgcatctacgttgactacttataccttattgtctaatttgctggcggcagtagcggttcctttggtttttccgttagtggagcctcatgctgacatgactttctttgctgctttcctgaaaatcctgagtaaagtgttcccgttgttgttgttccctttcttcctggcgtggtttctgagagtgtttatgccccgtgtgcaccattttttattgggtttccatgatcttgctttttatttgtggggcgtagcgcttgctattgtatccgggcaaactgttcgttccctggcaatcagtgatgcaccggtttcagtggaaatactgatagcctttgccggattagtggcttgttgcctgcaattctttctgggtaagaatataggtggacgttataatgaccgtatcagtggcgggcaggcactgggacagaaaaatacggttcttgctatctggatggcatatacttatctgaatccactttcctccgtgggaccgggatcttatgtcttgtggcagaatctgatcaatagctggcagctatggaaaaagagaaagagggaagaggaagaagcgcaacattaacgcagcagcaattcctcctcgttatatcttggcctgttctttacttcaatgtagattttaccgatatattcgcctacaattcccagggataccaatattgtaccacctaccagccaaagggaaatcatcagagatgaccatccgggtacagtgtcgtggaagtagtaagcgcgtagcgtccagatggtgacgcatacggctatcagtataaaaatacagcccagccagaaaaccatgcgcacaggtttgacagaaaaagatgtgattccgtcgatggcaaagtttaacatcttcttgaatggatatttcgactctccggcaaaacgcttgtcgcgattatagtaaacacaggcggtttggtaaccgatgagaggcaccagcccgcgcaaatagagattgcgctcgcggaaacggcaaagttgttggatagcacggcaactcatcaagcgataatccgcatggttataaaccgactttactcccattattttcatcaacttgtagaaagtgagggcagtggtacgtttgaagaaagtgtcggttttacgttcccggcgtacaccataaacaatgtcacatccctctcggtagcgttcgagcatttcgggaatggcgttgacgtcatcttgcaagtcggcatctatggaaatggcgacatcacatcgttctttgacggcattcagtccggccatgagtgcattttgatgtcctacatttccggctaggttcagcccacaggcatagggggtattttggtgtaaatccttgatgataggccaagtctgatctgtactgccatcatttacatataagatataactatgctgagagatgtgtcgttctgctatcagtttatccaataggagactgagtcttttatgtgtttcgtgtaatacagcttcttctttgtagcaaggtactacgatagcgagtactggagatttttccataatcaattattctttttgcaatattcgtaagaaatcgggagaaaaacaaattatctttctttgtatttgaaaacaaatctcactagcaggaagtttaccgggatagcgatggtaaataccggtatgggggcgaagggtttggaaaagcctaaccaaaggaacagattcagtaaacttatatgtaggatatagttgatcagatgggctcccccgaagccaaaagctttcttccaagatggcttctttccgaaggtaaaaagggctgtcagataaaaattagcaataaagctgagtatgtagcctatgctgtaggctatatttacattgatgaatcgctggaatataaaatataaaccatagtgcagagcggttgcaaagacgcctaccataatgaaacgaataaattccggcagttttttcagtctcttcatattcatagaattgagaaggcaaagttagggattgttgcagaataattcgtacttttgcgcacagaaatcactaaaaacagaaatatatgtcagatgataggaagaaagcgttctggtttatagcgctactcagtatgcttgtgatactcccttttctgggagaaaccattttttattctaaaggggaaccacgtgaggccattgttgccttttctatgttagagagtggtaactggatacttccggtgaattatggtaccgacatagcttataagcctcctttcctctactgggccatcgctgccatctcttccctttttggaggagtgtcagagtattcatcccgtctgccgtctgctattgcattcctggctatgcagttggtgttcttctcttttatagcaaaacgtaaaggggtaaaaacggcttttctgacttctattcttcttctgtcttcttttgaagtacaccgggcagcggtggcgtgccgtgtagatatgttgcaagtgtcgcttattgttatttcattgtgtttgctgtttcgttgggatgagaaggagtgccgcggtattccctggctggctgttttactgatgggctgtgccacattgaccaaaggaccggtaggttctatattcccatgtgtctgtatcggtctttaccaattgttgcgtggacgttctttctggaagacattcttcttgttattgcttgtaggaatcctttctctgattccttatgcagcctgggcgggcgcggcttatgcacaaggcggacagtcttttgtcgatttaatgttggaagagaataccggtcgcttcatgggaaagatgtcctacggatcacatgagaatccgatatggtataatttcctgactgttatctggggctggataccctggactttggtattgctgctctctctctttggactgaagtggaaaaacatgcgtgtgttacctgaggggacatctttcggcgaacgtatcgggaaggcctggaaaaaattccgttcacagtcgcccttgcaattgttcacatgggtggtaattctctttattttcatattttattgcatccccaagagtaaacgtagcgtttatctgcttcccatctatccatttatggcagtgctgatagctgaatatttattggctttggtgcagcgtggggcaaaagtgtttaaaatctctgcacatatatttgcgtctctgtgtttgatacttacggtaactttcatagcggtacgtttaggactgataccggatagcctttttggaaccggccgtcatgctgctgaaaatgtatcttttatgcatgctttggaagcggtttctctgtctattcctaaatggtgtctggtggcgcttcctttgatagcagctgcctgcacatggatgggagtagcgaagcggaccggcgcttactccttattatacagtatcgccggatgtatgctttgtctttttgtttctctggatggggtctatcaacctacagtgttggcagttaaatcggacaagcacctggttaaccaaatcagggaatatgtgccgcagggaacagtctactcatatgatggcatgagcttctattgtgcaaacttttatatgaatgatcagatgcgtcattttgagaaggatttgccgtccggtgagggatatgttgttttgccggagagaggaaaagaactgttgtttgaagaatttggaaatacatacgactttgaagagattttccttacgaagaagcgcagttgcgatttgcgtgatgagatttatatgtataagtttaaaaagaaataaatgtcacccgttacaatcatcgataaatattatccggaggataatgaacgtaaacacatcttgttggtgcatagtcgtttggtggccgagaaggctctttcaattgctgatcaccatccggagcttcagttggataaagactttttatatgaagccggcatgctgcatgatataggcatctttctgactaatgctccgggtatcttctgttttggagatcagccctatgtctgtcatggctatttaggggcggatctgatgcgtcaggaaggatatccccgtcatgcattggtatgtgaaaggcatacgggtgcagggctatctttggacgatattatttcgcaaaagctgccagtacctcatcgggatatgctcccgattagcctggaagagcaagtcgtttgctttgccgataagttttattccaagactcatctggagcgggaaaaaacagtggagaaagcccgaaaaagtctttctaatttcggcaatgaaggtttgaaacgttttgatcgctggtgcgaacagttcttgtagcaatctaaatttctttaaaaagggagattatccgtataatttacgtacttttgccccttcaagcggaaactataagttgattacgccattgaaagcaaatacattcatatcattcatactactacttgtcttactcctgctctccggcgaggctttttcgcaacgtcggcgtggaagaactgttcccacaggaagcgagcggacagatacctttaatatagaaggtgtacaaagaggagacactttgttgaagggggatactctgcaaaacgatacgatacaattgcagcctgccggtaagaaaaagcagcctttggatgctccggtgatttatgaagctactgactctattgtgttcactcagaatggcattgccaatttatatggagatgggaaggtgaactatcagaagatagagctggctgccgaggtgattactatgaatatggacagtagtacggtttttgcccatggtgtggaagactcattaaaagtcataaaaggaagaccggtcttcaaagatggcgatacaccttatgagacgaatacgattcggtataattttaagagtaaaaaggggctgatcagtaatgtagtcagtcagcaaggcgaggggtatgtgactggtaataatgctaagaagggtatgaacgatgagctgtacatgaagagtggccgttatactacctgtgataatcacgatcatcctcacttctacatgcagatgacctatgctaaagtacgccccaagaaaaatgtagtgacgggccctgcttatctggttattgaggatgtcccgctacctcttgccgtaccgtttttcttctttcctttctccagtagttattcatcgggtttcatcatgccaagttatatggatgactctacccgtggatttggtttgacggatggcggttactatttcgctatcagcgataagatggatttgaagctgcgcggtgatatctttacaaaaggctcctgggctttgaatgcggaaaccaattataatgttcgttataaattctccggtctgtttcaagccagctatcaggtgactaaaaccggtgataaaggcctggatgactacacagtagcaaaagacttcaaagttgtttggtcgcatcgtcaggatcccaaggccagtcctaattcgtcattctcggccagtgtgaacttttcgtccagtagctatgagcgtactaatatcggtaatatgtacaatgcgcaggctatgacgcagaataccaaaacatctagtatcagctattcacgtaactttcccgatcagaaactttctattgcggctaccggtaatattgcacagagtatgaaggattcttcgattgccgtaactttaccggatttgaatattactttgagtactattttcccttttaaacggaaaaatgctgtaggtaatgagaaatggtatgagaagatttctcttcgctatagtggccgcctttctaacagcattactacgaaagatgatcttctgttcaaatccaatctggtgaaggactggaagaacggaatgaaacatgaaatacctatcagcgctacgtttacattgttcaagtacttcaatgtaactccatcggtgagttatacggagcgttggtatacacgtaaggtgatgaaagactgggatccgaatataggtaccagtggacgggaagtagaaactgatactatttatggtttccatcgagtatataactatagtgccagtctgggtgttaatacaaaaatttatggtatgtataaacctttgtttatgaagaaaaaggaaatacagattcgacatgtcataactccttctgtcagtatcagtgcagctcctgactttggttcttcccgctatggttactatgatacttatattaaacccaatgctgatggaacacaagatacgatcacttattctccatatgccggacaaatgttcggagtgcctggacaaggaaaatctggaaatatttcattccagatatccaataacttggaaatgaaatataaggataagaatgactcaatacgcaaggtcagcctgattgatgagttgggtgcgagtatttcttataatacggctgctaaggtgcgtccatggagtaacctgacattaaatttgcgtttgaaattgagtaagaactatacctttagtatgagttcagtctttgctacttatgcttatacctttgataaaaacggtagggttgtaacgagtgaccgcacggagtggtcttacggacgttttggacgtttccaaggctatgggaactctttcagttacacacttaataacgatacatggaagaagtggaaagcattctttaccggagagaagagtgaggatgatggaaaaggaaacgaacagactgatgcggacagtgaaagtaacgaaactgatgatgcgggaacaagtaatacgcctaccaagcggaagaaggaaaaagctgctgtagatgatgacggttatcaggttttcaaaatgccttggtctataaatctgagtacaggctttaatataacagaagatacctccagaccaatcaacagagagagcatgcgttatccgtataagtttagtctgaatgcgcttaatattaatggtaatgttaagatttccaataagtgggcagtcagcttcaactccggttatgactttaatgctaaaaagatagtgcagacttctttcaatataacgcgtgacttgcactgtttcagtatgtctgctagtctttctccatttggtacatggaagtactatagcttcgttatccgtgccaatgccagcattctgcaagacttgaaatatgataagaagagtcagacacagactaatattaaatggtattaagaatccatttgatattccttttactgcatttgctttttcataaaaaatatccccttctatactgttgaaacgatttatttatcgaaatgcttcagtgtagaaggggatatctttatttctgattaggaattgctttttaccatgctatttcttgttctccatgttctttcaaataggcattcgctctgctaaaatgcttatttccaaagaaaccattgtaggcagataggggagagggatgcgcagaagtcagaacaagatgcttgctccggtcaatgaatgcacccttacgctgtgcataagatccccagaggatgaatacgaggtgttcacgctgttcggcaaggacacgtatggcggcgtccgtaaaagtctcccagccgcggttctgatgagaacctgcctgatgggcacggacagttagggttgcattcaggagcaggacaccttgctcggcccaacgggtcagatttccagtggtgggagcatctgtaccaatatcatcttttatttctttgaatatattaatcaatgaaggagggaaacgaactccatcgttcacagaaaagcataaaccatgagcttgtccgggaccatggtaaggatcctgaccgatgataactactttcaccttatcgaatgggcaaagattaaaagcgttgaatatgagctttcccggagggtatatcggataatgactgtattcttcccgtacaaaatccgttagtgtatgaaaataatctttttcaaattccggttccaaacgtgctttccaactttcttctatttgaacgttcataattttgtgtgttaaaagtttcggatgctaagatacaattttaatctgatttctgtaatagagcattctttttatttcttcgaacagagataaacagaaaaggcagaaatcataaaatctctgccttttctatttgtacctggatattaaatcaagtaaatattgtgttccttacattcttcacgcatatcttccggccagatactggcttgaatttcgccgatatgagcttttcttaaatagaacatacaaagacgtgattgaccgataccaccacctatagaaaggggcaatgtgtcattcatcaggcgtttatggaaatagagttccagtcgtttttcttctccctcttgtttcagctggcgttgcagggcttccttatctacacggatacccatggatgatagctcaatgctgcgctgcaatacattatcccataataaaaggtcaccattcaagcccggaagaccattcaacccttctgtggtatagtcatcatagtccggggcacgtccgtcgtgtttctttccatcgcttagtttacagccaataccgataatgaatacagcaccatattttttcgtaatggcatgttcgcggcatttgggttccagattcggataaagttgacgtaactcttccgcatgaatgaaatgtaacttctgaggcaggcaaggcttaatctgagggtacatttcatacaccatatattctgtacgtatcatggctgcataaatacgggttacaatttctttcaggaagttcacgttccggtcttcggtagtgatgacacgttcccagtcccattggtctacatagagagaatggagatttcccaactcttcgtctgagcgtatggcattcatatccgtataaataccatatccggattcaatattatagtctgccaatgtcaatcgcttccatttggcaagagaatgtactacttcggcttgcgcatctcccaaatctttgataggaaatgatacggcacgttctacgccattcaaatcatcattaatacccatacctttcaatacgaaaagcggggctgtgacgcggcgcaaacgtaattccgatgaaaggttcaattggaagaactctttgatctgtttgattcctaattctgtttgttttaagtccaataagggtttataaccctctggttttatcagataactcataagtgtgtactatgtttttgtcc

SEQ ID NO: 6468 - DNA, 682 bp, Unknown
  gut microbiota DNA sequence
gttaataagtatttttattatttagagataacggttcggaatgaggtcaaaattgcaaaagacttgtcaaggaattgcttaccactgctgaaaatcaatgctatgtccgattcatggaacaagcgaggtacaaaagaggcaattatattatgtcaaatgtatattgcccaatacatataaacaaaaatgccaccttcaaataactcataatttgaaagtggcattatttttatatcaaagaaattatgacgtgtttagtgaacgctcatcttagaaaacacgttaataattatcactccagctatgattagtactaatccgattagggcgggtagatctggtgtttgtttgaaagctatcgctcctatgattgctattaaaacaataccaaccgcagcccaaatagcgtaagctattccaacagggatagtcttcaaagataagctgagtaaacaaaaagctgttgcatatgccaaaacagttacaatagcaggtacaggcttcgtgaattgttctgataattttaatgtagtggtgccaagtgcttcggcgaggatggcacagatgagaaatgtgtaactttttatcatatcgagattctattatgatttcatggtgcaaaattagcctaaatttttatcaacaccgagaaaatatcattccaacaatggtacttttcgat

SEQ ID NO: 6469 - DNA, 2067 bp, Unknown
  gut microbiota DNA sequence
atatcagatagaaatgatttgtttatcattagaatctatgtaacatatgcttgccggtttatgacttttaaaggtcggtacaaaaaagtctcccttcggattatgtatcggagggagacttttaagagaagtgtaataaagagagacaggcttaatctatcttcataaatttctgttgtataacctcattatcggtttttatgattatgaagtaaatccctttactcagtgaagaaacattgattccttcgttgggaatcacctgtttgtccaatatcagtgtttgccccgcagtatcagagatgcgtacttcttcaatgttgccaatatctccccgaatatacaagcggtggcgtacgggacttggataaaccaacagtccttccgaaataggagtaattccggttgcttcgcctatatgcaggctgacaggagtggttaaactgcccgtcagtgtaccgctccattctatttcttccttgacgttgtattcctgctggtcggcggtgtcgaaggcacgtagggtcagtttgccatcggtttgctctccatgtgcagtgataaatagataaccgtctttttcaacggctatacctctacattcatcgcccacaaatacaccgacaaggaatttccctatttcagctttttgctctccgttgtaaagctcggctatggcaatcacgttgtcttcggactggtgaatgtcataactccattgtgctgatggagtggatggttctgattctgtaccatttgcagtatagttgaaagatttcactgattgagaatagtacatataaccttcacctggaagcaggtgggttaggctacctgtccatgtacttccatcgtatatggcaaaactatccaagcctttgataaggtcattctcttcagcttgcagattttgcaaggcttgctccaatggtaaagtgacggtaggaatataacctatccagttccagccctggtttagggtaatggtgttgcttgtcggatctgccccctttccggtcagttcaagagttgcctctttcttcatctttatcttgtaagcttgagtagtgctcagactgttcaatgaaccttcccaatcattttcatttttgttcgtcagttctccgttttgtccttttaggatgaggacggattctttgatgggagcgagtagagctggtatatcgtttagattctggtcctgcacgttgatagagaaccagttccagcccatagagagggtgtagttgcgggtgatttctttttctccggcttccacaacgctcacttttacttccggtttcatgtccataccttcgacggcaaattgtatcatagtctgtcccgggagctcgcctgatatgatgaaggtagctttaccttcttcgttcaatgtggcttctgccggttctatggttgcgatgatggaagaaacggaagttgctgtcactttcttgcctgttgaggcttctgccggttctacggttactgtaatttcagccgtttcattgtacaccacttcaatctcggaagcgaccactgccttgggctctttttcaatggctatttcttggctataatcactttccatttgtatgccggcatagctcttcacacgtttgctgacagtcagtatcactttatcggtggtagccagagcctcggcagggacaaagcgcactttcgaaacgaattgctcattcttgttttgtgggtttgcttcggcgttcttgaaagtcacttctcctgctaccgcttctccgttgcgagtaatggtgatgaactcggcagtcatagtttcgggcagcatgaacttgctgaaatcaatttctatgcctgtctcataaccacgtatggctgttacggtaggctgtgcggtttgtaccatgccaatgttcacttccaactgcgggggaggaacggggagccattcactgtaagttgtctggtagccttctttttcaaacttcacttgccagagaccttgggggacatcccagcggtacataccgttctcatcagtaaacaagggattttcctgagcatattcggctgcatcccaaagta

SEQ ID NO: 6470 - DNA, 39562 bp, Unknown
  gut microbiota DNA sequence
gaaatagaagctttttataaaaagtatttagtaggattttaatgtttatctgcgaattaaatcctatatttgctcaccaataaaaaagaaggataatttataatttgtaactcgtaatttgttattaaaagaaatgggtaaagttcttattatcggtgcaggcggtgtaggtaccgtcgttgcgcacaaggtggctcaaaatccggatgtattcactgagatcatgattgccagccgcacaaagtccaaatgcgacgctatcgtaaaagcaatcggtaaccctaacatccagaccgcacaggtagatgccgacaatgtggatgaactggttgctctctttaatagcttcaaacccgaaatcgtcataaacgtagcacttccctatcaggatcttaccattatggaagcttgtcttaaaagcggagtcaactatctggacactgccaactatgagccgaaagatgtggctcactttgaatacagctggcaatgggcatataagaaacgttttgaggatgccggactgaccgccatccttggttgcggcttcgatccgggggtaagtggtatttatactgcatatgctgccaaacattatttcgatgaaatgcaatatctggatatcgtagattgcaacgcaggtaatcatcataaggcatttgcaacgaacttcaatccggaaatcaatattcgtgaaatcacgcagaacggacgttactatgagaatggccaatgggtaaccacccaaccgttggaaatccataaggacctgacttatccgaatatcggaccacgtgattcctatctgttatatcacgaagaattggaatctttggtgaaaaacttccctaccatcaagcgtgcacgtttctggatgactttcggtcaggaatacctgactcacctgcgagtaatccagaacatcggtatggctcgtatcgatgaagtggattacaacggggtgaaaatcgttccgctgcaattcctgaaagccgtattgcctaacccgcaggatctgggcgaaaattatgaaggagaaacttccattggctgccgcatccggggattgaaagacggtaaagaacgcacctactacgtttacaataattgtagccaccaggaagcctacaaggaaacaggtatgcagggtgtaagctatacaacaggagttcctgccatgataggtgccatgatgttcctcaaaggattgtggaagaaaccgggagtatggaatgtggaagagtttaatccggacccgttcatggaacagttgaacaaacagggattgccttggcatgaagtgtttgataaagatttggaagtataattcttcatttttaatttaattatagattatgcaagttggagataaagcgcccgaagtattgggcatcaatgaaaaaggcgaagaaatccgcctcagcgattataaaggaaagaagatagttctttatttctatcccaaagatatgacttcaggatgtacggcacaagcctgcaacctgcgcgataattattcagaattacgcaaagccggctacgaagtgattggcgtaagcgtagataatgaaaagtcgcaccaaaaatttattgagaaaaacaacttacctttcccgctgattgcagatacggataagaaactcgtggagcaattcggtgtttggggagaaaaaagtatgtacggacgtaaatatatgggaaccttccgcaccactttcattatcaatgaagaaggagtgatagagagaatcatcacccccaaggaggtgaaaaccaaagaccacgccgcacaaatattataatcaacaagaagacaagttgacaaacagataaaaagtcagttcattatcaattgatatcttattaacttgtcaactctaataacagcaagtatatggcaaagaaagacgaacttaattttgaaaacgaaaacaatatggcatcaagcgaaaagctgaaagcgttacaggcagctatggacaagatagaaaagagcttcggcaaaggttctatcatgaaaatgggagatgaaagcgttgaacaagtagaagtaatcccctcaggctctatcggactgaacgtagcactgggcgttggcggctatccccgcggacgtatcatcgagatttatggcccggaatcttccggtaaaacaactctggctatccatgccattgctgaagcacaaaaagcaggtggtatcgccgcgtttattgatgctgaacacgccttcgaccgtttctatgcggccaaactgggggtagatgtagataacctgttgatttctcaaccggataacggagaacaagcattggaaattgcagaacagctgatccgttcttctgcaatcgacatcatcgttgtggactctgttgccgctttgactccaaaggccgaaatcgaaggcgacatgggggataataaagtaggtttgcaggcacgtctgatgtctcaggcattgcgtaaacttacggcagccgtgagtaagacacgcaccacatgtatctttatcaaccagttgcgcgaaaagatcggtgtaatgttcggtaatccagaaacaaccactggtggtaacgctctgaaattctacgcttccgtacgccttgatatccgcggaagccaggctatcaagaatggtgacgaagtgctgggtaaacagactaaagtaaaagtggtaaagaacaaagtggcacctcctttccgcagagcagaatttgatatcatgttcggagaaggcatttcccgtgccggagaaatcattgacttgggtgccgaactgggtatcgtcaaaaagagtggttcctggtttagctacaatgataccaagatagctcaaggccgcgacgcagccaaacaagttattgctgacaatccggaattggcagaagaattggaaggattgattttcgaagctttaagaaaagacaagtaatcaaattttcactcataacaaaaggggaaccggaatcggttcccctttctcaacaaactatttacacctatcagcagacagcctcattccaagtcttccaagcgtttttccagcatctccatgctctcctcaaaacgtttccaggaatcggcatccatctgtttctttaaatattcgctatcttttagtttacctaagtctttcaaattctttaatcctttcaggctttccagacttttcaggctttccagactcttcaaaccttctaagccctgtaagctttccaatcctttcaaaccgtccaaaacgcccaaatccgccaaatcaagagtaccgtctacgatacgatatacattccctcccacattcatactggtattttgatacatcatgatattctgaatatctttcaaagtcatttctccttccagataaacgaacttcaagttagcagcgccgtctataatcataatcagttccttcaccttatcccctttcctattaatatagaattcggaactggagacattccctttctgcttcatcaacagctcatatttggacgactgtaccagtgtacgcaaatctttccgcaaatccttcttgatattattatccattgtagaaacgatctgtacgctttccagcttaccggatactttcccaatatagatatccttcgtgaaaagattggggttcatttcaatcatcgcttttgagatataaacagaggaaacccctttcatatcattatacgtattgaatatatttttctgcgcctggcagagcagggggagcatcagcagcacacctgccaataaaatcttgttgagtttcataatcgtttatctttgcatttctttttttacttcctgattaacttttttcatatccatttgtgtttccttcacctgggcaatgccttggttcagattggtggaaacttcaatcaaagtggcttgcaaaacctgataagcttcttccggatcagagaatgtatcctgcggtgtgggcggacacacatcttttcccagattttccacaccatatccgatgcctataattaccagtatggttgctgcaacactcccaatccagcgccagttacgtctggatttgttaggccggaagaaacgttgttcttcttcagccttttcatcaatcagccggctcagtttatcccccaagtccgcaggaacttccacatctctatctgcaccctggttaaggctaagaaaaatttctttatccttttgcagatgttcgggcacttccgttgttctgaaataatctctcaacgcctcttcctggctctcggtagtgttcccctcataaaactcggcgagcagcctttcaatttcctcgactttcatagttattccatttattaaattcctcacgtattcttttcctcgcccgggacagcagtacacggatatttgtagagttcaacccggtcacttgttctatctcttcgtaagaacagcctttgacatcacgcaagttcacaatccgctgctgctgttcgggcaagtgggcaatgatatcttttacttgccttacctcgtcacgtacctccagattatcagcttgagaaatatcctgcacagcagtcaattccacagtttgcctggataagacatacttccctgaacgaagtaaatcaaagcacatattctttaccaaagtgacactgaacgcttccgggttgctgataaccatcaatccttcccgcttatcccatagcttcagataggcttcctgaaccaggtcctccgcatctgccgcattctcaagcagccgataggctacactgtacagcttgcggtggtagggcagaaactcatttttaaaactttcagcatccatgggctttttctgtatctcaatcctgtttattggttgtatctattgattagacgtaaagagacagaagtttgttacaaagaaaatgaattttatacaaaaatgcggcaaaagaaattttcttctgccgcataccttatattaataagtgttttctttagaaccaataaatatacgccagcgtgcttacgctaattgtaacccacaacaacacaccttgaataagtggtttgatgcccactgccttcaatacatcacgtgaaagggaagcaccgataaagaacaaagtgatagtcagtgtctttctggccagactgttaattccctctcctatcataataccggtttccgatgaatttaatacatatgtattgaataccatagccagaataaagaagaaaataaaccaagggatacttatcttctgtcctttactcttgaatacaaaagaagtaatcaaagccaaaggaataatccacaaggcacgtgtcaatttaatggtcgtagcaatttgcaaagcttcttcaccataagccgcaccggcacccactaccgaactggtatcgtgtatagcaattgccgcccatgttccgaattcttgctgactcatatctaaagcatggccaattaccggaaagataaacagtgcaatagcattcagaataaagatggtacccagcgctacagacatctccgtatcttttgcccgcaacacaggacctaccgccgcaatagcactaccaccacagatagctgtaccggaactaatgaggtaagaagtatcacggtctaccttcaggaatttacgcccgatgaaccaaccgataagcatagtacccactactgaaataacagtgaactccattccttctttacccgaggctaaagatgcctgaagattcataccgaatcccaatcccaccactgaatactgcaaaagatatttggatactttcttattaaacttcggatgtgcctgcccgcttgacaaagcaaaaatcaatcccaggaacaaagcgacaggaggtgtcacccaagtagaatagccagggatataatccaataataagaagattgataaaagcaccactaaagacacataagtaattttgttcttccgttgaagatacgccagagtgtttacactcgctgtttgaattgaagccataatttttcttgtatatcaatatttatattatttctgatttccgggtgcaaaggtaggcttctttacctatatacaccaattgtatctgtttatacgctataacttatggttatgatgtgcagcaaactgcataaagacctgggaaagcccgctctcctgtccctgaggttgggcaaaactaaaatcacgaagcataaccatgtcttttatctcaatgacacgcagttgtccggcatagagttcacgggtgatagaacgaatggaaacgatccccatgcagtcagtatgttccaggaaaagtttgatactttccgtactacccagatacattaatacctgaagagacgataactttatattatgctgttgcaatgccttctcaaagacatccaaggtgcccgatcctctttcacgaagcactaaaggaatatgaagcaactcttcgggagtaatttcttcacctacctgtagtttacttcccgtacgtgtcacagccaccagttcatcctccaaaaaagtagtatatttcaaatttggcaagcggaacacaccttccactaacccaagatctatgcgatgttcctgcaaagccgcttctatctcacgtgaattgccgttcatcaatgaaagatttacttgcggaaactttttgatgaagctggcaagcaatggaggtaaaacatattgggcaatggtagtactggcacccagacgcaattctccggtatattcattatgcagcaaatgcatctcatattccaatcgcttataatcttccagaatacggccacaatgttccaaaagtaactttcccgcttcggtcaaactaatcttgctaccttgcctgtcaaacaaacgcgcctgataagtgctttccaactcttgtatatgctttgttatggcaggctgactgacaaacaactcttgcgaagctttcgtgaaactcaggttcttcgctacagactgaaatacttttaaacgaaaatcagacacgggagttagtgattaaaggttagcgattagtgataagtaacaggtattattcaagttcttcggccttgatgcccaatgcacgcatcatggagtaacccagtaaatcccatttgcaaccaaggggatgcgcaggttcatccatattgaaaagaaacaatccttttgagttttcagtatcagcatttcttaaatactcatccaaaacttccattaatttagcaccgtaatcatcaataaacggaaccagcataagccgtttaacatcggcagagttaagtgctatattcagcagatcaagatagagatttgcccgtggaaccaatccttcagaagatacagaagtaaatgtaaactcacctaactgatttgtatagcccaccccgttcaaatctttattcaaatcagacggatcgcagtgaagcaacttattggtctgactgtcatgtacaaaaagtacttctatgttattatccttatcacgaacaccggagtcgagtgccagataagaagcccactcttctacataaatattctgcaacggacgtcccagctgcaactcaaaatatctcttcagatctttaactacgtcattaaagtatgctacgtccaccagtatcacattctctgcgagctttacattttctgccataatctattctattctatttttgagggataaagatacaatattcctttcagccctgcactagttttactcaaaatttacacattagtatattttagtaatgcttagaaaataagattctctggaatttcgtcactgctctttcataaaaagataatcgctgaaaggaaaactcgtattgtcgagtttatatcaatatttcctacatcctacacccgctattatttttatctggttatcaaatagataggtggtgtaggaaggtgtgtaggaaggtgtaggaaagttgcatcctacaccgaaaaacagaagaaaagagcgtttttatgtttgtaattcactaattcacaagtccttaatatgcattatgcaaactttagccgaattgatgcaaatatctccttttttagcctgaattattcatcgcaagtgtaaaaggagtatcacttcgttaggaattaaggggttatactccattatctcgttatatagaaagcagatattacagaggagaaacttgatatgatccttccttttccccttaaagccttaagcttaatgtcattatgctataagcaaaaccttgttttccagctgagggctgtccggccctcaattgcgggctacacagcccccatatggaaaacgtatagcccacaactgtgggacgaagttttgctacgggcaaaagaacgaaaacaataaggcaaagcgtggttttcatacgaccttttactcatctttcttattgttcctaagtattctattgtggaatctatacgtccgatgcgtcatatatatatcaatagcatggcacaataaagacattttggcattatctttcatcttttaactgtaaaattgtcaggtacaggctattggcaaatcttttgcgcccattcaagtgttattgaaaatgaaaatagaaaggagatataagatatgaactttaacaactttaccattaaatcgcaagaggcggtgcaagaagcgctgaacctggccaagagccgtggacagcaggctatcgaaccggttcatgttatgcagggagtgatgaaggtgggcgaaaacgtcactaacttcattttccagaaactgggcatgaacggacagcagatcgcactcgtccttgacaaacaaacagattcattacccaaagtttcgggtggagagccttacctgagtcgtgaaacgaacgaagtattccagaaggctacccagtattccaaagagatgggtgacgaatttgtttcactggaacatttactgttggcattgctgactgtaaaaagcacagttgccaccatcctgaaagatgcgggaatgacggagcacgagctccgaggagccatcacagaactgcgcaaaggagaaaaagttacttcacaatccagcgaggatacttatcagtcactggaaaagtatgccatcaacttgaatgaagctgcccgaagcggaaagctcgacccggttatcggccgtgatgaagaaatccgtcgtgtgttgcaaatcctgagtcgccgtaccaaaaacaatcctatattaataggtgaaccgggtaccggtaagactgccattgtggaaggacttgcccatcgtatcctgcgtggtgacgtgccggaaaatctgaagaacaagcaagtttactcattggatatgggtgcgctggttgccggagcaaagtataaaggtgaatttgaagaacgtctgaaagccgttatcaatgaggtaaagaaatcagaaggagatatcattctcttcattgatgaaattcacacgctggttggtgccggaaagggtgaaggtgccatggatgctgccaatattctgaaacctgcattagcgcgcggtgagttaagaagcatcggtgcaacaactcttgacgagtatcagaaatacttcgaaaaagataaggcactggaacgccgtttccagattgtatacgtgaacgaaccggatacattaagcaccatctccatcctgcgtggattgaaggagcgttacgagaatcatcatcatgtacggattaaagatgacgccatcatagctgccgtagagctgagcaaccgctatattacagatcgtttcttgccggataaggctatcgacctgatggatgaagctgctgccaagttacgtatggaagtagactccgtaccggaggaactggatgaaatttcacgtaagatcaaacaactggagattgagcgcgaagccatcaaacgcgaaaacgataaaccgaaactggaacaaatcggtaaggaacttgccgaactgaaagaacaggaaaaatcgtacaaagccaaatggcaaagtgaaaagacattggtcaacagaatccagcagaataaggttgaaatagaaaaccttaaattcgaagcagacaaagctgaacgtgagggagattacggtaaagttgccgaaatccgttacggtaagttgcaggctttgaatcaggagattgaggatactcaaaaggagcttcatgccatgcagggcgacaaagccatgattaaggaagaagtagatgccgaagacattgcagatgtagtatcccgttggacaggcatccccgtcagtaagatgctgcaaagcgaaaaggataaactgttgcatctggaagatgaacttcaccagcgtgtcatcggacaagatgaagccattgaagctgttgccgatgccgtacgccgtagtcgtgcaggtctacaagatccgaaacgtccgattggttcgtttatcttcctcggtaccaccggtgtgggtaaaacggaacttgccaaggcactcgctgaattcctctttgatgatgaaagcatgatgacgcgtatcgacatgagtgaatatcaggaaaagcatagtgtgtcacgcctggttggagcgcctccgggatatgtaggctatgatgaaggtggacaattgactgaagctattcgccgcaaaccatactcagtcgtactattcgacgaaatagaaaaggcgcatccggatgtattcaacatcttgctgcaagtattggatgacggacgattgacagacaataagggacgtgtggtaaacttcaagaacaccatcatcattatgacgtccaacatgggaagtgcttacattcagagtcagatggaaaagctgaatggtactaacaaagaacaagtgattgaagagacgaagaaggaagtgatgaatatgttgaaaaagacaattcgcccggaattcctaaaccgtattgatgagacaatcatgttcctgccactgaatgaaagcgaaatcaagcagattgtagtactccagataaaaggtgtacaaaagatgctggcccagaatggtgtggaactgatattgacagatggagctatagagttcttgacaaaggtcggatatgatccggaatttggtgcccgtccggtgaaacgagccatccaacattacttactgaatgacttgtcgaaaaagctgctcgctcaagaagtagaccgcagtaaaccaatcatagtagatgccggtggtgaaggactggtattcaaaaactaaactaaaatatccgcaaataaaaaaagctgtcttgccactgaaggcaaggcagcttttttcttattctataacgagctgcttaacaactggtacggacaacgcatgtgttataaccaacacatactctccagaacatggcaaatcaaacgaagcgctctcttccctcgcctgttttacctcaatcaccttcccccggatatgatataaacaaagcgtagcgtttggcaacaccccatccacatatatcttaccagcggctttatccacctgtactgttacgctcttatgctcttccatcttaattaatgccagcctcaagtcccccttaaaggcaataaattcatataaaaaaagcgtgggaactgctgttattactgtacctggggctctggactgccactattcaaataatatacaacagcccacgctccgtactatacatttgaatatgcatatacaacagagcatgagcgtttgttgtctatcatccttgaatagcatgaaattgtccagatttcaagtacaagataatattaaacgcttttatccataattatccctcaatctttgtgagagaggccaccgcccactctgcatctcaggatggcaacaaaggtataaaaaaagtaatcaaaattaaagataccgcataaaaaaaagcggattatccgggatgcccctgataatccgccttttctgttaaaagaacagtttattttaaatttattcttccgtctttccttcttctgtagtttccgcttccgctgtatcttcaaaatcagttattccacaagcaactaacagattgtaccaggaaataagctttttgatatcagccagatatacacgatcgcgatcaaaagtcggcaaaacttcacccagataagcacgaagttcatcagcagtagctttctttaaatccattactacggcagcaccgttttctttctctttcatagcagtcaacacatccttcaaaggtacgtcgtccgtatccgtatacatggcaatatcacccaaagagattattttctcgttaccataagcggggaagcgtttcttgtccgtgagagactctacgatcaacatatttctaccttgtgaaatgagtttatacaatcccggtttaccggaaatagacaaaatagtcttcaacatagtatgttctattttttattagtaatattttattttttcggtgggcaaagatagtgcaaaccgagagtaaaagcaaatttatttgtttttaccaaggtgcagcctattttcgcttaagcaaaggtaagcaatatttttagatagagaagttattacctctaaaacctgcggaattaacggagttttaccgtcgtttacaattacaaaatcagcctgagtacgcttctcttcatcactcatctggctacgaacacggcgttctatcaattcgcgaggagcggtgtcacgctgcatggcacgcatgatgcgaagttcttcgggcgcataaaccagaaccacagcatctacttcgcctgcaaatcctgcttcgatcagaattgcagactccatgcccactaccggataggtagtatgacgctctacccactgacggaaatcgtcccgtacccgcggatggataatactgtttactgtacggatatgctcaggatctccaaaaatataggaagcaagcaaaggtttgtttagttcatcaccggcatacacctcttcacccagcaaagcaatcaattcacgacggatcaaagcatccgaattcgtcaaccgcttcgactcaatatctgagatataaacaggaatccccattacttccaacaaacgggaaacaaggcttttcccactaccaataccaccggttattcctattttaatcgccatattcaaaggatacttgctcgataagaaagtcgacctgttccggattgatacgtatctgattaactcctttgggtactgacttcagttttactgtgtacttcttatccgaacccagtttcaagagttcttcataagaaacattgatatggaaatcactttccgttatcttattgaaacggcttaaaccaacctgaaaggtgacactgactttcgaaggaaacgcacgcagcacttttcctgccggaaagttaactccccgcaagggaacttccaccgttttctcagtataaatatctaccggaaaaaccatttctaccgaagcgggcacaaacttaattcctcttggagccaacagaggaacctgttgcctcaatgtatcggaaatatcctcgaatttcactttttgcgtataagcaactgttatggtatccaatgctccctccggcgcataagccaacacagaatcaggcttgcaaaccgtatcggatatataatattgccgccctgcactcaccgtgccctgaaactttaccggaaccagtttggaagcacctgtagaataaatatactccaaagtatcaggttttacagaaagcagttttgtagatacattcaactgattaagcaacctcttctcaaactgtgaagagtagatacgtacatgattatcagtccctttataatcagaaaaatccagagtaataggaaaaaagctctttccaagcatgtagttgagcagcaccgtgcccttgtctttcacccggatatgcaattcagaaggtggttcggaagttataaccacattattgggcactcccttcaaacgtaccggaatggagaattccgtttcataatcgttgttcagcgtctgaagtagccagaaaccactggctataaaaaagaagaataaaaaaattaagaactctctgctcttatcactgagcagaaagtccttaacttttctcgctgtttttaaatatatgcgttttatgttcctacgatcaatcataggctcacttattcaaaattatttagcagcctgattactgttagcatcagcagcagccgcaaatatagaatttttatctattctaatcttaacattagaagcgatttcaagtactatatcattgtcattaatttctttaatcacaccatgaataccaccggcagtaatcaccttttggtttacttgaagtgatttacggaagtttgcaatttctttctgctttttgttttgcggacgaatcatgaaaaaatacatgatagcaaacatagcaatcagaagaatccacatcatgctaccaccaccaggggctgcggcaggagcttgcaagaatacggtcattaaattcataaaatattcgtttttagtttttaatactcaacaaaggtatcagtttttcgctaacttaccttctttttttaattgattaactattccgtccaatgtaccgtttacgaagcttccgctctttatcgtactatagactttagcgatctcaacatattcatttaacgaaacacttaccggaatgttcggaaaacttagaatttccgccaatgcacattgcattattatcacatccataaaggctacacgatccaaatcccagttgcgtgtattttcactgatcagatgacggtaatagtcacaattcagtatagcgcgacggaacaagcgacgggcaaactcctggtcttcctcatccttaaattccggcaacaaagtctggttagcaccattttttgcctcaaaacgtttaatcgtcttcagcacgaaagtgtctactatttctttgtcatcattccaataaaggctctgatcttccagcaaaacatccaactcttcgttattgaaaacaaatgccttatagagctttctccatagttcacggtcaacttcataagatttatcagacgaagccatatattccttatatatatcagaaactataatcttgtcatacaaacccttgataaagtcttcgtcatttgcccacgaacgtttctggttggcagcaaactccatcaactgcttattcacttccagttgtgaaacgaacttgttttctacgaatttcatgttgggatacaactcctctgcggtcggagctaacttggactttgccgcatcaatgcgtttttgtgcgtacgtcgtcagagccaccatcagcatcagcaaataattataaaggtcatacgcttttgaaagactaaagaataattctttctccgctgagtctaaatttttactgccattctgataataagcatatacaatctgtataatcttaagacgaataagaactctgttaatcataaatctattaatcaatactgttgttaacgagatgcaaaagtagacatttttaatgagtttacgcaaataaatcacattttttaatgcagatattcattatccgggctttttcttttgacagtttaaaaaaaatcgtcatttttgaagccaattacaacaagaaacctaaaatatggaagacttaaagaagaaaaacggtgcggacatgaacgataaggagattgtattctccaaatccattaaagcaggtaaacgaatctactatctggatgtaaagaagaacagaaaagatgaaatgttcctggccattactgaaagtaagaaggtagtgaccggtgaaggcgaagatttgcaggtaagttttgaaaaacataagattttcttatatagagaagattttgagaaattcatgaacggcctgaacgaagctattgatttcattaatcggaaagagatgttggaagttataagcgatatgaatgcagaagcagatgaaaatgcagaagcagagttggatgctatagctgaaatgaataccaaaggaatggaattggacggagaaatcaagattgatattgattttgaagagccaactctttgataattcaaaaagaagctgtacttttgcaccgcttttttgcaacattgtgtggctaccccacatcgtgcgatggtgaattaagcaacaaaacaacttaatttagagtaacacaaaaaattaaaaaaatgaaatcaattgaagtaaaaggtactgcaagaactattgcagaacgttcttcggaacaagcaagagctttgaaagctattcgtaaagacaacggtgtaccttgcgtactctacggaggaagtgaaaacattcacttcactgtacctgctgatggtctgcgtaacctggtttatactccgcacatctacgtagttgacctgattatcgacggcaagaaaatcaacgctatcatgaaagatatccaatttcatccggtaaaagatacaatcctgcacgttgacttctatcagattgacgagtctaaacccatcgtaatggaagttcctgtacagatggaaggtttagcagaaggtgtaaaagccggtggtaagctggtattgcagatgcgtaagctaaaagtaaaagctttatacaacattattcctgaaaaactgacagtaaatgttgctcacctgggtctgggtaagactgttaaagttggtgagttgaacttcgaaggtttggaattgatgaatgcaaaagaagctgttgtatgcgcagttaagttgactcgtgctgcaagaggtgctgccgctgctgctggcaactaatcagctctttcacaagaagacacattccggaacgcggattaacgcagaagacgcagatttcattaatccgcgaaagctgtgataatccgcgttccttgtttctataattattcaccacagagttacacagagcatcacagaattatattattaaagaaaaaactccgtgaaattcagcgcaacctcgtggtgaaaaatataatttctcagagaaatgaaatacttaattgttggattaggaaatatcggtcctgactatcacgaaacccgccataatataggattcatggtagtggatgcattggcaaaagaagcaggggtcactttcaatgatggccgctacggctttaccactaccctatccgtgaaaggacgccagcttttactgctgaaaccttctacattcatgaacctcagcggaaatgccgtacgatactggatgcagaaagagaacattccattggaaaacgtgttagtaatagtagatgatcttgctctgccatttggtactctgcgcctgaaaggaaaaggtagcgacgccggacacaatggactaaaacacattgcagccatcctgggcacacagaactatgcccggctccgtttcggtatcggcaacgagttcccacgaggtggtcagatagattatgttctgggtcacttcactgacgaagactggaagaccatggacgaacgcttaaagactgcaggagatattatcaaaagcttctgcctggcaggaattgatattacaatgaaccaatttaataagaagtagatagtagttaactacttcctactaactactaaaaaatgatatgagtgaagcaagaatagataaatggatgtgggctgtacgtattttcaagacacgtaccattgccgccgaagcatgtaagaaaggacgcatcagtatcaatggaggattagcaaaagctgcccgtacggtgaaaccaggtgacgtgatacaagtgcgcaaaccacctgtgacctactctttcaaagtattgcaagctatcgagaaacgtattggtgcaaagctcgttacggaaatgatggagaacgttacgactcccgatcagtatgaactgctagagatgagccgtatcagtggtttcattgaccgtgccaaaggtgcaggtcgtcccacaaaaaaggatcgacgaactttggaagagtttacaactcccgaattcatggacgactttgattttgaattcgattttgaggaagaataaaaaagagtgataatcacattacatcattatgagcgaaaagaagattaaatggggattcattggttgcggagaagtgaccaaatataaaagtggtcccgccttccaaaaggtggaaggttcggaagtaattgctgtcatgagtcgcgatggcgccaaagccaaagcttatgctaaggaaagaggtattccaaagtggtatgatgatgcccaggaattgattgacgatgaagatgtgaatgctatctacattgccacccctccctcttcacacgccacttatgctatcatggcaatgaaagccggcaagcctgtatatatagaaaagcccatggccgtaacctacgaagagtgctgccgcatcaaccgtatctccaatgaaaccgggattccctgcttcgttgcttattaccgtcgctatctgccttacttcctcaaagtaaaagaattgatagagaatggaagcataggcaatgtcatcaatgttcaaattcgttttgcccaacctccccgtgacttagattacaacaaagaaaatctcccgtggcgtgtacaaccggatattgccggcggcggctatttttatgatttagccccacatcagattgacttattacaaaacatgttcggttgtatcctcgaagcctgtggatataagagtaatcgcggcggactttatcctgccgaagacactctgagtgcatgcttccaatttgacaatggattggtaggtagtggttcctggtgtttcgtagcgcacgactccgcacgcgaagaccgcattgaagtgataggagacaaaggaatgatctgtttctctgtatttacttacgatcctatcgcccttcacacagaaaaaggaagagaagaaatcccggtagctaatccggaacatgtacaacaaccacttatccaagccgttgtcgaccaccttttaggcaaatccatctgcacttgcgacggagcaagcgcaacgctcactaattgggcaatggacaaaatactgaataaactttaattagcgactaggggtcagtgattagtagctgcacgccgcatggtgttaatcactaatcactcacccctaatcactatcaaagctctttcttcacagcctcaatcaattctttgtattcagcatccgttaagtatacttttcccgggttcatctggaaagtaccaccataatcgggaccatctacatatttgggagcaagatgaaagtgcagatgcgacaacttatcggaatatgcaccataattaatcttttcgggattaaacgctttctgcatagcacgagttacacgcgccacatcctccataaaagcattacgatcctcatcgctcaattcattcaaatcattgacgtggtctttgtaagacacaaggcaacgtcctctgtatgtttgttccttaaacaaaaacacacgggatacactcagttcggcaaactcaatcatcagattgtgcagcgtctcgttattctgacaatacagacattctttcggatcacttttcatgatattcttggtttattatttatgtttacggaacaaagataaactttccatctttattccatgtcgatattttcattcttttggccgactaatttatacacatcggctttttctcccactacccataccacatcgtcctccataaacggctcatgcggatcgggagcatgcaaggcttcctctcctctctccacccctactataaggcaatgatacttctcacgaataccggattcacgcatcgtcttgcccagaaattctgattgctcatccacgcggaactgacgcaggatagtttcactcttttcaactacattcgtatccagagcagaagctttctccatttcggtaccaaactggttcagttcttcatctgtacctatgacctgaatcttatcttccgggaaaagccttacggaagctcccggtatattaatccgcttctttcctcgaagaatagagacgacatgtacgccaaattgttttccaaaattaagctccagcaatgtctttcccgcccatgccgattcaccggggatttcgaaatccgccagatgcaagtcacgggacaacaaacgtcctgcatattccggcttcttctctcccatatactcggcccgcatatcgcgatagcgcagattctggaagaatttccgctctatcatgatagactgtttcttcagttgccgggacaatatcatcatcgtaaccaataaaacagctacacccaacaataaaccaacagagacttcaaacaagcctgctatcacaaacattacaaaagatacagctatcagaatacgtataacgattgtagctaccaacggtgcacgatttccccgactatccttccataaagttacaaattcagccgaatgattcttttttatcataatagcccgcaagaatggagcaataaacagaatagtcaggaaagcggcaagcagcttcccccagattccgggtatatgttccaaaagcaacggaacaagaaagcggaaagctaacgcaacaaccgcaatgctcactatggaatagacaatagtgattcgcgtcaaagccaaaataaacttcttccacaggctctcatgattcatagtctgtgaaccggatgagtaatgcaacaagaaatttttccactttgccggcaaatgagtatcaacgaaatttgaagccggctcggcaaagcgaatcatatagggagtaagaaaggtggtaataaccgaaactgccaccacaataggatacagaaaatcactcgtcacatggagcgatacccccagcgatgcaataataaaagcaaactcaccaatctgagttaaactgaaaccgcattgcatagccgtcttcaaaggctgcccggccaacagcacacccaacgtaccgaacaaggactgtcccagaataacagccagtgttattacaatgataggaagtgcatattccacaatcattgcaggatccaccatcatacctaccgacacgaagaatacggcgccaaaaagatctttcaccggcttcactaaccgttctatactctcagcctcaaccgtttcagcaagaatggaacccatgataaaagctccgaatgcagcagaaaagcccgtatgagctgccataaccaccataccgaaacaaagtccaagggagacaataagcagtgtttcttcactcatcaacttgcggcatcgcttcagtaattcgggtatcaggtagataccgaccacaaaccaaagtatcaggaagaagagcagttttccgatactttccagcatttccgaaccttcaaaattatgccttaccgccatggtagacagcatcaccatcaagacaatagcaagaatatcttccaatatcagcacgctaagcaccaatccggtaaattgtttcttacgcattcccaaatcatcgaacgctttataaataatggtagtggaagacatggcaatcatacctcccaggaagatgctgtccatacgctgccagccaaagcccgtaccgacagttattcccaaaagaatcatacagaatatgatggtacaggcagcaatgatagccgctccaccaacttttacaattttcttgaaactaaattccagtcccagcgcgaacagaaggaatattacaccgatatccgcccaagtctgtatattagccgtatccatcaccgagggagtatatggcatatgtggactggccagaaagcctgccaccacataccccagcaccaacggctgtttcagtttcttgaacaatagcgtcatgattcctgcacaaatcagtatcaacgccaaatcgtttattaaagtagccaagtgtgacatattatttgtcctttcgtgtttttgcttacaaaagtagcaatttttatagcattaataattgtaatgatagaaactttttttcttcccgtattgttcaacgtataatcaatcattttaaaacataccatcatggaagagaaaaaagaagcccgtgaagaacggaacagggaaaagttagccaatgaagactgggttatggcagaattttacgcaagctggtgcccgcattgcaaacgcatgcagcctattgtagaagaatttaaaaaggcaatggaaggaacccttgaagtagtgcaagtggatatcgaccaggaaagtgcccttgctgatttctacaccattgaaatgtatcccacatttatattaatgagaaaaggtgaacagctttggagacaatcgggagaattgcctttggaaagactggaaaaggcagtgaaagagtacaaattaaaagcataaaaatagcaactgagtgagggatagtacggccctccataggtggtaatcagtttcccggtgtgaaacaaacagtttcatcgcttgaaaccagtagtttcacaccgagaaactggtagtttcatgccttgaaactaatggttcctccacaggaaactttttcctactcatagtaataccgaaaagtacaccttctccccgtaagttcaaacttaaggaaaaagcttgaagcagaagattactctacagcttgttatttaaataatccgtcaaactatcctcacgttccaaaccaaactttttgcgcaaccggtagcggatagtttcaacgccacgaacagagatattcagcaaaggagcaatctctttagtggaaagattcattttcagataggcacacatcatacgctcattatctgagagatcgggatgacgggcatgaaggcgtttcataaagttgttatgaatcaaatcgaactgatcttcgatgcgtttcagcacttcatcactttggatgttagagtcaattttaccatttataatcagaaggagctgcttaccttcacgggcgccctcccctttcagagaggaagccactttgaaaatttccgatttgatctccgtcaacatctcgtttttacggacaaagtttatcatcaggttagccatctcctggcttttatgctgcaagtcgtactccagcttttctttctccaactgcataatctgtttctctcgccgggatttttcagcctcaaactccttctccatttcatgcaattctttatctttctccacaactgcctgttgcttcttccgtttcacacgtacatcatcccagcggtaaatataccagacgcccaacaacataaggacgaaatagaagacataggcgggcacactgcgataccaaggcggaagaatacggaaagaaagttcatccaatgaagtagtaccgtccggataaatggcttttacttcaaaagtataatcaccttcggacagattactatattccttggtatgcacagtggtatagtccgaccatgctccttcattcaaacgatactgaaaacgaatatcatctcctccaaaagccaagaaagaaagactataatcgaaccgaaccgaattggatgtatagttaatagcgagggacggcttctttcctagaaaattagctgtatatatcaaagaatctttaggataggtaatatacatattccggatatatacggaatgggcaagatcttgccggtgcttcaccgccggaatcgtgaacagggcaaatccctcttcattcggaatcaccataagcgaatccgataaaggaacaatggcatacgtcggcaccaactcaagcaaagattggggaatggaattgatactggtattggctcccctcttataagtccccaggttagctatacagatttcataagggctcagactgatgagccggtcatgatattccaatagacgcgtatagggagcagtgccattcaacaaattattcatatcgttgcaaggctccatcatatctttgtgaatattatatttataaataccgtgggaagtggcaaaataaacacggccttctattttagctacataaatatcacgctcaaccggaaaaccttctgccacaccataggattttacactgatctgacgggttaaatcctcactcaactccacacgggtgataatgccggaattatgaacccatagaatcctggcagactcctgctcaaacaaacggcttgagtcaacaaatccttcgatcttacaaagcatatgccattcgcccgctttcttctccaaaagataaatgccattatacacccctacaaacatacgatcggggcgccccataacctcttgacagcaccaggcacccgtaatatccgtgattctatgtatacttgtacctttaatctgaaaaattccacgatcatgaagacaaaacagatcatcaccaattttacacaggttccacacctgaccactggattgaggaacgggatgaatatccggtaaactaccgttcagcttcaccggataagaagtataataaagcccccgattggtacccagatacaaatagccattctcaacagccgccgcatagcccgtaccgtaagaataaggatatgaatacaaattggtaaaaggagagctcagacaaacatgatcaataccactatccaaacccgcccacaagtttccctggccgtcgaaagctacggaaagcaccgtattattacgcagtccattattctcgttgaagtatttcacatccatggtagcgcaatctatcagtaataagcctttatgaatagttcccaaagctatcttatcatcttgagcagccacacaaaaaacttcgttctcacgcataaagtcctctgcaccggtaataaaaggagcaatggtacggccattataataaaacagaccgtcatacgccgtcacgatgatgattcccccacccttatgtggaatgattccacggatacgattggaagccagggaatccgcaccctgcaatggaaagaaagtatttccgaccagtacccacacaccacgatcggtacctatatagaggataccgttcaccatattggaacagtcgatcttggcattcatttcgatagcggtatattttccattcagatatttcactacacggtcatcgccttgtatataaaggatattatccgcctcatggattccccacacattgccaagcatacgaacagaattgtcaagcgtatcggacatgcagtggtaaatcagttcgccgtcttctgccggttcgtaatagccaaattcattaataccaccggcatagattcttttctgaatagtggatgccaatacggaacgcacatccgagaagttatttaacggaaatactttccacacattaccatcaaattgcaccatgccgtttttattggcaaaatacacccaatggtcatcataaggagctatttgccaagtctggggacctttcccataaaggcttttatcaaagtttacaatgaagttgttccaaccggcaaacgccttaccaaaagggatcagaaagagaaaaacgaagaatacatagaaggtataaggttgttttcgtatcataatattaggttttacagagcaaagctattacttttttcgtaaaaaacaaataaaaaagagatacattcttgttagaacatatctccttttctttgagcctcttgtcggattcgaaccaacgaccccgagattacaaatcacgtgctctggccagctgagctaaagaggcgggtgggtaagcttactatatcgcgccgctacaaccaactacctttgctgcgatcaagccctggaggattcgaagggagctggccgtataggacttacccgtattttcgtttgcgggtgcaaaggtatgcatttttattaaacctgcaatactttgcccaaacttttttcaactttaacaagaatacgggggttacaaacaatattatttatacctttgcgccattattcctaatgaaagatgacagagaacaaaggttacttacaacgatatgccatgttattcggcacttacctgggaggattttggattttgaagttcattttatttcctttagggttaactacaccgttcctatttttcctctttgcaggactaactctatgcgtgccttttatggcgtattattatgtacgaatgtaccgtaaccaagtttgcggtggtgccatcagttttcttcacgcgtggattttcactgtatttatgtatatgtttgccgcattgcttacagcggtagctcattatgtatatttccgttttattgatcaagggtttgtgctaaacacatacgaaagcttactgaacagcctgaccagtcataccataccggggatggatgcctatgtagagcagtttaaagaaattataagtgcgatgcgttcgctatctccaacagatatcaccatgcaactgatgtctcagaatgtattctacggatcattacttgctatccccaccgccttgtttgtcatgaagcgcccaccggcagagcatataggcggaagataaagatgaatcattaaaatgagtgataaagtaaaaaagcagatgtgatttcaaccctaattcataattcataaatcataaatcacaagatggatatttcagttgtcgttcctttatataatgaagaagaatcacttccggaactgtacgcatggattgaacgggtaatgaaagccaatggtttttcatacgaagtaattttcgtaaatgacggaagtaccgaccgttcctggcaaattatcgaagaactgagccgaaaatcggataccgtgcatggcatcaagttccgccgtaactatggcaaatcgccggcattgtactgtggctttgagaaggcacagggagatgtagtcatcaccatggatgcagatttgcaggatagcccggacgaaatacccgaactgtaccgcatgattacggaagacggctatgatctggtatccggatggaaaaagaaacgctacgacccactttcaaaaaccattcctacaaaaatattcaatgcaacagctcgtaaagtgtcgggcatcaagaacctgcacgactttaactgtggattgaaagcctacaaaatggatgtggtgaagaacatcgaagtgtacggagaaatgcaccgctatatcccctacctcgccaaaaatgccggtttcaaaaagatcggagaaaaagtagttcagcaccaggcacgtaaattcggaaagacaaagttcggcggtttaaaccgtttcttcaatggatatctggatttgatttcactctggttcttgtcagccttcggagtaaaacccatgcattttttcggattgctcggttcactgatgttcatcttcggctttatttcagtgattattgtaggaatcacgaaactgtataatatgtataacggaatgccttaccgcctggttacagactctccctacttctacttgtcactgaccgccatgatcatcggaactcaactcttccttgcaggcttccttggcgaactgatttcgcgtaacgctcctgaacgaaataaatatcaaatagaaaaaacaatatagactatgaaaaaattagtaaaactgatattgctttgtctgattgcttatcccatcatcagtatcgtttcttcttgttcagaagaagaagattgctccatgaatgcacgtccgatgatggaatgttatctatatacggtggacagggaaagtaaaagagtgctcaacgatacactcgactcactgactattacagctttcgatacggactccgtcattcttaacaatcagaaaagagtacattcgctatcattgcctctgcgctatacagcagattctaccgtattgatatttcactatagcaaagatcccaagattaaaaaagacactattattatctatcaaaagaatacgccctatttcctgtcaatggattgcggctatcagatgaaacaaagcatcacaggcggagcgtacagtcgctatctacttgactccatatatattcaagaaaaagaagtaagcatttatggaacggaaaatcttaagctcttttatcctcagccttagtctggcatttttcttgctgacagggcttccggtacaggcacagaacagcaaccggcctcccgcttccaatccacccaagaaggaggaaaagaaagaagcggatgagaatgtcttcccgctatacaatggcgtgactgtcagtgtagacctgtggggaatcggaagcaaagttctgggaggtgatttcttaagctcggaagtagctgtcgacgtcaaccttaaaaaccgtttcttcccgatagtggaacttggatatggcagcaccgacgcatggaatgataacggaacgaattacaaaagtaatgcaccttatttccgtatcggtatgaactacaacgctctttataagaagaaattcgataatttcctgtttgtcggtttacgttatgcaatgagtagtttcaagtatgatataacaactctccctgtgactgatcccatttttgacggaagtatcggaaaccccaatcaaatggatggtatctggggaggaagcgtaccattcaaccataaaggaatgaaaggttcaatgcaatggtttgaattctgcgttggcatacgcgcacatatctggaaacagttctacatgggttggggattgcgcttcaaattccgtacaagttcatcaaccggagaatacggtgatccgtggtatgtacccggattcggcaaatatggctctaacaccatgggcgtaacctatacaatcacatataaactaccctattaaactatgaacggattagagatttggcttcttgctgtgggactcgcgatggactgtttcgcaatctccatagccagtggtattcttctgaaacgtacgctgtggcggcccatgctgaccatggcttttttctttggattattccaagctatcatgccactcctcggatggataggtgccagcacgttcagccacctaatagaaagtctggatcattggattgcgttcatcatccttgctttcctaggcggacgcatggtcagagagtctttcaaagacgaagattgcaaaaaagagtatgacccgaaaagtctgaaagtagtgctcgcattagccgttgcaaccagtatagatgcactggccattggtgtctcatttgcatttctggggatgcgggatttctcggaaatactagcacccatttctatcatcggtttcgtatctttcgttatgtccctcataggattactgttcggtatccgttttggttgcggcattgcacgaaagttgcgggcagaactctggggaggtattatcctgattatcatcggcacaaaaatattaatagaacatttgttcttcagttaaatttcgcttatggaaaagaaagtacagagaaatttcttatggattgccctgcttgtattgggaacaatttggatacttgcacgtcataaccgtacgcaaccttattatacagtcaacggactgatattcggcacagtttataatataacttatcaatatgacgatgatctgaaagctgaaatcgatgaagaattgaagagatttgacggttcgctatctcccttcaatgatacggccacaattacacgaatcaaccggaatgaggatattgtaccagataccttctttacaaatgtattccgtcgtagtatggaaatatccaaagaaacgaatggtgcattcgatattacggttgctccactggccaatgcctgggggtttggtttcaaaaaaggcgcatttcctgactccgctatgatagacagcctgttggaaattacaggatatacgaaagtggctctgtcagaagaaggtaaagtggtgaaactggatcagcgtatgatgctctcatgtagtgcagtagccaagggatatgcagtggatgtaatagcacagtttcttgcaaagaaaggcatcacgaatttcatggtagatataggcggagagatcgtagcacggggagaaaatcccaagaaagaactatggcgcattggaatcaataagccggttgatgattcactgtccattaatcaggagttacaaacagtactgaatgtaacggatgtaggcattgcaacttcaggcaattatcgcaacttctattacagagatggaaagaaatatgcacataccatagacccaagaacaggatatcccgtacaacacaatatcttatctgccactgtagtagccaaagactgtatgagcgctgatgcttatgccaccgcattcatggtaatgggattggaagaagcggaacgttttgccaatgctcatccggatattgatgcgtgcttcatttatacggatgggaatggagaacttcaaacgtactatacgaaaggaatagaacggtttataacaaaaaaatgataatttagcggtgggagttgattgacagtagtatcttcattctcctcctcccgggaggaggaggggaatgaagttactccacatatcccactggtaaattattatttatagaatacaaaatacactgccaataccaggcaaatgaatgccgcaaaatgattccagtgcaggctttcacctttaaaaaggacagtagtaaatacagtgaaaataataagagtaatcacctcctgaattatcttcaactgtatcaatgaaaaaggaccgccattgcctataaacccaatacggttggccggaaccaggcagaaatattccgcaagagcgatgctccacgaaaacaaaatgatggcataaagcggccagtttgtaataattttcatgtcttgcaacttcagatgaccataccaagcaaaagtcataaagacattggagacaattaaaagcaaaatcgtataaagacctttcatttcagttatgaatatttaagcgataattaattaatctaaattactaacttttttaggaagaagctcttcctgaacatttgccatacttccccaaagactataacgagcttccggattcatttcttccagttgatgcaaaatgtctttcatattgcttcgatgagattgcgcttcataagggcaattcttcacctgtttccgatatccccttatctgtgccagttccagcaaatcagactcatgtaccaaacacatcggacggataaccgtcatatcgaacttcttcattaccaaacgaggaggcatggaactaaacgcgccctgaaaagtgatattcatcaataatgtttccagaatatcatccatgtgatgtcccaatgctattttattacaaccttgttccttggcaacagtaaacaacgctttacgccgattccatgaacaaagaaaacaaggtgacttacgcgtatccgtacttgcatcgaactccgtctcatacagtacgaaagggatattccacgactcaacatactcacgcagatatgctaaatcactctgataaggtatattcttcataaccacatgaacggcaaccacggagaatctgggcttaaagacacgggcgcgctttgccaacaattccaccaacgccaaagagtctttgccaccggaaagtccgatgaggattttatccccatcctctatcagcccatatcctaccagtcccttactaaaccgcttttctatgcggcggatggtcttctcttcttcagtaaattgcgccataataattcaaagctacgagttacaagctaagagctacaagtcccatgcagacgttacgcaactacttgtagctcgtagctcatgtagcttatagctcttttactctttgtcctgcaaaagtaagagaaaagaatgatttaaagaagaattaacataatagaataacggaaagcagcattattcccgattaatttgtatttttgaacattcgaatttgtaagttggataactagcatgaaaaagagatatattttactccttctattttgtctcgtattagtcggtgcatcggcacagacgttggaacaagctaaagctttttacaacaaggggcagtacgagaaagccaaacccgttttcaaaaaattcgtcaggacacaaccggcaaacggaaattataatttatggtacggtgtatgctgcttggaaacaggagaacctgacgtagccctgaaatacctggaaacagccgttaagaaacgtatccccagcggacaactgtatctggcacgaaattataacgacctgtatcgttttgaagatgccatcaagtgttacgaagagtatatcagtgatctttccaaacgaaaaaggtctaccgcagaagctgaaaaacttctggaaaagagcaagaccaatctccgcatgctgaaaggtattgaagaagtgtgcattatcgatagtatcgtagtggataaagaccgctttttggaagcttataaaatcagtccagaatccggtaaattattcacgtacaacgatttcttccagaataaagaagaagtagaagctactgtatacgaaactgaactcggtaataagatttattacggtgaacgccagcctgatggcaaactcagcatccttgcccgcaacaagatgcaaggcgaatggagtaaaggcagcctattgcccggtagcatcaacgactccatcaacgccaattatccgtacgtattaacggatggtgcaactatctactatgccgccgacggtgaaaattcaataggtggatacgacatattcgttacccgctacaatacgaataccaacacttatctgactccggagaatgtgggcatgccattcaattctccctataacgactatatgtttgccatcgacgagtttaacaacctcggatggtttgcttccgatcgctaccaaccggaagggaaagtatgtatttacgtatttattcccaactcttccaaacgggtgtataactatgaagctatggacaagaaaaaagttgtccgacttgctcaaattcactccctgaaagatacatgggtagatcaaaatacagtatctgatgccaaacgccgcctgcaagccgctatcagtgaaaagccacaagccgaacggagctatgactttgaatttgtaattgatgaccacactacgtattatcaatggagtgatttcaaatctcctcaggccaagagcttattcagcaaataccgccaattggagaaaagcttcagacagcagcaaaacaaattggaagagcaacgttccttgtactctcgcgccaaggaaagcaataaaaccaaactggctcccgccatactcgacctggaaaagcagatacaacaattatcaggtgaattggagaaggccgccattgaagtgcgtaatacagaaaaacaatcctttaaatagaaaactatggacatacttatcatcattgtactcattgttgcggcggttatcctgttcttggtagaactgttcgtcatcccgggcatcagcatagccggaattctggccggagcttgcatgatctatgccaactactatgcctttgcctatctgggtacaacggctggtttcatcacgctcggtgtatcggcaatagcctgcataggctcattgatactcttcatgcgctccaagaccttggataaagtggcgttgaagaagaatatcacatcgaaggtggaccgtacggccgcggatcaagtaaaagtaggcgatacgggtgtggccattacacgcctggcactgatcggcaatgccgaaatagacggcaacatcgtggaagtgaaatccatggacggatttctgaatgaaaaaacccctatcattgtaaaccgtattgcggacggcgttatcatggtagaaaagaaaaaagactaatattcacacttaatatcttatagatcatgaacgtagacactatgtacctaactgcctttcttgtgataggaggcattatcttcatcgtactgttcttccactatgttcctttcttcctatggttgtccgccaaagtttcgggagtcaggatttcattggtgcaattgtttttaatgcgtatccgtaacgtacctccttacatcattgtaccgggtatgattgaagcacacaaagccggactgagcaacattacccgcgacgagctggaagctcactacctggccggtggacacgtagaaagagtggtgcacgccttggtatccgcctctaaagctaatattgaattgtccttccagatggctaccgcaatcgaccttgccggacgtgatgtgttcgaagccgttcagatgtcggtaaacccgaaggtgatcgatactcctccggtgaccgccgtagccaaagatggtatccagttgatagccaaagcccgtgtaacggtacgcgccaatatccgccagttggtgggtggtgccggtgaagacactatcctggcccgtgtaggcgaaggtatcgtatcttccatcggttcgtccgaaaaccacaagtcagtattggaaaacccggattcaatctccaaacttgtgctccgcaaaggtctggatgccggtacggctttcgaaatcctgtccattgatatcgctgatatcgatataggtaagaacatcggtgcggctttgcagatagaccaggcaaatgccgacaagaatatcgcccaagccaaagctgaggaacgccgtgcaatggccgtggccagcgaacaggaaatgaaggcgaaagctcaggaagcacgcgccaaggtgatcgaggcggaagccgaagtacctaaagccatggcagaagcattccgtaacggcaacctgggcatcatggattattatcggatgaagaacatcgaagctgatacttccatgcgcgaaaccatagccaaaccatcgggaaacaactcaaaccagccgttgagtaaataaccggtagaattattgccccagaaaaacgtcggaaccggtgaacagtaatcccgttccggcgttttctatttataaacgtatcaacccaaaaatccagaatatgaaaaagtattttgcatcttccgaacttattatcaatgatgacggttcagtttttcatctgcacgtaaagcctgagtggctcgcagacaaagtaatcctggtgggcgacccgggcagagtggcactggtaggctcacaccttgagaataaagaatgtgaagtggaaagccgcgagttcaaaaccattacaggtacctacaagggcaaacgcatcacggtggtttctacgggtattggttgcgacaacatcgatattgtgatgaacgaactggacgccttggccaacatcgacttcaacacacgtgaagaaaagccccaacttcgccagttagaactggtacgcatcggtacttgtggcggtttgcaaccgaatacgcccgtaggtacatttatctgctcgcaaaagtccattggtttcgatggcctgctgaacttctattcagggcgcaatgaagtgtgcgacttgccatttgaacgtgcattcctgaaccacatgggatggtcggggaatatgtgcgcacctgctccgtacgtgatcgacgccaatgccgaactgatagagcgcattgccggagacgatatggtacgcggtgtaacgattgccgccggtggtttctttggcccgcaaggacgcgaactacgcattccgctggccgacccgaagcagaatgaaaaaatcgagaactttgaatacaatggctatcgcattacgaacttcgagatggaaagctccgcactggccggtttgagccgcctgatgggacataaggcgaccacggtatgcatggtcatagccaaccggttgattaaagaagccaatacgggctacaagaatacgattgacactttgataaaaaccgtactggacagaatctaagaaacacccactcaaatatacttgatgattgtttccttcaatctttcgtaagtatatggtttggcaataatatcattgcatccggcggctaatgcttgttgttgttctatcaggaaagcattggccgtcaccgcaacgataggcaaatcgatgtcgatggtacgtatcttttccgtagcctgaataccgttcatcaccggcatgcggatgtccatcaatatcaggtcgggacgctcgcgcaagaaactatttacggcctcttcgccattggtaacccacgaaatggtgtagtccttcttcagcaaaatgtttatctgcataaagttagactccgtatcttcggctatcagaattttcttcctgccgtctgatcttcgctctacgtgggcattgatttcaacaggttcaccatccgctcccaatacaaactggcggtaaggaagggtcatcacgaaagtgctccccactcctacttcggactctacggaaatctttcctcccaatctctccacgatgctctggcagatgggaagccccagacccgtgccctgaacaaaatcgttcagcttttcgaaacggttgaaaatcaagggcaatttctccttcgcaatgccgcaaccggtatccgttacatacaccttcaaccattctccgcagacttccaaccccagggtgatggccccttcatgggtattcttaatggcattggagaggaagttgaacagcacttgcgtaatcctgttccggtccaccataatccagatttcctcatcgggacgtatcacattcagtcggatgcccgttttcattttcaggcgatgcactttctccacttcgtcaatcagtccggtcatttcgaccaactggaagttcatttccgattttcccgactcgatgcgggaaaggtccagaatgtcatttatgagttgcaacaacaggttgctattcttctggatgatgttcaggtattcggctttctccacttcatcttccgtcaaagctatgatttcagagaatcccacgatagcattcaaaggagtgcggatttcgtggctcatattggccaggaacaccgatttcatgcggtcggcctcttctgcgcgttgcttcgcctcgatgagttcattggagcgttgcaccctgtcaccgatatcgtgtatcaatgccatcactttattatcttcgaacggagcgatgcgtgcctggaaataatgcctttcgcaatcatccacatccaagggatactctatctccttcaactccccgtcttcgaggcattgacgtatgttccgtagaaacaggtcgctgacttcaggagaatagatggtgcgcccgtccgctccccgtagctgttcaacgggatggagcaaaatggtgtcagaagacattaacacatcagtgaggaagaaattttcatcaaagatgaagatgaattcaggcaatgcctgtattatcttccggtttcgctcttccattcgcgatatacgcgtttcgcgttcgcactgcccggtgacattcacggtatagcataagaggctttccggatttccacttctatctttctctacagataagaggtggtcctccaaccagactatttcgccatgcgcgcctacgcaacgtacgcgtaagactttggactcatcaaagccatccaatttcttttgaaagccatccaacgacaccaaatgcttatcatcgggatgcacaaagctacagaactcttccaaattctgataacggatgccgactttatccaagcctaaactttcgaaatattcctgagtgaaagtgcactccagggtattgatatttatctcccagagagcaatttgatgggcagccagaacggagttgaccttcaataatttctctttcagtagttccgtgttctcgtctttctcggtagtatgagaagcggaatcatgcatttttattttgtcttgcgccataataacaaagtgtatcatgtaaaggctacgaaaattgagcaaatgtaataaaaaagagtaagtaatatacaatcgcgttcttttttttaccccaaaaggctatctttgcaactcaaataacaatttttatgatgaatcaggataccatctgtgccattgccacggcccaaggaggagcaatcggaagcattcgcgtctcaggagcggacgccattcgtatcaccagccacattttcaccccggcaaaatccggtaaaacgctggcggattgcaaaccttatacactgactttcgggaagatacacgatggagaggaaatcatcgacgaggttcttgtcagcctgtttcgcgccccgcactcttacacgggcgaagatagtacggagatcacctgccacggttcgagctatatcttgcaacaggttttgcaattgctcatcaagcacggttgccgcctggcgggaccgggggaatacacgcaacgcgcctttctcaatggcaagatggatttgagccaggccgaagccgtggcggacctgattgcttcttcatctgccgccacccaccgccttgccatgagccagatgcgtggcggattcagcaaggagcttacggagctacgcaaccagttgctacacttcacttcactgattgagctggaactggatttcagcgaccatgaagagttggagtttgcggacagaacggagctttgccgattggcggatcacattgaaggagttatttcccgactggtacattcgttcagtgtaggaaatgcgatcaaaaacggcgtaccggtagccatcatcggcgaaacaaatgccgggaaatcaacgcttctcaatgtattgctgaacgaggacaaggctatcgtgagcgacattcacggcactacacgcgacgtgattgaagatacgaccaatatcggcggcattactttccgtttcattgacacggcaggtatccgcgaaaccaatgatacgattgagagtctgggcatagagcgcacgttccaaaaactggaacaagcggagatcgtgctttggatgattgatgcaacggacgcaacgtcgcaaatgaatcagctatcggggcagatacttccgcgtctggaaagaaagcatttgatattggtattcaacaaagcggacttgctaggtacggctcattctgatgaggtgctgtctgcggcctcttccatcattcctgacgccgaatgtatttttatttccgccaagaaaaggcaaaatacggatgtgcttcagaaaaaacttatagccgccgccaatctgcctacgataacccagaacgacgtgatagtgaccaatgcccgccattacgaagcccttacgcatgctttagaagccatcggacgcgtacaacagggattggcaaacaatctttccggggacttcatggcccaggacatcagggagtgcatcttccatttgagcgacatcgcgggggaggtgacgaatgatatggtgctacaaaatatatttcaacatttttgcatcggaaaatgatatatcgcaattaaccgcaacgaattagaaccaactataatgaagtcgctgaaattcagcggcttttttatttaccccaaatccagttcatagcgattggatagtgttgttcaccatatttttctaccgtatttctactgcgaaacaaattggggtttgtccccgatgtcacactgaggtagtcgacaacatgtgttgacaatggtttacataggtagacaaaaagcgaaattaaaactatatggtttcactaaaaatatggagaaaacaacatggaagtaaaaagaatttgccaatggtgtggtaagccattcattgcgaagaaaactaccactaattattgtagccaccaatgtgccagtcaaggctacaaacatcgtatgagagaacgaagactcgaacttcgtgagttacaggatttgatagaagtcaaaagtaaacttgaccatcaagactactttacttttgcacaagccgcacagttgatgggcgtttct

SEQ ID NO: 6471 - DNA, 543 bp, Unknown
  gut microbiota DNA sequence
gagcttcaagaatcagtgcaaggatgtcaatcattcgcagagccgatattgaactgatgcttaaaacgcgcccctatgaacgaagaagaattaaagatgaccttgatataactgagtactacactgccgagcaaatttccgaaaagtacaaagtatcgcaaaaatggatttgggcatatacaagagagaacaatatccccaaaatccgtatccggcagttcaactattatagcaagaagcatattgatactgcgtttgccaaatacaagacagacgatgcactgaccgagtggtacactcctgatgagattgaacaaaagtatgggatgagtcgggttgccatccgctcccatgtctatcgcaacaacatcccgtccaagaaagaacacggtcagatattctactcaaagctacattttgacctatccaagcagactgccgaagataattcttcggaatactataccgtacaggaagccatgaagaaatataatctttctagagactctgtttatggcattctgcaatttcacgaaatcaaac

SEQ ID NO: 6472 - DNA, 31283 bp, Unknown
  gut microbiota DNA sequence
atgtatagcgcagctttaaaaatccgcgtcatccgtgtcatccgcgtctaaaagattaaagtccgcgtagtccgcgtacccattccctcgccgctaaattatcatttcgtgaacagcaattccctatatttcggcaacggccagatctcgtcatcaacttccatttcgaggtgatcgatgtggtcacgtatcttttccagataaggacggacattttcttcgtaggcgaaagccttgtccttgtagctatccatgtgattggcaactttacgggcttcggtcatttcgcgtaccagaaccttgatggacgttactcgtttggatatttcacgtatcagttccttgcggtcagcactcagtacttcgtattcttcgggagagaagatttctttgagtccacgtaaattctctaacagacggttttggtagctgactgcaatggggacaatgtgattgatggccagatcacccagtacacggctttctatttgtactttcatcgtgtacttttccagttccacttccaggcggcaggcaagctctgtttcattgaagatgcgttcacctatcagtacggaacgagactggttatccatataatgcatcagagcttcgggtacgtggcagatgttcgttaatccgcgacgggcagcttcttttttccattgatctgaatagccgtcaccttcgaatcggatagcttcggaagcaataatggtttctttcaaaacacggaagatggcttcatctttaccgattccttcttccatcaacttgtcgatagaggctttgaattcatttaactggtttgccatagctgcatttatggcaatcatggcagcggcacagttggaagaagaaccggcagcacggaattcaaaacgatttccggtgaaagcaaacggagaagtacggttgcggtctgtcgtgtcgagaaggatttcaggaatacgtccgattcctaatttaagggttgtcttctcttcagccgtcatcttgtcatcgcctacctggcgtacgatatcatccagagtagctgataattgtctgcccaggaatatggacagaatagcgggcggtgcttcattggcacccagacggtggctgttgccggcactcatgatagaggcacgcagcaaattctgattcttatagaccatcatcagtacattcaccaggaaagtcaggaaaagcatgttgcctttaggattcttgccgggtgcaaaaagattgatgccggtatcagtgcagagtgaccagttgttgtgttttcccgaaccgtttacaccgctgtatggcttttcatgcagcaatacggcaaagttatgcttacgggcaatacgtttcatcaggtccattactaactggttatgatcgttggcaaggttggcattctcaaagatgggagccagttcaaactggttgggtgcaacctcgttatggcgtgtttttgccggaatacccagtttgtgacattctatttccagttctttcataaaggctgttacccgtggcggaatagaaccgaaatagtggtcttccaactgttggtctttggcggaagaatgtcccattagcgtgcgtccggtcaggcaaaggtcggggcgggcgttgtatagggcagagtctaccaggaagtattcctgttcccagcctaaattagtaaacacgcgggttacatttttatcgaataactggcatacttccgtggcagctttatctacggcaccgagtgctttcagcaatggagttttgtagtccagcgcttcgccggtatatgagatgaagattgtagggatacacagagttgtatctaccacgaaggcgggagaggaaacatcccatgctgtatatccgcgtgcttcaaatgtattacggatacctccgttggggaaagaagaagcgtccggttcctgttggatgagcaatttgccggagaagcgttcaattacatttgaattttctccgaattcgatgaatccatcatgtttctcagctgtaccatccgtcagcggttgaaaccagtgagtgtaatgagtaacgttcagggatttggcccaacttttcatgccgtttgctatcaggtcagctatctctctactgatgggagtccctttttcgatagcatctgttacagctttgtaagcttctctgggtagatattcctgcattttcttgcggtcgaacacgtggcttccgtagtaatcggataatttgttcgaaggggttgtaacttcaagagggcgccggttggcaagctcttgcaaggcgtaaaatctcatttttgacatatttgtccttcttttgttggttgttgggcgcaaaattatatgttttttccggaagtacccctattttttagggggtattattgaaaataatgtgttttttatgcggataccccctaaaatattcggggatgttacagagaaaactcttttaggggattttatctccactcttttctatattgaagttatatctgggctgtaatgaagaatctttcatcaggtttcttaaaaagagaggtatttcgtcgttttacaacctttttttctatatttgtccctatatatttggaggtattgccgttgaaacgcgtcttttgtataggaaccttgctatgtcttttgctttcagcttgtccgaaagtgcaggcagcttctatccctgatccttacgatgcgagcttgctttctgcggactctataatgaagaaagtcatcttctttgctcctttttatgaaagtattatcgacgactatagagccgacctttatattaagggaaaagtgaatcttcgcaagaaaaatcacatcttacgctttattcctaccatgttccgcatccggaaaggagtgagggagtatatgatggaaacttatagtgacttgcattttactgctcccgacatttatgatcagaaagtaaaagctagtgtcggtaccacttccgagttttgggagctggacggaaggttgccggaatatttccatgttaatatctacgcttctaccttattatatgataagcttctttcgcctttggctccaaatgcgatgaaatattattcttatcatgtcgattcggtaatgggtaaagtgcatgatttgcaatataagattagtttcaaaccgaaaagcaaaagctttcagttggtcagcggtcacatggtggtcagtgagaatgtctggagtgtgcgtgagatgcattttagtggacgttctgaaatgttgcgtttcaacaatatgatacgtatgggagatgtgggtgaatcggatgagtttttgcctgtacattatgatgtggatgccactttccgctttctgggcaatgtggtcgatgccaattatattgctgctctcgattataaaaccattattcagaaagacccttcacggatggaccggaaaagattgaagagcaagtatgatctgtcggagtcctacacattgcgcagtgatacgaatgccaacaagaaggatagttcttattttgagagtatacgtcccattccgttgactgtacatgaacaggacttatataaagatttctttttaagccgtgatacttcatatcgatataagaaacccaaaaataagaatctggaattctggggacagataggtgatgcgcttatcagccgctatacagtagatctttcgaaactgggcagtgtgcgctgttcaccgcttatcaatccattcttgttgagttatagcgggaagaatggtttttcttaccggcaggaatttaagtacaaccgtatttttacgggcgaccgtttgttacgtatcgttcccagattgggttataacttcaagtataatgagttttattggtcgataaagtcagattttgattactggccacgtaagcgcgcggcccttcacgttaacctgggtaacggccaccgcatttatagtagtaggatgctggatgaattgaaaaacattccggatagtgttttcgattttgatcagatacaactggattactttaatgacttatacttgcaggtgcgccatagctgggaagttgtgaacggtctgtcactggatgtcggtttctccatgcataagcgtacggaggccaatcgttcgatgtatgtatccacgagggcgacttcgcgaagtgtaggctcctcttcagaagtttatcctgattggacagagaaaatgcgtcattcttacaatagttttgctccgcgtgtccgtctgacgtggacgcccggtcagtattactatatgaatggggatcgtaaagtgaatttacattccaaatatcccagtttttcagtggactgggagcggggcattaatggggtttttaaaagtaccggtacgtatgagcgtgtagaggtggatattcagcactccattcccttggggttgatgcgtgatttttatctccgctttggatggggtgcttttactaatcaaaaagatatatactttgtggattttgccaattttacccgttccaatcttcccgtgggatggaatgatgaaattggcggtgtattccagttgcttgacgggcggtggtataattcctcccgtaaatatctccgtgggcatttgacgtatgaatctcccttcctgatgttgcgtcatttggtgaagtatacacagcatgtgctcaatgagcgtctttatctgaatgctttggttgttccgcatctgaatccttatgttgaggttggctatggcatcggcaccaatatttttgatttcggagtctttggcagctttgccaattggaaatttaaggagataggttgcaaattcacttttgagttattcaaccgataatctttaagtttttcctgtatttctgttattaacttcctttataaattacccggctttcgtgttattgtagtttagaaaaacagtgttctatgttctataacatgcaatgacgtattcgatgaaagtatagtgttttctctgattatcaattgtttatttgtttttgacgtattgataacgtattctgaattttgaattgacgtatttaagaatgggtacttagggcttcttttattgcattttactctatgtttgcagtgttcaattgagaacgaaaccgagaattgttaatcttaatttagtaaaacttatgaaaaagttattatcagttttatttttactgagctttaccttagcttctgctgtatatgcacaagatatacagataaaaggtacggtggtaagtggtgcggacaatgaacccttacctggagtaaatgtggtggtgaaaggtaatgccactacgggaacaatcaccggtatagacggtgaatttgctttgtcggttccctccgacgcaatcctttctatttcttatataggattcaaatcacaggaagtttcggttagtggcaagcgtgaactgaaaattgttctgcaagaggattctgaagcgctggatgaagtggtggtagtgggttacggtgtgcaaaagaagagtgtagtcactgcttctattgccaaggtaagcagcgaagacattgccggaaaggctcctgttcgcatggataatgcattgaagggactggctgccggtgtagatgtaacttcggcttcaggacaaccgggtgattctcctcgcgtacgtgtacgtggtatcggtactattaataatagtgatccgctttatatcgtggacggtatgcctatcggaggtggccttgactttgtgaatccgaatgatatcgaatctatcgaagttttgaaagatgctgcatccggagctatttatggtgcacgtgctgccaatggtgttatcctcgttaccaccaaaaagggtaagatggggaaggcgcaaattaattataatttttcttatggctggcagagtgcatggaagcaacgtgacgtaacaagtgctacggattatgctattctgcagaatgagaagtatgtgaatggtggtcaggctcctctttatgctgatccttataatttgaaggatgccatggggaatgaaatcaaaggtttcggtacagattggcaagagcttatttttaatgataatgctcctattgtaaaccatgatgtgaccattagtggtgcatctgagaaggtgaactattatttgtcattgggctatttttcacaggatggtattgttggaggtaactatggtcagtctaattatgatcgtttgacaatccgttcgaatacccagtacaatctgattgatgcttccaaagaacgcggcttccttaataagttggatttgggtgtgaatattgcctatatgcgtacgcatgccactggtatcaataccaactctgaatttggttcagttctggggtctgctctttatttgtctcctattctgactcctactttgacgggtactgctgcagacgagcagattgctgcttatcctacttatgagttgcctcgtgatgaaaatgggaacgtgtatactgttcctggcggtgctttcgctgaaatgaacaatccattggctatgatgacgctgaatcccagaaagaattggtcgcataagtttgttcccaagttttcgcttgatttgcaattgtgggataacttgaagtatcacttcagttacagtgcagatatgggcttttggggttatgatgatgcaacgacatctcttttttatctatccggtaacaacaatgcatcgcataccagtgcatctgctgaaaagcaacaaaatgttacttggcagattgaaaatacgttgacttatgacaagacgattgataaacacagttttggtgttgtgcttgggcaatcggcatttaagtataagggtgataaacttggtggaggtcgttggaatctggtaaattctggtaaaccttctattgactatgctacgggaagtgtcattattgttacagatccagaaactggaaaatttgtcagttccactgttcagcataatgtctatggtgcccctgaaatagaacacagaatgtcttcactcttcgcccgtttcagttataactatgcagagcgctatatgtttcaggctaccgtacgtcgtgatggttctagccgctttggtgcaaataatttgtatggtatattcccttccgtatctgtaggatggaatgtgatgaatgaagcattcatggaaggcacgcgtgactggctatctaattttaagattcgtgccagctggggaaagaatggtaacgataatatagacgaatttggcttcacttcattgacggcaatgggaaacaatgtactcttcgggcaaactgccactaagtttattggttctaaggctcggcgtctggctaatccagatctaaagtgggaagagagtgaacaaacagacttgggtatcgacttggctttctttagcaatgccctgacattcagtgctgactattacataaagaaaactaatggcatgattatagaaatgcctattccgagttatgtaggtgagaaaaaacctttgggtaatgtgggtgacatgcaaaacagcggttttgagtttgaggttggttataagtggaatgtgtctgatgctaagtttgccgttaaaggtaatgccacctatcttaagaatgaattgaagaacttgggtaatgatactggttacattgatttggatggtattcagggattctcaggtggtggaacacgtggctctaacggtgaagctttcccttacttctttggttataagactgatggagttttccaaaacatggatgagatacgtgcttatgtggataaggatggtcagatgattatgccgaaagctgttcccggtgatgtgcgttttgttgacgtgaatggcgatggccagatttcctctgatgaccgtactaatattggtaacggtactcccgattggacttatggtctgaattttaatgctgactggaaagggtttgactttaacattttcttccaaggtgtggcaggtgctgacgtatttgatgctacttatcgttctgatatttctgccggaaactatcccacatggatgctggatcggtggactggtgagggaacttccaataaatatcctcgtctggctcttggtgattcccagaactggttggtatctgacctttatgtatgcgacggttcttatctgcgccttaagaacatcactttaggttacacactgccaaagactttgacccgcaagttaactatcgaacgactccgtttttatgtacaagctgaaaatcttgtgacttggacgaagtactggggctttgatcctgaaattgcttcaggtcccgatggtatcaaatctctcggtattgatcgtggtgtttatccacaggctcgtacatttacagtgggtgtaaacgtttctttttaatctaaaaacataagaaatatatgaaaacgaataaaatattaacaataggctttatagctgccgctactgtgtttactgtaggctgtagtgatgatttccttaaggtggataaccctaacggtgaaccattggaagaatattatacaacggatgctcatattcaggaagctctgattgcagcttatgatcctatacattggcctgattgggctttcgaccagtacaatgctctgaacattgatgctgaaatcatgggtgatgatttctgggtgggaggtgctaataaggcggatatgcgtaattggcacatgctgttcaactatgaaggtgatgaaaacaacactctcagttctctttggacggttgattattcaggcgtaaagcgttgtaatgatgtactgaagtatcttgattgggctacagatgttacgccggaaaatcgtataagctatgagatgcaggctcgttgtcttcgtgtgttttattacaatatgttgtggcattactttggaaatgtacctttctatcttgagaacctttcaaagcctccttatacggctccgcaacttacggcggatgaagtttatggtcaattgattgctgaactggaggcggtgattgattcgaaagcgttaccaatgaagtattataagaagaaagatacagaaggcaaagaggttgatgatcctggccagtttggccgtgttacacaagccatggcttatatgatgtatgctgaaatagtaatgtaccagaatgataatagtcgtttctctagagctcttggttatatgaaagagattattgatgactctcgttttcacttgaatcctaatttcgctaatatttgggagacaaatggcgaatggtgcaatgaatctatttgggaaatcaactacgaacattcaatttcagaacgtgactggggagaggctgcattgaatattggtggtacggtacttcctactctgatttctcctaaggattggccaggtggagatggttggggtaaagggcaggatggctggggattcttacccatacgccttgagacttacgatatgttcgcatcgatagataagcgtcgtgacgctacttgttgggatgttcgtggtataaaatatacagagcgttatcaagacactcatatctggctggctaaatacaggccatttgatgcaaataatgagaatgctactgccagtaagaatctgaactataataacaactatcgttactatcgctatgcagaggctctgcttaatgcggctgagttgtctctccgtacaggcggcagcggtagcggtgaagctaaaggatggctgaatgaagtgcgtactcgtgcaggtttgacgggtctcgataatatttctgtcaacgatgttcttaatgaacgccactttgaatttgtaggtgaaggtaaacgttattgggatcttgtacgtgctgaaggtattagtgaagcatccgataagaataaggcttcaaaagtacttgttcccgatcaatttggctaccgtactaactcttggactccgaagaagaagtatattcctatcgcacaaggtgagttggattctgatccggccttggttcagaacgattataaatagtttcccataactttattaaagaataaacgatatgaaaaatatttttaaatatatggcaggggtgttgattgcaagttttgcaatgactgcctgttcgcccgaagattttacgggggcaaatggagatatcccgcaagcttcagattatgctgacaattttaaagtgactgtagatcagtcaaccaattatgcgaattttgaatttacctccgctcctggagttactccggtttggattattgatggtgcaacttattcgtcgtcatttagcctctcaaagtattatcgtaagaaaggtacatatactgtagaatgcaaagtgaagaatgctaatgggtttagtgatggtactgttgtaaaaacttttgttgtagagaaaacaaagatggccggtttcggtggttttgttgaagatagtaattacaatcttttcaaaggactagagcttccaaataatcccggtaataatgataatccagcacataatcctgcattttggtatgctccgggatggaatatgatagatgctcctcgatgcgttttatctaagggagcttataccattactcttcctgaggctactactgatcagtggcaggcacagatggcgatcaatacagggctgtctatttctgctagcaagcattatgatttttctgttattctcacatcttctacagcgcataaaaacgtgaaggtgaaaatctgtcaagctgataacgataatgtaattcttatggataaaaactttgctcttgatgcgggagaaccgaaagcattgtggggaacgaatcttgaaatctatagtgcggatcctgaaaatataccggtaattgactttagtaatgttaaggttgtattcgattttggtggaaatgcggcgaacacagaagttagcattgaaagttttgtactgaaggatcatgctaatgatgatggaactgaaatacctaaagaagtggtaactccgtttaattatgatgatggggctaatatttggaaagcagtggatgagaattctgcttttactcaggaactttattttggcgatgataattggggggctattgactgtaatccgcaaactacacatgagggtagtaagcatacaatagtagttcccgttttgacatctgcagctgagatatggcgtgcccaatggaaatttcatacagatctttcggctacgattgatgatattgtggatttttcggtaaaggttaattcaactgtcaagttaccagggatgatagtcaaattgacaaaagatggtgatgatgaaaatttcttcttctctagccaagaagtaatccctgcaggagattttgtatttaaaatagaaaatgcaaagttatctaaagatgaagatgctccgaaactgatgctcgtctttggttttggcggggctcctgaaggtgctgtaattactataagtgaaatcacggtcattaaaaaatagggctgaatggcctgtttgataaattgtttactgaaacttggggatagaatatattccttataaatggaaggggaaggacgtgatcttatgaatattgagatttcattctacccccttctttacagaaaacagttcataggtcattccattcgacaactgaatattatcgaactaaatatgttgataatgaaatataactatgttttatctttgttgtttatagtgttaatcgcttgcggaaatagcgatgatgaattggatccattatctgataatgtaacattgacatgctctcctgaaaagctagaagctgttgctatagaagctatttatacgctaaatattacttgtagcggcgttgaatggacagcttttgccagtgatgattgtacctcttgggtgaaagtaaaagtgctggattcttctttggataaagggaaagtcgccgttactgtgaatgtaaattcgggaacaactgatcgcaacggttctgtaatcattaaatccggagcaaagcgtgttgtggtacctgtgacgcaaggaaccccaatgtctgtttcgaagcgtgagatatattccaattctcgtggcgagaacttcctattgtccgttgtagctacgggtgactggagtgtgacgtctaacgatagttggctaaaggccgaaaagaaagatggcaagacagtaagtgttacgacagaccctaatgagaataaaacttcccggaagggaactttggatattgtttcgggtgcggagaagattacggtgagcatcactcaagagtcgactgaagaccgtgagataaacactcccgaaggatatcgcctggtttggcacgacgagtttaatgaaggtagcactcttggcaccgattggacacacgaagtgcaaaagcctggttgggtgaataatgaacttcaggaatatgtgaatggttcagcaaatggtaagcatgtgacggaattagtagatggtaaattaaatatcaactgctttaaagggtctgatggtaagatatattcgggacgtgtgtatgctaaagtaaatactggatggctttatggctattttgaggctcgcatcatgcttcctaaaggtaagggtacttggcctgctttttggatgatgccagtgaacaataattactctactaatccctggccggggtgtggcgagattgacatcatggaagaagtgggtgttgatgcgaatatcgtgtcttcttctattcattgtgcagcttataatcataccataaacactcagaagactgcatctcgcaatattggtacggcagagtcagagttccatgtctatgcttgtgagtggacacccgactatctgaaattctttgtagatggaacagaattgatgacattcaagaatgaaggttccggcaaaaatgtgtggccgttcacttatgctttctatcctattctcaaccttgcatggggcggtgattggggaggatacaaaggtgtagatgagagtgccttgcctataacgatgaaggtggattatgtacgcgtgtttcaaaagaaataaactgagcagttagtgatgtggacaatcaatttataatgataggtaataatatacataattaggttaattcatgaagacactgaaaatcttctccgcctgcttgtttctcttgccttttgtctcttgtacgcaagtagcaaataaaggtagtgatgcggcaaccgagaaaaaagtagaatctctcctgtctaagatgacccttgaggagaaaatcggtcagatgaaccagatttcctcttacggtaatatcgaggatatgagtgctttgattaagaaaggtgaaatcggttccatcttgaatgaggtggatccggtgcgtattaatgcgctacagcgcgtggcaatggaagaatcccgtttgggtattcctttattgatagcgcgtgatgtcattcacgggtttaaaacaattttccctattcccttgggacaagcggcttcgttcaatccgcaggtagcgaaagatggtgcacgggtagcagctattgaagcttcgtctgtaggtatccggtggacttttgcgccaatgattgatattgcccgcgatcctcgctggggacgtattgccgaagggtgtggtgaagatacataccttacttccgtaatgggagcagctatggtagaaggttttcagggagattcgctgaatagccctacttcaattgcagcttgccctaaacattttgtaggttacggtgcagccgaaggaggacgtgattataattccacgttcattcccgaacgtcgtctgcgcaatgtttatttgccaccttttgaagctgccaccaaagcgggtgcagccacgtttatgacttcatttaatgataatgatggaatcccttctaccgggaatgcttttattttgaagaatgtactccgtgacgagtggggattcgatggttttgttgtgacggactgggcttctgccagcgaaatgataagccatggttttgccgccggttcaaaagaagcggcaatgaaatctgtgaatgcaggagtagatatggaaatggtgagttacacttttgtgaaggaactgccggaattagtgaaagagggaaaggtgaaggaaagcactatcgatgaggctgttcgtaatattttgcgtatcaagtatcgtttaggattgtttgatactccttatgtagatgaacaacaaacatctgtcatgtatgctccttctcatttggaagcagctaagcaagccgctgttgaatcggctattctgttgaagaatgataaggaagtgttgccgttacagccatctgtgaaaactgttgcagtggtaggacctatggctaatgcaccttatgaacagttgggtacttggatatttgatggtgagaaagctcgtactcagactccgttgaacgctattaaggaaatggttggcgataaagtacaggtgatttatgaaccgggactggcatacagtcgtgagaaaaatccggcgagtgtggctaaagcagctgccaccgctgcgcgtgcagatgtcattcttgcttttgtgggtgaagaatctattctttcgggtgaagctcactgtttggctgatctggatttgcagggtgatcagggagctttgattacagctttggctaagacgggtaaacctgtagtgactattgtgatggcgggtcgtccgttgactatcggtaaagaagtcgaagagtcgactgctgttctctattcattccatccgggcacaatgggcggtcctgcattggctgatttgctttgggggaaggctgtgccgagtggaaaggcgccggtcactttcccgaggatggtgggacaaattcctgtgtactacgctcataataataccggacgtccggctacacggaatgaagtgttgctgaatgatattgctgttgaggcaggacagacttcactgggctgtacttccttctatatggatgcgggttttgatcccttgtttccgtttggttatggcttgtcgtacaccacatttaagtatagcaacatcaaactggcgtctgatgtactgaaaaaagatgatgtgctgacagtgacattcgatctggaaaataccgggaaatatgaaggaacggaagtagctcaattgtatatacaagataagattggttccgtgacccgtccggtgaaagaactgaaacgtttcactcgtgtgacattgaagccgggtgagaaaaaaagcgtttcgtttgaactccctgttagtgaacttgcattttggaacatagatatggctaaagttgtggaacccggagactttgggctttgggtggcaacggatagtcagtccggagaagaagttttcttcaaggtagtagactgattggtgattttaaggttaaagtagaagaggggcggtccgtgatggttcgcccctcttgattattttattttttgacacttaaatagaattcatggttattttatacgtttataaccgtaaacagcattagcgcccagttcttcttcgatgcgaagcaactgattatattttgccatacggtcggaacgactcaatgaaccggttttgatttgtccgctattggtggcaacggcgatgtcggcaatcgtagcgtcttccgtttccccggagcgatgggaggtcacggtagtgtatccgtggcggtgagccatttcgatggcattcaatgtttcggtcagggaaccgatttggtttactttaattagaatagagttggcgcaacctttttcaatacccatggccaggaaatcaacgttagtaacaaagaggtcgtcacctaccaactggcaacggtcgccgatgcggtcggtaagtttcttccagccttcccagtcattttcgctcatgccgtcttcgatagagtcgatggggaattggttgataagttgttccagatagtcaatctgttcgtcagctgtgcgtttcttgcctttctcgccttcgaacttggtataatcgtagattccgtctttatagaattcagaagaagcgcagtccatggcaatcattacatctttgcccggttcgtatccggcagctttgatggcggcaataatactgttcagggcatcttctgtaccttccagatttggtgcaaaaccgccttcgtcacctacagcagtgctcagaccacgatctttcagtactttctttaaagcgtggaatacttcggcacccatgcgcagaccttcacggaaggaagttgcgcctacagggcgtatcatgaattcctggaaggcaataggagcgtcactgtgtgaaccaccgttgatgatattcatcatcggtacgggcattacgtatgtattggtaccaccgatgtagcggtacaggggtatatcgagataagcggcggcagctttagctacggcgagggatacgccgagaatagcatttgctcccagatttgatttcgtttttgttccatccaatgccagcatggtatgatcgatgcccatctggtcgagggctgacattccgacaagtttcggagcgataatatcattgatgttttctacagcttttaatacacctttgcctccataacgtcctttgtcgccatcacggagttccaaagcttcgtgttctcccgtagaagcgccggaaggaacggaagcacggcccataaagcctgattccaacattacatctacttccactgtgggatttcctcttgaatcgagaatttcacgtccgataatcttttctattttcataattatgatattatttgtaattattttaaataggaaacaagaagcaatcggtttttgttcagaatatagttgtgtttagtgattagtggtgagtgataagtgattagtgccgactgctcctcccgccaatgcagccaatattcccaacgtgatgctgattaaggtatatgctataaatgttccatagaaaccacctttcagcaaggtcagaccatcattggaaaaagtagagaaagtggtgaatccaccgcagaaaccggctgtcaataacagacgcatttcgggcgagagattaaaacgggcggaaagggcataaaacaacccgatgagaaaactgccgaagatattgactgtaaatgttgcccaaggaaaggaataagggatgatccgttcgtgcagtagttcctgcacatagtaacggagcacactgcctgttccgccaccaaggaaaatgtatatcaattctttcatttttattctgttattattccgataatgcctgcaaaggtacaatttttcatttatatcgggtttatattccggtttttccccttaatgcttaaaaatcagaaactaaaccagttatgcaaacgtttgccggtaaatcatctatattttcattttattccttcgttcacatgtcatttcatccttatatttgcatcacgattataattctctaaaataattcaaatcatgaaaaacatgaaagcaatcaaattgttctgtctcttgctctttttgtttgtaagcaattgggcaatggctgagagtatcacctcgccgaacggacaactgcaactgaacttttcagtgaacgcacaaggtgaaccgatctatgaactttcctacaaaggaaaagctgttatcaaaccttctaaactcggcttggaactgaaagatgctccgggactgatgaatggatttacactggcaaatacccaaacttccacttttgatgagacttgggagccggtgtggggtgaagtgaaacaaattcgcaaccattataatgagatggctgtaacattgaaccagaaagcgcaagatcgcaatatgatcatccgcttccgtctgtttgatgacggtttgggtttccgttacgaatttcctttgtctaagaacctgaattacttcgttatcaaggaagaacgtactcagtttgccatgacaggcgatcacactgctttctggataccgggcgattatgatacacaggaatatgattatacagaatctaagctttctgaaatccgtggcttgatggatggtgcaatcactcctaattcttcacagactacgttctctccgacgggtgtacagacttctctgcaaatgaaaacagctgacggtctttatattaacttgcatgaggctgctttggtggattactcctgtatgcatcttaatctggatgataagaattttgtattcgaatcctggcttacccctgatgcaaaaggagataaaggatacctgcaagctccctgtaagtctccgtggcgtacggttatcgtaagtgatgatgcccgtgatattctgaattccaaactgacgttgaatctgaatgagccttgtgcttatgaagatgtttcctggattaagccggtgaaatatgtaggcgtatggtgggaaatgattgccggaaagagcacttgggcttataccgatgatctgccttctgtaaaattgggtgaaacggactataccaaaactaaacctaacggacgtcatggtgctaccaatgaaaacgtaaaacgttatatagactttgcagctgaaaatggacttgatcaagtgctggtagaaggttggaacgaaggatgggaagactggttcggtcattctaaagattatgtatttgattttgtaactccatatcctgactttgatgtaaagatgttgaacgcttacgctaaaagtaagggtgtgaaattgatgatgcatcatgaaacttcggcatccgtacgcaattatgaacgtcatatggataaagcctaccagtttatggtagacaacggttacaatgcagtgaagagtggttatgtaggcaatatgattcctcgtggagagcatcactacggtcagtggatgaacaaccattatctgtacgccgtgactaaagctgccgagtataagatttgcgtaaatgcccatgaagctgtgcgtcctaccggactttgccgtacttatcctaacctgattggtaacgagtctgcccgtggtacggaatatgaggcttttggtggcagtaaaccgttccacactaccttgcttccatttaatcgcctgattggtggcccgatggattatactcctggtatcttcgatacaaaacttgatttcatgggcgatctgcctcatggacaggtacagaccactctctgtaagcagttggctctttacgtgacattatacagtccgttgcagatggctgccgatttagttgagaattatgagaagcacatggatgctttccaattcatcaaagatgtagcggtagattgggatgatagtaaatatctggaagcggaaccgggtgattatattacggcagctcgtaaggcgaaaggaacgaataactggtttgtaggtggcatcacagatgagaatgcacgtactgctaactttactctggattttctggaacctggcaagcagtatgtagctactctttatgctgatggtaaagatgctgattacaaagagaatccgacttcttatcagataaagaaaggtattgtgaccagtaagactaagatgtctgtgaagttggcacgtagtggtggctttgccctgagtttgattgaggctactccgtcagacaagaaggttgtgaagaaatggagatagataagattcatcggaaactctcagattgagagctactctaaaattagggtaaaaagaggtttttattaggcattaggtaaataaggggtgcacttcaaaatttgaagtgcgcccctttcttttttctttgtatgacttcttgctgagtttcttaactcaagggcccaggtttgttgctgcaaaatagaatcgatgcttccacaacttaataagacgattgagcaagaacttgatggtatggcttgattacccctgaaatgggaggctttgcattgactcgatggttgcagataatgcactgaattatatcatttgtcactaaattggaataaactttagaagtcttgtgatgtaacaaagtttgtcctgttttcaaggtattaagagcttgtttccaagaagttaagagtttgtcgacaaagagttaacttcctgtcgacaaactcttaacttcttggaagtgactaattcccagagtggttttaaagtgcctttgtcgttgaggtaatgagcgaaatagtgttgaataaaattccttattgtctggtgtgttaatcatagcttgtatagggctacaccttttgccgcaaagggtgtagccttacatacaaaagggtgtagtcatccggggtaaatggtgtagcccttttggaagtgcccttacaggtacttgtggataggattaaatgatatgattagaattatttttattaaacactttgttctttcgaaaatcccccttatctttgtgcccattaaacgaacgattaatagtatattttgttctattaagtcttttgtttacagtatattagaagtcgagaattgtgctttttcagcaaaatcagcttttccagtcttcaaaagtgcctgtttgtacttcctgcgatagggagtctgaatttaggccgttgaacgtagcaaattcaccatcacggatttacgttttaaccggaaggaattttcattccccggtgtccccaagaaatatccagacgagaacagttaatcattcatgagctctcaatcttccattctgaattctgaatatcattggtatgctttgcgtatcacctatagccgggaactcgttctgaaagagtttttggacaagaataatatcgaaaacttcattcctatgcgttatgaatatgtaacgcggaaggagcaacgtattcgtaaactcgttcctgccatacataatttggttttcatttattccactcgtaagaagattgacgaaattaaggaggaaaatgctgttcttctacctcttcgctatatcatggatcgtgagacgaagcagccgattattgttccggaaatccaaatgcgccactttatagccattgccggctcttacgaccaacaagtaatttacttgccgcctacggaatattccatgcagaaaggagatcgtgtccgcatcaccggtggagttttcgaaggtgtcgaaggtatatttgttcgtgtaaaaggtgatcgtcgggtagttgtttctattcagggggttatggcagtagctaccacttttattcatccctctcttattgttccgataacagaagaataattcataattctgcacattgtactttgttacttatacgctttgtaattcataatttgtaatcttaattatatgaagtctcaaatcgatgctttgcgtcaactcacgcatgagcttctttatcttggcatggatggtgaacccatttatgcggatcgttttcgtcaactaaattcagatgtttataatcaggcggaagccttgtatcagaaaaaagctcggaatgatgaagaagaagcgactctttgtgttactctcttgaaagcttatagtgctacgatttatgatcgtggcgataaaagagaaaaagttcaaatactgcttgatcgtagttgggaggttctgaataaaatatctgattctttgttgaaatgtcaattgttggtggtttgctatggagagacatccgatgaggagttggcgaaagaagcacgtgcgattatgaatggctggggtgattctctaactgttgaacaacaagaacttctaaatgaatttattccctaatatttgtccatagttttatatgaaaattcttgttacgggggctgctggtttcattggctcgtatgtttgtaaacgtctgctttctcgtggagatgaggtggtagggcttgacaatatcaacagctattatgacgtcaatctgaagtatggacgtttgggtactttaggcattgataaaaatacagttgattggtataaatttgtccaaagtaatacatctgagcagtttcggtttgttcgtataaatctggaggataaacaggcgatgcgaatgctttttgccaatgagtcttttgacaaagttgtaaatttagcggctcaggctggagtacgttattcaatagaaaatccatatgcatacgtggaaagcaatatagatggtttcttgaatgtattggaaggttgccgtcattacaaagtgaagcatttggtttacgctagctccagtagtgtttatggattgaacggaaaagttcctttttctgaaaaagatagtatcgcacatcctgtaagcctttatgcagcgacaaagaaatcaaatgaattgatggctcatacttatagccatttatatggcattccttctactggtttgcgcttctttacagtttacggcccttggggacgtccggatatgtcacctttcctttttgcagatgccatgttacacgggaggccaataaaggttttcaataatggtgatatgttgcgtgattttacttatattgatgatattgttgaaggaatccttcgggtgatagaccatattcctacttctaatcaggattggagcgctcaaacccctgatccgagttcttccactgctccatataaaatatataatataggtaattctcatccagtgaaacttatggactttattcaggcaattgaagaagctattggacatcctgcagagaaaatatatcttccgatgcaaccgggagatgtttatcagacaaatgcagatacttcggctttgcagaatgagttgggatttaagcctgacaaatctattaaagagggagttcaggaaacgatagactggtatcgttctttttatcaattgtaatcaaaagtaaactaagataatatgaaaatagcaatagttggtaccggctatgtcggtttggtgacaggtacctgtttttcggagatggggattgacgtgacttgtgtggatgtgcaggacagtaagatagaaaatctgaagaacggtattattcccatttatgagccgggcttggaagatatggttcatcgtaactatactgcgggtcgtctgaaatttacgacagacttgaaggaatgtttggatgaagtggaagttgtgtttagtgctgtcggtacccctcctgatgaggatggcagtgctgatttgaaatatgtgttggaggttgcgcgtaccattgggcgtaatatgaataagtatgtgctggttgtgactaagagtacggttcctgtggggactgcacaaaaggtaaagtctgccattcaggaagaagttgacaagcgtaatgtaaagatagagtttgatgtggcttccaatcccgagtttttgaaagaaggtgatgcggtagatgattttatgaagcccgaccgtgtggtagtaggtgtggagtcagaaaaggctaaggctataatggaacgtctttataagcctttcatgatgaataactatcgcttgatatttactgatattcctagtgccgagatgataaaatatgcggcaaattctatgttggctacacgaattagctttatgaatgatatcgctaacctctgtgaactggttggtgctgatgtaaatatggttcgcaaaggtattggcgcggatagtcgtattggcggtaaattcttgtatcccggttgtggatatggcggttcttgttttccgaaagatgtaaaggcgttgataaagactgctgaaaagaacggttatccgatgcgtgtgttgaaggccgtggaagaggtgaacgagaagcaaaagagtattctttttgagaaattattgaaacattataatggagacttgaaaggtaagcaaatcgctttatggggtttggctttcaagcctgaaacggatgatatgagggaggctccggcattggttttgattgataagttgatagaggctggcgcagatgtgaaggtttatgatccggttgcgatggatgaatgtaagcgcaggataggggataaggttgtctatgctacggatatgtatgatgcggtgttggatgcggatgcgttgttgctggtgacggagtggaaggagtttaggatgccgagttggggagtactgaagaagacgatgaggcaggcagtggtggttgatggaagaaatatctatgagaagcctgaattacaagagctagagattgtttatgattgtatcgggagataaacaataatgatgtgtgtaatatctgtaagtcttccattttgggtttctgaatgatacgtatattttgctgcgaaaagaatttaaattgtaatatatattagtatgaagattataaacacatcaattacaggtgttattatcattgaacctcgcctttttagcgatgaacgtggctatttttttgaatctttcaatcaaaaggaatttgaaaaaaaagtttgtaaaacggtttttgtacaagataatgagtctaaatcatcttacggggttattcgagggttacattatcagaagccaccttttgctcaaagtaaactagtgcgtgttataaaaggtgcggttttagatgtcgctgtagatataagaaagggttctccaacttttggacatcatgttgcagtagagttaactgaggataatcatcgacaattttttattccgagaggttttgcacatggattttctgttttgagtgaagatgttgtgtttcaatataaatgtgataatttttatgctccgcaatatgagggagctattgcttggaatgatcctgatttgaggattgactggagaataccagttgaaaaggtagtactgagtgaaaaagacaaagtacatccaatgttaagtgaaatagtttagatgtttgatagaaaaataagtaagagccccaaaagaagatattgtatataatatggatacattattagagattgagtctcgcgtggattgtatcgggagctctattgatttaccctagagaggattgcgggctattaggcttttgataaagagactaagaagttcaatctcaataattggactctcattactaagaaaacggtagaaaatttccccttcccattacatggttagacagtatgctgagtcctgtgaatatctcatggagctcgtccagagtgccaagtctgatatggagaaaatgacaaaagaaagaaaagaaaaagagtcaaaaagtagcacgaaagtttgatattagacctcaaaagtgttaaaattataaattctgttattttcagtgccgttaaatcattaatatataattgatttgataagatttggggagaagtggatacttaccgctgatggaggtgtggttttagaatatatgaaaggaggaaaataggtaaatttgataatgaataccaataaaataaagaatttggcacgaaacgcaacaaagagcaaagacgggagaactgtactgagcaatttcggttatctcacccttttgcagtttgctagttatctttttccaataatcaccgttccttacctatctagagtaataggtgttgaaggttatggaaaaatagcttttgcatcagccgtgatggtgtgggtgcagactgtggcagattggggctttttgctaaccgcaacgcgtgatgtagcaaaatgtagggataacaaagcggaggtttctcgaatattctccgaaacattctttgcaagatgtttattggctattgtttctttcatctttctttgtttgctcattctgattgtgcccgatttcaaggagaacgcagaaattctgtttgtcacctttttgatgattcccgggtatatcatgttccccgattggttctttcaggcgatagagcgcatgcgctacactaccataacaaatttgctggtgaaaacaatttttactgttgctgtttttatttttatcaaggagaaaggtgattatattatcgtccccctgttggcctctttggggacggttgcagcaggcattattgccatgtaccttattttaaagaagtgggattatagtctgcatcgggtttcttttcattcggtcatcttggcaataaagagaagcaccgatgtttttattaataacctctttccaaatctatacaatagcctttcggttgtgcttctgggaatctatgatggtagtgtggctaatggaatttattccgaaggaaacaaattcgtcaacataggacagagtgttcttggtgtggtgacaagggtgtttttcccgtttttatcaaggcggatagacaagcatcgcatctatgtggttgtctatatgggagctactttctgtattgccgtaattttattcgtgagtgccccgtggcttattgattggttatataccgatgagtttgctgatgcgatacccgttcttcggattatgtcaatttcgttggtgtttgtagccatgagtactgcttatggaaccaattatctgattgtgcaaggacacgaaaggatcttgagaaaaattaccatgtggtgttcattggcggggtttgccattgcgtacccattaatcattcattattcttatattggtgtggcagtgacggtcacattttccagaatgtgcttaggtatttcttcttggctggcagtcatgaaattgaagaaaaatcatttggaaaataaataataaatcatgcaatctctaaagttttacatcgacaatccccgagtatttggattttccttgttggataagttcggttatttgttgtcggataagttgtatttgcagcttttatattattttcggatgggaaagaagttgcacttgaaacatccccggacattcaacgagaaattacagtggcttaagctctatgatcgccgatcggagtacaccgtcatggtggataaagtgaaagccaaggaatatgtagctttgaagattggcgaggaatatatcatccctacactcggcgtgtgggaagaccccgatgagatcgacttcgatgccctccccaatcagtttgtgttgaaatgtaatcacagttccggtggcttgtgcatctgtaccgacaagagccagcttgacatttctaaagtgaaggaagatttacgcaaaggactgcgtgataactattacctacacggacgagagtggccctacaagaatgtgccgcgccgtattctggcagagaaatttatgatggacgagagcgatgaaggtgatttaattctgaggggagaacgtagggaaaagacagatttgcgcgattataagttcttctgctttgatggtgaacccaggttatgtcaagtaatatctgatcgcacagcggacgaaaagattgatttctatgatatgaattggcatagaatcattggcttaattggcttaagtgaaaacgtccataactctgatgatgatattctatgtccacgttcgtataataagatgaagcaaatggctcgtgtgttatccaaagaccttcctttttcacgtattgacttttatgaaatcaacggaaatccctatttcggggaaattactttttacccagcctgtggctttggtgaatttcgtccgaatgaatggaacaccacgataggcgagtgggtgcatctgccaattggggcacaacaataaaatgatattataaacaatagtcttaaagtggcgagtgcatatctgtaaacactcaggttagggttcaaaatgaaatatccatctttactgcgaaccccaaaaataaacttatgagcgaagaccttgaacgatttttctttcggtattaccgaggcattgcctcatggtgtgttagtacaaacattctgtagaaacaacaatgttccggtaagccgccattatagagtaaggcgatttgggtagtttcctctaccttcgcctccataattaaaaacgattaaatatgcctattgtatctgttattattccaacttataatacgagacaacaattattggatatggttgagtgtatgagagctcaaacattacaaaattgggaactgataattgtagatgataaatctatggatggttcactggagtatataaagagtgttattacagatgagagaataaaaatagtggtaagagatagagaacctaaaggttcggttgtatgtagaaatataggatttgaacttgctagcggaaaatatgttatacattttgatgctgatgatttaatatcccaaaaatgtttagaggatagaactaaatatatggaagatcacgaagatattgattttgctatatttagaggtaaatcatttactgatcctgataataaaaatcttttttcctcaaatgataagtcttgggggattaaaaaaggggatgtaattgccgattttttaagagctaattatcctttttctgtatggaatttgatttttagaaaaaaaagtgttttatctttcttatgggatgagaaagtcaaaatatatactgattttagttttataattcctttgttattttctaatctcaaatatgaatttgctgataatgattcttatgattatttctatcgggtagaacctaatagaaataatatgtgtacaaattttgtttcagaagaaaagtgtatttcaactttatatctatttgataagactataaaaatactgaatacttctatccacaatagattttataagaaaaattttttaggtttgttggaacttcatttctcccgattactattgaacgctaatgatgaaaatatatattcgtttatttgctttgtgaaacaaaattttggatatgcagtttggataagattctctattctggaaaagatatgtcgactttttaaaaagcaaaatatgaaaaagattctgatgtatttatttgaggcaatattgtttttgaaaatggataatatagtatataatatcaaaaagtatgtataggttcacttttttcataataaagatcatagcttttttttctttgtacatttttccttatcgagtgatgtattatgtgaaaagaataaaagatattttcttgtcaaatagatttgctcttaaaattaaatctggtaataattttaatatagaatctcctttccatgtgaaagggcatcgttatatctgtattggacataattttagtgcatgtcctggacttaggatagagtgctgggataaatatgcaggttatagctatttcccacaaatagtcattggtaataatgtgtcatgtaattatagatgtcatattggagctgtaaataagattgtaataggtaataatgtattgataggaagtcaagttttaatcatagatcatgcacatggtgaaggtaatgtagatatgtttcaggctcctattgacagaaagttgttttcaaaaggccctattgttattgaagataatgtttggattggtgatggagtttgcattttagctaatgtgacaataggatgtaattctataataggagcaaacgctgtaataacgaaagatatacctccatatagtactgttgttgggaataatataatactaaagaggagatctaactaattttgataagatacatttctaaatttatagtcttattattgtggatttggtaatatttaatgctattttatatctaagtactgctgttatatatttttataaacgtagagtaatagatataggttttatattattatcgatttactcttttgttgcaataatggctattccttgtcattattttcttaatgttttatggcagaggaatatcactttatttccatttctttatttatatatagttctgctacttttttttagagcttatttattgccaactgatgaactttgtttaaggataaaagaacgaaatttgaataaactgaagttacttgctgtaatatatataatgtcttcagtggttgttgtgatattattactgcctcaagtttttaccaatatagtatcaggagcatggaatgaagtcagagagaatctttatgaggaaggagttagtattccatattattctcctattgattttttgatgatgaattttactaattatagtagctcatttatgatattgctatttttctattttttagcatatcagaaagtaagtaagacttttttgttttattttggactctctattctagcaacaagattctctcttgcgctttttatgtcttcaagaggattattggtcgaatttatattgtcaattatagtttgtttttatttgtttaaggctaaatttactaatagtttattgcgacatataaagcttttatttggagtattactttttttgattttactatattctttctctgttactgcttctcgatttggagatgaaacagataaactacctgaagaatattcgcaaaacatttcgttagtagattattttggacaatcttttttggtttttaatagtggtgtttatcctatgcatacttatgcaaatggaaagtatatgttaaaatatttatattctatagttggggaagatacatcaatagaacaaaatgtgttgggagcaagttatggaactggattttttacatttgttggagcattatatattgattttggtcctttctttacaattttgtgtgctttattatttcctctctttttgaaaaaaagagtaactaaaagagttatatatttagaagatatgtatttgtattttttctttcttaatctgatgttaatgggagtatttgtgattggtagtggagtaattttatctatcatatttgcttttattatgtatgcgtatttgaggtgtgcattctatccccaaaagataactaatgtgatttgtaattaatctattttatggtttcaatattgctttcaacatataatggagaattatatcttaatgaattgataaactcaatacttaatcaaagttattcttcatgggagttatttattagagatgatggttcgaaggatagtaccaatattataattgatacatattgtgtaaaatatcctgaaaaaatatttagaattccctcctttgatgaaaatgtaggttctgggaaatcttttatgaaactattggaaagtgttgattctgattattatatgttttgtgatcaagatgatatttggttgaataataagatagaactatctatgaaaaaaatggaggaattggagtcttgtgaaaaaggtaaagctatagctgtttttacggacttgaaggttgttgatgaaaaacttaatttaatatcagattcattgtggaaatattctaatatatcagctgcttattctaaagatttttatcgaatgcttgcatggggatgtcctgcatatggttgtactatgctgtttaattcgaaagtgaagcaatatgtattaccatttccagaatggaaatttcatgatttatggacgattttaataatttcaaagaaaggcattgtagattatatatctttcccaacaattttatatagacaacatacttgtaatgtaacgggagctcatcaaaaaaataataaaaaatat

SEQ ID NO: 6473 - DNA, 24403 bp, Unknown
  gut microbiota DNA sequence
atgatgatccgttttttgataagtcattaatatagattacataaatattacatccttttttctatattctggtgttacaataagatttatgacttttcctttagaaatatgaccttctacaatcgtattttggggtgcacatagtttaaattttacattccaatcatctggaagcccggcacctatatatatattattgccatcacattgcataatcatttcttggagcccaatcatgcctgaaccaccccagttatgatctggagtccaatcatatcccggtccccaccaggtgggaaatcttctacccgagtctttcattttttggatggtgagttctgcagcttcctttttaagccctaattttgcacaaaatatagcattttgttgccaactgattacgcccttttgttgagggacatcattaccataataccaagtattacgggcaatatccagttcctctttacctattccatgtataccccatggaaaaactgtataaagttggggaaactcagtattgttaattcgttcccatgatttggctggagaaaatgttttctttccattctgcactcggtaatagatatcgtctggaattcgttttctgaaagattctatatattctctttgctcctttgttaaatattctttgggtaaatcaagcatagcttggctgacacattttaatgctgtaacagtagttattggattagtagccattttgtatgtttcgagtgctgtggaggggtataacactaatttcccctgagcatcgagagctttaggggttcgtttcaaacttaaatattgataatgctcatcgtaaaactttaagcagctttctattaggggaagatatttggatatgtttgttccgttgtagaaataggtgtctattatcatcatacagaattctaaaacagtatcccattgatactctatccatgcattatattgtactcctggatcaaaatcctctggtcttttccaactatattcaaatccaactggtaatccgaagttttctatctgttctgtaaaacatgctccttggtgaccccaatagtgcatagagcgtaactctgcattatttaacatattattataaaagtcgaattgtgacttcatcatgtcgaaatcaccacttttcagcataggccagtagactagacgctggttctgggcagtgaaacttcctcctccccactttctgaaatcaggactataattaaatgatttatttatgtattctggatcagtagtgaaaagtcccccattgaattttgtgggatagcttccataggcattacaagcgagctgataccgaaacacttgataatttcgtcctacttgccacttctcattttttggatccggtatatcattatctatgaaaatataacttcgatcccaaaaatcattccaccattttagcgtagcttttcttatgcttttctcatttgctataatttttttttctgtttctgagagttcttgtagccattcatctattgattctgcataggctgtatgcattacaacttttatattgtgttttcgtgaaggattgatagaacataattgccagcctttatagtcagtggaggcatattttccttgggtatttccggcaggtatcatgtttggggcgaagagtctacccccaaaagtaagtttatttattggattccaaaacttatctttgattggctctaacttctgttgttttatggccagatcaaaagcgctttctccagcattgcgatggtaaaatagaacacttgtatcatcaaatttaactgtatcacattttacaatcgcttttaccggagcattcatgtaagttctgcagacttctgtctcaggctttgagagtactctttctttaaatctccatccttcataagtagcatagagtttggtgggaacattacttgtgacatcgatatgagaaactggattaaatacatctgcccatatattgattgttgtttctgttccattttttcgggccttaatttccacatatccctctttaagttttaattcttgatggaaatgatcaggattttctagaggattgggagacattgttattctaattcgtcccaatttaggaaatgagtttaactcgtcaaaagtaccacttcgactaatgtaaattagtaagtctccatcttctacccaaacattcattcctatgtcgccacctccacatggcattgattcaagtgagttggctgagggagaattccaaactatgttatagttgtctaatcctttttgtgaggcttttgctattccaaatgaaaatagacaaatgataaggcttgaaatgattttcatgatattcgttttcttacagttattgtaatagttcttttatctataatacgaataaggaaataagtctacctaatttgcgggcactttataaataaattcgtaatttacatatttgagatggattgtggacttctgattttagagaagaaaataattactattctttcttagtgttgatatttgctagtaggatcagatagcatcttgacattggcacccatgacgagtcttccggcattatcaatgacttaaccactatggtaccttcttatttcactccttgcactacagttgttgtatgaaaattatatgtaaggaaagctgtcgtaaatatgattcttttgttcatgattgagttagaaaacaagaaaaataaaattagagtaagttgtagcattgatttgaaatataagaaaaaacagagtagcttcaatgctacgaaactactctgtttttttaattcactaatatggaattattcgcgatacagcattaatgttccccaacccaattggtcgaaagcgccactgtttgtgccgtaacggcttccaccgtccacaccaccttcgggacgcattttgtcagcagccatcttggcgtacttgtagccactgcccaacttcttcactttggcgtagtgattgaagagaatttcccatcccggacggaggttgccacggccattatcatcagctacggctgtatgtatggcaccgtggttcttgtcggcgcaactgcaatcaacgcaatattcatagcggttgaacggcatctgctctttggttgccagccaggaaccggcggcatttagttggtcggagccattacgtagattgaagagggctgtatattcacccattttcattattgcgttatcttttgcagcaaagaagtcgagttgggtaactgctggattgtactgaaagagggtgtaggccatttgacaaagattagctgttacagctattgacatcatggcgtggccctggtcacggccgctctcctggttttgggctatctcttcaccgctacccagaggatcggagaaggtgccctgaatgagtttgccaatatatccgttgcctactccattgtagaagtagttcaccacaaagttcaccatttcgtcgtcttcattcaggattccgatggcgaagtaagaacacatatttaccaaatcccaattagaccagtagtgatcgctgcaagtaccttgatggcgcttcatgaaatccaggtttttaggagcaaatacatctttcatccatttcttaaaggcggtcaaatcgttggctgcccaaccgctataggttgacattatttcacctgcattggcaaaagtataaccttgtgcacctgcggcaagcatgtggttggagtcgtttgaagttacctccttgcagacctttgcccaagcattcaggattttgatggaagtatcggcatacttcgtatcacctgtcaatttccacaataatgataactgataggcagcagcggcatcacgcattgcgttgctgtagttttcattcgtccctgttcccgtagcatcaccacgcactatcttttcggtaggtgaaggggtgtaagtaacatttgtaaactgactgctcttcagcagattgaattcatcctttaccgcctgtggtgcgcttccgttatcgagcattgtcttcacacgtgtaaagtcggcctcgttgaacatggcgcaaggatgagtataggtgtatttggcgaccacttcttcataaggcatctcccaactgtcgatatctgtcgttccgtcttcgatttcactggaacaggctgtgaagcctgttatcagtgagagacctaatgcgaatattaaattctttttcattgtgagtattctttagagttatattttagtttccggctgatatttcagcttcagcaaaggcttttgcttcggctatgctcttgaatgtgcgaatccagtaaaccgtatattgaccggtaggcaggttctcattgtaaatgtctgctaccttgatctggaaagtattggcttctaccataccattgcctaatgccgcattaattgatggtatatcataatatatcagattcgtattatcactcagaagttctcctacatgagctttgttgatatttccggatttagtgactagatctaatgtgtaagcaccaccttgcccgattccttttccgccgacaggcaatgtggaacgcatggcaagtatcggatagttggagaaatcaaggtttatggggacatttttgaaactcaagtccgcacgtctcatagtagcgttttgagcaccggctgtaaccaccattttaccattttctatcacatagcttgaataattctgtccgattttccagccatcgaaattattctggccatcccaaatcacccaaccgctttctacggttacagatacggaagccgtctgacctgttgccttacaagttgccgtaatagtagcagttccgaaacccttcggtgttacaacacccaaatctaccgtagcaatgttttcgtcacttgaagtccagtctactgaacctgtggtagcgttggccggtgtgtaagcaacatccagctgaaccgggccgcgagagatacaaagcggttctgtcaaagcagagatagagacactttctaccggaatgtactctttgatattcagctcataagaagcagatacaccactacggtcgtgtgtgtaagctgtaatgattgccttgcccggtgtcagacagtttaccaggccattttctgatactgtagcgatgcttgggttactgcttgcccatgtcagataagagtaggtatgattagccggaaggatggatgcctccaactgaattcggtctgtctcataaatatcttctccctctttcggattgaccaacgtcatatcggtagcctttatgatttcgggtattacattgaccgtcactgaggctgatggaccgaaacctatagcgggagtcacactaatgatggccgtaccttcggctataccggtaatagtaccttgctgcgaaactttggcaacagtttcatcggttgacttccagataatggaacgatcttccagttcttcgggagcatcaatcgcaaaaacaatagtagagtccatgccaatggcaagcggcaggttttcactgactttaaacgtgatgccgttaatcagtttggcttcgggcatggcaggagtaaattcttgatccttatcacatgcagtcagagtcatgcaggccgccagcatcccaatggatgcccggctcaagccttgatatatagaatttctattcttcatgttgttatcttctttttatgaatgaaaaacattgatttattctccccaacccgggttctgtttcaggttcgggttcaactgcaactggtcggtaggtaatgggtaaagatagtgcttatcttcccatttacgtcctgactccaggatgatgaaaccgtcgctgtttctttcattggtaacgcccggccatttgttctggaactctgtacctgtccatctgatacccagaaaatcttgcggcatttccgtttcagctgtcttccaacgtttcaggtcgtctatacggaaaccttcgttgaataattcaatggtacgttcgcggcgaatttcagttctcatatccagatcgtgagtgctggcaaatgcattggttagtttaggcattttggcgttgatgcggcaacgaaccaagttgagagatagattcagatcctcgtcagagatagctccatcccgttcgaatacggcttctgcatagttcaacagaacttctgcgtagcggatgatggggtagtcgtagctttcataggtatcgttcacatagcgttcgcaagcccatttctgattgttataaccacttcctccggtaggtaccaatcctttgatggaagctgaggcgcggtcaacggcatcacctgtccagttaacgcgtgaattcaggttactccaaaaatattcataaggtttgcagagggtataaatcatacggttatctctgttcagatattcgtccaaaatcttcaggtctcctttatatacttccgatttttcaatggggagtccatcctggcagagatacattgcagcaaatttgtgagagatcatttgggcatttgccaaacactcttttgtgatatttacaccgataggagccaacgcttcgtcgtgacggcgggagaaaatatactccgtattggcgcttttctgtaatccggcagggttacacttcgtatcttccaggataaacatatacttttgtgcactgtcgcctaagatagcaggtgcaaacagtgagaagtttttagtgttgatcacttcctttgctgcatttgctgcaatgtccaacaagtctttgccacgagctgtgttaccacggaacttttgccatgtaccttcgtagagtgctacacgggaaagcattgcccaggcgccttcgcgacctacacgtcctttttccactgtggaagtgacgggaagtaattcggcggcatctttcagatcctgaatgatgaggtcggctacttcgctgcggtcgttgcgtgctgcttgcatttcgggagcagtaacatcaatcggtgtagtgactactatgacatttccaaaaagctgtaacaggtcaaagtagcagtaagcgcggaaaaacttggcttcaccgatatattgtgcgatgtcactctgatttgcaaaactctctgctttctgtaagaggatatttgtacggcgaatgcgattgtaagcatcggtgtagttgccgtcggaagccggtatgctgttggttccgttagcaaatacatttttactgcctttatccatgataaggtcagaacgcttatcggagtggggggcatcgtagacgctgtttttaaaatcgcgtgtccagccatagaactgattggagaataacttgaagtctgtagcagtctgccaatagttaccatcggcaatctggtctttcggatccaggtcgagacaggaatgtaacatacatcctattgccagtatcaaaatagatttaattgtatattttttcatttttgtcttcaattaaaaggttaaattcaatccaaaagttacagtgcgcaggaaaggatatcgcttggagttgtccactttacgatttgcttccggatcccatccatcattgattttgctgtgttcccacaaatcgctacctgttacatatacgcgcgccttacttaatatttttgttttggcaagcagagaagccggaagtgaataacccagagttacatttttcaagcgcaaatatgctccgtcttctaccgaccatgaagagcattggtagttgtagttgttaagttcggactggttggtcagcgcagggaagaatgcacccggattatccggagaccatgtgttgcctatgtgctgatcgctcgtgttcagataaacggcacgcatcggaatcctccatgtactttcctcacgccagatagtacgtttgcctgctccctggaaaacgatggcaaggtcaaaaccattccactccagacctgcattgatagagaattgtactttaggatcgtctgtacccagatataccaaatcttcttctgtcagtttgccatccttattcacatcttcgaacatgttatcgccaaggcgcagattgttgagtgtaccgatggtactggtgtttttgtacttatccacatactttttcagttgttcttctgtctggatcttgccacagtaacggagaccgaatacagaattcagaggatatccttcacggtcggagcgtacacctgctttgatggctccactgccaccgttatccactaattcgttggtggtgtaggtaaaagtaccgccgatatgatagtttacttttccaatcttatccgaccagttgatcataccttcccaaccgtgtgccttgaatgcaccgtagtttgccgtgggagctttgtcacccaaaatacccgggtagattacgtcgatcaacatattgtcactcttcttccagaagatttctgccgtacccgtcaggcggttgcgcaagaatccgaaatcaagaccaatattgtagttatggatgcgttcccatgtacggtcggtactcggcaacttaccgttagtatctacataagagatttttccattacctatcaatgcaccgccactgggggtgaagttgtataactgtgcaccgtcatagcggtcaacgccactctgattacctacgctaccgtaagaagctctcagctttagttcgtctacaaatgtcaggttcttcatgaatgcttcttctgaaattctccatccggcagaagtaccccaatagaatacccaacggttttcgggctggaatttggaagaaccgtcgtaacgtccctgtgcttccaacatgtatttagaacgataattgtagttgatacgaccaaagtaagacattactgcctcttgccatttggttgatttgtcgtcaccgttcttcaggtaaacaacatcttttgtgctattaggaatttccaatgagggcagtataccttctgtatagaggaaagtgccttcatactcttttaggttatattgcgaccccaccatcacttttacatcgtgaacatcggcaaagatatgcgaccagtcgatgtgtccggacaatgagtaaaagtcggtacgtgaattggatttggaatacgagctcttgtcttcggtcggattgctacgaaccacgcggtcacctgcatagttataccaatcaatagctttactttgtttatcacggatggctgtcgatgtattataaccggccgttactgaagcagtcagatctttcaggatggagtatctgaatgtctcgctgatgttgatagcagatactttcagtttgttgtcaccacccaattcacaataccagttgggtgcgccccatgttccccatgcataaggcttgccattagcagtagcagatgggaaacccggttgctgtgagttggtggtcagtgccgaaccaatctgtgtaggtgccacttgatcctgacggttgtaggctatcactgactcaatagaagcgcggttggacagtttaaaggtatttgtcaagcgcaggttataacgattattattgttgttaccccacttcaagttactgtcatcatacatatagcctaaagacaaacggtattttgaggcatccgaaccaccagctatagcaagttcgtgttgcgtggaagcagctgttccccacatgatatcctgccagttggtatcgaaaaatacaaagtctgctacgtctgtgaaggcattaccaaagggatttgttgtatggtcaagattgatatactgatttttatacgccaatgctagttttgcataacgcatccaggtatcatcgtcaccgtaaccgtcattggtacgtgcatctatcacggaggaagcccattgttccaggctcatcagatggggagacagaccgataaacttacttgttaccgaaccgctatagtctacctgcactttgcctgcctgggctttcttggtagttaccaatactacaccaccagcagctttgctaccgtagatggaagctgaagcatctttcaagaagttgatagactcaatatcagagggattcaacaaacgcaattcgtttacgctttcatattccacgccgtcaataatgactaatggactggtagtgttttttgaaactgcaccgcgcagactcatattccagctttcatcgcccggggctgtagaattacgcgtgataatgacaccgggaacctgtccttgcaatgcctgtacaggactggacattgttcctttattctctaacatcttctgattcaccactgttaccgaaccggtcattgtagcttttttttgtgtgccgtaacccacaactaccacttcgtccagcatttccgaatcttctgccagaaccactttcagattggtttcatttccttttaccacaatctcctgtgacttatagcctataaatgaaaccactaaagtaccttttgcattactcagactgaaattaccgtcaatgtcggtaatgcaaccgttcgtggtgcctttcaccataatgttggcaccaatgatgggttcaccggtagcatccactacggtaccttttactgtaccggcctgcataatggcttgtacctcatttacattggcaaaagcctgctgcgggctacctacacagagcgcagatgccattgctgctgagaataaaattcttttcgatgagaatttcagaaattcattcttcataatttataaatttaaaattaacactattatttctattgtactctaattagatacattgtttcatatattcacgtatttctttccggctgataaacaaatggttttcgaccgtacggcgtgaaaggttcaatttggcggaaatttccgatgaggatttatcttcaaaacggctcatgatataaatctttctgcgttgttccggaagagtgcgcaatttgcgcttctcacaagccagtaaatcattggcaacaatctggttttccgtttcattggtacaggtcgttgcatgatcatatatataagatgttatttcttgcttcttatagtgacggcgcaggtaatcgttcaccagattgcgggatatggtgtaaatgaaaaactttacggtatccggacggagcatttgcttatagtccattaaacgcagaaatacatcttgggctatgtcttcagcttcctctttattgtttatcctataacatatatagagatagacggagcggtggtaactcgtataagagtcagctatcaattgaacggatgtcatctttttgttttccatgcttcagactttggttacgttttacgttagctttacgattgcaaatataaaaggtaaaaaacggaaaacaattttttatagtgcttaacaaatctcatctcattaacttagactgaaaactaattaatttgctgtaatatagcggcttaagaatttgagactcgtagtatcaactaataatttgagactccggaggtaagttggacagaatattcttgctgtttattgcaataaaaatgcacttatctttcgatattctgaaagataagtgcagaaaatgatggagtatatcttaaatgctatagattattcgtcgttattctttccgatgctccggatatattcattgggagtgatgccggtagccttcttgaaatagcggaagaaggaggcgcgtgagctaaaaccacagagttcggcaagtgctcccagtgtatatttggaatattcatcttcgttgataagacgcttgaactcctcaatacggtaatcattgatgtaatcgtaataattacggttcagatgttgattgaacagataagataaagtatgtgctgacctgccgagcatggttgccagatcggcaattttcagatccgggttcgtatatggcttatcacgatgcatcagagcctccagcttttctgtcagacgctgacattcttccgtgcttatcttattggtcttatatttcaattctactgtcttttcttgcttttcgggttcttgcacatcttccggaagctggatttgaatatttttcgtttgctttgcttttcttttccgctgatagtaaatatagccgataaaagctaaagcaatggaaacggcgatgatgctccacgtttctacaggataggcaatgtggacggcggtacgtacttcagaatctggatttccgatatagcgtagcttgaaaagatagtttccggatgacaaatcataataagtaatttccgactttccggtcaatatctgccagtcctcatcttcaccttccaatttgtattcataagtcatataagccggttcggtataggtaaaaccggagaagtgaaatgtcaggttgttttgggaggattcaagttgtatttcagggactttcccactctcaacaacaggatgaagcgatttctttccgttgacgtaaatatctgtaatcgtcagcggataagtgtatcttttcatctgattattttgcttgaagttcatataaatcagccctttggaatttcccatccatatatttccctgttgatcctgtacgggagggcacagtgtgaaaatagaactgggaataccatcaatgaaattataaggaataaaagtttctttcttgtcgtagcggtagagtccgttattggttcctatccagagccatttttcgtcatcttccagaataaacataccatcttttccttccagttgtgtatcaggttgtagccttctgaaacggctcatggagagatcggatatacacatacttcctttgtccggcaggaaataaagattatggtcggagtcttcatatacaactctgatcttttctttatgaataaagttttccgggaagatgtcggttttcagactttcagaagaggggtcccagatgcacatgccattctctgtacaaatccatcctttatgtgtggagtcgaaatagatttcgtaaacattcccttcgggtaatttggagttggcactggtatattgcttgattcttttcccatccttataacaatagaggcccattgaggtacctatccacaattggtctttgttatccgcttttatactgaaaatctgtccccgcatgaaaggttgcggttcattaggttcgaagtcgtgaatagtaagatcagcaggattgaatatgtacatacccccgccataggttccgatataatatttatcctgaaatttatagatacagaagatcatactggaacgcaattcgggagatttaaagtttttgaagcgtcgttgctcttcgtttatgtagaataggccgtcgcgggagccgactaatttctcatgctcggtaattgcaatactgcgtacaggcatatctttggagtcaaaatacgggagataactgtaagtagagaaaagtccgctctggtacagactgtaatccaatcccagttgatagaaacctatccagataagcccgtcacgatccactaaaagggagtacacggagttggaacggatactttcgtcttttcccggttcgtggcgcaaagagcgtagaactttcatttgtttggtagaaatgaaatgtactccatttccatccgtacccacatacaacatatctttcccatcaccggacagcgaagatatcacattgcatcctacatcgatgaagggcctgaacttatgtgtttgtgtatcgaagctgataataccttggcccatagtacccagataaagtacgttgccgatgcgggtgatattgttgtaagagcaaaaatgtttgtcttctactatattatgataagggacgattttcttgtcggcaagtgtcagggaataaagtccgtcgttggtggctatccagagaatgccatcctcactaagacttagtccggtgatgatattagaggctgaaaggacattgggatctatgagcttttgttccaggttcccgtttttatagataaacagaccggcctcacttcctatatataaagtacctttcccatcaggtaggagcgtccggacgccatagtgtaaagtttcagcagcaatcggttcgagaatatctttttcggtatttacccgccaaagtcccatgccgtttcccatccatatctggttgccttccatttcggcgatagcattgacccgcttgattttttcattcgctccggaaatcaggaaatgtttcagacgtgtgccgtcaaaacgttccaaagaattaccggtacctatccaaacatagccaatggagtctttataaagtgcatttactactaagtcggaaagtccttcggtgacggacagtccccggaagacagaggggagtgaatagcccggaaggaagccaaacagcaggaatagcaggatgatatatttcgatatgtttttcacgatatggtatctttcgtttctatacattatgtttctgtacagcaaatataaggaaaaagaacgaaaatattcgggtttaggatgattattcggcagtcgaagagtctttgctgacttattggcttgcggacagggtacggatcagatacggagatgatatggatttgatgctattgttttcacttcaattccatttccgctgtattggcttttagtttatacgtcttctttttgatactgatggagcaatcggcggatgcagtgtagtaccatgcccctttcttgaattccagtaatatctctgcgggagtttccgccttgataactacattcggggtacttagcaaagtgccatgtcctaaaaagaaggcacagtcattgccctttttatttccccataaagcataggtggcttgtgcactcatttttccactggtgcagatatccgtgggggtatctgatgacaggatataatctatacgtccatctttttgtacaacacatatgctggtggcactgttttccgttttactttttacttcggggaagcttacttcggcaatgcagccgggttcttttacggatgagggctcatagatagcgacgaatggtcggttccaggcttctcctttctggcgggctacaaatgtcagggtaggctgttcttttatattatatggcatccccggggtacggctcaaaccttccgtcatgggagacaaggcggtgaaaacttcccggtccgtttctcctttcatccacaagttcattgaaatgtcatccttgtcgggcatggtaatggtaaatgtagcttttatatctttgtcggtagtagctgactttttatcatagatataagaataagcataaaggtgagcaccggcaaaggccagttcttcggtgggttgcaaattcaagtctgtaccgtctgtgcctgtcaatgttagggtttgccccagattatggtagaaatagtcatgcattttatcaccaccacgttctttccggctgcggaaaatatctacataataaccggtttccggaccggtagtgacgatactcatcatgcgggtctggtcggcacgactttccggttcacggaaagaaacatcgctataggttacggaagtgaaagcttttcccggttcggaagaaacagggaaactggatttaagatcaaaggagtgattacttttcataaccgggtaactggaaatgccatccacgcaaaccgtgttatgactgggaaattgagaataatattccagatagtccagtccgctgtataagtaaaggccgattccggcatcgggagccagaacatatcccttaccataaagctccatggatatgccattggcatgcatgtggtttccttcgctggcattcagggatatcataaggctgttacggggattcattccgtttcgttgtaccagccaggaaacgttcggtgcatagaagaagggagagacatattgttctatttttccggcttcgatattgggattcagttccaatggcttttcatcaaagaaagaactgatagaaacagggacactttttttgttgtctttagtttttcccgcatcaggatggaagcatttcagcatggcagtgaaatattcttcttgctctttcttgccgttgtgctgtgcgtttcgtatcatgcgggatataggattggtgtttagatatcccgggtgggtatcgccgaaaccacagatcatccggttggggaacaaatattgcggagtagcgactaccgctttagagagaaccggcattgctttcaccagatcataattcagattccggtcgaagagagtagcaaaactggtgtagtcattcagtactacattgctgtacccgggacattcggcccagatacctgttttcggatcgaagccataatcggctaatttagtcagactccattggcgaatactggaacggttgagtacataatcaatgtaatattcgcgccctttaccatcggcatattgcttgttgttttccagtatcataccgatattcatgacatagcgagcctgcatcaggttccagttattgtgaggaacaccgtttgcaatgatattgtccgcccatttcttgaaagctcctgcgtatatatccatcttgtcggtatgccgggtattcaggtagtcatacaggaaatcgtaaaggggaacgatatcataaagaatatcttcgtggataacctcgaaagaactcattcctaccagcgtttgctgatggccgtggttgaggtcgataggaacattccggtaatagataccggtcatataggtatcgaatactccggcggcaagttttgcatatctttcttctccggtaagccagtaaaggaaggcggcatcacgggcgatacccatgatttcacggtttaggctttcgatgttgcggccggttttagatggatgtacactctccatagggcgaccgggcagggcattgttacaaaatgtcacatttccttcagcatcgtcatcgtatggcactacatcttccagacggggacgtccgtgggtggcgaatgtgccacgcgtaccggtatagcgaacggtgggtgccggtgctttttcgcctccggcatggtcgaaggtttcaccttttatatatacatccgtagcatgagacttccaatacatggcaaggcgcgaaagtaaccagtccggttgggcgtctgtcaggttagcataaagatcggttcgctttttcaatttctcaaatacgtcttttgcccaatcttctttttctatcagattcagggtttcactcttactgttactgtctgtcaggtaacgtggatggctattcggcaattgctgttggaaggcgattttcacctcctgagcttgtaatatccctgaaaagagaagacatatcaataaactaagtactttcatattctatcaataacattaggtgtttaaagaatatacggatgagggtggataattactcaacgaaattcttcaaagatagcgcaagactgtataaaagatgtaatcattattacacttttttaaaaataaagcccctacttttgtgaaaaatactatttcctatgaagaaattgtcatttataaacaggtttttaccttcgtaccaatggaaagtggctgcgataataatttgcggtgttgtggtaggcgggggaggcttgttcatgtatttgctgcgggcgcatacctacttgggggatgagccgtcagcgtgcgtgaactgtcatattatggcaccttactatgctacatggttccacagttcacatagtcgggatgccacttgtaatgattgtcatgttcctcatgagaatgtcgttaagaaatggacattcaaagggatggacggtatgaagcatgtagctgcttttttgacaaagagcgagccgcaggttatcagggcgcatgaagccagttcagaggtgattatgaacaactgtattcgttgccatacgcagttgaatacggagtttgtgaaaaccggaaaaatagattatatgatgtctcaggtaggcgagggtaaggcttgctgggattgtcaccgggatgtgccgcatggtggaagcaattcgttgtcatctactcccaatgcactggtaccttatcccgaatcgcccgttccggactggttgcaaaagatgcttaagaaataatgaaataaaatcaatatacttatggaaaagaaattgaagtcatggcaaggctggctgctgttcggtggttcgatggtagtcgtgtttgtattaggattatgtgtttccgcactgatggagaggcgggcggaattagaaagcgtgttcaataaccgcaggactgttattacaggcattgaagcccgtaatgaagtgttcaaaagtgatttcccccgtgaatatcagacttggacggaaacagcgaagacagatttccagagtgaattcaacggaaacattgcagtcgatgtattggagcaacgtcctgaaatggtagttctgtgggcaggatatgctttctcaaaggactattcgactccgcgtggccatatgcatgcgatagaggatattacggcaagtcttcgtacgggtgcacctgctactcccgaagatggcccgcaaccgtctacctgttggacatgtaagagtccggatgttccccgtatgatggaggctatcggtgtggatgcattctataataataagtggggagcaatgggtgatgagattgtaaatcctatcggatgtgccgattgccacgaaccggaaaatatgaacctgcacatcagccgtccggcattgatcgaggcttttgcacgccagggtaaggatattacgaaagctactccgcaggaaatgcgctcgctggtttgtgcgcagtgccacgtggaatattacttcaaaggtgatggtaagtacctgactttcccttgggataaaggatttactgtggaagagatggaggcttattatgataatgaaggtttctatgactatattcataaactgagccgtgctccgatattgaaagcgcagcatcctgattatgaaatctgtcagatgggtattcacggtcagagaggtgtgtcatgtgcagattgccacatgccttataagagcgaaggtggtgtgaaattcagcgatcaccatattcaaagcccgctggcgatgatagaccgcacttgtcagacttgccaccgcgaaagtgaagaaacactgcgtaacaatgtgtacgaacgtcaacgtaaggctaacgaaatacgtaaccgtttggaacaggaactcgctaaggctcatatcgaggcaaagtttgcatgggacaagggggctacggaagatcagatgaaagatgtacttgcccttatccgtcaggcgcagtggcgttgggatttcggtgtggcttctcacggtggttctttccatgctccgcaggaaatccaacgtatcctttcacatggactggataaggctatgcaggctcgtctggctgtatcaagagtattggctaagcatggttttacggatgatgtgccgatgccggatatttcaaccaaagagaaagcgcaacaatacattggtctcgacatggatgcggaaagagctgctaaagagaaattcttgaaaacaactgtacctgcgtggctggaaaaagcgaaagctaacggtcgcctggcccagaaataaaacagagatatgtggatcagaccgtggggatttaaagaaggatgcctgataggcgcaggattgttggtgacaggatggctgctacagattacaattggtgaaatagattggagtctgtttgcctatccggtgaacatcattgttctggttttatatatagccggaatagttgccatgcattgcctgcgcaaacgtgtctatttcttcggttggatgagtcattatacatcagctgtctcttctcttttatgggtggcgggcattacggtggtgatgggacttatccgtcagctcccttccggtcatccggcagatatgcttggcttttcgcgaatgctttcggcatggccttttgtattgctttatatctggatggtgactgtactggggttgaccacgcttcgtgccggatttccattcagatggaagaagcttgctttccttttgaatcatgccgggctgttcattgccttgattacggcaaccttgggaaatgccgatatgcagcggctgaaaatgactacccggatagataatgccgaatggcgtgcaatggatgagcacggtaaattgatagaacttccgctggccgttgaactgaaagacttcacgattgacgagtatcctccgaaactgatgctgattgataatgaaacaggacgtacattgcctgagaaagcaccggaacatttgttgctggaagaaggtgtaacggatgggcaactgtccgattggctggtgactatccggcaaacgattccctgggcggcttctgtggctacgggagatacggtgaagtttaccgaattccattcgatgggagccacatatgccgtttatttgcaggctatcaatcaaaagacgaaagctgcaaaggagggctgggtaagttgcggtagttttattttcccatataaagcattgcgtctggattcgttgacaagccttatcatgccggaacgcgagccgcagcgttttgcttctacagtgaaagtttacacggaagacggcaaacaggtggaagatacgattgcagtgaaccatcctctgaatgtggccggatggaatatttatcaattgagttatgatgatacgaaagggcgttggagcgatatcagtgtgtttgaactggtacgtgatccgtggttgcctgctgtctatgcgggtattatcatgatggtgcttggagctatctgtctgtttgttaacgcacaaaaaagaaaagaggaggacgctgaatgacgtgggattattttgtaccgttttcaattgccgccctgcacttctggggattcggtgcctttgccgcctggcgcggaagaaaaccgtatgttgttggcgggcttaccttgataggacttgctatcttcttttgctttattgtgggaatgtggatttctctggagcgtccgcctatgcgaaccatgggagagactcgcctgtggtactctttctttcttccactggcaggactcatcacatacagccgttggaggtataagtggatactcagtttcagttttattctgtcactggtatttatctgcatcaatatcttcaaaccggaaatacataacaaaactttgatgccggctttgcaaagcccgtggtttacgccgcatgtcatcgtatatatgtttgcctatgctatgctgggtgcggctaccgtgatggctatttatctgctttggttcaagaagaagccgattgacagccgggagatggacctatgcgataatctgacttatgtaggattggcattcatgacattaggcatgctgtcgggggctgtatgggcaaaagaggcgtggggacattactggtcgtgggacccgaaagagacatgggcggccgctacgtggttctcctatctgatttatatacatttccgccttggaaaacctttgttacaccgtaaggccttaattttacttctgatatcatttgttttgctgcaaatgtgctggtacggcataaactatctgccctctgcacagggagtcagcattcatacgtataatttaaactgataatcattatgaaaactacttattgggcaatgcttctcatgcttttgccaagcatggcgtatacgcaaacaacagaaaaagagaatgaatttacaatgtccatccagatcagacctcgtgcagaatatcgtaatggtgctctgatgccccgtaacgaaggagaggaacctgcaggattcatcaataaccgtgcacgactttctatggagtacaagcgttctgatttgcaaatgaaaatctcggctcagcatgtgggggtatggggacaagatccgcagattgacaagaatggacgtttcatcatgaatgaggcatgggctaaactgaatttcggtaaaaacttctttgcacaattaggtcgtcagaccctttcgtacgatgacgaacgcattttgggcggactggattggaacatagccggacgctatcatgatgcattgaaactgggctatgccgaccccaacaaccaattgcatcttatcctcgctttcaaccagaatgacgagactaagataggtggtacctattacgtgcaggccggagcacagccttacaagaatatacagacactctggtatcactataaatccgattatactccttttgatgcatccttactgttcatgaatctgggactggagaccggagatgcagcaacaaaagaatcccatacccgctatctgcaaacgatgggtacttatattacttataaggataatggctggaatgtggacggtgctttctactaccagatggggaagaacctgaatgcagaaaaggtatctgcctttatggcaagcctgcaggccgcttatgccattgacaagacctggaccgtagtggcaagtgccgattatctaagcggagacagcggtgacagtgacaagtacaaggcattcaatgttctgtatggcacacatcacaagttctacggagctatggattatttctacgcatccgattttaaaaacggatatgctcccgggttatttgacaaacgtctgggtgtacgtttccgtgcttccgataaggtggatatggacttgaactaccaccatttctcaacagcggcgaaattgccgaatctgaagaaagcattaggttcggaagtcgattaccagattaactggtcggtgatgaaagatgtgaaactctctgccggatattccttcatgcgcggaacggaaaccatggatgtcgtgaaaggcggtaatcacaaaagctggcaagactggggatgggtttcagtaaatatcaatccgagagtattgtttgtgaagtggtaaagatagataaaagagaatacgtatggggagcttcctcatacgtatttttctaatgatggttcgtccagaacacggactgtctttccgtccatctctataattccttcctttatcattttattaatttcctttgatagtgcagggcgggttacattcagatattcggcaagggttgcctgattgtgaatgatgttgactgttgaagagttctttttcttgtgttccagcaagtagacaacgaaacgttcacgcactgtttttcgtgatagggttttcaggcgggatactgtgcagacattacaattgcccgtgatacaaagaaagttgtgtaatattttaggttcctcgctgataagcttaaacatggactctttactggcagtgagtagggtactgtcttccatggcagtaaaggttgccggcagcactccgtctgaactgaataaatgaggagtagcgaatgcacgtgctgcaacgatatattctatcatgacttcatttcccaatccgtcaataatatctacccgtagttttccttctaacaatacatataacttcttgcagagtgttccctgggtggcaatgatatcttttttgtctaccgagtacagggagatatccaacctgtcgagcaatgaatgcttgatgttaaggggaaggtcacgaaacagcggaatctggaaaagtaattcctgatgtttgtcggttaatgttattttcctcattatattaggtagttggttgtacaaagatacgatgaaaaagtagaattaaaagtatttcttcgaattctcctcgtcaataaacatttcttttccttctatttgtatgcagccctcattgctcaattcagatatggcacgtgccaatgacggacgggctaccccaagtatatgtgccacctcctgttgggaaccgatacctccatgcatctttacataattgagtaatctggatttcaggctttgtaaggcaaactcgttcagtttcttggatagaaataagctccggtcggaaatcaacttcaggaaattctgcataatgatcgggtactggtgcatgaactccagaaaagcatccttattcagaatcaatacttccgaggtttccagggtttcgatattcaccgggaaacggttttcggaggcgaagatgaaagccggtgcaaggagcttcggagcacggagagtctctatggtgagttgttttccttctgcactgaccatttgcgtacgcactgttccattgcacagaatatagagagaacggtaaatatctccctgcatggcgataaactctcccgatttataagatttaagggtatgttggtgcaacagaacgaactttaacagcgtttcttctgttatgcctcgaaataatggcatctgtaataatatatgtggttccattcttttttaagttttttgtgattgggtgtaacatacgtgacaatttacctgctataaactctccatctttgcacaaagataatgcaaatgtattttatagatgcccgattacaattaatttatagtatggtaaatgataatttagcggcgagggaatgggtacgcggactacgcggataaggcggacgaacgcggact

SEQ ID NO: 6474 - DNA, 22101 bp, Unknown
  gut microbiota DNA sequence
tatcaagctcatatagataaagtcgagaattttgctaaaaaaatccctttgtatgtattcaatcatgattgtgttctgaataataatttggctgattttttgatatcttcttatcagaaacctgccttccaggagaaatatgagctgtttgtgaaacggattgagcgggcagatgttcctttagacttcatgattcagtattatcagaacagtaaatatgccataagcctgttcaagcgttttatagaatggagcataaaagatagttggacggctatcattgaatacaatgatactgtaggacgtacagtgcttatagaaggttggttgagattttgtgacgcagctaaattacttgatgatcaaaaaatatggctacatgacaattatgctttcttaacggatcatatagaggcaatcggactggagcaggcaaaacgactgtcaaaggaacaaagatatgttatcctaaatacggattcctgtgagctattggattttataatagccaacaatttttatttaccgaatgcggaaaatctgtgtctgataacaaactatttaaataaaagagatgatgtcaatgttagtaaccttaatctgtcacgcataaatggaacggaaaacaaggctttcattttatatatagagaaaaatattgattactgtctggagcagttctctgatactgttaatgatgaagaggaaaactctctcttgttcattttgaataatataaatatagctgaagaggataaaataagttatctgaaaaatcaacgtaatcgaatagaaaagatagaggatgtaacggaagatcttaaagatatggctgttaagcttttcctggtaaagcctacatgggagaatgttgcatcatatttctgttcttctggaaaatctgtttcagaaaatcttatatcatacattgagcattatggagaagatttaggatgtttagcatgtgctgattcgatagaggtgaagagactgttatttgatttactcttggtttcaaataaattgaatataaatacattcaagaagttatttaattcgtttgataatacgattgacaatgatgattctctctccagtcttgagcctgaacgagttgattttctaattgatagaaataggattgaatatacgaatgaaaatacgcttgctttgttttcacataagactccaataatgacaaaatacctgattagccataagactgattttttactggaagtggagactttcaactattcagcagatctagcaatatgtcttttgaaatcgagtgctttttcaattcatgagaagtctcaaattgtatctgtattgaatcttgatactataaaggataatagagagctggcgacagagatttgttctctccttacaaaagtacggatagatttgagtgagaatatcctttatacagtcttacggatatccagtaacatcaacgaccggattactgtcgctacttacaccattgagaacgaaggtgataatatagaccttattgagaatttattatgtcaattaccatctccttatgcggatattgcgaaacatgatcaaaaacatcctattcttgaaaatacagattttaactcaagactactcggggttcttaaaagtgttggctatatttcaactgtaagtgatactgataaagggttaaaagtaaataagaaaatgtcatggtaattatattttctgattaaaggaagagaagaatttttaggtttcatctttttgtttttgtcacagactgctgggaaaggtaatatttgcctgctgatttgaatgtgatggttttgcatatattgctctttaaagcgatgatatggaggactcgattgattaattgtatcgttggtattttgttgaatagtagctgatcgttactgatctttgatatcttattagatatctgtttctctttcagaaacagccataaagaaccgtcggacattgttcgtaattggcgacacgtcagttgcttgattgaagcataattcaaaccagtgaagcaactaaatatgaaaatatcccttatggctgcatagtggcaaggaagatggacttcctgaaggtagaacacatcttccggtgtgagttcttccgaaatattatgtagagtcagttgctgatttaaaggatcagatagtttgatattgccttttcggtattctttcaataagatggtgcggatcaactgtacttgttcccggcttcggtgcttctctgtcgaatgattagcaaagaatgcttctaactggtctaaaaatgtatcaggtagtgccaatatggatatctccgggattccataggttagttggcaaaatataggtatggactttatggtttttaattggaactgatattgttcaaaagatattgttttaccaatactgagaaaatgagaagtacaggatcgatatatggtgtcatataataacgaaggagtggaggtcgtaaactgctttttcagttctttagccgtaataggcttgtgctgcaatagtgactctttgtaaatacgaaacagggttgatgatagggacatcagttcttcctggaaaccggacggaattatatgcttcaaggtcatacgaaaacgtgtgccgtttacgctaaccgtcatgcgagcgtaatttgtagccggaacaggcttgaacgatactcttaaatcaccattcatatttgatagactttgttgaatgcaaagttaaggttgttcttccggaactgcataatttcgttacagacaaaacgggacagaatttagacaaattcagccaaatggtaaccgatgtaaaatggagggtagacaagttatacattagttaaagagaagcataaatggatcaaaacagcatgattttacctttgatttgtataacgtggtggcgacggattggaaaatagaagcaaagatatgcaaacagtgacacagcagtctatacattaatataatactttgccattccatttatatttgtcgtatgaaaattaataggatgaacatatggaagtagttacaatagaaaaagcaacatttgaagaaattcaaaatgaagtcattgaggcgatctcaatggctgaaagtttattaagtaagtttaagcccaatcatcccaaatggttggataatgagaatgtgtgcatgatgttgaatatcagtaagcgtacgttacaaaattataaggatcagggtattttgccttatagttatgtttctcggaagagttatttcaaattgagtgatgtagagaacttattgaaaaataaaacaaaagacaacaatggaattgataacaaaagatcatgaggtaacccagaaattgttcttgataatccatcggttgaaggctgagatcgagagtatatcaattacatgtagaccctctatgaatggagaggtttatttggatcatgaacaggtgtgtaaaatactgcatgtctcaaaaaggactttgcaatcttacaggaatgatgtttttttaccatatattcaattaccaggaaaggtaatttataaagaatcggatatacagaacttattggaagaaaactatataaggagtagactggacgtattagattaggaataagaagagtcctatcgagattaaaaaagtctgttagacaaatggttgtctaacagacttttttattatattttatcaactagcgctttctcaaaattgtgtaatgtttcagatagtttctgcatgtcatcacttattttttgattggtgatccttgcatatatttgtgttgtggttatattggaatgacctaacatgtgactaacggtttcgataggaactccttttgacaacatcatcgttgcgaaagtatggcggctcatgtgaaatgtcaagtgcttatctatacgggcaaatccagcaacaatttttataaggttattacacggatcgtactcagggacagggaaagcgcgatttcctatttgataatcacgatatttttctaagatcttctttggaatctctaataatggtatactagattttatatcggtctttcttcgcctatatatcaaccaattattcccatcaaagaagtcttgaatattttgcctggtgagctttttcaaatcagtatgagaaataccggtgaagcaacagaagacaaacatatccctgacaatttctaataatttagtcggtaaatcagcggaaatcatagcttcaacttcatccattgtaagatatcctatatcaacactttctttttctgctacaaaatgcttgaatggatcaatggctatgatgttatcatcctttgccattgctgtgagtcttttcaatggaaccatatagaggcgtacggtattggccttgaaattcttttcacagcgtagatagaagtcaaaatttttaataaaactttctttgagctcaattaatgggatatcagataaattatatttcaacttcaggaaattggatacatgattatatacatcacagtacatgcgatgggtattttcggctctggtccttcctaccttcaacttaaattcatcattgtgttgtttgaaaaatgttaagagagtcattttcttagcatctgtccccattactgcattatccactttctcagcagtaacatatccctcataatggaacaacgtatcatatttggctccaatgttacgttcccagagatctagcgcattgttgatttttgtagcgtaggcgtcccttcctgttactctcattcttgctttatcccaccggtcgggatttacactaacttttgcacttcttgttttctcaactccatcaatagtggtacggatcatgatgggtactgtcccatcttttttaggtgcatttttctttaaatagaatagcactttgaatgtcgatttcttttcttccataagaacattttttttggtgataaaaatagtactttcttttctgtggttctctatgaaaaacgaagcagtgctatgaaatatcatctttgtaatatgctgaaatacaacttattgcctattagttaccggtaactaattttttgaaaataggtaacgatttggtaactaaaacttgtccgaaacaggcttgttgggggcttttaaagcctatcttcacaaaatccccaaatgagatataaagttattaatcagcttgttagtgataatattaccttatttttctttgttttgtttggtaattggcgataagactaaataacacttcagataacactagataagactacgtaagttccggataacacaaagtccggaagatttcaccgtactttgcagtgcaagagcttaagggatgattcggttttgcacaaggcatcttttgcaaaaggtatagggagaatcttgtgcagtcccttgcataattgggtgtcaaccttggtcaaccggcctgtcaactaaggttaatggatctgtcaaccaagcttaatcgacctgtcaaccaaggttgacacccaatcatctctaagtctgaacacatttatgtcgtatctaaaacaaatgaacatgaagtcttattactatctttccctgatgctatgtgcattgagtgcaggagtttccgctcaggaaataacgaagagtacagatgtagagagcgaacggacgctcagcgcggacagtattataacacaagacaagcagctggacagtctttaccaatctcttcctgaagtaatgattaccggacaacgtcccatcgtgaaagcggagcaaggcaaactggtgtacgatcttccgcgtcttatcggtaatctacccgtagataatgcttatgacgctgtgaaggaattgccgggcgtaaccgagatgaatggcgggttgatgttggcagggcagggggtaactgtaatattggatggcaaagttaccaccatgagtaccgaacagctttattctttattgaaaagcatcccgtccagtcgcattgagaaggcggaagtgatgtacaatgctccggcacgctatcaggtgcggggtgcactcatcaatatcacactgaaacaaagcaccggaggcccgtcttcctggcagggagagctttatggcaaatataatcagaaacattacgagggcttcaacgaacgtgccagcctgatctataacggaaataaattctcagcagattttctttactcacacaaccacggacggggatattctttaaccgataaagaagctatgcactctctggcggacggttcggttcatcacatcacaaccgatgagatgggccgaagccgttcacatactcatagtttccgggtaggaacggattataatattgccaaggaccatcagttgagctttgtttataatggaagttattcgactcatcatagtctgatggatatttacggtacgcagcagtccaatactcgtagcaacagtaccgattggctgcacaacgggcgtctggattaccgtacacctttcggattgaaagccggtgctgaattgacttattaccgttctccgtccgatcagttattgcatagcagcatgcaagatgaagagcttgccttttataccgaagactgtcagcgcatcaatcgctggaaattcttccttgcccaagagcataatctgggtcgtggatggggattgaattatggtgccgtttatacgaccagtatcgaccatagttatcaatattattatgatacggagaaggatgcgggaacaaagacaggtgtgagtacaggtattcccgataatatgcaatcccgccgtcgcgaacaaactctgaacttctatgcgggtttcaataaaagtttcggtgataaactttccttggacgcttcgcttgccgtagaacattataagacaccggtatggaatcagtgggattggtatcctaccattaacctgagttatatgcctgcccccggctatgtctggcaattggctttgagcagcgataaggactatcctgattattgggcggtgcaggacgctatctcttatctgggcggtggatattctgaaatacatgggaacccgttcctgaaaccggctcaggaatatcaacttcagttgacacatattttgaagagtaaatacatctttagcgcatggtttgcccatacgaaagattattctacccagactctttatcaatcttctgaacgtctggtggaaatctataagcatttgaactttaattaccagcaacaagcaggagtacaagcttctataccatttgatataaagcaatggttaaactctcgtttaactttgattggtgtgtggcatcatgagaaggatgatgatttttgggatattccttttaaccgaaatatttgttatggtattgccgtactgacaaatactttcactctctctaagaagcctgatctgaaactgacactgacgggaatggctcgtagtaaagcgactcagggaatttatgatttaccgtcttcagggtatgtaaatgctgctttgcggtatgcctttgccaaaggaaaggctattctgaatctttattgcaatgatatttttgagacgggacagataaaaccacgtatccgctttggtacgcagaacgtgacgaatgattatgcttgtttcagggaaatcggggtgtcgtttacgtataaattcggaggatacagggagaagaagagagaggaggtggatacgtcgaggtttaaatagtgacgagctacaagctaccagtgacaagtacctttcagtgtgatagctgggcgaataattattagcctacgagtacagcgcagcaattcgttactggtagctcgtagcaaattttaacgtatgtattgtccttccttgtgattgtttgttatatacttaaccagaatacgttcgtcttgtttaatgaaaaagatataccatgttgtacggggtgacttgcttcttttgaaaaaagtgtattgcatattttctccgtaacgggaaaaatggctttcggctgaagggctgaggtggtaatgaactgctgttggaagttcctctaaaaaaaactgaaacagaagggtgtataaggattttagttgcgagcatacatttcttttaatttgcgtttacactgcatgcggaaatcctcaacggttagtccctgttcccattcctgctcaaatttatctttttgtgcaataatatctccgtagatacctaacggttcggaagcgttcgtttgttgcaccggaatatcagaatattttttggtctctttctttcccatatctatcgtttttaataatcgtttcaatgatagtacaaatatagaatgtttgctttatctttcaatgatttgctgccatttaaatgaagaacttatttttttatgattactaaaaacattccgcatactataaaaatcagaatcttttgtcccttcctcctctatatttcttaattttgtcggaacaaaatgaagtatcaaccttccgcacactcaatctcaaaatgacactgcggaacctaaattatcgtattatgattaacagattcgtcttgaacgaagtatcctacttcggaccgggtgcccgcgaagtgctcccacaggaaattaaacgtctcggcttgaaaaaagcctttgtatctaccgacaaagatctgattaaatttggtgtagccgacaaggtgctttccgtactggataaggtgggcataccctatgttgtattcagcgatattaaaccaaatcctaccgttagtaatgtaaatgcaggtgtgaaagcgtttgcagaatccggtgccgattttattctggctattggtggtggttcttccatcgatacatcaaaagctatcggcattatcactaataacccggaattcagtgatgtggtttctctggaaggagtggcgccgactcagaagaaatccgtgcctatcattgctctgcctactacagcgggaacggctgccgaagtgactatcaactacgtgattaccgacgaagtgaatgaaaagaagatggtatgtgtagatccgaatgatattcctgccatcgccattgtagatgccgaattgatgtacactttgcctaaagggctgactgcttctacgggactggatgcattgacacatgctattgaaggtctgattactaagggagcttgggaaatgagcgatatgtttgaaattaaagctatcgaaatgattacccgttatctggaaacggctgtgtttgagccgacaaatgcagaagcgcgtaatggtatggcggtagcacaatatattgcaggtatggctttctctaatgtaggtttgggcgttgttcatggcatggcacatccgttgggtgctattttcgatatacctcatggtgtggctaatgcgttgttgctgcctatcattatggaattcaatgctcctgctgcgcttgataagtatgtggaaattgctaaggcgatgacagtatataaagaaggaatgagccaggaagaggctgcacgtgctgccgtggatgcggtgagagcactgtcagtaagagtaggtattccgcaacacctttctgaattgggtatcaaggaaagcgatctcgataagctggctacggctgctattgccgatgtttgtacaccgggtaatcctcgcgaggtgacgaaggagattattctggatttatacaaaaaagcgttgtagagtgattaggaattaattatttatgcgaatcagtagttgaattaacgtctttaggacgggttatgaattaaatgctaattccaatattaagtaaattgagatagtatttcatcattttatttattacttttccttataaagggtaactcctgattcgcatcatttattaaactattgggaacagaagcgtgaatgtgcttccttctcccacttttgattgcaccgtaatgctgccatgatgctggtgcatgatttggcgggagatggttaacccgatacctgaaccggtaggttttgtggtgaagaatggaatgaaaatacgttcctgaacttccggatcaataccggttccattatcaataacacgcaggaaaaggtgatctcctggggtgatgcccgcggaaagagtgatttgtgtcgcttcgttttcgcgggcattccgtatcaggttgataagtacttgttctacttgctctttatctgcaatcaagcgcaacggaatgttgggaagagagaggtgtagatcatttgtatcattttgcattaactgaacaacttctttcagtaattctccggcattataaagtttcaataaagggtggggcagatgcgatacttcccggtagctattcataaagcgtaccagcccgttccctctgcgaccaatggtttgcagcatctgcctgatttccgttttggtatcttcgtcactttccaggttgtcggcatatttggtaagaagctctgtcagcgaaataatgggagtgatggaattcataatttcatgtgtcagcacacggattagcttttgccaggcttccgtttcacggttatccaaggcggaatggatatttttcattcccgcaatcaaaagcttcctgccctggatgataaactccatactggaaagggcgaattgtacggtctcttcttcctgtttgatttgccatacagacaaatcgccagctttcagtgtacgtaactttgccgggagctccggatgaaaatctataagatcatttaccgtatgcggacgattgatatgtatcaggcgtttggtcgcatcattgatccactctatttgaccgtcgggcgtataaacaaggatggccatatctatatgattggcaagagcctggaaatactgcaattcgctttccttcttttgtagattgctccgataatattcaagagcatcctgcatctcggtcagcaattcttcgggaaggggtggtgtggcattcggattggaagtaggagaagacaggaactcagagtagcgcacagaccagataaactgagccatggcgcgggctgagcgtaagatatacctatatatggcataagcaacgaatgctgtgaggcagagcgctacgaacaggctataataaaacccatgcacagccagccaggccgtaatgaggcagcatatcagtaatgcgatagtgagccaaagtggcgttcttacccaagtttgtcttttcataatctgaacttttcaatccttctataaagtgaagttcttgtgattcccagcatttctgccgccaatgtaatattaccaccacacattctcattacctcattgattgcatccttttccattcgttccagattatacttatctttctcagaaacagtattggaagatcgggggctgcgtaacatgaaatcatccggagtcagcatggttccggtggagaggatgacggcacgttcgatggcatgttccagttcgcgcacattgcccggccagcggtaaagttgcagcatctttcgtgcttctctggaaattccccgaagttctttcttatacttcttccgatagcgttgcaggaagaaatcagccaagaggaataagtcatttccgcgttcccgcagaggcggaatacggatttcaatcgtattgatgcgatacaataaatcctgacggaattgtccgttgtcgatagcggtatataagtccgtattcgtggcgcaaatcaaccttacatctacaggatatgaagttgtagagccgagccgtgaactctttctctgttcaatgactgaaagcaacttcgcttggagtggaagactcaggttaccgatttcattcaagaacaacgttccgcctgaagccacttccacacgtcccggcttattcttgcgggcgtcggtaaatgcacccttttcatatccgaacaattcgctttcgaacaatgtgtccggaatacttcctaaatcgataggtacgtatatctcattcttgcggggggactgttcgtacacgtagcgggcaatcaagtcttttcccgttccgttttctcccaggagcaaaaggttcgcatctgtttcggagaactttctgatcgtttgaaaaatagtttgcatggcggcagattcaccgatgacgcgcgttggctcagggggaagagtcaaagcttctgtttgttttttcaaagtctccttctgttgtttcagggtttctacttccgtccggctgaaactgagttgcagtgcagaggagacggtggctatcagtttctcgttttgccagggcttgggaataaaatctgtggcaccttgttttatagcttgtacagccttctctgtatctgcataggctgtgataaagataacgactgcttttgcatccagcttcagtatctcttccaaccaatgaaatccttctttgccactgacagcatcctgacggaaattcatgtcgagcaagataacatcgaaacgggttcgtgaaatgataggtaacagttctcttgggtcatttagagtggttatgctttctgcaatagggcgcagcagcattttcagggtgaagaggatgtcttcattatcatctacgattaagattttacctcgtttcatcataattcgaaaggattggtttgacttgttggtgaagattggtacgcgtacccattgcaaagatatagaaagttttcgagatagtagtgtacgaaagcgtgcattcggtgtacgatatcgtgcaattttgcgtagaaagtatttagataaatctttgtatattaactatctaaccatttggtatggttgttgccatctatatttaaagtaaacgaatacgaaaaacatatgctacacaaaaaactgatttatattgtattaattgtttcttttatagcttgtagctctaagaatccgggtatgaataaggatgaaattgtccggactttggacgagcaagccatgcaacatgaaaccgccgtgaaggcggcttctgctgcaatgccggaagttacggaagattatacacctcctgccggaataaaatatcgggctaaaatagaaactgttggagtgaaaacccttaatgtacaggctgcgttgaagaatgtacgttctatgaaagttagtgagctcggtacacttcatatccaccgtacaggagcattggtaccaatgggcggtagtttgatatcagtggacgagggttacttattgaatagttatcaaggaatttacttgttggataaggactttaagcttatcaagcagttgttcaaaaatgatgttgaatttcaacgcaatgggaaaagattcttttttcaattgaacgccctgttgcagagtgtctattataatgcaactcacaagcaagttcagggggcgtatacagtatataagcatgagaggaatagttcccggacttttctggcctttcttccctgggatgttttaacagctgccacagagcctttgatagagaaggatataacaaacagtgtccctctacaggggaatctgggccatagggttttgtttaagtttacgacggagggtttcatgcgtggcataccttactccagtcgtttttacaccaatgaactaaaaggagataccttgtgctattttgatcctacccatttgcctgactatgccccttcgggaagatccggttcggtacggagcggagaaccatggaatatttatgattatcaaggcaaaacgcggatacgcctggcttatgataatacgctttaccaattggaaaacgcttccacgctgaaggctatttatcgattggattttggctctttgcagcgtgccgttggacagaaggttataggtggcagtaatgtggatgatttttattttgtagatcagtggttggagacggatcgctacctgtttatcaggcttacgaaaggatacgattcgcctaacgcacgaaaagcgaaatcggtttctctttattcgctgatatatgataaaacatccggaaacttcttttccctgcctcatgaagctgataaggtagaactcgattttccgtgtttcccagccgatggcgagcagaatgtgtcgttctatcctaaaggagcagtaggaaatatacttttcacctgtctcgatgcaatgaatatgaaagacaaatatccggatgctctgaaagggcaggacgtgccggatgatgaattaatagtgttaaccatagaataattaaaataggagaataacagatgataaagcattatgtgaaagttgcgcttcggcttataaagcggagtttcttgttttcttccatcaatatgctgggttttgtattcggcatggcggcggcgttcctcatctacctttgggtagtagacgaactgacgtatgatgactgctttcccgaggtgaatcgtgtttaccggactattgaggtgaaacgggagccgagtggggaaataaaggagtctccttcgacggtacgttcgcttactaaagtctttcgtgaagactttccacaagtagaggaagctacagctattaagtatggagagttgcatacatttgagacggaaagtcataaaaaaatcagcggacatgggctatatgctgattctgcattctttcgaatatttccttttccggtgttggaaggaaatccggagtatataagtaataatcctgataatgtcgttttgtcggaattgacggcacagaaaatgtttggtaagaaaccggcagtaggacagaaattaacttatagcggatatggaagagaaagaatctataatgtagttgcagtggtgaagataccttcaaagagccatatccagtttgatattgtttatccgatggaggcttatggcatggggatgatgggccataattgggatcattttcgtgagagtatccatgtatatgtaaagatgaaggctggtgacgaaggaaaaatgtatcagcaggaattgaaaagcatgagtcgggcgcttagtaagtttggggaaaagcgaactttgttgcgttttcaatctgtcaaagatattcatctgcatactacttttcccgatcctcacgtaaagaatcatggtaacatggccactatttatctgtttacagctctggctatattagttatctttatgggagccttcaactttacaacactttctacggcacgggcttccatgcgttataaagaaataggggtacgcaaaataacaggcgccaagcgaaagactctgatctcacagtttctttcggaaagtctggtacaggcatttatatctctgatattggctttagctttgacagaattgatgttgccgttattcaataagttcatggatacggaaatctcactgcggctgagttgggctgtcttcttttatatattgttcggcatagtgggaataggctgtctggcaggaagttatccggctttttatctttcttccatcaatccattacttgcttttaaaggtggacagaaaacaggaaagaaaggaggacttatcaaaggattggtgtgcatacagttttttatagctcttacgctgatgttgctgactgctatcgtctttaaacagctccactatatgcaaaacaaagatttggggcttgacaaggaaaatgtggtatccgtctataccagtttgtggtataatgtggctggattcaagcaagaattattgagaaatccaaatgtgaaaagtatatctatgggagcacctattgagagccttggagaaggtgaagcccatggagacggtagcctattccgttggacaaatatagacgggcaggaagattcactaaaaatggtaatagtatttgccgatggggattttagtaagacatttggtttggagttgataaaagggaaattgctggaatctgattttggaaaatactggggagacaggaatcccggtattgtaattaatgaggctgcctggaagggtatgaaggtagctgatcctatcggtatggagttacaaatgaatacctggggcaagatgcatattgtaggagtggtgaaagatttcaatttccagtctctgcgcgaaaagataaagcctgctattctttattattctccggaagcattatcgtatatgcatataaagatagctcccgaacatcggcaggagactctgaaattcattcagagaaaatacgaagagatggccgtacaggatgatttgttcgtaaaggatttcagttatcagttcttttccgatgcattgaataagaactataccaaggaacatcaacaaagccggatgttactattcttcactgtattggccatcgttatagctatgctgggtgtatttggactggttgccctctccacggaacagcggacaaaagaaatcggtgtgcgtaaagtgaacggcgcccattccaaccggattgtaaagatgttctgtatggaatatctgaaatgggtgggaattgcttttgttgtggcatctcccattggatattaccttatgtaccgttggctgagcgaatttgcttatcagactgccataagttggtggttgttcatattggcaggagcagtcattacaggggttactttgcttacggtcattgggcaaacctggcggaaggcttcgcaaaatccggtagtgtccttgagatatgaataaataaatgtttaagataataacaatacaatatacgattatgattaagataattaacctcaccaaaatattccgtacggaaagcgtacagaccactgcattgaatgaagtaagtttagaaatcagtcagggagagtttgttgccattatgggaccttccggttgcggtaaatctactttgctgaatatgataggtttgcttgataaccccacttccggcgagctttggtttatggatcaggaagtttcccgctattctgaaaacgaccgtacagacctgcgtaacggaaatcttggttttgtatttcagagtttcaacctgatagacgaacttacagtctttgaaaacgtggaacttcctttgctctatgccggagtttctacccgtgaacgtgtgaagcgtgtcaatgaggctttggagcgcatgcagatagctcaccgcaccgagcattacccgcaacaactttccggtggacagcagcaacgtgtggctatagcgcgtgccattgttaccaatccccgcattatccttgccgatgagcctacgggaaatctggattctacgaatggtaatgaagtgatgaatctcctgaaagagctgaatcatgatggagctactgttgttatggtaacgcactccgaagagaacgcccgtgaagcagaaagaatcatacggatgatggacggatatatattgactgaaagtaaaaatactcggtgatagatgcttaatattaaaggaaacaggtaattacgaaataatcgtaatattatttgctgatctcggagaaatcatatagttttgtgcgtagatatataattttataactaaacagcacgtatatgaaaaaagagattgtaacgctgttcttaatgacaagtgtttgggcggcacaagctcaagggacttttacaatagaagggcaagtaaagaatgtagaagacggagctttaatcactttgtttcgtttagatggaaatgtgggtagcagtatcggtgttgatacgattcgtaacggacattttcgttttcaggcagaaacattggggaacgaaacagaaatagtggatatgatgggaagaagtgacaagtttccttccatgagtttaaggctttgggtgcgtccgggagataatatacggataagcggtgaaaatacactgatacgaacttgggatgtgaaaagcactgttccggaacaagtggctaatcaggcttttataaacgactcacgcgaattgtggaatgaatatcagcgcaattctttgttgcagcgtgcatatcgccggaagtatgcaggaagtgcggtggacgaagaaagacaggcgatacgtgcacaagctgatagtttacggaagctggaagatgaaattacgatccgtattgatgccaacactataaaacgtatgaagcagattcctgttgacgatatttggctggagcaattggagaagttggcaatgtcagcaaagtatactgaaaattatccttataaagaagaagtgattgctctctatgaaggactgaccgatgaagaaaaacagaccgatttggcaatgaatacatatacatatctctttcctccccaagtagtggaagtaggtgatgaaatggcagatgctgatttgtacgacttggagggaaatgtacaccgcctggctgattttaaaggtaaatatatcatgttggatttctggagtcgtggttgcggtccgtgccttatggctctacccgaaatgaaggaagtggctgagatgtacaaagatcgcctgacaatagtaagtctgagcatcgataccaagaaaggttgggaaactgcctctaaaacgcatgaaatgacttggcagaatctgaatgaattgaaaggaagtaatggattatttgccaaatatggagtacgtggaattccaaattatgtccttatttcacctgaaggacgcattgtagaaaaatggttcggatatagtgcacacagcttgaaacgaaaacttcgccgcctactgaatgtagacgaatatgtgatgagcttaggggaagagaatggacataaagtggtgaatttcccgacggtgaagaaaagcaataacgatattcctgaaatccgccaggtagtattgacggatactgctacggtcttgcggattcgtgcctattatatacccaaatattggatacaaattatgaagaatatccagttagtagcggacaatggaactgtatgtccggttcttcgttcggaaggtattcctttaggggagaaattctatatgccggaaagtggagaggccgattatactctttatttcgctccactgcctgccggaacacgttctttcgatatggttgagccggaaggttcaaactcggatcgtgtagaaggtatcgctttgacacttgaataagataacagaggctttctttccctaaaatcttgctatctgcactctttttcgtacttttgtagctttcaaaaagaaagttttatttaaagaagttctctgtatgaaatcagacattgaaatagcccgcagcatagagctgaagaagattaagcaggtagccgagaatgtaggtattccacgtgaagaagtagaaaactacggacggtatattgctaagatccctacacatctgattgatgaagaaaaagtgaagaaaagtaacctgattttggtaactgccattactgctaccaaagcaggtattggtaagactacggtttccatcggtctgacattggggttgaataagatcggcaagaaagccatcgttgctttgcgtgaaccttcgttaggaccttgtttcggcatgaagggtggagcggcaggtggcggttatgcccaggtgcttcctatggaaaagataaatctgcactttacaggagattttcatgccatcacttcggcgcacaatatgatatccgcattgctcgataattatctttatcagcatcaggcggacggattcgggctgaaagaaatcatctggcagcgcgtgctcgatgtgaacgaccgctctttgcgtagcattgtcaccggtttaggccccagtacgaacggtattaccgaagaatccggcttcgatattacccctgcatccgaaattatggctattctctgtctggcaaaggacatagacgacctgaaacgacggatcgagaatatcatccttggtttccgttttgatggttgcccgttcactgtgaaggagttaggagtagcaggagccatcactgtcttgctgaaagatgctatcaatccgaacttggttcagacaaccgaaggatcggcagcttttgttcatggcggtcccttcgcaaatattgcgcatggttgtaactctattcttgcaacgaaaatggcaatgactttcggagattatgttgtaacggaagctggtttcggtgccgatcttggtgcggagaaattttataatatcaaatgtcgcaaaagtgggttacaacctaaactgacagtgattgtggctactgcacaaggcttgaagatgcatggaggtgtcagtctggatcgtattaaagaacccaatatggaaggattgcaacaaggcttcggcaatctcgataaacatatacgcaatctacgttcattcggtcagacggtgctggttgccttcaatcgttttgccagtgatacggacgaggaggtagaagcaatccgccggcattgcgaagagaagttaggtgtagggttcgctgtcaataatgcctttgcagaaggaggagagggggctgtggagctcgctaatctggtagtggatactattgagaagaaaccttctgaacccttgaacttcagttatagtgaaaatgacagtgtagaacaaaagatagagaagatagcttgcaatctttacggtgccagtgtggtgacttacagtatccattcacgtaaaatcatcaaattgatagagaagatgggcattggtcattatcccgtttgcattgccaaaacacaatattctttctctgccgatccgaaaatatacggtgcggtgaacaactttgaatttcatatcaaggatattgtaatcaataacggtgcggaaatgattgttgccatcgccggagaaattctgcgcatgccggggcttcccaaagagccacaagctatgcacatcgacattgtagatggaaatatagaaggattgagctaaccatcggaaataaatatagaaataggggatgccggtatatacttgcatcccctttccatttatttcaaatcattcaacatggctttcgggtctttggccaactgtttccagtcgtagtttctcaatagtcccagaagtgtagcaataacgataacaatacgtgctgcccaaagaacgatgataacagccagtgcaataagaccgaacttcatggcatagataatcatgctatcatcatcacgggttttacttccatcgctccatttagttatggtggtggtcacatataaagcgccggcagcacccactaaagctcctgcaatgccgaataatatctttttgagaccggtagccattttgtcttcacggcgacgtttagtaatcatatatccacgtggacggcaggcgaaaatataaagcacgatccagataaaacaccagatcgcttcccatctttcacgccatactccggcatcggcacgatctaccaggtgctttttataagtttccacattatatgctttcagttcttttatttcttcagtggcattttccatatatttttcataaagactgcgtgtttcttcagaaatggtatctactgccaacttttggctataagtatcaatgtaactttgttgccgggtgatggcttcgctaagttcagtctgcacttgctcatcagtcagcgcctgtctctttgctacataatcctgttcgcttccggcctgatagaaataataacatcccataatggctacacagatgatgatccaccatgcgaatgtccaatgccgctgtttggaccattccagcacttcgcgcgtatcagccattacctccattagttcggtatccgacgggtcatcaatggctgcttccgcttgtgtcagcagatcttccatatcccttgtttcctgggctgttcgaggataataatcttcatccggctgtccatgatatccggctgtttcccatgcctggaacaatagttcttccgcttttttgtttctttcgtcttcagtatttacattgctgtatgtggtgttcataccaccctgcatgtgtttcttgtttgctgagctcatagtattgcagaattaaatagtttgggaattgttgtttgcttgtacctgtcttaactgttcacacatttcggcgtcttttttgtcccggtgacctttgtaagctctaaacccgaaggtcagtacattccatacacctttaaaaagagcgataacaattttcagcataatcttacctgtagctactccaatgttttctgacatagtaattaaagttttaaagtgaataataaatgtagtttccaaaaatagggaaatgcaagcaggagtatcctttcaatacaacaaaaatagtgt

SEQ ID NO: 6475 - DNA, 18909 bp, Unknown
  gut microbiota DNA sequence
cgtagcctttatcacaaaggctacggaccattttacaatttaactatatatttaatcatttatatacatacattttttctcaaaaatgtatatacctgtcggccggaaaaaacaaaaccggctgactcgtaaaaacaaatttcttaatatgcgaacagcggatatttctccattgtcttatttacgcgtgcgcgaacttcggcaataaccgcttcgttttctacattggacagaaccgtttcaatcatttctgcaatttccagcatcagatcttctttggcgccacgagtagtgatggcaggagtacccaaacggataccggaagtctggaatgcagaacggctatcgaacggaaccatattcttgtttacagtgatatcggcagataccaatgccttttcagcaactttacctgtgagatcaggatatttgctacgcaggtcaaccagcatagagtgattatccgtaccaccggaaacgattgtaaagccacggtcgattaatgcttgtgccagtacggccgcatttttcttcacttgggcagcatattctttgaattcgggttgcaggatttcaccgaatgcaacagcttttgatgcaatgacgtgttccaacggaccaccttggatacccgggaatacagctgagtcgatcaactgagacatcatcttgatttcacccttcggtgtcgttttgccccaaggattagggaagtctttgccaatcaggatgatacctccgcgaggaccacgcaaagtcttatgtgtggtagaagtaacgatatgagcatacttcacagggttttccagcaatccggctgcaatcagtccggcagggtgagccatatcgatcatcaggatagcacctactttgtctgcgatttcgcgcatacgcttgtagtcccattcgcgggaatatgctgaaccaccaccgatgatcattttgggtttttcgcgcaaagcaacttcttccatctggtcatagtctacgcgaccagtttccttattcagattatattcacagggagtatagatgataccggaagtatttactaaagaaccgtgtgagaggtgaccgccgtgagccagattcaatcccatgaatttgtcacccggattcaatacagcgaggaatacagctgcattagcttgtgcgcctgagtggggttgcacgttagcccattctgcaccaaagatttcctttatgcggtcgatagcaatttgttcgctctggtctactacttcgcaacctccgtagtaacgtttgccgggataaccttctgcatacttgttagtgagacaggagcccattgcctccattacttggtcacttacaaaattctctgatgcaatcagttcaatacctttgagctgacgttgatgttctttttcgatgatatcgaaaattaaatcgtctcttttcattttgcttacttagataagtttgataaatctgtgttctcttattaagcgcacaaatttacggtaaaaaaatgaataaactgtcagaaaagacagaaatttactttctaaaagaatactccaaaggaaaagctgagaacattgtctcgtcggtggaaacgtatttcgtcagcgggtggatcaccttcgacgacgccgtcatcataagtcactttgcgggatatattatgtactcctatgtcatagcggaaatcgaagaaaatgcgagagatagtgacggctactccaagggtgaagctgaggttcagcggacgcaacctttctttgattccctgctggtcgaaattctcaaaagtaacttcactctttttattccagatataacgaaatttaggaccgccgaatacagccagactatagggcccctccttaataacattatatccgtagatcacaggaatgtctacactgtggatttcagaagttatagatgccatttccaaaggagcatcctctgcggcaggtttttcgaaagtaatattgcagcggttgatattgtaggatatttccggttgcaggaaatgacgttcaaagttgatacgcataaagacagagccgaaatagcctatcttgtagttattctgcacctcgtctatggtgattccgtttaatgtaagattagatacaaggaagagggaagaggtgaaaccacctttaataccgaagttcaccggacgatcatggtgatgtttcttcagtggttcttcaaccgctgtaccgggcacaagatgagattgcccccacgttgtagcggggaaaaacaaaaggcacaggataaatattttcaaaactttgttcatcacttatcactaaccgttaatcactatcttttcttctcaacagaccagccaaatttaccgatcttttcacccaattcatagtatcctccatgtacataaaccagtggattagcttccgccagctccagtttcccggtttccgggttcaggttccggtcgtcggcacgcacgtttaccacatcggcaataaacatatcatgcgagccgagtgacatgatttcctttacacgacattctatacacaaaggggattcttcaataagaggggcattgaccacagtgctttttcccggtgtcagatgcatttcttcaaacttattgtagtttttcccggaacgtacgccacaccaatccgttgcacgcgccatatctttggtagtgagattgatgacaaactccatattccgtttcaggatttcgtaggagtggcgttcgggacgtactgaaatatagcacatgggcgggttcgtacaaatcgttcccgtccatgcaattgttaatatgttatattcttccggaatgcttccgcagcttaccaatacggcaggaagcgggtaaatcattgttccgggcttccagtcttgtttcatgactaaagagttacgagctcttatattatttcaatttcgttcctgttttgttctttctcgcaataatggcatcggatcacacaattctccttatccactacatggaataacgtcgccatgggctcgttgttcgtaatacatttgggattagcacactttacaatgccgcgaagttcttcaggaaggctaacttcacgtttttccaccacttcataatcccgaataatattcagcttcacattaggtgctaccacggcgatacgattaatttcgtcatcgcagaaaaatttatccgcaattttaataatgcctttagtacccagctttccgcttttgagattaaagccaatggtgatattgttattcatgtgttcaagtcccagcaaagagactactgtgaacagattttcagaggggatatggtcgataactgtaccgttttctaatgcggcaacctgtaattcttgttttttttcgctcatctttcaatttacaatttagcaatttacaaagtacaatttaggctttcacctcatccagtgtaatgcctaatacatcgcagaggatagcctcacgagcatacagaccgttttgagcttgctggaagtagtaagctttcggattatcgtctacgtcataagcgatttcattgacgcggggcaggggatgcagaatgcataaattgggacgagtatgttccagcatcttgttgcgcaggatgtaaacgttcttcacccgttcgtactccatgaggtcagtgaagcgttcacgctgcacacgggtcatgtagaggatgtcggcatctgctatggtttcttccgtaaaatccgtatgttccacgtatttgatgccatgatcacggcagtaaattttgtattcttcgggcattctcaattcatcaggagctatgaagtggaaagtcgggttgaagtggcgcattgccatcagcagtgagtgtacggtgcggccatatttgaggtcgccaacgaggaaaatattcaggttctccagtgtaccctgggttttgtagatggagtagagatcgagcatcgtttgtgaaggatgctggttggctccgtctccggcattgacgataggcactgtggttacttcgctggcatagcgggcggctccttccagatgatgccgcatcacgatgatatcggcgtagttgctcaccattttgatggtatctttcagggtttcgcctttcgaagaactcgttgctttggggtcactaaacccgattacacgggctcccaagcggttggctgctgtttcaaaactgagtcttgtgcgggtagacggctcgaaaaagagggtggcaaccactttcccttccagcagcctacggttgggacgggcttcaaactgcttcgccatctcgatcatgtagaggattttttccttgctatgctcggcaatggtgactaaacttctgttttccatatcgttcgttattttaattcttttcgagagttcaaaggtacggaaaagatgcggagtacggaagaaagacgggagaaaatttagaagtttttttcgtctccatagacggtgatcttcagtttatgggacaaagagttttgccctatgagctgaaaaaatatctcgtggggcgaaaaaacaatcttacgggatgaagtttcttatgcggtgagatgaatgccggaatttgtttggatcattaccagcatcagcagtagcttttctttttcttttctgctgttgttgttatataaagaatatataagaaagaaaaatgcattgtctgttttagtgaaagtgttgaataatagcattttgcccttcttgatcatactttgttcctaagcaaaaaaatgcgtttttttgcaaaaaacagcttggaatcggccgtttcctaaacaaaaaacgcctccaaaatgccaggtttcatcaccccaaacgccacactttatcatcggaaatgctacatttcattctccgaaatgccacactttgcgcttgctgaagtgtggcattttacccattaagatgtggcatttccgatgataaagtgtggcgttttaagagttttctatagaatttataagggtgttccaatataattccgtacctttgccttgttatttttacaggtaatctattttattgatttagtgaatttacagtaataaacatgataaagaacatcataaaaatcctttggatattcttagccgtcatagtattggcttgcgtcactgttttcttctccattgcaaaaggttggataggctatatgcctcctgtcgaagatctggaaaaccccaattataagtttgctacacaaattttctcagaagacgggaaggtgctcggaacttattcttttagtaaagagaatcgtgtgtatgtaggctataatgatctgtctcctaatattatcaatgctttgattgcaacggaagatgtgcgttttgccaaacactccggaattgatgccatcgcattgttccgcgctatcgtgaagcgtggtttgttatttcagacgaatgcaggtggaggtagtacgataacacaacaattatccaagcagctttattcgcccagtgcggataatgtaatggaacgtttgtttcagaaacccatcgagtgggtgattgccgtgaaattggaacgttattacactaaagaagagatacttaccatgtatcttaataaatttgatttcttgaacaatgcagtaggtattaaaactgctgccaatacttatttcggttgcgatccaaatgatttaaagatagaagaagccgctatgcttgtaggaatgtgcaagaatccatcttattttaatcctgtacgatataatgaacgttcacgcgggcgtcgtaacgtggtgcttgatcagatgcgtaaagccggatatatcacagcggaagaatgtgattctttgcaggcccttccgcttgttctgaaatatactcgcgttgatcataatgaaggaatggcaacttacttccgcgaatatctgcgtggtgtattgaatgcaaagaaacctgtaaagggagattatcgtggttggcagatgcaaaaattctatgaagattctcttgactgggaaaataatcctttatttggttggtgtgaaaagaatactaagaaagatggctctaaatataatctttatacagacggtctgaaaatttataccactattgactctcgtatgcagcaatatgcagaagaggcggtagaagagcacctgaaagaattgcaaggctatttcttcaaagaaaagaaaggacgtaaaaaagcgccttacagtaacagaattacgcaggagcaggtagatgaaattcttacccgcactatgaaacagtccgaccgttatcgtatcatgaagaaagccggggcatcggatgcccaaattgaaaaagctttcaatacacctgaagaaatgtcggtatttacctggaatggtgaaaaggatacaatcatgacacctatggattctatccgctattacaaacacttcctccgtgcaggttttatgtctatgaatccgcataatgggcatgtgaaagcatatgtcggagggcctaatcatcattattttaaatatgatatggcaatggtaggtcgccgtcaggtggggtccaccattaagccttatgtctacacattagctatggagaatggctattctccttgtgatgaagcgcgtcatgtggaatatactttaattgatgaaaacggcaaaccgtggacgccccgtaatgccaatactaaacgttatggagaaatggtaactgtgaagtggggattggctaactctgacaactggatcacagcgtatctgatgagtaagctcaacccatattctctgaaacgcttgattgaaagttttggtgtacgtaatcgtgaaattgtgccgtcagtttctttatgtcttggtccttgcgaaatttcggtaggagaaatggtcagtgcttatactgcattccccaataaaggtatccgtgtagctccactgtttgtaactcgcattgaagataatgacggaaatgtattagctacgttctctccggaaatggaagaggttatcagtgtttccagcgcttataagatgttggttatgcttcgtgccgttattaatgagggaacaggtggacgtgttcgtcgcttaggtgtgaaagctgatatgggtggtaagaccggaacaactaactataatgcagatggttggtttatgggctttactccttcactggtatctggatgctgggttggtggagaagagcgcgatattcatttcgatactatgctgcatgggcaaggtgcttctatggcattgcctatctggtctaaatatatggtaaaagtgcttggagacaagacactgggatatgatgaaaatgagacattccaacttccggaaggtttcgatccttgtaaggataatggggacgttaattttgaatcggcatcagaaactggtttggatgacttttttgattaaagttcaagtgtcggtctaaattcttgatttcgaaagtggtttatacaattagcatcggtagtaacgagcaacagaaagagaatctttcgttggcgcggaagcggttgaaagaactgtttcctggtattcgtttttctacggaagaagagactaaaccgctttatttccggcgttcatccttattttccaatcaggtggcacgttttatttccagtagcgatgcggcggaaataacttcttgtttgaaagctattgaacgggaagcggggcggatgcctgaagagaaaaaacaagaaatagtccggttggatctggacttattatcatgtgatgacacagtctataaacccgatgatttaaaaagggactatatttgccggggattgaaagagatagagtaatttaaaatgggtacgcggacgacgcggataaagcggacgaacgcggatctataaaatcgtaaatataaatatgttgaagtttttaggaatcattcccgcccgttacgcatccacgcgttttcctgcaaaaccgttggccatgctgggaggtaaaactgtaatacagcgagtatatgaacaagtggcaggtattctggacgatgcttatgtggccacagatgatgaacggatcgaagaagctgtaaaagctttcggaggtaaagtagtgatgacttccgttaatcataaaagtggtacggatcgttgctatgaagcatatactaaaatagggggagactttgatgtcatagtcaacattcagggtgacgagccttttattcaaccctcccaactggaaactgtaaaagcttgcttcgacgatattacgacccagattgctacactggtgaaaccttttactcctgagaatggatttgaagctttggagaatatcaattctccgaaagtagtgctgaataagaatatgaatgcactctatttcagccgctccattattccttatcagcgaaatgcggaaaaacaagattggctgaaaaatcacacttattataagcatataggattatacgcctatcgtgctgaagttttaaaagagattacttcgttgccgcaatcttcgctggaactggcagaatcgctggaacaactccgttggctggagaatggttataccattaaagccggtattaccgaagtagagactattggcattgatactccccaggatttggaaaaggctgaagaattcttgaaaatatgttagacagaactatccagccccgtatttgtgagccggaacaactggcagtgccatctcccgaatgtcgggtgatgaaaaatggcatacctttatatatactcaatgccggggataatgaagtagtccgaattgacctgttgatagagggtggacgctggcagcagaaccaacgcttgcaggctttgtttaccaaccggatgctgcgcgaaggtacccggcgttattcagccgcggccattgctgaaaaattggattactatggtgcttggttggagctttccagctcgtccgagtatgcttatatcaccctttattctttgaataaatatctgccggaaactttagatatttttgaatctatcgtaaaagaacctcttttccctgaaaaagagttaggagtgattatcgacagcaatatccagcaatttcttgtgaacagttccaaggtggactttctggcccatcgcactttgataaatgccgtatatggcgatacgcatccgtgcgggcaattagtgcagaaggaagattatcatttgatcaacccttctgtcttgcaatcgttttacgaccgatattatcattccggaaattgcagtatctatcttgcggggaaggtcagcgaagacgctatccgtcgtattgaaactctttttggaagtgaacctttcggtaaagatttccgcaaaccggaaaaactgtcttatgttccggtaacttcttctgagaaacgtatttttatcgagcgtgccgatgcaatgcaaagtgctgttcgcatgggaatgctttctttggatcgacgccatcctgattatttgaaagttcgcgttctggttaccttgttcggaggctatttcggtagccgtctgatgtctaatattcgtgaagataaaggatatacgtatggtatatctgccggtatcatgccttatcccgatagtggactgttggttgtcaatgcagagactgccaatgaatttgtagagctgcttatcaaagaagtttaccatgaaatagatcgcctgcaaaatgaccttgtacctgccgaagaacttgccatggtaaggaactatatgttgggtgatatgtgtcgcagctatgaatctgctttctcactggcggatgcctggatctttattcatacttccggcctcccggactcgtatgtgagggatgccgtagaagcagtgaagacaattactcctgtcgagatacgcgaacttgcctcacgctatttgtgcaaagagacattaaaagaaatcgtatccggcaaaaaaatgtcataaaaaaggtgtgataccccttccttttagcagattaattgtatctttgtgcaaatactatataaggcgtgtaacaagttgctgcgtttacacgtctttttattaaaatcgctaatttataattttcaatgaaatatctatatactgcactcattctggtattcatgtcccaaggcggggcgacggcccaggaaaagaaatccggtttcttcgacaaagtaaaaacaactttctcttctgaaataaagataggaactcatacctttaaagatggctccgtatatacgggtgaaatgaaaggacgtaaacccaacggaaagggtaagacggttttcaagaatggcaatgtctacgaaggtgaatatgtgaaaggaaagcgtgaaggatatggtacttatacatttcctgacggcgaaaagtacgaaggacaatggtttcaggaccagcaacacggtaagggtatctactatttcatgaacaacaaccgttatgacggcatgtggtttcaggattatcagcaaggcaaaggtacaatgtactactataccggtgacatttacgaaggagactgggtaaatgataaacgtgaaggtcaaggtacatacacctggaaaaacggttccaaatatgaaggttcctggaagaatgataagaaagagggtaaaggtacttttgtctggaatgacggctgtaaatacgaaggtgactggaagaacgatgtgcgtgatggaaaaggaactttcgaatatgccaacggagataaatatgtaggcgactggaaagatgatatgcaacatggcaaaggtatttacttcttccacaccggcgaccgctatgaaggtgcgtatgtgcaaggtgaacgtaccggagccggtatttattatcacgccaacggcaataaatatgtaggaaacttcaaggacggcatgcaacatgggaaaggtgtattcacctgggcaaatggtgcagtctatgacggcgactggaaggacaaccagcgtgacggccgtggaacgtataaatggaatgtaggtgattcctacgaaggtgaatggaaaaataaccagttcaatggtcagggaaccctgattatgacagacggaactaagtataaaggtggttttgtgaatggtatggaagaaggtaacggtatacaggaggataaaaacggtaatcgttacgaaggcttcttcaaacaaggcaaaaaacacggtccttttgttgaaacggataaaaacggaaaagtaataaaaaagggcacgtataaaatgggaagactggaattaaattaaaaattaataattaaaaattaaaggctgcgcgatgttacattaactgcgcagcctttaatttttaatttctaaattgccaaaggcaatttagataatgtattgtgaactgatagactcattattcaccactctcttgatggtttctgcaaacatatcagcaatactgagttgtttcactttcgcgcatttcttagagtaggggatactatcggtaaatacgatttcggtcagactggattcctgtacacggaaagacgccgggtcagacattacacagtggcttgcaatagcgcgtactgatttagcaccggcatccaacataatgttagctgctttggtgatagtaccggctgtgtctacgatgtcatccactaatacaacatttttatcggttacatcaccgataatttgcatggatgcaacttcgtttgctttctcacgtgatttgttgcacaataccaggggaactcccaaatactttgagaatgtgctggcacgtttggaaccacccacatccggcgtagcgattacaagatctttcaatttcaaggactcaatataggggaggaacactgccgaagcatacaagtgatctaccggaatgttgaagaaaccttggatttgatcagcatggagatccatcgtaatcaaacgatcgatacctgctactgaaagtaaatcggctactaactttgcgccgatagaaacgcgaggtttgtcttttctgtcctgtcgtgcccaaccgaaatatggaatgactgcaacaacgctttttgcagacgctcttttagcagcgtcgatcatcagcagaagttccattaaattgtcggaattagggaaggtggattgaaccaggaatacatgtgcgccacgaattgactcttcataggaaacagcaaactcaccatcagcaaagtgggtgatgttcatctttcccagagggcaatcaaggcttgcgcagattttctctgcaaggtatctcgagttagttccggagaataccattacgggtgctttttcgctcattttgtaatagatgttacctatttgtttaatacggctgcaaagttatgaatttcccgctacattctacaagacttattgtagaaaaatcttttttctttcccggatttatttgtagctttgctaagtgaaacggtttcctcatatacgattggtgggcttactgtgtttttgcatagtaatgatttcttgtgtgggtactgctcccaccaaggaagtacatcttatcgattcgctcaaccaagtggcttattcttatcggtataaagacctggactcttcttgtcatgctgccacacaagcttatggaaaagtgaatctgtatagtcaggggaaagcggaagcatccaataatctgggtttttgtgcttttatgcgcatggattttgagaaagcggagaagtttcataaagatgtgtatagtctcacgaaaaatgaactggaactgctggttgccgatatcggattgatgaaaatctatcagcggacggccatgaacaaagaattttatgactatcggaacagtgccctccgccgcatgaaacgaatagatgaagataacaaacttttcgtagataagcacgaacggttgagactgaactatgcacgctccgaattttatatcgtttccgcagtttattactactatctgcaacaacgtccggaagcggtggcttccatcaacgaaatatatccgcaggaagaacttgtagcggatacgaaccagttactgtattatcattatataaaaggatcggcagcactttgtgatggtgaaacggcggatgaacgtcgtttgcgtgaattcgacgaactgtatacaacttggaaaatggcatcccgcggaggatacttgtattttgaaggtaatggagtgcagggacttgctaacctgatggcatctcccgataattatgactttttccaggtcaggcgttctcatgcattgaaacagtttgatgttcccgtggattctttgttgcccatgcgtttaggacaattggctttgaagaaattcaagcaatataatgatgtgtatcagattgccggtgcctatgtttctattggtaaatatttgaatgcgcatgataactacgccgaagcattggatacattgacgcttgccttggagtgcgtgaacagccatcatcgccgtttttatgattgccacgatagcctggactggttgaaaacctatgatatacgggataccatttcttcagaaaaagcatggatagagcgtaagttacgaaccgttccggaatggatttcacgtattcgcgaacaactgagtgttacgtatgccggactggaaatgaagcaacactccgattataatcgcaatatttatctggatattctggaagatacccggcaggataaggagttggaaagccgttatcaggctttggaaagtgaagcccggcaactcaatattttactcttcttcgtgattgtcggttttatactggtggttttattcttttggatattcaataaacggtctaaagaacgtaattatgtccatttgcaccgtttgaggcagatgttggacatttgccagaaaataaccgcttctattcccacggacgcgcagacggaagaagagattgtagatgccattctttctgctgtgcagacagatatagaggaacttttcaatgtaaaagatattcggatagaagatgggcagttggtattacccaaacgtcttacgaaggatgagaaagcaatactacatgtgattgctccttatattacatgggcgcttgataatggcatgacttccatttcgctgggtgacgagcgccgccggttggaaaaagaacggtatgtgtacgaacagcatatagccggaaataaacgtcagaatcttataaagaaagcgtgtatggccattgtgaacggtattcatccgtacatagaccgtattattaatgaagtgcataaactgacggaaaagggctttatccatgacgaacacatcaaagccgagaagtatcaatatatggacgaattggtgacaaccatcaatgaatacaatgacatccttgctttatggattaaaatgaagcagggtagcttgagcttgaatatagaaacattcgggttgaacgagcttttcgatctgatacggaaaggaagccgtgctttcgaaatgaaacagcaacaactggaagtgacaccaacggatacctatgtgaaagctgacaaggcgttgacgctgtttatgataaacacgcttgcagaaaatgcccgtaaatatactccaaagggaggtaaggtaaaagtctatgcaaatccgacagaagaatatgtggaaatctcagtagaagataccggttatggtctttctgaagaagatgtgacgcgtattgtcggtgagaaattgtataattcgcaggaaataggcatactggatgctgccgaccgggaagaactgctgaaaaacaaagggagcggcttcggtctgatgaattgtaaaggtatcattgagaaataccggaagacgaacgaagtattcagagtctgtttgttcaatgtagaaagtactttagggaagggcagccgtttttatttccgtttgcctacaggagtgcgtaaaactttgatggtatttctgtgcatattcttttctataggcatgagttcgtgcaataaagcagtggaggaagcggtgatgcaaccggatgaaatctatgcgcaaacggctcaggattctttgtcattagctgcggaaaatgagtttgaagccctgttgaatgaggcgtcagactatgccaatgatgcctattatagtaatgtggaaggaaattttgaacaggctttggaatatgtagactctgccatgtcttgcttgaatgcgcattataaaaggtatgcccaggagccgcagcgctatatgtcattgagaggagaaggggagccgggggagttatcctggtggaatgatcttttcaattcggactttcatgtcattctggatatccggaatgaggcggctgtcgcttttcttgcgttgaaacaatgggatgcatacagttataataatgccgcttatacgactttgtacaaattgctgggtgaagatcagtctttggaggaatattgtcgtcaactggaacgttccaccaataataagatggtgggggttatcctgtttatcggacttatagctatgttgctcttgggatattacatcctgtatattcgcaaacgtcttgtaaaccgttggaatctggaacaggttttggaaatcaatagacagatatttgctgcctccctgatacaagttcccgaaacagaagaggcattgcaacgggaagaagataccctgaaagctattcctcaacgtatcgttgacgaaggcttcgatgccgtaaatgagttgctaagtattgatcggttgggaatcgccgtttataatgaaacgacacatcaactggaatatgcgtcaaattctatagaaaatgagttgtcctctgtgggagataatggatcatctacggcagaagatgaactttggaaggaagtagttcaacgctgttttgaacagcatactcaactgtccgcaccgggatttgaagctttgcctttggtagtggatgctgcgggtgattcgcgctgtgtgggtgtgttatatcttgaacggcaggagagcgtcgatcaggagacggctcatctattgctggaattgattgcgcggtatatagcgattgtggtcttcaatgcagttgtgaaactggcaacaaaataccgcgacatcgaagctgcgcatgaagaagcacaccgggcgtcatgggaggacggtatgttgcatgtgcagaatatggtgcttgataattgtctttccaccatcaagcatgagacaatttattatccgaataagatcaagcaactcattggtaaactccgttcaggtattctctcagaaacggaagaaaaagagacggtttcagctatcagcgaattgatagaatattataaaggtatatttaccatcttgagttcgtgcgcatcgcgacagttggaagaagttacgttccgtcgcgggataatttccgtaccggagttgtttgctctggcagaaaagtatttccgtaaagcaaataagggaaaaggggttgctgtatctttctctacaagagctattgatgaaagagtggtcggagattttatccaactccgcttcttattggagaatctgatagatgaagctttgtctgttcctctgggtggagaaatacatttggcagcagcagtagacggagaatatattcgtttccttttcactgatatgcgaaggacgaaaacccgtgaggaattaaatcaacttttctatccaaatctggaacgtatgacggcaacaggagaaaaaggagagttgcgaggtacggagtatctcgtctgcaagcagattattcgcgaccatgacgagtttgccggaaaacgtggctgtcgcattaatgctgaaccggctgaaaatggtggatttacagtttatttcacgataccgagaagaaaataaaattaaagaatatggaagacaagaaattcaaagtaattattgtagaagacgtcaagcttgaactgaaaggaacggaagaaatcttccgccatgaaatacccaacgcagaagttatcggtacggctatgaccgaaagcgaattctggacattgatagaagccggagttcctgacttggtattgctggatttaggtttgggtggttctactactattggtgtggatatctgccggaatatctttaagcgctatccgggagtacacgtactcatatttaccggagaaattctgaatgaaaagctttgggtggatgttctgaatgcgggtgctgacggtattattttgaaaacaggtgagctgcttacgaaaacagatgtacaggcagtaatggatggaaagaagctggtttttaattatcctattctggaaaaaattgtagaccgtttcaagcaatctgttgcgaatgatgccaaacgtcaggaagcggttatcagttatgatatcgatgagtatgacgaacgtttcctacgccatctggcattggggtataccaaagatatgattgctaacctgaaaggtatgccttttggagttaaatctctggaaaagcgtcagaatgatttggtaaaccgtctgtttccacaaggagagcgggtaggagtgaatgcaacccgtctggttgtgcgtgctttggaactccgtattcttgatatagataatctggaagcagatgatgaataacaaatggcgtttaccgcatccggcaacaatgtttctcttgttgacgctggctgtcattgtcctatcatggatatttgacatttacggcctgagcgtgtttcaaccgcaaacaggggaggagatacgggtacaaagtttacttagtccggaaggtgttcgttggctgttgcggcatgtggttactaatttcacggggtttgctccgctgggcttagtaattgtggctatgtttggtatcggggtagcacaacattcaggttttatagatgcttgtatccgcggtggggcacgtcgtaagcataatccatggcgcatggtgatactggttattttcttgggattgctttccaatgtagtaggtgatgccggatacataattcttttaccgattgcagcaactttattccattcggtcgggctgcatccagttgcaggtattattacggcatacgtttctgtttcgtgtgggtatagtgctaacctgatgctgagtactttggatcctatgcttgctgccactacccaggaagctgcggatatggcaaatgtatcacctggaaatactgggcctttatgcaattactatttcttgtttgcatctacttttttgctggcttttattatttatcaggtaacccgtcgtaatcttcttccggctttgggggaatatgccggtcatattcgtttcaatggttataagcaattatcccgcaaagagcgtcgtgctatgataggtgcagtatctattggggtgatttatacaaccgtgattctttgggctactttctcttcatggggtattttgcgtagtgtgaatggtggtctgatccgttctccttttatagagggcattctgtttctgctttcttttggtatcgggcttatggggatggtttatggctttgcttccggtcgttatcgtacagatggagatgtgattgaagggctaactcaacctatgaaattgttgggtgtttactttgttatcgctttctttgctgctcagatgtttgcgtgtttcgagtattctcatttggataaatgtatagccattatgggagcggacatgctttcgtccatccatcttgggagtttatggatactcattctatttattctctttacagcacttgtgaaccttattatggtttctgccactgccaagtggactttcatgtccttcatctttgttccgttctttgccaatttggggatttctccggatatggtgcaatgcgcttttcgtattggcgacagtgccaccaatgccatcactcctttcatgttctacatgcctcttatccttacttacatgcagcaatatgataagcaagcgacctatggttcattactgaaatatacatggagatactctctatatatattattagcctggactttgttatttattttatggtatgtaactggtttaccattaggattataacatctaatcggatataaaagc

SEQ ID NO: 6476 - DNA, 588 bp, Unknown
  gut microbiota DNA sequence
taccttgtcccgtccgtagaaacaatcctttattatatcggctgttatcggtttgttgtctatttccagttcacggtgtatctgtaatactttggcacgaactgtattaatatagtggttcagttcgatggctacacggtctttacctttggaacattcctttttctgattccataaatctacgggaatgctccgtttaatcataacctcggctactcgcttgtttacggtgatgcgcatacaaataggagcttcaccgtttttcagaagtttcgctttcttgatgatgaacaatacgcttagtgtgtttcttttcactgctcccataattctttgatttttaagtggtacaaaattagtttgctacactcaaaaaccagctacgcaaaaagctgacaatcaaagacaaatgcgtcaattcgtgggagcaaaacggttttcaaaaagtcccacgaataagccacgtgagaactgcctgaaaccactattttttgccgaagtgagtaaaaagaaaaagctccgaaatccttgaatttcagagctttgctttaatttgctatttgctttcgcggtgcgtacgggactaac

SEQ ID NO: 6477 - DNA, 1085 bp, Unknown
  gut microbiota DNA sequence
tctattgtcaccgtccattttacgaatgtcacaatatcaagaaagttacctgccttgcatccgtaccaccaacattagaaaacgactatgatattctctacggtgtagataaatccagcacagaactcttagtgcctttctggtccgtaaacagctataaactggcctcaggttgggatgcatttcctacaatcaatcctctggattatgaaacagacctcatcaacgtgcccggcgaactggtcatagccgcggatatccgtttcaagaacaatccgaccgtatccgtatttgataacggccgactgacagtcagaggaaccgatgcactctctatgaagaagtacacacaaagccacacacttagtggatatgatgataataactggtcctaccgcaatcctgtctatacgaacttactcagcgagtccggagccatgcgtgccgacagcgtcgtctacaagttgaatctgaaaagagagtattggcagttcatcacacttcctttcgatgtgaacagggcagatatgcaagtgaacaatgacgccctctttgtcatccgttactatgacggcaaggcacgagccgatggtgaaaccggcaactggaaagacgtacccgccaacggaacgctgcaagccggaaccggctatatcattcaagccaacaaacagacccaactcaccctgaaagccatcaacaatgacaacaaaaaccggctcttctccggcaattccttaaaacggacactggatgaatacgcctccgagttcgcccacaatgccagttggaacttcataggcaacccctatccatgcttctatgatatttattacatggactatacctctcccatcaccatatgggacacccgcaaccggacttacaccgctgtctcaaccgaagacgataactacatactcagtccgatgcaagcatttttcattcagaagccggtggaaatgaaagaaatcagcttctccgccgaaggccgccaactggacgccaccgtacgccaacgcactacgacccgttccgccatttcatcggaccgtaccgtcttcaattttgctttgaacgatggc

SEQ ID NO: 6478 - DNA, 18306 bp, Unknown
  gut microbiota DNA sequence
gaaattcagtctcgtgccatcgtagaaatgcgtttgcgccaattgaccggactgatgcaggatcagcttcatgctgaatatgaagaagtaatgaagatgattgcttattacgaagaaattctttcgaatgacgaactttgccgcaaagttattactgatgaattaattgaagtaaaagcaaaatacggagatgaacgtcgttctgagattgtttactcatccgaagaattcaatccggaagatttctatgcagatgacgaaatgattatcaccatttctcatatgggctatattaaacgtactccgttgagtgagttccgtgctcaaaaccgtggtggagtaggctccaagggtacagatacccgcgatgcagacttcatagaacacatatatccggcaaccatgcacaataccatgatgttctttactcaaaagggtaagtgctattggctcaaagtatatgaaatccccgaaggtaccaagaattccaagggacgtgccatccaaaacttgctgaatattgattcagacgatgctgtaaatgcatatctgcgtgtgaagaacctttctgacacagacttcatcaacagtcattatgtcttattctgtaccaagaatggtgttattaagaagacattacttgaacagtattcccgccctcgccagaatggtgtaaacgccattactatccgtgaggacgaccgcgttatcgaagtacgtatgactaacggtgacaacgaaattatcattgccaatcgtaatggacgtgctattcgcttccacgaaagtgctgtacgcgttatgggacgtactgcaaccggtgtgcgtggtatgacgcttgacgaagacgggcaagatgaagttgttggaatgatttgcatcaaagatcctgaagcagaaaccattatggtagtttctgaacaaggttatggcaaacgttctgatatcgaagactaccgtaagactaatcgtggcggtaagggcgttaagacgatgaatatcaccgataaaacaggtaaattggtaacaattaagtctgtaacagatgataatgacttgatgattatcaataaatctggtatcaccattcgtctgaaagttgctgatgtccgtattatgggtcgtgctacccaaggtgttcgtctgatcaatcttgaaaagagaaacgatgagatcggttcagtatgtaaggttacatcagaaagtatggaagatgaaattcctgttgatgatgaaaattccccgattcccactataaatgaggtagaaggagaggaggaagactataactctgataataaagtcaataatgaagatgaagaatagacataatattaattttaattttacaactatcatgaaaagagtattattttcagtgattttattgctcgctgcaggcttcactttcgctcaagaaaagactgtgaaagaagctaaaagcattgcaaatgaagtgaatccggactttaataaggccgagcagctcatcaatcaagccttgactaatcctgaaacaaaggataatgccgatacttgggatgtagcaggttttattcagaaaaggattaatgaaaaacagatggaaaatgcctatttaagaaaaccttatgatactcttaaggtatataatagcgcattgaatatgtgcaaatactatcttaagtgcgatgaactcgcacaggttccaaatgaaaagggaaaaatcaagaacaagtacagaaaacccaatgctgctgctattgtagcagaacgcccaaacttgatcaatggcggtattcaatattataacttagagaagaacaaagaggcattagatttctttggaacttatattgaaattgctcagaatccgatgtttgaaaaggaagacttcttgcagacagatacactcttagctcaaattgcttattatgcaagcttggcagcagcaaagatggaggattatcccagtgttctgaaatatgctccttatgcacagaacgacaaagaagtaggtcagtatgctatggagttcatctctacagctttaaaagcacaaggcgatactgttaagtggattgcttcattgaaagaaggtttgcaaaaataccctcagcattcattcttcttcggtcatttaattgattattatagcaataacaataaatacgatgaagccatgcaattcgctgatgaaatgttagctaaagaccccaataatacattctatctatacgtaaaaggatatctttaccataatatgaaggattatgataaggctattgaatactacaaaaagacaattgaagtagatcctacttatgcagaagcttattccaatttaggactgatctactgtctccaagctcaagacttctcagaaaaagctactactgacgttaatgaccctaaatataaagaagatcagattactttgaaagctttctatgaaaatgcaaaaccttgctatgaaaaagcaagagaattaaaacctgaccaaaaggatttatggttgaatggtctttacagagtatattataatttagatatgggaccagaatttgaagaaattgaaaagctgatgtaaagtataaacttaaaaaactgctttttgaagtgaaccctaaaagttagacaaaaaacttttagggtttattttatatgattaagtacacataccgtataagccgcaccgcacttgagggctggggacgtttaacccgcaataaaataaaggctacacgccactccgtacacacaggggcaggaccgccaaaagatatgggtagacctaagaagttggctttaattatgcaagaagaatattagcgccatatattaaacataatctttattattaatttgaaatgcttgcactatttattttagcttgggcgtccataaataactaacagcggtgtatcggaatgaaaaatcatcttccgagcaatacctggattaaataagcgagagaatatattacgtttataagtagtcaacgtaattatatctatatgattagtttttatgtaattatctaagctgttcaagaaatcatcattcatcacaacatcataatgaatttccaggtccggatactgtttttgaaaatactccttaataccacctaatttaatttcattccaagtgtccttaacatctgacagatgaatcaaagatacagagaaatgaaatggctttaaagcaacaatcaaagaatcaaatgcgattaaatcccgttgatcaaaattggtgataaatgcaatacgtttagcttctgccagctgtttaaatggagtattctccggaatggctaaaactggtacgcggcttcgctcaattacctcagcagttacactaccaattaaatctatatctttctgatttttaccacgagtccccataatcacaatacgtggccgatattccttcgaataacgaagaatttcctcttctggaataccttcacgcaatacacaactatattttacattcggaaactctcctgaagctacttttgcttttaccttgtcagataaagtatttaagtctgcatgaactttttgtaatatgttttttacattttcatcgtctgttagctgataattaaaaacgtctccataaggtaatgacgtggtatagattggtgtaaaataaacatgaagcaacacaacttccgctcccatattctgagcgaaattaaaaccaaactcacatgccttcattgaataattagaaaagtctacaggaattaagaccttattactctccttttctactttgggtgacttccctcccactacctcttcagaaagccaagcagagctctcagttatcttcaatgcacgcggtagatcgctttcttttatacgtaagcgcacacctgaagacactacaggttgtatttgatttacattatgaatataggtttcaataccttcattttcaagcacattcttcaatatctgagcttttgcataagtcagaatagctaaggttactaacttgtcttccataatcaactgtttttactttataaacaaataagaaatcccaattgtttgtctatcaattgggattcatttataactttcttttcttaagctcgaacaggctcagcactagcattcatttcatctagaatttttagagctctatcaaggacggtagtatcatccaacataaccaaaccaccatccggaccaggctctaaatgtatcccaacactcttaccttccttaaaattgtgaccgccaaaaaaatttctaactgtatcgacgttcaatccgagctcatcggctattctatgcatactaccagtaggtaatgaatctttaattctgcgaagttcattaaatgttattgttctcatatttataaatttaatggttaataactctgtgagtttcacttatcacgctataaacttaaggaaaaaaaaagataaaacaaactatttcggtgtcttttttacaaaaataaagaagcctgtcaaaaggagatttgtattttccctttcaacaggcttctttctattattaactatcttattatgaaagaattatatctatcagataacttcaacagatgacgcaggtacccatcctactttaccatcctctaagcggatttctttccattcacgcatggagttatctttaatttcaaccttccgtccctcatgcaatatgaacaaactggtgccactttcactcggagtactacgtactgttacacttggagttaatacgatagcattgttacgattcaatagctcatttttttgttgaaaagcaaagacattcgctaataaaactaacaccagaaatactatccccgcaataaatcctattttcttccacacgatttgcttggaaaagaagaagaaataaagagatgcaagcaacaaaaagaaacaaacgacgcctaccttcgcccaagcatccacactcaaacaattaatcaatgatttcgtccaagatacaaagaaaacctcgggtacagggatcactttatcaatcgtttttgcacgagcaatctctaaattagcccgaatatcagcattgcctggctgtattaaaagtgcacgctcataatttaaaatggcttttgctatatcaccagccttatagtagctatttcctaagttatagtatacctcggccgcttctccttctttcagcaaagcttcatatatctgaatagcagaggcataatcattcttcacgtatgcgctatctccttctgcttttgtcacactattctcttgcgcagcagctgaaaattcagtgtgtgaacctattgttaccgaatcattcgcttgttgtaatgtatccgatgcagtctgtccagaagaggtcaatgccattaataggccaacaaaagtaaaaaacagtatttttttcatcatataacctcctaattaatgtttaatagaattctccattttacttattactgctaatgaagccgaatagactttatccatagcctgattatcatcgccaggagcaaaacgggcaaactcacaatcattcaatgcagccaggaattctttaatcaaagcatcctccactccatatttacgaagttcctcttcaatattatcttttgaaagtcgagaaaccggaatattcaatttatcgcttatatatccccaaagagccttcaagacttcgtcatagaaaacatcttttttattatcagccaacaacttaccagctaacttcatacgtttaacagcaaccttatttgcctttttcgtacgcattttcgcaacattagcattagcagctatctgcttacggtaaatgataaagaaaatgataaacgcaacgccaggtactaaatagagcaaccaatataacatagagtcaaagaaaaagtctcccttttgagaaagcgtcacatcattttgcttgatgaagcgaatatcctcattcaagactttcaaatcctctttatttgtaaagttagcaatagtttgcgctgcatttccttcacctttctctacatgcaattcatactcttcggtagtcaatatcttataagtacgggatttgatatcaaaatagctgaatttcaccgctggtattttaaatgttccggcattgcgtggaatagccagatattcaataaccttactacccgaaagccctgcacttgtcagcctgaatttattatcaactttagggtcatatacctcgaagtcatccgggaatttcacctcaggatcacctattaacttcaaattgcctgtaccggaaatgacaagtttaatagttacagcatcgtttgtttttacattagtgctattaatggaagaagaaatgctaaactctcccactccaccggaaaaatcagcaggtttatcgcctggtaaaggttttacatctacagttagtttcggtgtcatcaatgtctttttgacttcaatgtagttgctgccaccattaaagaaagcttcaaatggatcagatacttgagtagctttagcaatagaagcatcaaaacgtgccggatcaatagtcaaattaccaaactgctgcggaaacagcacaaattgccggtaaacggtagtttgataattccgtcccttataatgttccaagctccattttctatcacccggaagttctacttcttgtgaatgaaatcccttaaaatcaggaagtttcacattgtcaaaaccacgaaggtcaaccagagtgtaaattttataagtcagcaagaatgcttcttgttcatacacattggccttactaatagtaggcaaaataaagagatcctgattggaaacagaagttcctgaagaagcacgactggtattgccctgctggctactattacctccgcctgaagaagctgctccggcctgatccgctggcagaaccttgatttgcacagaattagaaaccatctgattaccatcggctgtaattgtagctcccggaattgtgaaactaccctcagcagtagccatcagtatataagtgaaagtaatactgctggttgaggtcgataccccattaactatttgcatactactttgctgagagcgactggggcccatcagtacgtcaaaccccttaatagaaggagcacggaaatctctcaccttctgtgtagtcactgtatatgccagtctgaactggtcacccaccgctacagcatcaggagctgacgcggtaaatgacaccttgtcattagccaaagcttgcagactgactgctaccagtgctatccataagaaaattaattttctcatatattatcgtatcttttattatttaccaatccttttccaaacgaccaccctggataacttgctgtttcttcaccttatcctgtacatctttctcatcctgcatcaccgacttcaaaagttgttcagcattttcctttgacatctgattttcttgtggctgaggaggttgctgctgttgatcctggttctgctgatcttgttgattttggtcttgtttgtctttatcttgttctttttcctgctcctttttgtcctgattctgatcttggttctggtcttgattctgctgattctgttcctgatctttcagcattttctgagccaaagccaagttataacgcgtctcgttatctttcggattattacgtagtgactctttgtatgcttccacagctttggcataatccttaccggagtggaatattacccccatattatgatagatttgagcaagattacccttatctttctccattttagtggcagcaacaaactgctccatagcctcctgcaacttattctgttgcataagcgtattacccagattatacatggatatcgccgacttcggattcacatcaatagctttccgataattcacttcagcatttacatacgtactatctttataagcacggtttcccttacgaatatagtcgcgttccgctttctgtgcagaaactgaaatagccgtcagtagcagcaagataattccgatagttctatttctcatcatcatacctttcttcctttttaaacagatggatattacggaataacgggtttttacgttccaaaatcagcatttcagccaacaacagtaacaatataatccatgcaacagcctggaattgttcgttgaactctgtataaacctgtgtttccacatccgctttcgccattttattaatctcctgagcaatcaccttttgtgcagcatttgaattgtctacacgcacataaatcccatctcctgcctgagctatttcctgacacatctgctcattcaagcgggttacaaccacgtttccatcacggtcacggcggaagtcattggttccttctacagggataggtgcaccatcaggcatacccacacccagaacactgacttgaatacctttttctgcagcagccttggcagcttccacagctccgccttcatggttttcaccgtcagtaataacgatgacggcacgccctactccttcctggggggtaaaactgcgggtagccagattaatagctgcaccgatagccgtaccctgcttggatatcaacgatggattaatagattccaaaaacatcttggcagaaatataatcgcttgtaataggcaactgggtaaaggcatcaccggcaaacacaatcatacctaccttatcattctccattttgtcaaccaattgtgctaccagtctcttggctttctccagacgactgggttgtacatcttgtgccaacatagagttagaaatatccaacgcaatcattacctctactccctgacgtttcacagtctccaacttagagccaaactgcggacgtgccagcaatacagcaaacagtccgattgcagcaaacaccagccaaaactttacatccggacgatatttagatacatccggcatcaactgtgccattagcaccggatcgccaaacttgcggatcgctttccgtctccgataattggagtacaggtagaaagccgccaagaaaggcaacaggagcaacaggtataaatatgtaggttcttcaaatcgaaacatctttctatgtacaatttagtaatttacaattaatgcattgttttaaggtatcttcttcaagatagaattacgaagcaatacttcaagtaacacgcacaagaatgccgccaaagcaaaccaacggtattcttcctggcgcttgctgtattccttcacattcaacttggttttctccaacttatcgatctcctcatatacctctttcagcttagaattactggtggcacggaaataattaccttctgtggtagccgcaatttgcgtcagtgtcttttcatcaatctccaccggcatattgacatactgcacagtgttacccaccggataaggatacggagccattccgtttgtacctacaccaattgtataaacccggataccaaaactcttagctatttctgccgcagtcagcggagatatatctcctttattatttgtaccatccgtcaacagaatgattactttagacttcgctttactgtctttcaagcgggtaacagcattagcaatacccataccgactgctgttccatcttcaataataccacacttaatgccttgaaacaaattcagaagcactgcatgatccaccgtcaacggacattgcgtaaaactttcaccggcaaataaagttataccgatattatcattgggccgaccattgataaactccgcagccacatctttagcagcttccagacgattcggtttcaaatcctctgccagcatactggtagatacgtcgatggccatcataatatctataccttcaatttcactgttttgccagctattagtagtttgaggacgcgccaacactacgataatcaatgccaaggcaataatccgtagcataaaaggcacatgcaacaaatagttcttataactcttcggcgtatgagcatatacacgagcatccgaaatctgaagtgtagcttcattattcctccgcttcataatataccatactatataaggtataagcaacagcagcaaaaacaaatattcaatattggcaaaaaccattgtatttactatttaacaatttactatttaagattggagttacccttaaattctgctactatgcaaaataattgtataactgcattccaatataaacgaacgaaccaatcaaggcaactgacaatactactatgcctatgcccagcaatattttagtacgcaatgagcgtttctcaatgatagtaatttcagtgggttgcggttttgcattctccacttctttctccttggtttcattgataaattcgatggcattgatcagattcgcatcattttcgttcatcaacggattatgtttagcgaacttcaccaaatcggcagtctcaaaaagagaacgtaaatctgcaatagcttctttatcttgcatttcaagcagcttttctataatctccgaagaggtcatttccaaagcattgaaaccaaaacgctctttaatatacgtacgcaaagtatctgtcaattccgtgtaatactccttcggctgtcccttttgccatactttttcccctttgatacgctctatttctttcatcgccatctgatgcggaggtaacttcggttcaacctttaccttacggataataggtttattgtcacagatacgcatgatcagatagataagtaataatgcaatcggaataagcaatatgccacaggtgataatcccataccaatcttcccacacaaaaggaggttgcattactgtcttcggaccaaaaaactgttccggattctctggatccaatggcacattcatcgaatataccttcagtgctaatgccttcgaacgatatgccttattatccaccaatacttccatcggtggcagataatacaatgccgagtcgaatgatgtaacagtatactcctgcgtaatcagcattcgtttatcatcatttatatactgcgtatccggctttgcaacatctataatctccacaccgcttaccagtgtatccgtataaacagggaaaatagcccgtttatcggcatccaaggctacctgaagtttaatcttcgcctggtcaccgatataaatttgcagagagtcaatggtagcatccactgttaccgactgagccactgccttgccagtcaacatccccaatagggttatcagaaatagatatcttttcatttttccgattaatttcgtttcgcaaacaaattcatcaatgctttgacatagtcttgatcagtgcgtaccgacacattatcgacattgctcttagtgaatgtttcgttcagttccacctgtttattcacccaccagtcgtgatgagcacgacgaacagcacgcgacgaagtatcaatccactgctcatgtccggtctcagcatcctttattttcatcaaaccgatagccggcagttcctctaccctgcggtcatacacctggatagccaccatatcatgtttccggttggcgatagtcattgcattcttaaagttcccctgatcaatgaaatcggataacaggaaggctgtacaacgacgcttcattacgtttgtcagatattccagtccgagccggatgtcagtcctccgactctccgctttaaagtcaatcagttcgcgaataatatataagatatgcttacgccctttcttaggcggaatgaatttctctatccggtcagagaaaaagataaccccgattttatcgttgttttgtatagccgaaaaagccaacgttgcagctatttccgtcaccatatcctttttcatctgcttcaccgtaccgaattccaaactaccggaaacatccaccagcaacataacggtcagctcgcgctcttcttcgaacaccttcacgtaaggcttattgaagcgagcggtcacattccagtcaatgtcgcgtatgtcatcgccaaactgatattcgcgcacctcggaaaatgccatacccctacccttgaaagccgaatgatactgaccggcaaagatattgttggataatccgcgcgtcttgatttcaatctgacggactttttttaacagttcacttgtttccatctatatcgttaaataattccgttaataaataccggcaacgttctttaaaaacgttggcaagattctttaaaaacgttcacaccatttattaacaggtctcggaagacctttttaaaaatgcttacttaattaaggtacttcaaccttattcagtattttgctgatgatctcgtcagaagtcagattgctggcctctgcttcataagtcaatccgatacgatgacgcaatacgtcatgagccacggcacgaacatcttcaggaatcacataaccacgacgtttgatgaaagcataagtacgggcagccaacgccagattgatagaggcacggggagaaccaccgaaaccaatcatatctttcagttccttcagatcatatttctccggataacgggtagcaaatacaatatcaacaatgtagcgttcaatcttctcatccagatatacctgacgaactactttacgtgcttcaataatctcctgagctttcagaataggcttcacattgaatttatcgccattgatattctggcggataatcattttttcttcttccatcttcggatagtcgataaccactttcagcatgaaacggtccacctgggcttcaggcagcggataagtaccttcctgctcaataggattctgtgtagcaagtacaaggaaaggttcgggcaacgggaatgtttccgtaccaatagttacctgacgttcctgcatcgcttccagcaaagcactctgtaccttggccggagcacggttaatttcatctgccaaaacgaagttggcaaaaacaggtcctttctttacttggaatgtttcgtctttctgactgtaaaccattgtaccgataacgtcagcaggcagcaaatcgggagtaaactgtacacgactgtattgtgcatcgatcaatgaggcaagcgtcttaatcgccaatgtctttgccaaaccgggcacaccttctaataatacgtgtccatcggacagcaaaccgattaacaatgactctaccagatgtttttgtcctacgatgatctggtccataccagcagtaaggttggtaacaaaagaactttgtctttcaatccgctcgttcagttcgcggatatcaattgtttcagccataaatactattatttttattgtttaaattccattgatttctccagtatgctactggtaattatttttttcgctcccaaaagtacaggaataaattaaccataccaactaatttttattaaaaaacaattagattaaactactttcatagagtttagtagttaacaatagtttctgaaaagaatttcaaattcgcagacaggaataaatagcaaatcacccctgcaagtgaagtattatcaacttgcaggggtgcaatattttcttttatttcttttcgagctccggtatcttgattacagtaccatacggcacatgatcgggattctttataacacccgaattatacttcacaatatagggccacagggccttagtcccgtaaaagcgaagtgcaacctttgtcagagtttctccttcctggatagtatgagtagcttttgtacctacaatcttataatttacagagtctggctcaaaaggagttgcagcagctttctttgtctcttttttaggagcagcagcaggagtctcctgttttgcaaccggcttcggctcttcaacaactttaggagtaacaacttctgccacagtatctttcttcgcaaccacagttgtggtatcttttcgaacaatactatccgtcagagcgaccggaacggctggtttctctatcttttcatcagcaactttctctgttggcggtggagatattctgtcaaataaatccggataatacataaaagtaacagcacctacacataataatacaacaagtattacgattccaatgaaaaacttcatcgtagaactatctgctctattcacaggaggtgatggagattcaggaacttcataagtaggcaccaaatcttcttgattcttttgttctgtcagagattcttctacgcactcattcaccggagtagttgcctctgttacagactgttttacttctccagatagaacgacaggtacctctacaagctgttctgactcttcaatctgaatgacaggttccgcctgatcaacctgaatttctttatcctgaacaagttgttctgtagcttctattacttcttcaactacctgaatatgttcctcagctactactacagattcttctttaacaatttcagcagtttcctcaatgatctcagttggtacttctaccacctccacagactcctctacagtttcagctgatacttctattgattcttctacagtctctatagtttcctctgaaacaacatctgccacttctgtattaacgacagacttttctgattccacaagcacctcttctttttcctcctcttcggaattatcctccaccggtgtatcttctaacacggtttcatcattcaataccacagtctcaaagtgagaaaaaggcttgtttatcaagtccttcaaggcaggttccggagcaaatgaaacttttgtatgcccctgtatttcaaatcgttcccctgtatttatatttacgctctcacgactctctacatcaatcagtttaaatgtgcccaagcctctaatctttacatacttatcattctccagcgactcttcaatcaactgaaaaaactctttcacgaagctcccggcatccgccttatccatgccatgtttttctgcgagcaattctattaaattctgtatattcagcttctcattcatatttatggaagattacttgagtaaaagaggattacttaaacttatctttcagagccgtgctgggtctgtatgttaatactaatttaggtggaaccaacatgcgtaatttggttgtaggattgatagtgatacgctccgctttcttctttacctcgaacgtaccgaaactttgtacagaaatggcatttccttcttgcaactgttgcgtcatatccgacagcaaagatgcaatcagttcggatgtgtcctttatggtatatcccaatcttcgtgacaattctgaagtaaattctttattattcaaaatccagctatttttataaagttcggtgctatattagcaaaacttccgcacatacacaaattcttcaggaaaattatttaaataactcgtccaaaaagatcgaaatcatcggaatttataatctctacctggtaaaagttaccaataagcaatttctgtttaccctgttctatcagaacttccggatctacttctggggaatcaaattccgtacggccaatataataatctccttccaaacgatcgataattactttaaggcattgaccgacctttgctgcactctgttctgccgaaatcccttgctgaattgacatcaactcatccaggcgtgcttgtttcacttcctgaggaatttcatcctcatagtgtgcagcagcataagtaccttcttcttcggaataagtaaaagcccccattctatcgaaacgagccttacgaataaactcttttaattcctcaaaatcagcttccgtttctcccggatgtcctaccatcaaagtagtgcgcagatgaatacccggtacttctttgcggaattgctctatcagatgataggtttcttcctgagtcacatgtcgccgcatcttctccagcatcggattactgatatgctgaagggcgatatccatatacctgcacacattaggacgctcacgcatgactcggaataaatccataggaaaatgtgccggataagcataatgcagccgaatccactccacaccagggacttcagaaatacgttctattaattcggggagcatttgcttcttatataaatccactccataatatgtcaattcctgagcaataacctgaaactctttcactcccttacttaccaaataacgaacttcatccaagatctcttccatcggacgtgagacatgttttcctgtaataataggaatagcacaatacgaacacttccgatcacaaccttctgatattttcagatatgcgtagtgcctaggagtggtaagtgtacgttctatatgaagctcttcgtgatatgccttaccaagatcctgcaacaactccacccagttaaatttaccataaaatttatctacttgtggaatttcgatagctaattctttcagataacgctccgaaagacatcccattacatataatttttctaaatccccttcttcctttgcctgtgcaaattccaaaatcatattgatggactcttcctttgcatcaccgatgaaaccacaagtattgatcactgcaatttctccctcaggcttttccgtatcatgagtcacatgatatccagcttcttctaattgccgcatcaaatgctccgagtccactaggtttttagaacatcctaacgttataatatcaatggttttccgcttcatgcattctctccaaacaacgaatcaacaaattctttcttacggaacacctgcagatcttccataccttcacccagaccaatgtattttaccggtattttgaactgatcggaaatgccaataacaactccccctttcgcagtgccatctaatttagtaatagccatcgcagtcacttccgtagccaatgtgaactgtttagcctgctcaaatgcattttgcccggtggaaccgtccaaaaccagcaaaacctcattaggagcatcaggaaccactttcttcattacattcttaatcttagtcaactcgttcatcaagccaactttattatgaagacgtccggcagtatcaatgattaccacatcggcattattagcaacagcagaattcaaagtatcataagccacagaagctggatcagcgcccattttttgtttgattacaggtactcctacccgactcccccaaatatccaattgttcgacagctgccgcacggaaagtatctgcagcacccagataaacacttttaccagcttttttaaattgataagccaatttaccaatagtagtcgttttaccgactccattcactcccactaccataataacgtaaggtttcttctcaatcggagcttcaaagtcatccacatcatctgaattattttccgtcaataaggcagcgatttcatcgcgcaaaatggtgttcaattcttgcgcattcatatatttctctgacgcagcgcgtttctctatacgttgaataatattcaatgtcgtttccacacctacatccgatgttatcaacacctcttccagattatcaagcacttcatcatccactttcgactttcctgccacaacacgggcaatttttccgaacacactttcctttgtcttagataatcctttatctaatgtttcctttttatcttttgagaaaaaactaaaaaatcccatactctatctattaatacaatacattatgccacaaagatataacaaagtaatgaaagtacagggataaagtacaaaaaaaatccccttatcggaatacgataagaggattctatattcaaacgtctttcgacagactatcttatttcttgaaaaagtcttgcactttttcgttcaataccatctgttcatcaaaagtgtaagcaccagttttgggtgacttaaccatcttgataacctttgtataagcacgaccttctttagaaccttcgtgcaaacttgctacagttttctttgccatgggttataccttattatttaatttctttatgtactgttactctcttcaggatcgggttgtatttcttcaattccaatctttcagttgtattctttctgttttttgtagtgatataacgagaagttcccggcataccactatctttgtgttctgtgcattccagaatcacctgtactctgttaccttttgctttctttgccataatcagtattctcctctacttttagccaattactttaatgcttttccaatcacaataaccttttgctactgcatcgttcaaagcagcgtccagtcctttcttgttaataatacgcagaccgttagcacaaatgctaaggctgatccagcaatcttgctctacatagtagaactttttgttaaacaagttcaaatcaaaggttctcttagttcttctctttgagtgtgaaacattgttgccaatcatggctttctttccggtaatttgacaaatcttcgacatttctatcttatttttatagtttt

SEQ ID NO: 6479 - DNA, 1997 bp, Unknown
  gut microbiota DNA sequence
acagagttgtagaagttcccgcttcaaatttgaaaaaagaaatcactaagattctttttgagaaaggctacattcttaattataagtttgtagaagatggtcctcaaggtacaattaaggttgccttgaagtatgatccggttaacaaagtaaacgcgattaagaaattggaaagaatctcttctccaggtttgcgtcagtataccggttacaaggacatgccgcgagttattaatggtttgggtattgctataatatctacttccaaaggtgtaatgaccaacaaagaagccgctgaactgaaaattggtggtgaagttttgtgttatgtatattaataggaggaattagcaatgtcaagaataggaaaattacccattagtattcccgctggagtaacagttactctgaaagaaaatgtggttaccgtgaagggacccaaaggcgaacttagccaatatgtagatcctgctatcaatgttgccatcgaagatggtcatgtgactttgagtgagaatgaaaatgcaatgttggataattccaaacaaaagcatgcatttcatggtttgtaccgctctttagttcacaacatggttgttggtgtatctgaaggatataaaaaagaattggaacttgtaggtgtgggttatcgtgcttctaatcaaggcaatattattgagttgtctttgggttatacgcatagtatcttcatacagctgcctcctgaagttaaggtagagacaaaatctgaaagaaataagaatcctcttattattttagagtcttgcgataaacaattgctgggtcaagtttgctctaagatacgttctttccgtaagcccgaaccgtataaaggtaaaggtgttaagtttgttggtgaagaaattcgtagaaagtctggtaaatctgccggcgctaagtaatttacataaaataagaatgttatgacaacaaaaatagaaagacgaataaaaatcaaatatagagtacgcaataaaatttcaggtactgctgaacgtccgcgtatgagtgtatttagaagtaataagcaaatctacgtccaacttatcgatgatttgagtggtaagactttggttgcttcttcttctttgggtataacagagaagttgccgaagaaagaacaagctgcaaaggttggagagttgatcgctaaaaaagctcaggaagcaggtattactactgttgttttcgaccgtaatggttacttgtatcatgggagagtaaaagaagtagctgatgctgctcgtaacggtggacttaaattttaatcattatggcaattaataatagagttaagattacaaacgatatagaactgaaagaccgtttggttgctattaatcgtgtaaccaaagtaaccaaaggtggtagaacttttagtttctctgcaattgttgttgtaggtaacgaagaaggcatcatcggttggggtcttggtaaagctggtgaagttaccgcagctatcgctaaaggtgttgaatcagctaagaagaatctgacgaaagtacctgtactgaagggtactgttcctcacgaacagtccgctaagtttggtggcgcggaagtattcatcaagcctgcttctcatggtacaggtgtagttgccggtggtgcaatgcgtgcagtacttgaaagtgttggtattacggacgttttggctaagtcaaaaggatcttctaatccacacaacttggtgaaggctactatcctggcgttgggtgaaatgcgtgacgcacgtatggttgctcaaaacagaggaattagtattgaaaaagtatttagaggataaggaggaatatatgtcgactataaagattaaacaagttaaaagtagaattggtgctccggctgatcagaaaagaactctcgatgcactgggacttcgtaagttgaatcgtgtggttgaacacgagtgtactccttcaattcttggaatggtggataaggttaaacacttggttaccattgttaagtaa

SEQ ID NO: 6480 - DNA, 25737 bp, Unknown
  gut microbiota DNA sequence
aaaaaaaaaaatcgaatgacaaatcaaaatcaattaaaagcgagaaaaaccatgagaaatactcctattgaacgtaaactgattgacgaaaccatcgaagcatttcagattgcagactttggaaaagcaaccatccgcgaagtaaaggcgattgccgccaaggcagaagctgaatctggtatagaatttataaaaatggaaatgggtgtgccgggacttcccccttcggcagtaggtgtaaaagctgaaatagaagctctgcaaaaaggaattgccagtctttatcctgacatcaacggattgcctgcactgaaagaagaagcttcgcgttttataaaagcatttattaatgtagatttgcaaccggaaggttgtgtacctgttaccggttccatgcaaggcacctttgcttcgttcctcacttgcagtcagtgtgatgaaaaaaaagatacgatattgtttattgacccgggatttcctgtacagaagcaacagctagtcgttatgggacaaaagttcgagactttcgatgtatatgatttccgtggcgacaaattgaaagagaaactggaaagttacctcaagaaagggaatatctctgctatcgtctattccaatccgaacaatcccagctggatttgcctgaaagaagaagagctacgtatcatcggagaacttgctacgcaatatgatgttattgttctggaagacctggcttactttgctatggacttccggcaagatttgagcaaaccattccaagcaccttatcaaccatcagtggcacattatacagacaactatgtattgctcatttccggctctaaagcattcagctatgccggacagcgtattggtgtcagctgcatttcaaacaagctctatcaccgctcttatcccggattgacaaaacgctatggtggcggcacattcggtacagtattcattcaccgtgtactctatgccctctcctccggtacgagtcattcggcacaatacgcgcttgccgccatgctgaaggctgctaatgaagggcagtacaacttccttgacgaagtgaaaatatatggtgaacgcgctcacaggctaaaagagatttttctgcgccacggttttcatctggtatatgacaatgaccttggtgatcccgtagccgatggcttctactttactatcggttatccggggatgaccagcggcgaattggctaaggaattgatgtactatggtgtcagcgccatatctctgattaccaccggtagccatcaggaaggtttgcgtgcctgtacttcattcatccaggatcatcaatatgcacaattagaagaacggatggcaatctttgcagaaaaccatccgatataatagaataaacttaccaattagtgccggtatcccaccacaaacgggtgccggcattatcatctcctcccaaagctttcaccaatgcacggtattgctccggattttccgtttgtaatcctccgggaaagtttaaacggcgaatcataatttccgtatcaacgcagccatccttactatgattgaaacgaacaggaaaaaggcgtggatatccggttctgcgctgctccgcccaggcttcacatccttcaggaaacattgccagccatttctgcgtaatgatcttctccaacttcgtatcccggtctgctgtttcaatccacttcggtgagactttacaataggcttttatattattttcagcatcaaatgtatccacaaaatcaattggcaatttatcactattcaaatacgaatctgtctgcatgataccatattgatgtagagaggaagtaatccctttttcatagcatataccggcatcttcatctgtccagttcctcaaagcggcttccgcacgcagaaaccagacctcggcagcagtcataagaaccgcatccgttgactgagtagtcttcagtttcgacaaacccatataattgctatgagagaagcaagttccctgccggattccacgatactgtcctttaaacgactcatcctggcatgtggcaaaaaagacagtacgccgaggatcttcataaccgttcatgatagactccattggagcactcatataagtttcgttccacaccagattgagttctcccaacggattggcataccctttctttgtagataccgccaccggttcattttccgcttccaatattccatattcattattaaaagctttcaggaactctgaacgggctttctcttcatccactgtggctattcgcattgcaagccgcattctcaatgaattggcaaaccttatccacgaaatgtattcgccatccatcagtatatcaaaacgagaaaactcagcagcttccggatttgactcgacataaccggtaagggtactcacagccgtatctaattcacaaaagaactctttataaaccgcttcttgtgtatcaggcatatattctgcgttaggatcagcaaaccgtgaataaatgataggaccatagtaatccgtaacgcgatgcatcacttccactttcagaatcttggtgactccgaagaaacccggatgtttctcacgcgttgcgttctccgactggtatatctgtggaaaaatatacgaataggtatgtccccacattgcactgttccaaccatcttgcaaattatagtccgaattatggctacctccattcaatggttttccatcatgcatatatccactgaacatgtctgcattcaggttctgcgtcaactggaaaggccagttcttaccctttccataatcataattgaagtaaatgccctgctgaatcactcccagacgaataccatgttcattataatcaatctgcaaatcttcatccgtaattccggataaatccgtattgatatccttaaagtcacccgtacaagaagccaaaattaacagggcaccgaatatccaactatatcttttcatatcaatcctcccctctcccattaaaattcacacttcaatgaaaagccccaactgcgcgttgttggcatcccatacacatcaataccttgattatcattaccagtagataataccagatccggatcaaaaggtgccttcttgtaaaagaagaacaaattgcgggctataaaagaaacctgcgctttcttcaggactttagatttttccatccaggaagcaggtaactgataagacaatgaaagttctctcaatcggatattggtcgcatcatacatataatattccgttgtccctgcgcgtccgcctacaatcttatagaatcccttcacgttctctatccgctgcccctccagcataacataaccattatcacgggcctttccggtaatttccgatacaccgtacaagtccatatctgcctgagtttgcgaaagcaccttaccgccgtaacgacaatctatcaggaaatagagagacaagtctttataagaaagcgtatgattccatcccagctggaacttcggattggagtttccaacctttaccgtattcccgtcaccttctacttttggcaatcctgcattattcccttccgtctcataaacaatattaccggaagcatctctgacaaaagcttttccataaatatcgccaatcgatccaccttttatcaatttcatggcataactggaagagaaactggtagggccataaacaaattctttcaaatcttcatgcaaagcaactattttgttcctgttagaagcaaaattaagagtagtgctccacataaaatcttttgccatcacaggagtagcgtccaatgcgatttcccatccctgattctgaatgttaccggcattcacatagcggtaagcatatttgtcacccgccagcgtaggcaatttaaaaaactggttatgagtatttgttctatagaaagtgatattaaacccgatacggctgttcagaaaacgtccttctgcaccaatttcccacgaataattcatctccggttccatttccttgaaaggtgccgcatcattcgccagatattcaccaccggcagtgatatgggaagcggaattcgtaatatacaaaggaatatcattccccaccatactataagcagcacgcacctttgcatacgacacccattcaggtaaagtcagcagacggcttaggatcaacgaagtaccaactgaaggataaaaatatcctctgccttcgtgcttggtatgtgataaagtggaagaccagtcattgcgggccgtcaaatctatataggcactctctttataacccacctgcgccgtagcaaacagcgattgcagctgacggtgtgaatcaattttctggtcaagagctgctgaaccgttcattataatatttgccagagtaaatacattggcatagtacaaagaagctgttttggaatcataacgggtagaattagtagtcttatcagtaatacttcccccaaatgcaccatttactgagaaatcgccccatttcttcttcatcataagcatcaggtcaccataaaactggagatcctgataatccatttccaggtaacgtccgttagcaccggctaacgccggagccgtagaagcataaaatttctgacggactttatcgtcaatgcaatccacattgccacgagcctgtaccgtcaaccagtcatttacttgcaagtttgccgataaggagacaatggcatgcatacgcacttctttagtttgtatgcggttcgttatccaatacggattctgctcaaaatcttcataggcagtatgccagttctgtatattcaggtttctactttcatcgtacacttcgaaattatccctataatacgacaagtcctctccacggggaaaccgataaagccccaccaacgggttcatataaaatccgcctactgtcggtttgtttttagagacttgtcgcatcaaattcacattaccatccagtttcaaacgattattgaacatcacagaagtttccctgaatgtaatattatgcttggataagcgatttttatcaataatccctttaccggtagtattggcatatgaaaaataattctgcaatttctcattgccatggcttacggatacggaagtaatggaagtcactccggtagagaagaaatcattcagattatcgtatttcggcaagtcttttcgttctccccaactatccaccccatcgcttactccataacgattttgcatttcgggtaaagaagatgctttatcgaacatcagactggtagaaaatgatatgctccgttgtccttgtgatttacctttcttggtcgtaatcaatatcacaccgttacctgcctggctaccataaagtgccgctgcaggagcccctttcagaatacttatgctttctatatcttccgagtttaagtttgaaataccatcaccgccatcgcggttacctgcattagctgttccgccaatggcactgaaagcctgttccgaagttgaatttaacataggaacaccatcaattacataaagaggttgattttccccggctaccgaacggattccgcgaatgtttactttagcggaagcacccagtcccgatgatacctgattaacctgcacaccggcagtcttaccggtcaatgaagttatcagattaggcattttaacccgtgtcagttcttcacttttcacctgactcattgcataggaaagagagtgctccttcttttcgatacccaatgcagtcacaactactttatccagttccaccgcatcttcttctaatacaatatccagaaatgtatgtccttttacgcttacctcctgcgtcttatatcccataaaagagaatctcagcaccgcatcatcagcaaccgtcagtgcaaatttgccttccaaatccgtcactgcaccattcgaagtacctttttccaacactgtagctcccggtaaaggcacaccgtctccatctacaacacgccccattatacttttccgagcgataagtacttcaagccgatggttcacatcgtctgcaacaaaagcacaacaagaactactatacgaaaaaaaataaccaaaaacaaaaaaacagatataattatagatagtcaatttcatgatttacaataaagagataacaatttgcaaaagtaaccaatttcttcctaataaaaacctgttatataacatatatgaaaattctatcagtgaaaaaagagaaataatatttgtttttcaaggatttgtctgtatattagtggcatggatattaacacagacatattcaaaattgaaacgaaccacgtattaccttcacgtggaaaagtactgatatccgagcctttcctctatgacgagatgttcggacgttctattatcctgctggtagaccatacgctggatggtacaatggggttggtattgaacaaatctctcccgctatatcttaatgacgtattgaaagacttcaaagatgtggaaaatatacctatttataaaggcggtccgttatgtaccgatacgctgttttaccttcatacactaaaaggtgtaaaagattctctgcaaataggaaaaggattctatctgaacggagattttgatgccatccgccgttatattttggaaggcaatgacatcaccggaaaaatacgcttcttcttgggatattcaggctgggaacatgaccagctatgccaggaaattgaagaaaacacctggctgataggatcgacaaacatcgcttcccttatggatgaaaagggaagcgcagaactttggaaaaatgttttgggagaactgggaggcaaatatcaaacatggtcacgcttcccgcagatacccacattgaattaatcaacccggatgcactgcagtaatgcaacatctttgaaataaccttctacacacaaccaatcttttaacaacccacactgaacaaagccgcaagaggtgaacaaacgcatgcttgcctcattatcggtggcgatatgaacaaccaactgtttcatacgcagaaagtcgaaagcatagtcacaaagtagtgtcaatgcatcttttgcatagcctgcgccacgaaactctttccggataacgatacccacttctccgcgtgcatgcatcggagaaaagtctgtaatatcaatcgttcctatcgtagcatgatcttcaaggcgcaccaccatcatacgcagttgcttatcggaaaacatatcacattgtgaattctccatatattgcttcatcacatagcgtgaatagggtacggtgaagttactgatatcccactgttgcggatcgttttccatttcacaaatcaattccagatcctccggttccatagcacgaaggcgaatacgttcgtttacaaaataaatatgtttcatgatcagagataacatttttcggaagtcaccagtacgcgactttccgggttataaattcccagacgcaatcccattttccgatggcgggacagcaagcggataattgtagaaaaagaaaaggcacggcaatcatacaccacatgcgtgaaacctttcagcgagatgaatggaccggcatgtccgtcggcggcagatgcttcgtttgccacaacgaaatgatgctttccgatcagcccgttacgtttgaaaagtccacgcaaactatgaatagtggcttcttcaccgaaaacaagaaaacgagggaaagcttgtcctttaagaaagggaactttcgctttttttcccggaatactgaatatacgtctcaaggaaagcatcagcaaacgaatatacatctgtaaatggataccaatccgaacaagccaacgccccatgagcccataacgttcaccatgcttgcgaaagaaaatatccattgctccacaaaatacgcgcacatggtgataggtatctttcgatgtactttctcccttataatgcaatataggataaggcaagtagtaattttcatatcccgccttctcaatccggcaggacaaatctatatcttcaccatacataaagaagtcttcatccagtaatccggatttttccaatgcagaacggcgcagcaacatgaatgcacctgccaatacttccacccggtgaatggcatccgcatccaaagcattacaataatacccacctaaacctttagaacgggggaaaagttttcccaagccggacagtttaccaaaagtggctgccaaagtaggatatccacgctttgattcccgcagaaaacgtccgtcatccgtcaacattttcacaccggcagctccgacgcaaggatgcgtgtccataaacagaagcgcttcttccaaagtctgctccggcaataccgtatcaggattcagcaacagcacgtattctcccttcgcttgacgaatggcctggttattagcacgggcaaaaccaacattctccttattatatatataggtaatacgcgggaaacgttcggtaaggtatgcctccgaatcatcgacggacgcattatctactacaaaaatttcggctgaaagattgtcaatagccctgtataaggaacaaagacactgttccagataatactttacattgtaattgactatgacaacagagaatttcatgcttcctcctctttattgatatgcaattctttacgtaaacgtccttcgccgggcaagcagaacagcgaagccgtaagagcaataaaagcacaaagcaaacctttgttactcaatgttagataataaactgcaagacctacccataccggcagcgaaagcatagctacccgaactttactccagaaagaatataaacgtaaagcttcaggcaaactaactttatcaatcttccgcgtcagcacccaggcgaaaagtttcaaagaaaccggcacgcaagcagcaaccagcaaaatagacaaagtttctgcaaaataagtcgtacggacatcagcggcatatatacctacccaatctccaccggtttcacctactatgatccatatcaccggcagcaaccagaaactgataaatattacttttaaacgactcgcaacgtgttttatctgttcttccattctcttataaacaatagacttaataacaataatttaattcgttcccgtaaaaagcgtccggtttacaatactacgtcccagagtgacttcgtccgcatattccaactcatcgcccactgaaatgccacgggcaatcacacttagcttcacccccatcttttcaagcttacgataaatatagaagtttgttgtgtcaccttccatcgtagtgctgagtgccaggatcacctccttgattccaccggcagccacacgccgtacaagactttctatctgcaagtcacccggccctaccccgtccattggtgaaataacaccacccaagacgtgatatagtccacggaattgctgcgtcgcttccaccgccatgacatcgcggatattctctacaacacaaactgtagatgcatcccgctgcggattggcacaaatacggcaagtttccgtatctgaaatattgtggcaaaccctgcaatatttcacttcatgcttcagtgtaacaatagcgttaccaaaggcttctaccactgccgtatcttgtctcagaaggtgtagtaccaagcgcatagcagtcttccgccccactcctggcagtttggcaaactcgctcaccgccttctccaataatatcgaggaaaattgtccgttcatactaagaaatcaactattggcggcaaagataatgcaaattgagtgcagaactttcatgcaagcatgaaaaagttatgccaaaatgcagcttatcttcttaaaagataattagatttccacattccgaacatagatttttgaaataagtactacctttgcatacgcagaaaaaaagaaaaagagtaagaaactttctaaatttgacataaaaatggagattacaagcgctgaattcgtcattagtaacacagatgtgaaaaaatgtccccccggaatatttcctgaatatgcctttatcggacgttccaacgttggaaaatccagcctcatcaatatgctaacagggcgtaaaggacttgccatgacttccgccactccgggaaagactatgctcatcaatcatttccttattaataaaagctggtacatcgtcgatctacctggctatggttatgccagacgcggacaaaaaggaaaatcacaaatacagcgtatcatcgaagattatattctggaacgtgaacagatgaccaatctcttcttgctcattgactcacggcttgaaccacaagtcatcgatatcgaattcatgggatggctgggcgagcacggaatacctttctccattgtctttaccaaaggggataagctgaaaggcggtaggctgaacaccaatatccagcagtatctgaaaaaactaaaagagcaatgggaagaacttcccccttattttgtgacctcttctgagaacagaatgggcaaaaaagagttattagattatatagagagtattaataaagaattaaataccaaataaagtaatagtaaatatgaaaaagagtgtattttcactggcatttattgccaccttacttcttgtgtcggccaatagccaggcacaatcgctaaaagatttattcaacaaagaaaatgtagaaaaagtagtcagcgccgttaccggcaagaatactgttgatatgacaggtacatggtcgtataccggtgccgctatcgaattcgaatcagacaacctgttgatgaaagccggcggagccgttgctgctaccactgccgaagccaaactcaatgagcaactgagcaaagtgggtatcaaacccggacaaatgagttttaccttcaatgccgacagcactttcaatgctaaactgggaaccaaaactctgaacgggacttatatgtataacgctaccgaaaagcatgtaaccatgaagttcgtcagactgataaacatgaatgccaaagttaactgtacatccggcagcatggatttactgtttgagtcggacaaactactgaagctaatcactttcctttccagcaagagcagcaatgccacactgaaaacaatcagttcactagcaaacagttacgacggcatgatgctaggcttctcacttgagaagaaagaataaaacggaatatcaataaaaaagtcccgtaaacattatgtttacgggacttttttattctcaatggagcggaaaacgagactcgaactcgcgaccctaaccttggcaaggttatgctctaccaactgagctatttccgcattatgataatcgtgtgaagaggaggagactcgaactcccacaacatttctgtcactaccacctcaaagtagcgcgtctaccaattccgccacctctccatactatctcatactttcaaagaactaaaatttgcctcacctaatgtgcccagaacaggactcgaacctgcatgcctctcgacacacgcacctgaaacgtgcgcgtctaccaattccgccacctgggcattatcagtcatccagacaaaaacaaaaaaaatgagcggaaaacgagactcgaactcgcgaccctaaccttggcaaggttatgctctaccaactgagctatttccgcgtttgcggttgcaaaggtagatattttctccaaacctgcaaacattctacttatttttttcgcgaagaaaaatacacatttaccatacgaaagcggcaggcttttgattatcaactcattctgtcgcgataatcctcgtaagaaaattgcttgaaaatatcagctttcctctctttggtccacatagcaatagcaggatggtgaattccattgaacatatttgttttcaccatggtataatgtatcatgtcttcgaaaacaatacgctctccgatttgcaattcatggtcgaagctccagtcgcccatatagtcaccactcaaacatgaatttccacccaggcgatacacatgacaaccaccattatttcctatttcagcaccacgtacggcaggctggtaaggcatttcaagacagtcgggcatatgacaggtaaaactcacattaagaatggcagtacggataccacgacttactacaatatctactacttcagaaaccaatacgccggtttgccaagtaaaggcagaacctggttcaaggataatacgcaaatgaggataacgagcacgcaaatctttcagcagttgaataagatgctccacgtcataatctttacgcgtcatcagatgaccacctcccagattcaaccacttgatttgcggaaaccagcgagagaatttttcttccaaatgttttaatgtccgttccagttcataagatgaagattcgcaatgacaatgacaatggaaaccttcaataccttgcggcagcacctcagtcaataaatccgccgtcataccgaaacgggtgccgggagcacagggattataaagttccgtttccacttcggaatattccggattgatgcgaataccgcaagaaatgccacttccctctttcactacctctggataaaaacgacagaactgcgacaaagaattaaaagttatatgactactacaacgcatgatttcaggaaaatcagcttccgtataagcgggagaataagtatgtgccttactaccgaattcttccagtgccagacgtgcctcgtaaacagaacttgctgtagaatgctctatgtactccctaaatataggaaacgagcgccacatagcaaaagacttaaatgccagaatgatctctactccagcacggtcagcaacactttttatgagagtgaggttctttctcaacaattcttcatccatgatatagcacggagaaggaaaacaattgaaatctatcatattttcttttttaaccaatgatcttaaaacgggcaaagcgcaatagaagttgtttgtcgcccgcatttttgaagtgaatggtagctttggcattatcgccctgaccttccactttcatcacttctcccagaccgaaacgttcatgctcgatcagttgtcccggctgcacagccattacagaagcagaagtgggtgtagaagaagaggttgccggagtcacccgtttcagattgcgcggaacgcttggagctataatctgctgtttggaacgctgcggagtttctttttccgtattatacaatgattcacgaacatgaggtgagcgagagaaaccgccgctatgttccctacggaaagatccggcctcttcatcaattttactaccaatccctgcgtcctgaggcaagcggaggaagcggatgtcgatatctttcagaaaacgactggggctaccaaattccattttcccataacggaaacgagtacgtgcgtacgaaaggaaacaatgttcttctgcgcgagtgatagccacataaaacaaacgcctctcctcttccagcgcacggggagaatctccgaccataccactgggaaaaagattttcttccattcccaccacaaatacatttctaaattccaatcctttggcagaatgaacggtcataagcgttattttctcatcatccccattgtccgagtcctgatcagtcagcaatgatacttccgataaaaagtccgtcaatgaaatattcagattaccctcttccatgcgcaaagcacagaaatcgctcataccattcactaattcctcaatattctctttgcgactaagattttccggtgaattatcttggcagacgtcattaataatgccggactgacggatgatttccgtaccaatctcataggcatttttctccactgttccttctataaatccaccaatcaggtcacggaagatttgcaatttagagtgcgtgcctttattgaaattcaatccgtatgtcagcggttcacaaagcacagcccaaagactgatattgttttccgtagcagcagtaataattttacctactgtcgtatttccgataccacgggccggataattgataatacgcttgaatgcttcttcatcattaggattgaccaccagccggaagtaagctatcacatccttaatctctttacgctgatagaaggatagaccgccataaatgcgataaggcataccccgcttacgcatagcttcctcaaatacgcggctctgcgcattggtccgataaagtatggcaaaatccgaataggcataatgctccgaacggcgcaactcagcaatcttattgactacaatatctccttcttccacatcactatatgcctgaaacaccccgatggcttcccctttctccttttcagagaagacctccttgcgtatctgtctctcattcttttcaatcagactgttggcagcacagacaatagtttgcgtagaccgatagttctgttccagtttgaatactttcgtattgggatacacttttgtaaaatacaatatattgtcaatatctgctccccggaaagaatagatactctgcgcatcatcccctaccacacacacatgctgatgatcttttgccaactgcaacacaatgctgtgctgggcatagttggtatcttgatattcatctaccagaatgtagcgaaactgctcctgataacgtgccagtacttcgggatgatctctgaaaagaataaaagtataaaagagcaaatcatcaaaatccatggcatccgcctgcctgcaacgatcccaataacgatggtaaatatcccggatcgcaggcatcttggcagcacaatcaccttcataagcctccttattagaggcatatcccgcaggagaaaccaagtggttcttcgcattcgagatacgtgcctgcacactacccggtttatagactttctcatccagccccatttcttttatgatagagcgtaccagacttttactgtctgccgtatcatagatggtaaactgtgaggtaaaaccaatattcgcagcttccgcatgcagaatacgtagaaatatggagtggaacgtacccatccataaatggcgtgcccgttgatctcccacctgccgggcaatacgttctttcatttcacgggcagctttattagtaaaggtcaaagccaatatattccatggctgataaccattctccaacaaatatgctatcttgtaggtcagcacccgtgtctttccagaacctgcaccggctataaccaatgacggaccctcgttgtagagcactgcagcgcgctgtccttcattcaattcttcgatataattcgcattcatgtatgcaaaattaaaagaatctttttatatttgtacaatgttattcaaactaaaatcataagaaactatggaacaaattaaaaatatgcgactttacatttcttttatctgcctgttggccttctcatgtgcttcgcctgtaatggcgcaaaagcaaagtaaagtagaaaagctcttgaaatttcttgtaaacaatgagaatgagaaatttacaaaaaaccgggacaaattagatgctgaaacagcaacagcttttgaagcagaagtcaaactaatcgatttgtgcgatcaaatctggaatcagcaagaggtaaccgttgccaaagattttttccaggcttatgtagatgctaccaaagccaactttatttccatctgtcaggaagccggtgctgatccggccgcaatccgtaaacgtatggaagataacatcagtgccatattagatgaatatcccaataaattagtctattccagcactctggtagatgccgtaaaagcatcaggatatgaattgtccgacgaaagcagaaaacatctgtatgatgtacatgaagaggaattatggaaagatttcgtacgcaacaagaacattccgaaatgcgaaagatatctgactgaatatgctgatggtaagtataaaacagaagctatgatagaatacaatcgtctgctgttccaaaccgtacagaaatcaccatctgccagtaactttaagagattcttcgatcatgaccggctcaacacattcttcaacgggcgttccaagcgggagtctatggcacaggctctctccatttatgatgattatctttacggtaacatctgcaaagcgcaggccatagcttccattaagcaggctattgcagaatatgagcaggccccttatttgagtccagacgataaaaaatataccaatactctggagtacaaaaaagacagtattgactatgagacactaaagttggaagtgaactctccaagcaaactgggactcatcaaagaatacctcctaactcataaatacaaggaattccgtgataaagccaacaagttacgcgtaccttttgagcaacaattggtatggagtaatcctactaccatccaagcatacacccatggattattgatgaaatccaatgagacgaagaatggaaagagtactcagaaaacctatacgtatgatgaaaacggaagactggttagtatcaaggaagttacggaagataagggaaccactaccctacagactaatttcttgtatgattctcaaggtaactgcgtagaagaagtgcaggtaaaccaaagaggcatgaaggaggtgtacaaacgcctgcgtgctttcagcacactgggtgtcattctttcggattctgctttctatcagagcggaaaactgatcgtaagaaaatatcatccacaactcggtctgctggcaggagagacagtttacgagaaaaacattccggtatcttccgtaatcaaccaatataataagaagggacagatcatcaagagagaagagacattcccattgcctaaagatccgttacccacccaggtaagtaaacaagtggatgtatatgaatacgatacttatggttatctgacaaagatcacatttgaaaagactcttgtcaatagtgataagaccagtggttcactcatattcttgtatgacgaattcggtaaccaaatagacagtaatgcctattatgaatatgacagcaccggacgctggatacaaaaaacagatcggggagatgccaagaatacagaaaagattcagattatctatcaacaataaccataaaaaataccgtccgcataatgaaatacggacggtatttttatataatcactctattttatgataatcgttgcgcaatttcctgaatagaaaaagagccttccaaagtacgaacctgtatctttccatgcagcaagttaaagaagaaatcagctaccttctccggaataatttcacaaagctctccattcgcatcaactccgagatcataggttttcagcaattgacttcccaacgccgtagctcctatcaggaaatgatttctcaatttatccacattgaccagatccgcagccaacacctttcctactaccgaatagcaatgcaccagtaccttttcgtctccttcaaacagttgagattcttgttcgtcagaataggtattcatctctataatacctgtattttccatctcgggagttcctttataaagagcgcccaaatccgccagacttaaattgaacaggcgggcttcactcgtgacttgcatttcttcgccactgaatgcgctgggtaacagcaactttatatccccactaacagctacattcttcgcattgaaagttcccactatacagtctttcatggtcaacttagccgtagcaaaaactcctcccaatactatacagtcctccaatatcacctcatccgcaaaaatactgccggcaacgaaagcattgcacaattttacagtctttccgttgatgtcagccatgaacatcggacggcaatcacgagcatacgacaccagagaatccgaagtggctaccgtcttacgcaagataatatcccctttcgcattattgctgatatggaattcaagcttagtgaacaccgcaccaagtatttccacatctccattctgtatttccagcttgcgggcataaacagccccttctacaatggtatcgttctgtatcagcacatccctttccagttcagcagatgtacgggggagaatagaaccttttaccagattctcacttaaaatcactccattctccaaacttattactttcaattctttcataactctacttctattttatagaacataagtaacggtatttacgataaaaaattcccggcaagtttcctcatcattccggctacccgtttttcatgttctgaagaacctaatctttgaatctctctctccagatgctttccaatgcgctgcttatcttcttgtgtcatggcaggcatggacgcttgctgaacattctgacgtactttccagtcactgactcccatacgtgcagtctgttcattcatcacgacctcagtttctttactgccaccagcaacagtcttctctactactaccaccggcaacatccaacgggcatttttacatccgccaatcaacacatgttctatatgactggccaattgcttttgcccgagcagatattgcttggcactctctatcaatccggcagcccgctgcttcactgtgatagcagaaatacgtgcctgtacatccaactgctctttatgcccaactaatgccattgccgacagagatgagtccgtattgcgcaactgttccttgcggctgctttccacaaagcggaagcaaggttccatcaacatgtgaatacgctgcaccaactctctgtccaaattctcaaaaacagcggagtaacgggtagtcagaatatcatagtcgtctatcatcaccaacttacgattggcaagttcatcagactgagactgtaattcggcaactacggcttccacattcgagcactcttccatattttgcatatccagactggcagtgatatatcccaaaaagcctttggatatatgtttaccgatttgctgagtactggctatcttatgggcaacttcagctgcattacatgccacaacagagttacgcaagctttcaatatgtttactgcaatcgtgtacgctactgttataaggattgtcgtctatttccagatagatatcaatcggctcttccagaactacagtcttggaagctgacttatcacctacggtgagtgtcaccgtttcgctcttccggatcacatcatgtaagatatgtcttcgtcctcccataatcaaccctccttcacattaagccaggtttcattccgggccataagtttcttcatgttctccttcactctttcatttagatcggaagttgcaatcagtcgttccagctttccagccaccatccgttgcgattctatagaaacattttcccatccagaaccttcaaccgtgcgttccatattttcccgtatcttcgtgcatgagcgttgtccaattaattgttcaagtcctgaaggcagtttcgtttccaccacttctcctctatcttcttttttcaccagcatgatagcaggcaaatagcgaagaacagacttgccaacaaaggagttcagctttattctttgcattttagcgctttgctgcttgcatgtagtgagaaaattagtcatttgtgcaattaaagcttgcgcattacgcttaatatgggcggcggcaatagcttgtgtagtagccagagattccgtctgattaaccggaacggtaccaatcagattattcaggcggttcaaagtaatggcaacatcccactcacagaatcgaataacaggtttgtccaactcatgaacacgattatgcagagctacatcaagtcctcggaataacttagaatagcgctctgtcagaatcacaaagtcatctcccattctctttttcaaatcaagcaacgcctcttgttgctgtatcaattcggacgcatacgcatttaccgagcttaacgctgtggcatttttctgttctatctgagaagtaaccagagagaaaaagcctttattaagccgtttgcacagtttgttcgtagcatccctttcggcagcaataacagccgcctccatagcaaccactgctgttgtgaccccggagaccttattagatacagtatctattttattggccatgtcgcgggtatccactgtaacatcatattttgccataatctttcattttcaaatttatgaatgctatttctctttctccagatcgctaaagtcatccaaatcgtccagatcatccaagtcgtccaaatcactcagatcgtccaactcgtccgctgtctccgatgctttaggagtctcatgaacttccggagccgttgttgtctctgtattttccggaacttccggctgtacaggttccacagcttcagccaccggagccattctaatagttttttccgcttcttccgccacttcgggttgtgccaccggttcatccacgtttacggcttcagtcacttttgcgctttgaggagcatatcccgaatagtccatagcctcgctgtcatccactaattcagcatgatgattgaacacaacatcctgtccttgctcagcaatttcatgcaatgagtcggtagctacctgagctatatccaaagtcatatattcttccacacaatcctcaacagcaggagcaggtggaatattcgaagcaaatgcataaaaaggattgatgcctgccaaaggacggcgacgatcatccaacaaagctacattatcattagcatccacgatttcctttgccattttatcgcgaagactggcatcaaagaattcaatgaatccataaacttttgcccgttcattaatatcactctgcaaagctttcatatattccttgaactcttcctgagtttgtttgaatgattcagactgttcggcaaattgctgcaaattactttccagcttatctcctgcattctcctccaactcctgagcatctccatccatcatttgttgcaacatccgtgccttcatacgatccagacgttcaaaagtggattgtgcagcaaggaattttgtcaagttgctacgcataatattaatcaaatcatctccggaagtccggttacgcccataaaagtcttgagtttcccggtgccattgattcagataatcacgcttctgattatcaatgtcattatagatatccaaacggttcagtcgcgtttccgctaacagattctgtacgataggtgctacgatttcttcttgtatctggctgataccataaggcattgtcgtacggcttccgtcttctgcaacccacgaatgatccttcatatcatagcgcattcgtgaactttccttcaattggaaaggtgtgtagttctccaccgtatcgcggaagttgaaattcgtctggcggattttctccaactcatccttctccaacttcggtgaatagtgattataagaggttttcagaatggtgaacagcaattgattagaactttccaccagcgaattagtggatttaaccttcgctgccgcaattgtctgtactgcataccccacgtttgaaatcaaacggcgtaatacatcttcaaattgctcgctctggtcagacaatgaatggcgcattgcattcagcgaattaaattgctctatttctttatcatacgctgccgtatcaaatacattcagcacaggcgctcccgacggattggccgtaccatattcattcaaataagaaataaccggcgaatcgggaggaatgacaggcatgcctacagaaacagtatgcaagtccgacaagaagtaagcactgtcacgcagattacgatccatacgtccaaagtaatcatagaacttcactttaggtatagatgttgaataatcctctgtggaaacttcttccactcccttactttcttctaccaaaggggccgtagtggagagttcatccagttctctcaatttctcggaaagtgctccctggttattaactaattgcagttcaaagttctgtactgaactatttccggtatgatctatcacaaagctcttattctcgaaaggaacctgactggcaacggggacataaaccacccccatcttttcaatcttatagtctctgaaaatctgctgatgcttgttttccagttctttcaactccactccgacatcatcaatggatttaccgctggatttaaacagcttgtagtttttcatcccccaataaagaccggctactgcaatagcaatacttagccacccaattactgctatcaatgcaagaccgacaacaagaattccaattcctacgtacatctgcgtctgggcttttttcttacccgtagcattcatagtcaacgaattctttaattctcccatctccttttctaattcttcttcttgcgacactattttttctgccgcatctttataaaaatcaaaaaggattttcgcttgatcctgatacaaatcttgcgaagaagaaaaaacctttcctttcataaccagatatgtttttatagtaaataaataagaatttaatttctaattgtagcctaactccaacagcttacgctcggccattgaaaagcctttcgctttagctttccggtaccacataacagcttcgaagatatcgatatcaacgccttttcctgtttcatacatgatacccagacaatattgtgcttctgcatttccggcattggctaaagatttataaatatcgaatgctttcttgtaatcaccattctgcgttgcttcccgagctgcttccaaagagttagtctgagcttttttctctgttttctcaggttcggcctgttgttgaggttcattaacaggagtctttgcctccggctgggatttagatcgagattgttcttcaactttaggctgcttttgctgctctacagccttaaccggagtttcctcaggagtagcaacaggcgccacagtcgtggtatcctgcaccacagtaatagtgtcagcaaccacagccggaggtgcaacaactggcttaggtttggatgcaaacacaaaatacaaacagatcaaaaccaagatcagaaatatacagccacctactatatatatagattttctggatttcttttgaatagcaggggcttcttcttttctttccggatccggctgcttcacttcaggctctggcgattttatttccggttgatttgattcaacaacaaccggctcactttgcttcatttccggttcagcctgtataacttccggttcaacctgttttacatctgcttctgcaaattctggtttatcctcagtaggttctgattttgcttcaacaagttccggttttgcttcagtaggttcggaaacaacttcagcaggttcactctctaccgattctatttccggttctacttgttcgatctccggttccgtttgttctattgccggttcaaccaaatcatccgcaatctcagtatttttctcttctatctcttcaaggacttcttccggtttttcctcaatagcctttacttcctctggttgaccttcctcaatcaatgatatttccgctggaatatccagtacaatagtctcttgccctgactttctataaaatgcatctaaaataccccgaataatactaaagtaataaacttcctccttaaacagtgatggaaaattcaaatacaactgttcagccatcttccaatacaattctttatcagaagtattgtcacaagtatcaaacaaattattcgcttctttcaataaaggcaagaaacgtaaattgattcgaagcactttcagtctaagtacattcaggaaattcgcctcacataaatcagcatattcattcaggtacttcaccaatttaggcaccttttctgcataaggttttatttgaatacgcagcttgttgatagcctgttggcacacctcactatctgcctgaggcttcttgaagttttcagcaagtacagccagctccggagctattttctttagaataacatgttccacattcttctgaagggtagaccgcaaaagttgaaagcgttctgcatctttcaagtttaaaacaaacttctgagggaacagatctttcctgattgcctccagcatagccaccaatgaaacattatccatctccaaagcagcagcaatgctttcgcactcttttaaagtaaactttccactcttttcaataataacccgacggattttagttatctcatccaacaaatatgttctattcataataccaaattcataaaaagtctctaaaaatacatattattttcaccaaaacaactcttttcacgactttttcactcatatatgcctatttctcacggttttccgtgacaaactatattttactttggaaaaattaatagaatctgagagaacatttataagataccaaacgttatattaacaaaaccataattcaagacaaattatgaatacgttattaacatctttaatgcttataattatgactcacgaaatgccgaaacttccgtatgcaaataatgcattggaacctgtaatcagtcagcaaaccatagattttcactatggtaaacacttacagacatacgtaaataacctcaataacctggtaccgggtacagagtatgaaaacaaagatctagtgactatagtagccactgcaccggatggagcaattttcaataatgccggacaagtattaaatcataccctctacttcctgcaattttccccgaaacccgctcaaagcgagcctacaggaaaattagcagaagccatcaaacgcgactttggaagctttgacaacttcaagaaagaattcacagctgccgctgtaggattgttcggatcaggttgggcttggttatcagtagatgaaaatggtaaattacatattaccaaagaagccaatggcagtaaccctgtacgttcaggatttacccccttgctaggctttgatgtttgggaacactcctactatctcgattaccaaaatcgccgtgccgatcatgtaaatgctctttggggtatcattgattggaatgtagtaggcagccggatgaaataacaacaacatcataaactctttttcaaaaaaacgcacctgcgggaattatcagtcccaaaggtgcgttttgcatatcctatctaacatattttaaagaaaaacgttggctactgaaagcttttatcattaactttgctaacataaacgtttatcaaaagaaatgaagctcattgtagtcacagcacccacattttttgtggaagaagacaagattatcacggcactctttgaagaggggttggatattctacatctgcgaaaaccggaaacacctgcaatgtattccgagcgactcttaacgttgataccagaaaaatatcacaggcgtatcgtcactcatgagcacttttatctaaaagaagaattcgacctcatgggcattcacttaaatacgcgcaatccacatgaaccgcatgactattcagggcatgtcagttatacctgccattctgtagaagaagtaaaaagtaaaaaacatttttacgactatgtattcatgagtcccgtttatgactgcatatccaaggaaggaattctttccggctacacacccgaagaattgcgtgcggcaggaaaagaaagaatcatcgatactaaagtcatggctttaggtggaattactcccgacaatattctggaaataaaagattttggattcggaggtgcggtagtactcggtgatttatggaacaaatttaatgtctgtacagaccgggattatctgggcgtaatccgccactttaagaaactaaaagaaatggcggattaaaaagttaaaaaaacatctatattaaaatttcccatattccctatactctgcactggcaggtaaagtaaagtagaaagtagatccctccc

SEQ ID NO: 6481 - DNA, 962 bp, Unknown
  gut microbiota DNA sequence
ctgaggtgtcataccagtttctttcttaatcatgtcaccgaaataattgggtgagagatagattttatccgcaaagtatttcacagacggcaagccatcctgcacaggaagattgcttctgaaatattcatccagaagttgctcaaacttggtaagagagtctttattggcgccgctccgggtgatgaactggcgttcatagaaccgcatacagtaattgagcagaagctcgatattcatagcaatcaatgctttactatgcttatcgataggatgctccagctcgatactgatctttttcaggcaatccatcacagtctctttttcctgatcggacaggtgcaaagcctcgcttactgaataagagaagaaagtataattctttattgtctttccgagggaggttccacggatcaggtcgggatgaaagagaatgccgtacacttcttgctgcactacatcattcagcatctctactccggcagtctgaccgggagcaaagcaaacgatggttccttcctgatagtcataatgctggcgaccatacttgatatcacagttcttagctcctttcagaaagagtgcataaaggccataagtcatttggatatgattgaccgatttggttgctttggtaagatccaccacactcaccagaggatgcagggtttccaatccgtagagactgttatagtgatctacattatctaattttataactctatccatattcataagtatttgaactgcaacaaagatagaaattatttcaattgagaaatcaggtatctgtaattggggttatcatatccgtaataagggtacaaatttcgagatacagcttcaaaacaaagacaacattcgcatatcatccaaagctttcggctgatattttatctcactgaatactcccgtaaagccgtcgccacgagaaccgtgtgccgcgaaacctactttaatct

SEQ ID NO: 6482 - DNA, 221 bp, Unknown
  gut microbiota DNA sequence
ggtgtaacggagacaggtcataatacaataaagaagatcaaagagttatctacgcaaattgacgcaaatgaacgcaaaaatcacaggaagcgggttgaagagatttattttccatatatttgcgcagtgacagaaacaagtaattaaaaacacgatatcatgggaattatcaaccagggcattctcggaggtttctccggtaaagtgggaccgatagtagg

SEQ ID NO: 6483 - DNA, 251 bp, Unknown
  gut microbiota DNA sequence
ttcgtgggcgcttatgtgatgcgccataccagtgaaccggtttcggtggctttttatcagcttttcatgtacattggcatcatcactacctcatttgtgaatggtttcttgttgcgacatgtgagtgtgaagatgctgtatgcaggagggatattagttagtggattgtcgatgtttgccattatgctggtaaagtcattaggctttgtggaattgggtatagcaggatttgtacttggagctgcatcggg

SEQ ID NO: 6484 - DNA, 3378 bp, Unknown
  gut microbiota DNA sequence
ggttccggcggatatgttatccgccggtgcaagagtatgaggattttaaatccgagctgtcatggggataagccgggatcttgcggattataaatcctgatactcgggacaatcggattacaaatccgattgaacggtaatccgattgaacggtgtaagggttgaacggtgtcatggcacggggtaatgatattcgtagttcccgggctcatccgtttcgtaagggtcgttccagtcgataccttctttgaggccgcagtagatgttcttccaggtgatgccggcgttctgagcccaggcgatgtaggtggcttggttggctttgaacagggtttcgctgacatcacgcaggaagaggttggtgagaacggcggcatcttcgaaggcagagctgtcaacgcttggaagcatgggagcgtcagggctgacgttggggtcatagccgctgaggatgacgctttcaagttggttgcaaccagcgaatgttcttgctcctatgctcgtcaccccttgcggcagactgatgcttgtcaaggatgtgcagtaatagaatgcttcatctcctatatttgccaggctttgcggcaagctgatacttgccagcggtgtgccggtaaatgcgctttgtcctatacttatcagtccttgcggcaggccgatgcttatgagggatgtgcagtcggtgaatgccatttctcctatacttgtcactccttgcggcaggctgatgcttgtaagggattcgcaaaggtagaatgtttcttctcctatgctttccagtccttgcggcaggttgatgtttgacagggaggtgcagttggtgaatgcacggcttcctatgcttttcagtccttgcggcaggttgatgtttgacagggcttggcaactgttgaatgcacctgttcctatgctttccagtccttgcggcaggccgatgcttatgagggatgtgcattcgttgaatgctgctactcctatgcttttcagtccttgtggcagactgatgttttccaggtagtaactgtggaagaatgcattttcttctatgcttgtcacccccgttgccagaatacataaatccgtaatccagttactttttgcaaatgctgccagcttttccatgtccgcattattcatctttcccgtgattgcgatcttcttctttgctcctacactgtttgtcagccattcttcactcatatttcctgccgttgcctccaccacagctacgtccacattgctgttatccacatccactatctgcacctgttctcccgctttcagaccatcactgctgacattcgacttcttagccttgctgtctgtcaggtagctgatttccgttgcgccgggcaatatgtatgcgccgtacatcagtcccgcatccttgtacatctccatcacggattttccggcttctccgttctccgtcgtggggctgagggcgtttacctgtcgcagcgttatccggcttgcatcgctcactatctgtacacgcaccaggggacatccgaggttcaaactgatggggacgtcacgtcggggcgtttgcgcagttgcgattggcgtgatgcgcagttgtccccattcttcgtaactgtccgctgtccaagcggtgggcaggtagatggcgggggtgaagccgatgattttaccggcatctgtggcgtctgtcaggatgttcgcgttgggcgtgtcggtggcggggctgatggcgtagaaacgatgctcatcgccggaagattgccagcatagcggatcgctgcccggttggagttgccaggaggctgtagtggtggagggagcgcccggggtggcggcggaggtgtagacgtagtttgcgtggtggcatactgtggctccgtccgtgcccgtggggctgaacatgaatacggtcatggttcgcccttccacgaggaagttcccggtgtcgttggtgagggtgcgggtatcggcgttggcgtcggtggtggcactgttggcggttattgcgatgttgcctatctgtatcggttgtccggtcaggtcttccgttgcggcgggggtgtcgggggcttcggggaggggaagctcgtcggtgaagcccgcgcacgacgcgacgcacataccgagcacgacggcgcagaggaaggatcggagggaggagtaaggagccataaatataagtattaaatagttacgagttacaagttacaagctacgagtgcctttcgggatcatagttacgagctacgagctacaagttacaagctacaagtgcctttcggaatcatagcgcagctactcgtagcttgtagcttgtaactcgtagctaattcacacattttcacagagggtcctcggggttaggctaagtagggtcatactttgcggttaaagtaggggtatactttgcggttaaagtatgggtatacttggtccggcacgaggagggggcttccgaagggctgttttcgtccttcgttctattgttcttgcttgccgcttttatcccagcgggttctcgtccagacctccgccgcctccctggccgcctccctgactgcctccaccaccttcaccttcgggttgctggtaggctgaccctacgccgaggggtgtatccatctggtaggtacggggtgcttttacggtgccgcctccgctgctgtattgggtggtgacgcttacgttccacagtccgtcggtcacttcggcggggaggacgaagatgaggcgcttgggttcgtttacggtgacgtcctccatgggcacgaatactttcttggagggtgtatccacggaggtgaaggtgacgccgacggtggggtcggtgcctgccagtttgatgtttcttccggtgagtccgatgtttttgccgggttgcggggcgcgggtggtggtggtgccgttggcggagcgggtctgagcttgggcgccgttcagcagcgggcctaccacggcgggctgggtgaatatttcgagttggcactcgttcatggactggcgcaggcgcgagcccatgctgaggctggcgtagactttcactttgtcacggtcgggcgcttgggagaggtcggtacggagcacggtgccgctggctccgggttgcatcagtgcggtgggggtggatacgatgtaaccgctgctcagtgcgtcgcacttcacttcttcggcggcgttgaggagggtgtagacttcgtcttcgttctttcccaggcggagggctgtttcacgggccacggcgtgcaggtcgatggtttggggcatggttttgacgcggaggtagtagtcgtccgtgcgttcggtcagcgcggcgtcgtaggccatgaggctgatcagtttggtaaaacttgtcgttgacattgttttcttaatttaagtaattaatataattag

SEQ ID NO: 6485 - DNA, 323 bp, Unknown
  gut microbiota DNA sequence
ccgaagccatggtgtccttggatgcgatgaatggttaaatttccaatagctttatctttttcaatgctttctacatttgtaaaaccatcctgtgtaatactctctttatcttgcggttgtgtcaggaacaggatgttcttcgctaaatgctgtttcactgtcgggtcgtaatggtcaatatggttgtgtgtcaacaataccatatccagaccgtccgcaatttcattcatcggcatcgtgaggtgtactcttggggtcttatacacacctagagccgactgtaaagtgccttttccggcaagcatggggtcaacaagtatctc

SEQ ID NO: 6486 - DNA, 7745 bp, Unknown
  gut microbiota DNA sequence
taaagtatgtactgatagtagtatttgtttattactacgtaggaaacacagcctttgtccatacacatgtagtcgataattttctcgtaactcactcccacccttatctgccgggcacacaccattcgcacacggaggcacagtgggaaaccgtctcttggttcaatttattatgcctggacagttcgcatgagttaccgatagttccctttattttatttttcctaagtttcatcttcttgttgcatggagcaaaccggattgttcgcacgacccggtctttccatttacgttctccaccctgtcatgtatgccgagaacagattttgttatttaagtttcgtatgtagcctgaaaggcagagcatatgcgaaaccttaatctgttattcccaaaatacatgaagaaaaacgagttcttatcataacgacaaagaaatgaaatacatatatttattgtgcctgaccggcatgatgtgctatgcctgtaccggtcagcaaaaagaacaggaaaacccggaattttctgtctcaggagatactattgtggtatcttcggaatcccccatcgccaagaaactgaaaataagcgaagttcagaaagaattgcatgaaacgacattcacagtttcgggcatcgtgaaagccatccccaatcattatgcagaaatagcctctccgtttgcaggacgggtgacgcgttcctttatccgtctgggacaaaaagtggataaaggcagtcccctgtttgaaatcagttcgcccgacttctttgaaaccggaaaagtctactaccaggcaaagcaggaaatggaactggcttccaagaatctgcgccgcgaacaggacttgtatgcacacaaagtaagtgcgcaaaaagaagtggaagaagccgaagtgaactatgaattgaaaaagaaagattatgaaaatgcattggctgccctgaaagtattccagatagaaccggatcagttagtactgggtcagcctatgattgtacgttcacccatttccggtgaaatagtgaagaataacattgtaatcgggcaattcatgaaagacgatgccgacccggtagccgtggtagccgatctgaatgaagtatgggtagctgccaatgtgaaagaaaaggatatgtccctgctctcttcactgaaaaaggtggaaatatctctggtatcgcaatcgaaccagaccttcagcggtacaatctaccatatcaacgaaatgctggatgaagatacgcgttcggtagaagtattagtggcatgcgataataaagagcgactgatgaagcctgccatgtatgccactgtgaaactgactgacgaacctgctgaaagcattctgatcccgacttccgccattttgcaggaagaagaacaggcgtatgtactggtctcttcgggcaacaataaattcctgaaacggaaagtggaaacttctgttacggatggtgacaagagtgtcatcacttccggcctgcaatccggagaaaagtatgtttcggacggtgctttctatctgctgaacgccaactaaacaccggatttacagagtatgaagaagttgatttttctggcgatacatcgtcgaggactgatgttcgtattgtttgccttcattgccgtggtggggtactattcatggacaagactggcaatagacgcttatccggatattgcggataccaccgtacagattgtgacacaagtgccgggactggctgccgaagagatagaacagcaaatcacaattcccattgaacgggccgtaaacggtctgccgggactgaacgtgatgcgaagcaaaaacaccttcggactgagcaccgtggtactggtgtttgatgacggaattgatgactactgggcacgccagcgtgtgcaggagcgcctggtagatgtagaattaccttatggtgccgtaccggggctgaatcccctgacctcacctaccggagagatattccgctacgtcattgaaagcgataatctggacctgcgtgagatcaccgatttgcataaatgggtgattattccccgactgaaacaagtgacaggcgtagccgatgtaagtaactatggtggcatcactacccagtatcagatcgaactgaatccacgtaagatggaagagtacgatatatccctttctgacgtgaccgaaaaagttgaaatgaacaatgtgaacgccggaggaagtatgttgagccggggtgatttgagttacgtgattcgcggtatcggtctggtgaaggatttgaaggacttaggacgtatcgttatcaaaacggataatggagtacctgtgtatctggatgatatcggaaagttgaaatatggcagcctggagcgcaagggcgtactgggcttttatgatggcaaacgtaatttctctgacggcgtagaaggcatcgtgcaaatgttgcgcggtcagaatccctcgcaagtgctcgaaggagtacatgccgctattgacgaactgaataacgaagtactgcccaaaggcacacacatccatccttttatggatcgcacgaacctggtagatatgaccttacacacagtttcgcatacactgtttatgggtatgatcctggtgatattggtactgattctctttttaggaagctggcggggtgcattgctcgttgccgtcactattcccctatcgctgctgatagcttttatcctgatgcacgtgacggatatacctgccaacctgctttcattgggagccattgacttcggtatccttgtagacggttctatcgtgatgatggaaacgattctgaagaagcgtgaacggcatcccgatgaagtattggaagaagattccatcttacgacgtacaacggaagtcgcccgccctatcttcttctctatccttattattataaccgcttatttgcccctgtttgccttcgaacatatcgagaagaaattgtttacaccgatggcatatacagtgggatatgcactgataggcgctctgtgtgtagcattgtttctaattccgggactggcatatatggcttaccgtaagcctcggaaagtatatcataaccgttggttggaaaaattgcagatgctgtatcacgcacaagtggttcgtgtaattgactgcccgaaagccgtattgggagtattggcaggaatcctggttttagcaggtgttttgagctatacggtgggaaaagatttccttcctcccttagacgaaggggctatctggattcaggtacaattgcctccgggtatctctatcgagcgttccaaagagatgggagctgaattaagaaataagttggggcagtttccggaagtgtcgtacgtaatgacacaggtgggacgtgacgatgaaggtgcagaagccttttctctttcgcacatcgagtgcggtgtaggattgaaaccttacgatagctggactacaggacgcaataaagccaagctgattgaagcgatgaatgatacgctcatgaccatgccgggatattcggtaggtttctcccagccgattattgacatggtgatggaccagatagcaggtgcgcacagtgatcttgcactgaagatatacggggaagatatcacggaaacgcgtcatattgccgataaggttgtcaatgtcatcaagcagataccgggcgcgacggatgttgccgtagatcaggaacctccccttccccaacttcagattatagcagaccgtgaccgtattgcccaatacggattgaatgtctcggatgtggccgatctgatagaactcgccattggcggcaaggccatttcgcaaatctttgtaggtagcaagtcgtatgacgtcatctgccgtttcagcgaagagacgcgcaatacaccggaacgcatcggaaacctgatgctgacttcgggcacaggtgccaagataccattgagccaggttgcggaaatcaaactgaccacaggggcaagcaccatttcacgcgagatgaataagcgccaccttacaatccgcgtcaatctgcgtggtatcgacctgacttctttcttgcagaaagcgaacaggatgattgatgaccaagtgaaatacaatcacgaagattttcatctgaaatgggcgggacagtttgaaaaccagcatcgtgcatacaatcgtttgggcgtggtagttccgttggcattgggcattatgttactgttattgtttgccgccctcggcaaattccggcaagcggctttattgatgtgtatcattccgctggcactcttcggaggtatgcttgcactgaatgtacggggaatgacgctgaatgtatcttctgctgtaggcttcatcgcactgattggtgtagctattcagaatggagtgattatgatttcgcatatcaataatttgcgcgaacgggggcgcgacttgcgcgatgctgtggttaccggcgtgcgccatcgtttccgtcctattctgatgacggctactgttgctgtgctgggtttgcttccggcatccttgagtacgggaattggttccgatgtacagcgtccgctggcaacggttattgtatacggattgctgtttgctactgtggtgacactgtatattctccccactttatattatatgatggaaaaaaaggaagataaaaaggatgaaaatgaaaagatataatattgcgttgtttacccttattgtttgtgcctgttcagtgcaggcacagactgtagaaccgattacttataagcagtatatgcataaagtaagtgccgacaatctggaatatgcagcggagaagatgaatgtcagcgccacacatgcagatgtgatagctgccaaagtatttgatgatccgtcgctctcttttacttattccaacaatgaagaccacactttgcaaatgggtcaaagctatgaactggaactttcgcagaacgtaactttaggaagacgtacagccggcatcaagttggcacgcagccagaatgaactggcggagattgtgctggatgattatttccggaatttacaggcggacgccaccattgcttatctggaagtaatgaagcaaaaacaactcagtgacatcaagagaagtgcatggagcaatatgtacgacttggcgaaatccgatagtatccgtctggcatccggcaagattatggaggtggaagcgatacaaagcaggctggaagcggatatcatgtataacgaggtgctgcaagctgagacggacttaaagcaggcatatatgcaactgtccctttttgtcggaaccacagttacagatacgctgtttcatccagtggaagaactgaaaaagccggaacaggtatttgtgctgaacggattgattgagggagctatagaacatcgctccgatttgctggcagctttgaagaatacggaggttgcacgccgtgaactgattctggctaagcgtgaaaagcgtcctgatgtggagttttcattaggatggagccataataagcgcgtacgcaatgaagaagcacctgccccggcattcaatggagtcagtgcgggaattgcgattcctttaaacttctcttctctgaacagaggtgcggtcaatgccgcccatttccgtgcccgccaggcagaattgcaatatgagcaaatgtgcttgcaggtacaacgggaagttatgggagcctatcagcaattccaatcgcaggcacttcaagtgaaacattatgaaggcggaattctgaaacaggcgcaggatgtacttgaagggaaaatatacagttataaccggggtgaagtttccctgctggaaatactgaatgcacaacgcacgtatgatgaagttcaggcgcaatatatagaaacgctgtttaattataatgcggcactcgttgagctggaacgcagctgcggaatttgggatataaagggataaattgttgataatacaaatggcactatagagtctatttcttctcctcgaactcttcatagagagctatcggaccgtagtgccataattttgtttcttctttttctaaggccttataagtgtttgacctgtagaaaatacgaatggcatccagcaaagttactcccttttcttctgcgtaaattttagcaaaaaggctcacctttccgggcaatagcaaatagagatttttatcagttatttctctattcataaaattatctcctttacttcaatgtatttcaaatatttcaatgatttatctgtatggaatagcatttgatctaccagtttataggttttcaactctttaataagtccttctttatctaaaagttcgctttcatatagagcaaaggctgcataaaccctgtcattagctactggtccgtaaaccaaatcatgattatgttcaaaatttcttaatgtacgatttgacataacaaaatctacccattcttctgtaggttcatcaaaccacaaaatattcatttcggacatgctggcattatccatttcatagacattgatataacctacatttgcttgagctgtcatgcgtctcctcacccactgctctgcttgttcgtatgaggtcgtagtatagaaaccggtaccataatcaagcgttcttgtaggcttaatgattcgaggttcttgcactatttccaaacttccatggtatagtttcatcctattcctcctttttttgctgaataaagtcatcaatttcttctaacaaccattgacgactttgtgtatgcaaaatctcaaagttgtcagacaagtactctgtcaccccgtatttgtcaaataagtccataacttcattgccattagctgaaatatgaactttatactgttcaatacagaatgaaataaagtaagctatatccaattctttttttaccattcctacttcttttagtgctcgaaaatacgatttttatcagaaagatacaacctctttctgtttttttcatttttagttcacataagtcacttctcccgtatttcaagtcgcgtactctgctgttatctcaggatatcgcatttcttgtatgaattcttaaaatgagagtatgtgattgtcacaatatcctctttttttcgtatcattgcaaacataattttctaaagaacatactattatgaaaactaaacttttattatttgccgtatttctattggtgtgcagcactgcattcagtcaggaaagtgataatgcgaagtacattgaagttaccggaacttcggaaataacccttgtgcccgacgagattcattatcttatcgagattaaagaatattgggaagaggaatttgacggaaagtctaaaccggagaattatcggactaaagtgccattggtaggaatagagcgaaatttgagaactgccttgcgaaagatcgggattccggaagacgccatccgtacacaagaagtaggcgactattggcgtgaacgcggacttgaattcctggtatccaaacggtttgatattacattgaccgattttagtcagatagatgagattctaaaggttatcgacacgaaaggtgtcaactacatgcgtatcggagaactgaaaaacaaggatatgcaggtctatcggcaacaaggcaaaatagaggcactgaaagccgcacaaaagaaagctgaatatttggtggaagcattaggcaaacgcctgggagatgtcattcgcattgtcgaaccgcaggaaagtgcaggttattcccggtattttgcagcccagagcaatgtaagttcatcacaggcagaagcttacgatgctttccgt

SEQ ID NO: 6487 - DNA, 295 bp, Unknown
  gut microbiota DNA sequence
tgatttattatttgattacttctataagatccggatgaatggtagcaagcgcaacggcaataacaccttgtatctcgataactacacggcgatcacgtgcgccttttactttcacgaaaatgccttcctgcccctcgaagtcaccgcccgtgatacgaactttcgtacctttagatagattcagttcatcaggttggaagtacataagatggtcattgtaagtaccggctactgcaataaagcgttgcatctcactgtcggagataatgattttctgaccgctacgggtatccgt

SEQ ID NO: 6488 - DNA, 945 bp, Unknown
  gut microbiota DNA sequence
gaacgcccgtatggtaaatcgtttatacgataaggataaccttccgcttgagcaaacgcagctacttcctgttccaagacctgccagtaatcttttcgttttttgttgtagatatcatcatacaaggctacaagctccggatgcttttcccgtatataccccatgatgtctctcttaaattgtccacgaagattcagattttccagccatatcaaatctgcataatcttttaccctattaacgatagctttcacatctgtaattcctggaaaaatcggtgaaataaaacacacggtgcgtatgcctgcattataaatctgtttcatggctttaagtcttcgctcaatgcttacggcacgatccatatcacatctgaattgttcatcgagtgtgttaactgaccaagatactgtcactttctgaaagcctttaagtaaatcaatatcacgcaaaaccaaatctgacttagtacaaatcatgatttcagcattagtgccttttaactcttccagcagtttacgggttctgcaaaaatcttcttcatacggatggtatccgtctgttactgaaccgataacaatccgttgtccatcatatttatgcggattatcaataggtttccagtgctttacgtccagaaacgtaccccaaggctctgtatgccctgtaaaacgtttcatgaatgaagcatagcagtacttacaagcatgaggacaacctacataaggattgacagagaagccccctactggtaatgaggatttagtcatgacattctgtacatctatttctctgattatttccttttccatattctttctataaattgttttggtagttcttgaatcattcggtattctcccattataggcaaaaggttttctttcataaataccaaaatgtgatttcttttcgcctgttctacaatatgacgtactcattcag

SEQ ID NO: 6489 - DNA, 19727 bp, Unknown
  gut microbiota DNA sequence
gtaagaactatttgaaccgagtagtaattctggaataagatatagggacaaagagttgtaaactctaaacaagagagggggcttaacatgagttaggcctccttttttgttattatgacagcagatgcgtcaaatatcaaattttaatcgtaattttgtagcccattatgagtagaatattagcgattgattacggtaaaaagcgtacggggatagccgtcagcgatatgttgcaaatgattgctaacgggttgacaactgtacctacacatgaactgttgacgttcatccttgattatgtaggaaaagaaccggtggaacgcattcttgtagggcttcctaaacaaatgaacaatgaagcttcggaaaatatgaagcgaatagagccttttgttcgtttgttgaagaaaaaattgccggcaatgcctgttgagtatgttgacgagcgttttacttctgttttggcacatcgtactatgctggaggctgggctgaagaaaaaagatcgacagaataaagctttggtagatgaaatcagtgcgactattatcctacaaagttatttggagaataaacgttttgccttataataataaggtatatatacttatatataatagtgatttaataatttgtaattagataaacaatgattttacccatttacgtgtacgggcagcccgtattgagaaaagtggcggaagatattactcccgactatcctggtttgaaagagttaatagcgaatatgtttgaaacgatggaccatgcagaaggtgtgggacttgctgctccacaaattggacttcctattcgtgttgtagtggtagatttggatgtactgtctgaagattatccggaatataagaattttcggaaagcatatatcaatcctcatatccttgaagtatctggtgaagaaatatctatggaagaagggtgtttgagtcttcctggtatccatgagtctgtgaaacgtggtaatagaattcatgttacatatatggatgaagatatggtagagcatgatgaggttgttgaaggttatctggcgcgtgtgatgcaacatgaatttgatcatttggagggaaagatgtttattgatcacttgtctcccctacgtaaacaaatgattaagggaaaactgaatgcgatgttgaagggcaaagctcattgcacgtataaagtgaaaactgtgaaataagccaatcttataatatggtataaaaggctcaaaaaatataaaaagtcttccgctaatcctgctaggtaaatgaaaagcattaaatttgtttcgtttacaagcatttataagacaagatgataaaaaagatactgacggctttcctgttgcttccaacgttgctgtgtgcgcagatcaatacggagcgggtgatgacaatcgcgcgcaatgcattgtattttgaagactatgtgctttctatccagtatttcaaccaggtaattaacgctaagccttatttatatgagccttacttctttcgtggtttggcaaagattaatctggatgattttcaaggtgcggaagcggactgtaatgctgctatccaacgtaatccttttgtggtaggcgcttatcaaatacgtgggttggctcgtattcggcagaataattatgacggagccatagaggattataagacagccttgaaatatgatccggaaaatcttgtcttgtggcataatctttctctttgccacatgcagaaggaggactatggagcagctaaagaggatctgggaaaattgttgaaaatagcgcccagatacactcgtgcttatctgatgcgtggtgaagtatcactgaagcagaaagatacgatacaggccttgaatgattttgaaaaggcgattgaaatggatcgctatgatcctgacgggtggggagcacgcgctattgtccgtctgcagcaaggaaagtatgcggatgctgaagctgacttggatcattctattcatttgagtgcaaagaatgcaggtaattatattaatcgtgcattggctcgttttcatcagaataatttgagaggtgccatgagtgattatgatctggcattggatattgatccgaataacttcctcggacactataaccgtggcttgctccgtgctcaggtgggtgatgataaccgtgcaatagaagactttgatttcgttctgcagatagagccggataatatgatggcaaccttcaaccgtggtttgctacgtgcacagaccggaaattatcgtggtgcaatcagtgattattcgagagtgattgatgaataccccaactttatggcaggatattatcatcgtgctgaagctcgtaagaagatcggtgatcgtaagggggctgaacaggatgaattcaaactcatgaagatgcagattgacaaacgtaacggagttacagcagataataaggatgtcgcggataataatgctcaggatggtgaggataagagcaagacgcgtaagaagtccgataagaatatggacaattaccggaagattgtgattgctgacgactctgagcaggatgagaagtataagagtgattaccgcggacgtgtacaagaccggaatgtatctatcaagatggagccgatgtatgcgctgacctattatgagaaattaagcgaggtaaaacgtatcgtccatttccataagtatatcgaggagttgaatcattctaaattgttcccgaagcctttgcgtatcaccaatatggaagctccgttgacggaagaacaagtgagattccattttgctttggtcgactcgcatacctcggatattgttgcagatgacaaagatgccaagaaacgtttcttacgtgggcttgacttctatttggtccaagactttgccagctccattgatgactttacgcaggcgattttgttggatgataaattcttcccggcttatttcatgcgagcattggtgcgctacaaacagctggaatataaaaaagcggaagctgagttaactgaaggtgttcccggagcttcttccgatagtaagaaacaaccagaagtaacgtcaatagattatgatattgtgaaaaatgatttggatcatgtcatccaattggctcctgattttgtttatggctattataaccgcgccaatgtattatcaatgttgaaagattaccgtggggcattagaggattataataaggctatcgaattgaacaaagactttgctgaagcttatttcaaccgtggtttgactcatatcttcttgggtaacaacaagcagggaattacagatctgagtaaggcgggtgaattgggtatcgtatcagcttataatattataaagagatttaccgatacgcgtgaataacatttttttgctaaaaaataaaatatcaaaaaagaattagctatttttgcgttctgaaaattgaaatatacacaacattatgataaagataacatttccagacggctccgtacgtgagtataacgaaggagtaacgggactgcagattgcagaaagtatcagttcacgcctggcacaggaggtgctggcatgtggcgtgaacggtgagatttatgatttgggacgtcctatcaatgaggatgctgagtttgttctctataaatgggaagatgagcagggtaaacacgctttctggcataccagtgctcacttgctggccgaagctttacaggaattgtatccgggtattcagttcggtattggtcctgctatcgaaaacggtttctattatgatgtggatccgggggaagctgtcattaaagaatctgaccttccggctattgaagccaagatggcagaattagtggcgaagaaggaagctgttgtaagagaaagtatttcaaaaacggatgcattgaagaaattcggtgaccgtggtgagaactataagtgtgagttgatctccgaattggaggatggtcgtataacaacttatacacaaggtgctttcacggatttatgccgtggtccacatttgatgactaccgcgccgatcaaggctattaagttgatgtcggtggctggtgcatattggcgtggacatgaggatcgtaagatgatgacgcgtatttatggtatcacattcccgaaaaagaaaatgttggatgaatatctggctatgctggaagaagccaagaagcgtgatcatcgtaagatcggtaaggaaatggatttatttatgttctccgacacagtgggtaaaggactaccgatgtggttgccgaaggggactgcgttgcgcttgcgtctgcaggaattcttgcgtcgtatccaggcacgttacgattatcaggaggttatcactcccccgatcggtaacaagttgttgtatatcacttccggccactatgcaaaatatggtaaagattcgttccagcctattcatacgcccgaagaaggagaggagtacttcttgaaaccgatgaattgtcctcatcactgtatgatttataagaattctccgcgttcatataaagatctgcctttgcgcctggctgagtttggtacggtttgtcgttatgagcaaagtggtgaattacatggattaacgcgtgtacgtagttttacgcaggatgatgcacatatcttctgccgtcccgatcaggtgaaggatgaattcttgcgtgtgatggatattatttcaatcgtattccgttccatggactttgccaatgtggaggctcagatttccttgcgtgacaaagtgaatcgtgaaaaatatattggtagcgatgaaaactgggaaagagctgaacaatctatcattgaggcttgtgaagaaaagggcttgagtgccagaattgagtatggtgaagctgctttctatggtccgaagttggattttatggtgaaagatgctatcggccgccgttggcagttgggtaccattcaggtggactataacttgccggagcgttttgaattggaatatacaggcgctgataatcagaaacatcgtccggtaatgatacaccgtgcgccgtttggttctatggagcgttttgttgctgtgcttattgagcatacggctggtaaattcccattgtggctgactcctgaacaggtggctattctgcccatcagcgaaaaattcaatgactacgcacaagaagtgaagaagttcttgaaacaatacgatattcgtgcaattgtggatgagcgtaacgagaagataggacgtaagattcgcgataacgaattgaagcgtattccttacatgttgattgtgggtgaaaaagaagctgaaaatagagaagtttccgtccgcaagcaaggggaaggcgataagggtaccatgaaatttgaagaatttgctaaaattttgaacgaagaagttcagaatatgataaataaatggtatctttgcgcccacttataaaagcatagcatatagtgatgttttgaagatagcttttatctaacttaaaaaataataatttgggagtaataaataagaaacaaactggaaatagaggttatttaatgaaaaatgacagcttaaaagggcaatatcggattaatgagcaaatccgtgccaaagaagtccgcatagtgggcgatgaagtagaaccaaacgtatatccgatagctcaggcattaaagcttgccgaagagcgtgaggtggatctcgtggaaatctctccaaacgcgcaaccccctgtttgtcgaatcgttgattactctaaatttctttatcagctgaagaagcgtcagaaggaacagaaggcaaagcaggttaaagtaaatgtgaaggagattcgtttcggtccacaaaccgatgatcacgattacaacttcaagttgaaacatgccagaggattcttggaagatggtgataaggtgaaagcctatgtattctttaaaggtcgttcaatcttgtttaaagaacaaggggaggtattgttgctgcgatttgccaatgatttggaagactatgcgaaagtagaccaaatgccgatattggaagggaaaagaatgaccattcagctttctccaaaaaagaaagaggcaccaaagaagcctgcagcaccgaaatccgcagaaggatcgaaagcggctccggctgaaacagaagaataaaaaagaaatgagtaacgccacaggtatagtgcgttgccatataatttaaataatttaaaaataagtaagatgccaaagatgaagactaactccggttctaaaaagagatttactcttaccggaacaggtaaaatcaaaagaaagcacgcttttcacagtcatatcttgactaagaaaactaagaagcaaaaaagaaacttgtgccattcaactacagttgacgtgacaaacgtaagccaagttaaggaactcttagcaatgaagtaaaaagcgtacaaagtattttaaagtattaaccgaatgcattagctttaagtccgttgcgtgaagtaatggcgctaacattcaaaaattagtaaaactatgccaagatcagtaaatcacgttgcttcaagagcaagaagaaagaaaattttgaaattaaccagaggctactttggtgcaagaaagaacgtatggaccgttgccaagaatacttgggagaaaggtctgacttatgcgttccgtgaccgtaagaacaagaaaagaaacttccgcgctttgtggattcagcgtattaatgctgcagctcgtttggaaggtatgtcttattctaagctgatgggtgctttgcacaaagcaggaatcgaaatcaaccgtaaagttttggctgatttagcgatgaaccatccggaagctttcaaggctatcgtagctaaagcaaaagctgcttaagtttatttagcaaataattgacaaagtgctgattacgaatgagtaatcggcactttttgcttatagtaggggagatattatataaaatgtcttgtctgaaggaaacaaaatcatgtttttccttgtttctttgacggaaacttactacatttgttgtagaaaatatagccgcattgattggatcgggaaactcatcaaactattatgaaataccgagacaagcttcgcttctcaatggcgggccacgcccttcggggtaacctttgagtcagtggattacaaagaggacgagcgctcaaatcatgtcattcggagtttcatcacatcatcggtgcggcttttttataaaggggaacggtaatcttggttgattaccgttccttttttcttttaatgccacttcgtcatctttggagttattacataaaaaaacatcccatgaagcgaaataaattcatgggatgtttttttatgtagagagagtgatctcttgaaagaattagtgattttgacgtaggtcttttactctgactgcttttccttcgctttgtggcaaggagccttttttcactagtttcagtttgggagtcactaatatctcgtctttcaattgacgtgtgatctctttgcgtatcttttccaattcaatgtaattatcagtagagagatcgctgagttctacttccacaatcatttcatcctggttgtttactgtttccagtgtgattagataattgctgcctaattgtgggaattgtaccaatatcttttctacttgcattgggaagatgttaactcccttaatgatgaacatatcatcgctacgtcctttaatacggtcaatacgtaggtgggtgcgtccacatggacattctccgggaagaatacgggtgagatctcgggtacgataccgtagaagcggcatcatctcgcggtcgagagtggtcaatactaactcaccaatttctccatctggaacaggttctcctgtttcaggatcaataatttcaaccagatagcaatcctcccagaagtgcatgccgttttgttcctgacattcaaaagcaactccagggccgttcatttccgtcataccaaagctgttataagctttaacacctaacatacgttcgatctttttccgttgttcatctgtatgaggctcagcaccaatgacaagtgtttttaagctggtgcttgtcggatctataccttcttcttgaatgacttctgccaggcgaatagcatagctgggaatagcatgaagcgcagttgttttgaaatcagtaatgaatttaatctgtcgcttactgtttccggcagcagcaggaactgtcagtgctcccaaacgttctgctccatattggaaacctaatcctccggtgaacataccatatccggaactattctggaaaacatccgttttgcgtatgcctaccatatagagacagcgtgctaccaggtttgcccaagagtccagatcgtgctgagaatgaacaatcagagtcggagtaccggttgttccacttgaagaatgaatacgtaccccatcttcctgcatattacctgaaactagaccaaaagggtaggtggcacgcatatcagctttagtagtaaatgggatttttcgaatatctttaaggctttgaatgctatcagctgtgatattatgttcttggaacacttttttgtaatacggtgaattagctgcaatacttatcgtctttttaagccgctgaagttgcaattcctgcaacttctcacggctcatggtctctatgtcttcttcccagtatttgttattcatggtagtttgttttggagggtctttacattaatttttcggcaatttcttttccggcagccagtgctttgaggttcatctctacaatagcctcgcctttgcgttcgaagatttcgcgaatgctggtttgtattttctcatagtcaattcctagaaagggaatggtagccccaagcaaaacaatatttgctacgcgaatagaaccaatttctttagctaccttatccacattcagaacgattttatggggcaatttatccaactctgcccgcacatcagcttctgccggatagttggggatattaacgaacggagtttcgttagttaccagccagccttcagaacttaaataggggagatagcgtaatccttccatgggttcaagtgagatgatcaaatcgcatttgcctgaaggaataagatcagaggcaataggttgatcactgatacgtaaattggattgtacgtcaccgccacgttggctcatgccatgtacttccgcttgtttcatatataatccgtctttaagggcggctttaccaattactgtggcgatagagaggatgccttgtccaccaacgccggaaagtatgatatcttttttcatggttttacttgtttcgttttttacgtgctaaagtttgaatgcattctctgcgtggtataataacagatacaccacgatattcgatttcttcacggataatctgtttcatttcttcataattctttttaaggggaactactacgcgaatgtgttcaggagctacgccgataccagcgcagattgcttcgatacgtcctgtgccggcggaatcctgaccgcctgtcatagcggtagtttcattgtctgagatgacaatggtaacattagcattttcattgacacagtctagaagtcctgtcatgccggaatgggtaaaagttgagtctccgatgactgccactgcggggtgaagaccgccatcagaggcgccttttgccattgtaatggatgcccccatgtctacacatgaattgatggcattgaatggcgcattggctcctaaagtataacaaccgatatcactgaataccttatgagttggatattcttcttttagtacttgcgtcagtacagtatacatatcacgatgtccacaaccttcgcaaagtgcaggtgggcgcatttctacaagagaaggcactccaaactctgatttgttttcttttcctacggtgcgcgctaccttgtccggatttaattcaccgtcctgtggcaatgtgccatccagacgtccttttactttaacgccaatgccgagataacctttcaactgtttctcaacgaaaggttgtccatcttccaataccagaatctcatcgcaggcttctaccagctgtagaagttgtttcttgggcaatgggtattgcccaatctttaatacaggatattcacagccgtcaggatagttttccatcagatagttgtagccgataccgcaagctatgatacccatttttttgttaggaccatctatatacttattatatggagaactttcagaggcttctatgaattcagcctgacgttccaacaaaactttgtaacgtttgcgtgcattacctggtaataggataaattggcgtgggtcttcactgaaagatatttcattctggacttgttgagccttttgctctacacctgaacgagagtgggcgagacgagtgaccatacgcaataatatcggttcgccgattttttcagagaatgcaaagccgttataaaccatgtcgtacgcttcttgctgattacttggttcgtacatgggaataagtgagaaatcaccgtaaaaacggctgtcttgttcattttgtgaagagtgcatgctgggatcatccgctgctattacgattaatccaccttttacaccggtaacggctgaattgataaaacagtcggcagctacattcatacctacatgtttcatacagactaatgctcgtttaccaacaaatgacatacccaaagcggcttccattgcggtcttttcgttagaagaccaacgactgtgaatattttgttcagccgtaatgggtgccatttggatgtattctgttatttccgtggaaggagtgccgggataggcgtaaacgcctgagagtccggcatctaatgcagcttgtgcaatggcttcatcgccaagtaagagttgcttgctcatatctgattgttttaatgttagtcatggattattaataagaaaataatctgcgtttttcactcgcaaatatagccttttgcttttattttattacgattttacttgaaaatctttctttcgtttaaagcattccaatattttctagcatttttcatatgatcagtgtaattggaagcaaagttatgggtacctgaaaagtcctctttggcacacatataaatataattgtgctttgcataattcagcacagcatcaatgccaatggttgaaggaatacgtatcggtcccggtggtaatccggcatttagataagtattgtagggtgactttacattcaggtgctcattcgtaattcttcttagagcgaaatcttgaagtgcgaatttaatggtgggatcggcctgtaagggcatacccttatttaaacgatttatgtagagacctgcaaccatggacttttcttcattgttatttgtttcttcttctacaatagaggcgagcgtcgatacttcttccggggtcatgcctatgcttgtggccttggctagtcgttcctgattccagaatttctcatgttctttcttcatacggtcaaagaaatcctgtacgctcatattccaatatacttgataagtttcgggaatgaacaggctggccattgtttcctttgtatatcccattttcttttgaaatagcgagtcgttcattattgctgcaatttcagtagaatcaatcataagttgtttacctacgctgcgagcaagtctatctaaagtacgtacattgctaatggtcagatttataggttcttgatatcctctatataaacgactaaagacgtggtaaacactctcttctggacggatggcatagcatccggtgtggatgtttgaattgtagtcacgccatttagccatccagagaaagcctgaaaaacttttcggatgtccctgtttttttaccttgttatatatggaatccggtgtatcgtctttgtcgatataaatataagctgttttggagggatgaaactgtggatagaataaataataatagaatgttccggcacaagctgcaccaataaggaacagggctgtcaatcctcctatgagaattctttttgtcttctttttcatcggtttctacagttttctttagtcaggcaaaggtaagaagaatctatgaaataaaaaaagagatgcataagcatctcctttcctttgagccgctagccagacttgaactggcgacctacgcgttacgaatgcgttgctctaccaactgagctatagcggcagtgacttttcatttacggggtgcaaaattacatctttctttgaaattacgaaaagaaaaaggtttttttttgaaaaaatctttcttaaaatggttttctatatttgttctgtcatttttccttctaaaataattgttttatcaatataaaaaatacatctttgcaaatcttactgtcaacctaaaatctgacaataaatatgaatttgaagatatattataagaatctttcatcccgtattgcctccaagtggactatattggctattgatatttgtttgataatgatttccatgcttttagcatgtatccttcagctcggggtatcttctataatatataagatgtcattgtatgtatggatgatttttttctctttgttttgtaatctgtgtttcttttctgtctttcatacatatgttggagttattcgtttttcttcgtttgtggatatctatagagtgtttatatctcttacattgagctatggagtactgggggtaggaaatttttgctggtcagcttttggtttgggagaaacattacccagtggaataatttttatagcatatattcttaacttcatattcatggcatgtctgcgcattttggtgaaaatgttacatgaggttttgtcttttgatattcggcattgtgtgaatgtgtttatttatggctttcgtggaactggagtgaatatagcaaaatctatgcgtgtaagtagaaataatcattatcgtgtatgtggttttatttctgatgagccgtggatgataggcaaacacaccatgggatgtagggtatatgctaatgataagatgttatttgaacacttaaaaaggaagaatgtacgtacgattattgcttcacctgataagttggtggatttggaacagtctggtatagtagcacaaatgttagctcaggatattcatgtgatgacagtgcctcccttgagcgattgtttggatgatggaattataaaagatatccatatagaagattggcttcgtcgtgaaccaattcaggttgatatccgtaaaatagcggcttatgttgagggacatcgaatattgataaccggtgctgctggtactgtagggcgggaaatcgttcgccagttggcggcgctaaatccatatcagttgatattggttgatcaggctgaatctcctttgtacgatattcaattggaattgtctgaccattggaagaatctcgaagtacgggtattagtagcagatgttacaaattatactcgtatggaggctattttcagagagtgtatgccgcagttagtctttcatgctgcagcatataaacacgttgccatgcttgaagattatgcttctgaagctatacaggtgaatattttaggaacaaagactgttgcggatttgtctgtaaaatacaaaattaaaaaatgtatgataatttctacagatcatgctttctgtccggtgcatgctatggggtatagtaaatgtttggctgaaatgtatgtacagggattatctcgcaaagtagtgcaggaaaatagtcttactaaattatttgtagttcgcttcagtgatgtatatcctgatgctcctcgcagtttaatgactgtatcggaagcttgtcagttgatattggaaacggggaatttgggtgagaatggtgaaatctatgtgtttgaagatgatgcagtagaagatacactgcccaccagctatgaaaaaataaggaaaagcaaaggatatttcattgattatactatgatttgcgaacagattaatactttaacggaaaataattgcatgcaggattcagcggtaataattaacaaaatgaaaaaaataatctcatatttttctgagtcttgtgcggatgcctgaacggctgaatggagtttttaattctttttccgaaatttcgatgtaaaataaatgggcgttctgaaataatgtgctacctttgtgcccgatttatatttaactgtaggaattttaaagattaatcaaatatcttatgcgtagattaatagcactattcttttcaatcttcatccttgtagggggcgttatggcccagcaaatgtcggatgatcaggtggttcaatatgtgaaagaagcacagagaactggcaaatcgcaaaagcaaatgactactgagctattgcgtagaggagtaaccaaagaacaggttgctcgtatacaaaaaaaatatgccgagcatagtactgctgcagatggagtagaaaacaaaccctctcaacttcgtgaacgtacttctttaatgacagacgggaaagctattagaggtacttcttatgaagaagcagaattagaagaacagaaagaaataattgatttaaaacgtgatgcgaaagctactcctgaagcaccaggaagcaatatttttggtcatagtttattttctaatagaaacctttcttttgagccgagtgcaaatctggctactccggtaaattaccgtctaggcccgggtgatgaagttattatagatatctggggagcttcagaaaatacaattcgtcagacgatttctcccgaaggaactattttagtccgtggtttaggtcccgttcatcttagtggtatgactgtaaaagaggcgaactcttttttgcaacgtgagttttctaaaatctattctggaatttcaggtactgagcccaactctgagataaaattgacattgggtgacattcgtacgatacaaattaatattatgggtgaggtttctgtaccgggaacttataccttatctgcattttccactgtatttcatgctttatatcgtgctggtggtgtaaaccgtatcggtagtttacgtagtattaaagtggtacgtgatggtaaaacctttgctgatctggatgtttacgactttataatgaaaggtaaaatgaaggatgatatacgccttcaagaaggtgacgtgatcattgtagatccttatcagtctctggttgagattgtgggtaaagtcaaaagaccgatgttttatgagatgaaacctacagagactgttgctaccatattaaattatgcaggtggttttactggtgatgcttataaaaaagccattcgtcttgtgcgtaagagtggacgtgaacatcaggtctttaatgtagatgaaatggattactctgttttccgtttggatgatggagatatgattacgatagatgctgtactggatcgttttgaaaatcgtgtagaagttcgtggtgctgtttatcgtgccggtttatatcaactagacggtacagtaaatacggtgaaacaattaataaagaaagctgaaggattgcgtggagatgctttcctaaatagagtaattatagatagagagcatgaagacctgtctcatgaaatcattgctattgatttaggaggactattaaatgggacaattgctgatattcctttgcagaaaaatgatattctgtatatcccaagtattactgacctgaaagaagaagaaacggttgcaatttatggtgaagttgctaatccgggtactttccttttttctaagaatatgactattgaagatttacttgttcaggcaggtggtttgttggaagaagctgctacaacaagggttgaggtaactcgtcgtattaaagatcctaagagcacttcattcagtagtgttttaggtaaaacatttacttttgatataaaagatggttttattgttggaggaaatgcggagaacttctatttagagccctttgatgctgtttatattcgtagaagtcctgcttatcgtaggcaacagaatgtggttgttgctggtgaagtacttttctctggtagctattctttattgaagaagaatgagcgcttgtctgacttggttagcaaggctggtggtgtaactccggatgcttatgtaaaaggagctcgtttaatccgtaaattgtccgatgaggaaagacgtcgtcagaatgacgctatccgtatggctcagaatggtgagggaaaggactccatatctatacagaaattaaatctgtcagagacctatactgtaggtattgatctggagaaagctttagccaatccaaagtctgattttgatttggttttgcgtgagggagatgtactgtatattccggaatatgtgaatactgtgaaaatcagtggttcggtcatgtatcctaataccgtagtgtatcagaagggaaagaatctgaaattctatattaatcaggcgggtggttatggcaatatggcaaagaagaagaaagtttatgtggtttacatgaatggtacggtatctcgtctgaaggcaagaaatgccagtgctatagaaccgggatgtgaaattatcgttcccagcaaggctgaaaagaagcatatggcgatggctgaaattttgggtattagtagtacaactgctacaattgcagcaatggtagcaactatggctaacgcttttaagtaatttggattatgggtgaagaaaaaaaactgaatacacttcctcaacaaccagaggaacaggaaatagacttgattgaacttgccaagaaagtttgggcagagcgaaaattggtttttaaagcgtgtggatatgctgcgttaataggactggttgttgcatttagcattcccagagaatattccactagcgtaacgttagcaccagaaagcactgggaaaacttcaggaggtagcatgggagcgttggctgctatggctggaatcaatatgggctcttctgttggagaagatgctctttatccggatctttatccggatatcgtaagttctactccgtttctgactgagttgtttgatgtaaaggtcaaagatgataaagaaaaggtagatactacactgtatgtttacttggacgaacatcagcgtgctccttggtggggtgctattatttctgctccttttaaagttttgggttggaccatctctttatttaaggatgatgaagtagaaggaactggcacactggatccttttagattaacaaaagatgaagcagacattgccgaagcgctaagtaaacgtattgctgtctctgttgataagaagacaggtgttactaccttgacggtaacaatgcaggatcctttaatttctgcttcattaaccgatacagtaatgcaccgccttcagaattatataactgaatatcgaactaataaagctcgtcatgatttggcttttaccgagaaattatatacagaagcaaaagctaattatacggatgcccaaagtaagtatgcatcttttgtagatgccaatcaaaatattattttgttaagttatcgtgctgagcaggagcgtttgcaaaatgagatgagtttagcatataatgtatatactcaagttgcccaacagttacagatggcaaaagctaaagtacaagaaattactccggtatatactgttgttcagccagcgacggttcctttgcgtccgtctaagcctagcaagcccatgattctgataggtttcgtatttttggctggtgttggtagtgttggatggatattgtttataaaggatttattaaaaggatggaaaaagcaaacaacgatatgatgatggatgaaaattcgcgtagctggtatgtattgtacacagcgccaagattggaacgtaaattgatgcaacaccttactgttgccggatataagacttattgtcctatgcaaacaatttatgtgaactggaatggaaagacaaaggaaattattgttccttttttctccggttgtgtttttgtagagggagatcttaaggatatgactcctgttgtagcttctcaaaaagcggcatttttagtgaatgctgatggtaaagagcttactatagtatctgataaggcaaaccttccaggaaagtttgcccaattattgaagtaatgatgaagttgatttcagaagaactgttggatagtgtgtcccatgaagcacgagagagttctcgtttgcgtatgaattataattttcatgaatcattggactcacctattcatcgcttgcttaacgcattagagccgggaacgtatcttcctcctcatcgtcacactgataaagaggagacttatgtagtattacgtggaagtctgttgactttcttttatgatgatttaggtaatgtaatagaaaaagttaacctaaatccgtcggctggagtctatggggtggagattccttccggtacttggcatagtattattgctttagagccaggcactgtgatttttgaaatcaaaagtggcccttataaaccacttcctcccgaagatattgcgccatgggcgcctgcaccctccgacttggaaggtgcggctgtgtttatgaaacgaatgttggaggtttaattagcaccttcaaacattcggcttcgtgccagcatgcatgcacctacaatgccggccttatcttttaacttggatgtcgtgataactgagtctttattcacgaggtttaaggagtattttcgtaccgctgtttttataggttgcgtaatgtagtctccggttagagataatgttcctccgattattactaactcgggattaaagatatttataagaccggcaatttgtttacctaatttttgcccgatttcttcgacaatttcaatgcatagcacatcttccttgtttactgctgctataatctcatctaatgttaatgggttttccatattaatccgttcggataaaatagaattttctcctttctttattcgttccagcagagtacggtgtaatgctgagccggaagcttctgtttccagacaacctttctttccacagtggcagatgatttcattatcaaatgtgctgatatgcccaaattctcctgagaatcctgattttcctttgtagatttttccatctataatgattccgattcctaatccccagctgacatttacgaaaataatatctttttctcctttaacgcatccttgcatgtattctccataggtcattgctcgtgtatcattgtcgattgtgacagtatatcctagtctttcacttaatacatctgcaagaggacgttcttcaaaattaaactggctgaaactatatccggattctgggtttacccgacctgatacattgacattgatattaagaatcttttcagtgtcaattgaaagtttcttgatgaaattgagaataaggctacaaagctcgttcattccttccaaagagttctcaaaattataaggaatgtccattttgagatctaccatatctcctttgaaattgattaatccgatattgatggagaatttttttatatctactccaataaagtaaccggattgaggattcaagccgtatagatgcgggtggcgtcctccgcttgtttccagtttcccataatcatttatataaccttcatcgaacatttcacctattaatttagtgacagtagggatactcagatctaactccttagagagatcaggaattgtagaactaccattatatatataataggtgataatccttttttttataagggcatttttagaccccatttctatttcttttaggaattgctgatacatactctttgttaatttcattattgtcaacaaagatactta

SEQ ID NO: 6490 - DNA, 1983 bp, Unknown
  gut microbiota DNA sequence
aaagaaagccagactgcacataggtttcttcccctacatacagtctggttctctgattccatcattcatttctggtaataagtcaataaatcagacattccattactcttccgcatccatctccgacttaatctcatcctcgcagtctgccattgcctgcagtgtcatagtgagcagcttctgcagttcccagccgagttgttcggctcctcgctcgatgacttctctggagcatcctgctgcgaagcctttgcttttatatttcttcttgagggatttgagttccatgtcttttgtgcttttggatggtctcataagtgctgctgcccagataagtcctgtaagttcgtccgccgcaaagagtactttttccatttcgtgttccggtgctacatcaatggttgcgccacatcctactgtgatgccgtagccgtgggatacaactgaatggattacgtcttcgcctacgcctgctttgcggagcatttccggagctttcaggcagtgttcttccggatataactcaaagtcaatgtcatggaggagtcctacaattccccagtattctgcatcttcgccatagccaagttcactggcataccatttcattactgcttctacagtcagggcatgctgaatatggaagggatccttgttgtatttctttaataatgcgaatgcctcatctcgtgtaattgttttcattattttgtcactcctcatatctgaattgtcaagcggataaaatatctgctttgctacttgctcataactgaataactgctccgcagtttatctgtcaatctggatctgacatgcttccattgctttcagtgcattctcatggctttccggtgttacgcctgcgcaacatttagcgtctacgatgatcggaacttccgggagagatgcttttgccagaagtgcattggaaataacacagatgtctgtgcataaacctacaaatgtgatacttttgatttcattatcctcattcattgccaccagttctcctgcaagatctgtggaaccaaaggtttctttatcaatgggttctgtttttctgagtgcatctaattcgcttctgatctgccagccttcagtgtcacggatacagtgcggtacaggaagcttctgtccttcctgggtgtcaagatagtaagtctcatgggtgtctctggtaaaaagaacaactccatcaaaattttcgattttctcttttacaccaggtacaatggcaactgcctcttttgttccaagagctccgtcgatgaagtcattctgcatgtctacaactactaataccttctgcatatttccttccctttcgttctttctgcacattttttcagataatgctataaaatctctggaaacgtatgctgttattatttgttattactatacaacgacaaagtgtttttgtacaggcaaaagtgcctgttttactatagcaattccataaaatatcaatcatctatttttcagtatatttttcaaatctgtacttctgtttaatatccggatatttgtctctgtccacttcactcataaacatatcatagggtctggcgcagattttgaaaggtgcgtagagagcctggtagatcatcagtttttcaccgttttctgtgtgatgggctactgcaaggactttatagagatattcggaagtatccggggatacccattctcttttgaaatgctgtacaatgtcgcctgcatgaatatcgtgttccggtgtttccaaagtgttttcattttccgcactgtcaggttcttccggttctgtgttgagttccatatattcttctttatcaagggaaaccgggattccggaacggccattgatgtggacgccgccataccaggtacctgtgacctcacaaatatcacctacttcgtattccatgctgcagtcattatttttctttatgattctgatctttgccattttatcatctcctagcatatagttcttat

SEQ ID NO: 6491 - DNA, 10083 bp, Unknown
  gut microbiota DNA sequence
aaagaaaagataacaggactataaattatagaaaaaggttgtgccaacgttttgacacaacccctttcctatatatacaccgccgaatattattccgcagtcttttttcttctagtcggcttttcctttacctcttccttgtgttcgatggttacaccagccaattccgggtcaatcatgatacgtccgcaatactcgcaaacgatgattttcttacgagaacggatatccagttgtctctggggtgggattttgttgaagcaaccgccacaagcgtcacgctgtacatatacgatacccaatccgttgcgagagttcttacggatacgcttgaaagactggagcaagcgcggttcgatcttagtttcaagttctttggctttgtctctcagcttttcttcttcctgcttggtttcagagatgatttcgtccagttcgttcttcttaacgtccaggtctttctgtctttcgtccaacgcttctgtgctctttgcagcttcagcagacttctcctgttcctgtgcagcgaactctttgattctcttatcgcaaagctccatttccagagtttggaattcgatttctttgcttaggaagtcgtactcacggttgttgcgtacattctcctgctgttccttgtattttgcgatagaagcttttgaagtttcaatctccactttcttggtagcgatggcggatttcagttcggctacttctgccttaattctgtcgatacgagtgctcagaccggcgatttcatcttccaagtcctgtacttccaacggaagttcacctcttaaagtcttgatttcatcaatcttagacaacatagtctgcaactggaacagggctttcaacttctgctccacggtcaattcctgaggatctttttttgcttctttagccattttacttataaatattttatggggttggtattcactttgcactgttgcagcgcaaggttaggaaacaactcccggattattgtatagaatatttcttttgtatattgttcgctttcgtaatgtcctatctctgccagcagaatatctgtatcgtgtccgaagtaatcgtgatacttgatttctccggtgatgaacacgtctgcgccgttgcgtatggcaagcggcatcagaaatgctccggctcctccacacagtgccacggtctgtatttcacgtccggtcagcttgttatgcttcagacagcccacttcaaaggtcttcttgatgcgtttcaggaactccaactccgtttccggtgtttccagttctccgataactcctgccccagcctgtgtccagctattctgcaaaggatataaatcgaatgcaggttcctcatacggatgggcactcagtagagctttgataacttccgatttcttataggcaggcaatacggtctctatccgcacttccttttccgtatgcaactctccgatgcttccacagaacgggtggctaccctcctgagcacggaaagttccctctccttctacattgtagctgcatgcgtcatagtttcctatgcaaccgcatccggctgcaaacaaagctttacgaacatcttccgcctgtgctgtgggtacaaaagtcaccaattttaccaaggtattctctttggcttccagcacgcgtacattactcaatcctattttctcggcaatcttgaagttcacccctcccggagcattgtccaggttggtatgtgccgagtagatcacgatatcattcttgattgctttcatgatacaatgctctacatagtccctacccgtgatggatttatatcctttgaatatcagcggatgatgggatatgacaagattgtaccctaacgcaatcgcttcgtccagcacggcttcggtgacgtcaagacacaacaaagcccctgttgcttccgcttctgtcaatccgatttgcaggccggcattatcaaatccgtcttgcaatggcagaggcgcgaaccgttcaagggcgcttactatctccttaattctcattatgtgaatagaaaatttcggtgcaaatatagtaaaaatgcactgaataactgtttgttttactctttttttatatatttgttcggataattgtaaaactctataccatgaaagtattacttttctcgtttttcgctttattatgcattcttttctcgtgccaaccctcacccaaagcccaggatggcggtgaagaggatgcacaagaggaatttgtggatactactccgaaggctacagccatcttctggatagataaacataaggaaatgcccggacaaccgtcaaagaggccgggtgcggtacgtacggtgaaagccaaagtcaatatccatttggcagggcgtatagaagtactttcgtatgtgaaaccgcagaaaggatatataaaaagttatataaatcgccgtcttgagacgttccgggtaaggaaagtgttgatggacagtgcttatataaaacccggcgtacagtatgtgcagttgcgttatactcctgaaaaagtagagcattaacggtttttcttcttttcctttttctctaccattacttgcagtagttttccgttggcatcgaacgacttacgcgatgccagcgagatggtaatcatcagcgaaagcatggatgccgtgaaggttatcaccataatcatcatctgatatttgatggcgacattcgggctactacctcccaggatttgtccgatcattgtgccgggcagtgccaccaagcccataacggcaatattggcaatcaacggactaaaagacttaatgatagcctgtttgataaaaggcgcctgtgcctctgcccttgtggcgccattgccaagcagatagcgatacaattgttgttcccgtttcaatccgctgtaataagcattcagcgcaacgacattgctggatagcatgtttcccatcaggataccgaatatcggaataaaatactgggcactgaacacattctccaaccgtaatacaatggcaatgaagtacatgccgatgcagacaacactgaataagaaacctatggagataggaataaacagtattttccgtttcaattgggtgcgtgccagggcggtttgtgcggcgacgaatatcataataatcacccacagaaagttgatccacgggttattccacagaaacaagtatttcaggtagataccgataaagaaaagttgtacaatcatccgtgcgataccaatcacggtaacccacaatagccctgtcttgaacttccacaagtagaacagcggaatgagcaacagcaacaatccgatggctaaactggtatatgatatgtcgatagttcccactttattaatctcttagttatagcgttatcatctggttgcatccttgcgcaaatccctggtcgtgagagacggcgagaatggcacttccctccctcattcgtttccggaagaaagcaagtactttatccgtagagtccgaatccagtgcggaagtcggttcatccacaatcagcagcggcttttgcatcagggtggctacggcaatcatgatacgttgccgttgtcctccggagatctcattcacacgtttatcgtacaattcctcttccagccccaattcatcgaaacaggcaaatagtttgtccagtgaaaagggggtattccggttagctttcagattgaaagggagttgcaccatttccttcacccattccgatggaagcgccagttcttgcggtatccatgccacttgcctgcgaatttggtcgatagttcctttttccagtaaaatgccgttaacggtgatgctccctgctttgaggggtacaaatcctaaaactgcattcagcaaggaggtctttccccgccccgattgtccggaaatgcaggcgatttccccttcgtgcagttgtaagcaaaaaccggaaaaaagtgtatctgctccgaaagcgatgcatgcgttgtctatttgaagtatagtcctggtctccatttgaaagcaaatatagaaaggaattctgagaaaacgacggattattggctgaaatcagtatctttaaataagataagctgcattttggcataactttttcatgcaagcatgaaagttctgcactcaatttgcattatctttgctatcagtttttaataaaagtgagaattatgatacagaacgaacgtgcaagccgccacgaacatgtgttggatgtggcaaggcagatgatgactgctgcccgtaccgctccgaagggaaaaggtgtagatataattgaaatagctatggtcaccggagacgatttaaaagtattgtcggacaagatggttgccatggtggaagaacacggaatgaagttctttttgcgggatgccgccaacattttgcaggctgaatgtgtaattataataggtacgcgcgagcaggcgcaaggattgaattgcggccattgtggttatcccacttgtgcgggacgccttgaaggtgtgccttgtgctgtgaattcggtcgatgtaggtatagctatcggttcggcttgcgccacggcggctgatttgcgtgtggatacccgtgtgatgttctctgccggacttgctgcgcagcaattggagtggttgccgggatgcagatccgtgtatgctattccggtcagtgcttcgaccaagaatccgttctttgaccgcaagccgaaagaagaaaagaaagaatgataaatatgagtgatacgttcaatgctgttttacctgccgaatgggcgccgcaaagcggaatacagctgacttggccccatgccggaactgactgggcacatatgcttacggaagtacaagtctgctttgccgctatcgcacgcgaaataacccaacgggaattgcttctgatcgtaactcccgaaccggaggaggtcaaaaagcagatttcagctaccgtcaatatgcagaatgtccgtttcatggagtgtgaaacgaatgatacttgggcacgtgatcatggtgcaattaccatgttggattcagaaggcgcttcgcttcttgatttcatgttcaatggctgggggctgaaattcgcttcggataaagacaatctgattacccgtcaggctgtgaaagtcggtttcctgaatgggcggtatgttaatcgtctgggctttgttctggaaggtggttccattgagagtgacgggttgggcacattactcaccacgtccgagtgtttgctttctcccaatcgtaacgggcagatgagccgcgatgaaatcgaagactatctctgttctgtatttcatctgaaacaggtactttggctcgatcatgggtatttggcaggagatgatacggatagtcatgtcgatacgctcgctcgtctttgctcaccggatactattgcctatgtgcaatgcaccgatacgcaggatgaacattacgaagctctccatcaaatggaagaacaactgaaaaccttccgtactttgaatggaaacccctaccgcctgttggcattgcctatggtggacaagattgaggaagagggcgaacgcctccccgcaacgtatgccaatttcttgataatgaatgatgcggtgctttatcctacttatcgtcagccggagaatgaccaacgtgcaaaagaagtcttgcaggaagcgttcccggaatatgagattgtaggcattgattgtcggacgctgattaagcagcatggatcgctccattgtgttacgatgcagtaccctgccggtgtattgaaataaaattagaaagatatgagaaaaataaaagtcggaattattcagcaagccaatacagcagatcttcgtacgaacctgatgaacctggctaaaagcatagaagcttgtgctgcacatggtgcgcaactgattgtattacaggagctgcacaactccctgtatttctgtcagactgaaaacacgcaactgtttgatctggcggaaaccattcccggcccttccaccggattttattccgaactggccgctgccaataaaatagtattggtgacctccctatttgagaaacgtgccccaggactctatcataacaccgccgttgtctttgatcgtgacggaagcattgccggaaaataccgcaagatgcatatccccgatgatccggcctattatgaaaagttctatttcacccccggagatataggtttcgaacctatccaaacctctctcggaaaactgggcgtacttgtttgctgggatcagtggtatcccgaagctgcccgcctgatggcattgaaaggtgccgaattattaatctaccccaccgccatcggttgggaaagcagtgacgccgatgatgaaaaggcacgccagctcaatgcctggattatctcccagcgtgcccatgccgtagccaacggacttcctgttatctccgttaaccgtgtcggtcacgaacccgatccgtccatgcagacaaatggcatccaattctggggaaatagttttgtagcaggtccgcaaggggaattccttgcacaagccggaaatgatcgtccggaaaatatagtagtggagatagatatggaacgctctgaaaatgtacgccgttggtggcctttcctgcgcgaccgtcgtatcgatgaatacggtggattgacgaaacgctttcttgattaaaatacaattcgataaaagtgcgataaagcgcaatttgataaaagcgcagtaaaacgtagtttgataaagcgttaacggaacgtgattctcctgttcattataaaattcacgcctccgtaaataaacagtcccaggaactgagccagatattcatcacaattcagtgcctcgactaacactaccaagaataggaattgcgccagatatgccattccgaaagcgatagaaaagagcaacacctgcctccaggtgttgctcttcttttctttatcatccaaaggaaatatccagtgcttgcaccagataaaattatgagtctgtgcaatgacgtaagcagttatgttagagagcatatagtcgatgtccagttcatccatcatcagccagatgactgctgctataatcagggcattcagcgtaccgattaccgcaaaacggaagatgcgtctcgactctctcacaacaaactaacctactcttattctttgatatctacgatcagattcagttcgtccaactgagacggatcaagtgctgcgggagcatccagcatcacgtcgcgtccactgttattcttcgggaatgcgatgcagtcacgaatactatccaatccggcaaagagagatacccaacgatcaagaccatatgccagaccgccatgaggaggtgcaccgtatttgaatgcattcatcaggaatccgaattgttcttctgctttttcaggagtgaatcccaggatttcgaacatctttgcctgcaactttggatcgtggatacggattgaaccgccaccgacttccacaccattgattaccatatcataagcatcggcacgtactgctgccggatcagtatccagtaaatcaatgtcctcgtctttcggatgggtgaacggatggtgcatagccatcaagcggttttcttgctcactccattcaaacatcgggaagtctactacccacaggcatgcgaatgtgttcttatcacgcaatcccaattggctacccatttccagacgaagctcgcaaagttgcttgcgtgtcttcatggtgtcgtcgccgctcaaaatcagaatcaagtcacccggtttggcaccgaaagcttctttcacctgttgcagtacttcctgcgtatagaatttgtcaacgctcgattttacatttccgtcttcctctacacgggcgtaaaccataccttttgcaccaatctgcggtctcttcacaaattccgtcagtgcatccagttgtttgcgggtgtagtgtgcggcaccctcggcacagataccaccgatgtattcggcgctatcaaatacagagaagccatggcctttcagtatatccatcagttccacgaacttcataccgaaacgcaagtcgggtttgtcgctaccataatatttcatggcgtccgcccatgccatacgctggaactgaccttccaattccacaccgcggatttctttgaacagatatttcgtcataccttcaaacaggttgatgatgtcgtcctgttccacgaaagacatttcacagtctatctgagtaaattccggctgacggtcggcacgaaggtcctcgtcacggaaacacttggcaatctggaagtaacggtcgaaaccggataccatcagcaattgtttcaaggtctgcgggctttgcggcaaagcgtaaaactgtcccggattcatgcgtgaaggcaccacgaagtcgcgtgcaccttccggagtagagcctaccagtacaggagtttccacttcgatgaaaccctggctgtccagatagcggcgtacctcaatggtcattctatggcggagttctagatttctgcgtaccgacgggcggcgcaaatccagataacggtatttcatgcggatatcgtcgccaccatccgtattatcttcgatggtgaacggaggtgtcagggctgcattcagcacattcagttccgatacgatgatttcaatatctccggtcgggatattggcattcttgctgaagcgttcgttcaccgttcctgtaatctgaatgacgaattcgcgtcctaggcggttggcgttctcgcaaagtgcggcgtccacctcttcgttaaaaactaactgggtgataccgtaacgatcgcggaggtcaatgaatgtcatacctcccattttgcggctgcgctgcacccaacctgccagcgttacttgcttattgacatcggagatacgaagttctccgcaggtgtgtgatctaaacatgttgatatttacaatttacaatttacaatttacaatttggctgcgctgtcggggcacaacgcttaattgctaatgacgtgcaaaaatacagatttattttataaaaaactcagattttcgttaacttcttaatctgctctttactcttatccaatatcatcttattcttatgcacaatctcctcattgatctgcttcaggccatttatataatcctgtgcccgttgcaatacattcgaagagtctttttcggcatactgggggatgataacctgcaatccttctttgattacctttacgtcaatgttttctcccatcatcatcgggtccccgtcaaagtgcactactcctggtttggtacggtggatgcgcagcgtctggcagcggaaagttttgatgcggctattttggtctatagtcttattaaacagttggaaagacagggagggcacatccagcaccgtgaaaggttcaaggatggtcacgtccagtaatccgtccgtcagcatggcctgtggagctatgtacgcattgtttccgtattgcgaagcgttgccgcaggctatcaggaaagccttatactttaaagtaccgtcttccgtttccagttcgtaagtttcgggctgatacttcagactctccagcagagtcttttctaaataggtaagagggcctctcctgcccgcctttgcaaacttcaggctgacaaaagcatcaaaacccacaccgcaggtacagaagaaaggcacttcattgatttttccgtaatcgatgacgtctataattccttcgttgatgatttctatcgcctttttgggctccatcgaaatttgcagatggcgtgccagtccgtttcccgaaccacacggaatgatgcccaatgcagtttttgtatgcaccagcgaacgggctatttcgttgatcgtgccgtcaccgccaatagccactacagcatgcacattttcctttgctttttgtgcagcaatttcaacagcatgtccggcatattcggtatagattacctcttggacatactttgccttatccagcttttcatcgagcaaatggaggatttgctctttgctctgcgtaccggatttcggatttataatgaatgatattttctttttttcttcgtccatgcaagggttgtttcactatgcaattttataaatggcaaaagtaatacaaatacttgaatttttaaccatagagtg

SEQ ID NO: 6492 - DNA, 7725 bp, Unknown
  gut microbiota DNA sequence
ctataaaaatagagtgtgaaatgctatcaacacctattacataatataaaaaaacaggtacaggcagagcagccatagtaaccaacaaacagggtttaaaaacattccagacatctctccaataataattagctattttcactactaatataggctttacgattaaccccaatatggcataagtcaataaactagcccatgaaagagcaacaggagaatatcctgctttaaataagaagtaaattataggaaatcttattaagcccaaagttggtgatatcaaagcattctcttttaaccgtcctttagcatacaaagctgtataaaaagaagtatcaaaaacttgaaacaggctctgaataactatgatctgaagaaatataactgtataatcaggcacaacacccagccatatttttaataaaggatgcgcaagaagacagacaggaaaacagattataaacatcatataataagaatacttggtggatgccaataatagccttttagaacctatcaaatcacctgcagccagtttctttactatctgcggattagccgcagtacgaaaattatcgacaaactggctagctgccatatttacctgaatagaaatagatcgtgctgcaaccacagcaggttcaaaaaacatattcaacaaaatcagaatgccttggctattaagagccgttgaactactggcaaataaactccatcccgaaaatcccgctatttctttgaatatagccttatcaaaaacaaaacgataaaccgtttccttaaaatgccgactacaatataaacgatagatacagatgagtcctacctgaactatgaataataaagttgcatacaattttaatttatcataactgccaatggataaaagataaacgatgcctaattttgccgaaacttctataatgctcatatatgcaaaaaccgacattttctcatgtgcaataatacttgcattgtaaggaacttgtgtcaatgtaaacacagcagttaatatggatatatgaaaagtataaaccgcagcatccatccgctcagccggtatcaccaatttattataaagaaaccatactccaagcgtttctgcaactataacaacaaagagagcaattgctatatggatagtcaatgttgtagagaaagttctcttcaacttttcaagattgcctgttcccagttcgtaagttaaaaaacgagatgagcctgtactgagcgcactattaataaaagacaaaaatcctacaattccacctacggactgataaataccataattgtcaactcctaacgtttgtagtattacacgtgaagtatacaatgaaactatcattgtaaacatcatacggaaatacaggaatgcggtatttttagctatagttttatttgtagaaggtacagacatcaaaattagtaggaatatgtatgattatatgaccattttctataatatagaaaaatcacaattatcgggatcataacgaagtcgtgaattgatatttatattatcaatagcaattatttcatctgcacttaactcaaaatcaaaaattgaaatattttccaattggcgtttcttattcaaagaacgcacaacagggattaaaccattttgaatatgccaacgaagtatgatttgagcaatagacttatgatatttttcagacatgcgtttaagcaaaggcaaacgggtcagccttacgtccatacgtgcaattggtgtataagcttctacttgaataccacaagacttacaatattttattaattccttttgtgtaaaaagaggatgcacttctatttgatttattgccggaacaacttcggaaacattcaacaaagcttccaaatgatgcttatggcaattagcaaccccaagtgtccggcaatagccctctttatacaattgaaccatctgcttccatgtatccaaatataaatcagtaacaggccaatgaaacattaataaatccacataatcaatccccataccctccaattgctgaaataagcattctcgaatcttaccactcctttgcgcctggttgcttactcttgttgttaaaaacaaatcttttcgctcaatatggctctttcttatcgctttatttattaaaacaccatccccatatgaggaagaaaaatccaataatttaaagcctacttgaaacgcatgcgccacagaattgacataattatgatatagcacaggacgcaaacaaaacttattataagctctaaatccaaaatttattaaaggaatgtctgatttcaaatttaaatttccactacgagcagcagcaggaccaatgccaatagctggaatagatacaccattatttaattgaacttcattcatgatattctatgtatttcaaaagtcactacaatttccaagcaatatctttcattaccactttagccggatgcccacttaccaaagtatgagctggcacattctgaattacataagaacaagcacccacaactgcaccctcttttatcttcacacccggacaaataacagcaccactacaaagccaagtatggttttcaataatgactgggcgtaaaactttgtaaccttctatagcaataatatgagcattagtatcacgaatacttacatctctgccaagagaaacacgccctttcaattctattcttttcccacagataattgtagtattacagtttgttccacaattatcaataccaagataagcattagcaaaaacttctatatttgaaccataaccaagacaaaaacgctctgcaaccaacatatgagcattcttttcaagaagtaaacgggtttcttctttcgattttcggaatctcttcactccaagcatgaatggtccatgtaattcaagcttcgatccagtatgaaactcaattatcgaataaggagtgatatatataaatccgttattagcccaatctgtttttacatgcttacataaaaaattgaaatataaaaaacgagaaaaaacccacggattatattgactatacctcagagctaatacaaaaggtctaataattaatttaactttctctttgaactgggctttgaatcctcgttctttttcatggaaaggaaaatagagaggaacgacttcctcaattgccttcctgtctaaatcatgaaaaaaagtatccctattcatcaccggcattttctgttcgtgcaaaagtgcaggatttccaggcagtatcttttcgatagttgtttctaaagatgtgatatttttaagctgcttataaaaagccaatcccttagaactattacacataactgccgatgtaccggcattatcatcaatatctttcagataagcatatttttccactccccaaaaatctgcaatagtaatatcagacatacgaggaaaacccttaaattgacaaaaatagcaagacggacggcttacaatattaccatgataagccattgaataaagatcattatcttgtgcctgactatacattgtcttaccattcttaaaatcaaaacgctttacaagactacgccatcccaattctttatctttaaacttaaaagaaacaagttgacttccaaccttacgttcccaataatcaagatatttagcataaaatttaggagaagtgatactcttacaaataaaatccacaataataagattctcatagtctttattaagaaaacggcgaagagccgccatttggcaaggggtaccacaaattaaaactttctcacctgccatcaacagtcgttttacttctttatagattccacaggtctgactctgagaatacttactctgacgcaatagagcaagatctgccggattattagaaataaaatgtgatactgaaaagtctttattataaatagcaccaccaacatagcctccttctctatacatttgttctgctagagctgaaaaaagtcctcctgtagtactgccaaaacgaacttctatatttttatgtatagcagcaaaacaaacaggatactcaaaatcattcttcttcaaagctccaatgtgcaactgaggacatgtacgctcacaaagtccgcaattaatacatttatctatgtcaacccgaggataccaaaatccttcaatatcagtggaaagtgtaatagcatccttcggacagatatcataacaagcattacatccacaacaatttttcttttctttaatatctatcatcaaatctcatatttagatgctaacatatagcaaattaccttgctgtataacctccatccacaattaaattttgccctgtaatccaacgagatgcatcactaagcaaatagacacaagcattagaaatatctacagcttcacctagccccaacggaaaaccacttacacgcttctgataatcttcctccgaaagatctgaaagaaaattttgcattaaaggagttaatatagtcccaggagaaatacaattgatacaaattttcttctttgctaattccaaggccatggagcgaacagcactgaccattgcccctttagaagcagcataggccgatactcctccgcgccctataattgaagtaatagatgatatcaacacaatatgtccaccatccctgaaatatctcttattactaaaataacggataaactcaaaagcacctaaagtattcactttaaatacattcatatagtcatcaggagtcaacaattttactggcaaagttttttcaataccagcagcatagacaaatccatcaatcttaccctgtttttcaactatttcatccaccaaaggttttatctgacctgtctgaaataaatcaaacatataatagcaatgtctttccggatgatctaataatgacaacgtttcctgcaaacgagtttcagtacgagctataagtataactttagctcccatccggctacaatctattgcgcactgttgtccaatgccagaagaagcaccagtcaccaatacagttttatcttcaagtgaaaaaggattatacatattattttaccaattcaccattctctacttctacaatgctgctaattctacagtccacaaagggaacaatagcggtagcccaagtcatacctaccccaaaagcactcatcaaaatatttttcttgccatcaagcttatctttcaactcactgacaattgttagaggtacagaaacagaagatgtattaccaaacttggcgatagtagcaggcatcttgtccagatcaagcttcattttctttgctatgtaagaattgataaagttattagcctgatgaaaaacaatataatcaaaatcatctgtggacatttgggaaaattcaagtgtcttctttatatcacgcggaatctcacgaataacaaaattgaacacatctccccctttcatatagccttgttcatcgcttcgaatattaccatattcatcaaccactttttcccgaatagtatctgcactgctcatatgacgataaccgccaccaggaatcataatcaaatctgcccgagaaccatctgaattgagtgaaaagatgctcctgccatactttacatcacgctctatgagagcggcaacaccaccatcgccaaaaataaaagcactgcgtcggtctttaggagaatacactttactacgtgtctccccatcaagaattaaagctttacgaatattctcaccttgcatcatagcatatactacagaaaggccatagcagaaagcagaacaaccaagagttatatcgaaggctatacaattatgcgaaagccctaagcgctcctgaagaataagtgaggtagctggcatacgataatctggtgtctgtgatataaagacaagaaggtctatctcaaatcgatcaatattattatctttcaacaatttttctgcagctgcaaagcaaagatcagaagaacaagtattttcatcagcaaaacggcgttcaaaaatacctaccttatcaacaatctcttttacctgatctgcaggaaaacattccgtgtattcataattatttattacacgtttaggtacagcagcagccatagctgatatgccaatattctgatacgtaagaaaagccattatccctcaatatatatttaaccaattgctatcttataaaggtcttcaatcgtagaacattcctttatagctgaatcacctatttctttttcaaattcttcatcaaaaaaggctacaagcaacattaccgaaagagaggaccactcatctaaatcacgaaaatcagtatcgccatgcaaagattctacatcctctacttcaattacctctgcaaatttctctataaattcttttaagtccataatagataaattaataagtacaacatactatatttataagtcaacatcttcccacggatagggattctcttcaatattcttcagttcttccattgcctccttctgctcagcagtcaatcggaaagtcccccagctatcaataataacatgggcctctttagctaactcctctgcataaacctcaccatagcaataagtcagcagacggactttcaacaatgaagcagggatcagtggaagaacgttaagagcacgctccagaaccttctgaatatattcctgtttatgcccattatcatacattgtggcattgaaggctactaaaagacctaaacacagctcagcttcagcttcaggagttgagccatgttttccatacgagtttagggctgattcataaacatcacgattcagacgggtgaaactatcaacataaatcggactgccatcctgacctagagtgagaagactgtgagccagggaaaataaggatgaaacttgatcactcatatatttaattatgatttagaatttatgatttatgacactgaaattagtcagttatcggttctacaagcgaagagtgaataaaagtcgttgcaacagccatgacaccttcaatattgacaactacacgacgatcgcgacggatacgaacaaattctcctacagcaccctcaaaaacaccgcccatgacacgcaccttctggcctcttaccagttgaagttcagcgggttctacataaataaccgattcttcgtaggtaccagcaacaagaatgaaactacgcatctgatcgtctggaacgataacaggaagatgatgctcccgattcattatatagcgtatagggatgttcataccggctttatccttcaatgtatcgatacgcttacgagtagagcgaatgaaaacaaggttatgcacggcaggaacaaacttacaaatgcgacgaccatctttcacgacataatcgcgacgcatcggaatgaaattctctatcttctcttcatccagaaaagctttcagagccagttcacggccatatgtgacacgtactgcgaaccagtggaggcgaggggggatgttcacgtcagaatattctttggggacaccggagtagtgaaatacttaccgattattttatgtaatgcagttgttttcaacaacttatttagcattcatcttattccaaagcgttccgtcatctcgatcaaaaagcagtgaaatagttatgtaaaaaggttattaacgaagagataaaagaaaacgaagtgtcttttaatcgttcgtttaatgtgcacaattttaaacgtaaaaaatgggtaccaagaattataaaaatgagaagatattaaatccatttagatataatatagaat

SEQ ID NO: 6493 - DNA, 26616 bp, Unknown
  gut microbiota DNA sequence
attacctcaatcatctattaatcaaacaaataagcataattcacacaaatttatgtcagaatcacatatccccaattaatcaaatattcatacgcgcatgtataattagtaaattcgcactataaaataataaataaaaaacaagcaaatgaaaattaggctaacgcaactgacaaattctctaaatatcccacatatgaaatattccagattactcgcagcaatcatgatgcttacaggagtgctgaccgcatgctcggatcaagaaaacgaacaggacggtgcgaacgaacgaacagcactgagtattaacgccggtatcggcgttatccctgccggcacgtcctctgcaaccacccgtgccacagatgcttcctggcaagcgaatgatgccatcggtatagtgatgctggatgccggaaccaacactgtgaccgaaggaaaggccaattaccgttatattaccacaaccggaaacggcagttttaccccggacggaaaggagcataccgcctattatcccaccgcaggcgcccaggtggacgtactggcttattacccctacaccataaccatatcggcaggtagtttgaatattcctgtggacgtaagcgatcagagtaatctggcagccatcgacctgatgacggccgagaaagtaaccggacgctcgtcgaaggcgccggacgtgtcacttatgttcacacaccgcctatgcaaactcgtgctgaaagtggtaaaagacgaaacgacttccgacgtgacgttgacaggtgccacagccatactggcaggtacagccaccaccggaaactggaacctgataacggaaaaactcagcatggaaggagaagcaagagacctgacactccccctctctgctgatggaaccattgctaccgccatcgtgatgcccacccaagccggagacggaaaaaacatcaccgtgaccaccaccgacggcaagagttacaccgccacaattgccgccaacctcgctctggctgccggaacagtgaacacatacaccatgacactgcaccgcaaccaggccagcatcactgccggcatcacaccgtggacagacggtaccaccgtgccactggaaagcctgcacatagaagtacctgctgacgccaccgccaacggactgaccaccttcgaaatgtggcgcaaccaggcacagaagacagatacacgcatctatactttcagcaacaacggaaacagcggaaccggcacctgggctgccactccaaagcctttctacattgaagagatcgccacaaccgaccatttctacgccctccacacacccgccgatgaccggaaagatggtctgaccgggctgaaagacctccttaccgccggccccgcatcgctacagtcttccgctacgggaagtatcgccaatagcctctccctcaatttcaagcacctaatggcgcagctcaccgtaacactggcacccggcaaggacttccccaccggcgtatcaacggaaggagccaccgttatcttgcccgaaatgatctcaggatacaccttggacggcattaccctgacggcagacgatacaaagaagaccggatacaaaaacataaccgtaacttcgggacggacagccatcctcaccgtagttccgcaaacgttgtcccaaggaactgaaatcagcgtaaaactaaccggtggaaacacctataagacaacattgggcaaggccgtagcattaagtgcaggtagcaaaaccagcatcaacctcactatcagcccgacgcaaacggcaatcagcgtttcagtgaatccatggacagacaccgatgccgtcgcccaaaacatcaccatcgaaggaatagagacaggaagcgccacgggaagctatgagtccgcagacaaagacttactggtactgaccggcaccaacgagactatccccaccgaaaagcataccgccagttacatatataataaggtgaacaaccaatggaactccaacgcccctctctattgggacagcttcagccaattcgccgctgcaaaggcaaaaggcggcagtgcagacgcagcaggcgacaatacaggcaatgcagacagcaacacgccctgcaccttccgctttgacgccctcatcactcccgccgtcacacccacggaagcacggatagcctgtggtgcagtgaaagattacctacaaggatcgctcaccgccaccactttcggtacaccactcagtttccggctaagccatctcatggcgcaaatcagcgtgacactgaaagcgggcatcggatatacggcggaagacctgagccaaaacgtcaccgtacacttgtacgggttgcataccctgaccgacgaaggcgtgaaaactgacggcaccctgatcctaagcaaagaggccgcatcttctccattaaagatgaacaaggcagcagaggcaaacgctgaaggaaacttcacgtacactacccttgtggctccacagactatcgcccagggaaatctcgtcgcacgcatcaccctcactgcacaggaggcggacggaacgacacccggcagcctgaactacgactaccgtgcgggaagcaacggattcgtctaccgtgccggacagaacaataaactggtgctcaccgtcagcaaggcgggcgtgagcgcagtgttcaccctgacggactgggatgattcgcaagaggccaccgagggggatgtaacggtagattagagccgcaccaccctttagattaagaacaacttaaatagtaagaaatataataataaataagttttgtatatagcctcaaaggctttagagctattgcgtagggctttcgggctgacaagctatatgcaggacgtgaataataaattaacaaaaacagtatgaacaagctaagttttaaaatcagcaccttgctggcagttgcagttctttttgccgcgtgcagcaatgacgagacattaacgcccgaaactgacggacaagtagacatcagcactcgcgtgaatgcgggtaacgaggctacggccgaaggcacctacgcaccaacagacggcacccaactcttcctttattacaaggagatgggcaatgccgacgacaacggcaccttcacctacacgaacaacaaatgggaaaatacccggaaactctactgggacgacctgacgtccgtaaccgtaggagacgtgcaagcctaccccttcttcgccgcatcaccacaaacgcccaccgcatcgccggccgtatccgtcaaccagaacaccggcaacgcctacaccaccagcgaccaactcatcgcctacatcaccgttccgaagcggcaaaccgtactcaacctcaagttccgccacgtattgtcacaactgaaggtagtcatcgagtcgcctacgggaaacaatcaggtagacctcagcggaaccaccctcagcataaacggcacccggacgacatactcgctggcatacaccggcaccgcacaggataaggacggcaacgatatcaccgtacccagtgaagccgtgcccgccatcgccaccgcaggcaccgacgcacaggctgtggcagtaactccaaagaccgtagcccgcagtacaggaaacgccacggaagccgcacaggccaccttcgagggaatcctcccgccgcaaacgtgcagtcccgtgcttgccttcaccatcgaaggaaagacatacacctacaaagccgttgaaaccacactggtagccggaaaaaccaccgcctacaagctcagcgtaaccaagagtggcgtagaactcagcagcatcaccctggaagactgggataccaccgcccccgccactaaagccgatatcaaagccgacctcaccggaacagcctccgcaggcggtagtggtacggaagccatcaagggaaccgccatgagcatctggaaaaaaggagtcggcaacacaggaagcacaacgaataacgcacaggctgacaaggccgcggcacacgtctacaccttcgccggcagtgcatggagcagtacgaaccccatttacgtggacgacacaaatctgactaacgaccgtttttattctaccatcgagaacgccaccgacagcaagacccgggtggtagatctgataggcgccggccccgccaccatgggacaaggcatcctgaacttcggcttccgccatttgatggcacagctggccgtgaacgtagtagccggaacggacttccccgcaggcatctccctgaccgacgccaccgtaaagacccccgccatgctgacctcctacactctgggctacaacaccgctgacaacagccttctgcaagtgaatcccaccgtcggcagcaccagcaccgcctacacagatctcgccaccggagtttccgccactgacaacaccggtaccgccatcatcacgggcgagaccacctacctcgtagtgccgcagacgcttgcccaaggcgcatcgttcaccgtcagcgtgggcgacaagacttacaccggtacactcaacgcagctctcactctgcaagcaggcaagaagaacgtcctgacactgaccctgaaccccaccgccatgaccgtgggcagcatcacacttgcggaatggggagcaggaagcaagggtagcggcagcagcgaagtggacggagtcaccatcaccaccaccaccctgacgaacatcgaccaagccggcacgctctacctggcagccacggcagaaagtacctccggcgtagccgccaacggcacaggaacttatcccgtgaaatacgagaagagccaagcctccatcgacgatgcaaccggtagcggatactcccccatcatttgggacaatctggcaaaaggaaactacacctatgccgccctcttcgtccccaaagaatatcggcacgaagccgtggcaggcaacaaccacgagtttgactacctcatcgccacttccgacgtcaccgcatggggcacacagcccggtttcagcaccgaaggccacaaactaacacacgccatggcacagctggacgtgaagttaatatcgggtacagacggattcacaaacgctgaactgaacgccgccgccgtaaagacagacagtaaaaagaaagtatctgtcggcagcaccaccgccacactgaacatcagcgatctcaccactgccaagaacgtagccctgaagaagaccgtggatgcagccgatgctagcggtaccaacgccaccttcagcgcccttattgctccgcagcaactgaagcagatagtcatcaccatcaacgggaacaactacacgctgaataaagaactgacgatgacagccaaccagaagttcagcctcgaagtcaccgtaagccgcacgccgctgggcttctcggcagctgtgaccaactggaccgaagcctcgatgacagaaggcggagtggtagtagatccctaaataaaacaaagaaagatatgaagaagaaaaataatctattcctgaccggttgcctggcactatgcaccctgacagcctgtaccgacagcatcgacgacgcatcggacacgcgtgacccggcagatgccgtcaccctcagcgtgaacaccgatgacgccaacccgcagacgcgcgtcaccaccggtagcaccgaagcatatatccccgatcagaacgtagacctacatctttacagcaactccgtgggcagctccataacggccgtatacaacaacaccgccggtgaccaaaccaccaacgccacctgggaggccaagaccggcacgtcccctctctattgggacgatgccatcggcaccgacggcaacaagttctacagcttctacgccgtggtgaatgcgcacgcatcctccggaaaaggcagtaacgacaatgccgtctacaccatacccaccaaccaggctgacccagccaccgactccgagaatttttctccctatgaacgggctgacctgttgacggcttatacttataccacccggcgacgtcaggacctccagttcaccttgaagcacctcatggcacagctcaccgtcacactgaccacgctcgaaggaaacgacggattcagccccacacaactggcgggagccacagccgaagcttcgctgatagcgccctacacactggtgtatactgacgtggccaacaccacgaatgctgataaagctaaagaaacgcccgccaccgccactgcaagcggcaccaccagcaccgctttcaccatgcagcgcaccctgcactacaagtcgggcactgaagagacggccggaaacgtggcgagtgtcaccttccgcctcatcgccccgcctcagacaataagcagcaccgatgacggcatcgtgctcaccatcgacggaaagacctacaccttcaagcccgacaaacccgaaaataacatccagctgacagcaggccggaacaccatccagcccatcgtagcccggaagtctgtactgatccccggtaccatccaactgaaagactgggacacctcgaccaacgccagtcagagtgtgacggcggacggagtggtgacacctcaggatattgatctctcgggcatcacggagacgggaacactgtatctgcgggctacaacctcgacgaggagcgtcactgacggcaccatcggtacataccccattcaataccagacatcttccacaggaggtacagccagcatcaataccgccgatgccgcctacgcccccatcctatgggacaacctgaacaagtgggataacgatgcatccaccggtaccctgcaaaagtattattttcatgccgtctttatccccaccaactaccgccacgccactaacaccggtgcggatagaaacaaggaaaaccacgagaaggactatcttgaaggccggaacgcagcaaccgaatggggcgaatcacctaagttcaccgaaaacagctccggcagcggcgatgaccggcgcttggagcatcagaccgtccggttcatcatgaatctgaaaagcgatggtacctacgatgccgccactctgaactctgcctcaatcaagctgaagcgcaacaagaaaatgaccatctcaggctctggcaacaatgcatggaacagcatcagcgatggctggcccagtatcaccaccgccacgcttacatccggtgagtccaccgacgtcaccctggtgaagatcgaggatgccaccgacagtggttccggcgccactgaagccaaacccgcccgattcgttgccattatcgccccacaaactttaggagcaaacagtgcaagtggcgccactatcggtactgactatctgatcctgaccttaggcagcggtacggcaacagagaaaacctacactctgaaagcagccgacaaggatgggctaacgctgaagtacggcagccagtacaccctcaccgccaccctgataaaatccgaactcaatccgggtaccattgcggtggaagcatggaaagaagaatcgggtgaaggcaacttcgagtggcaatagtaactccgattcttccgacgcacgggagagcgataacgagacgaagaaccaaaagacataaagaacaagaaacaatgaaaaaacaaaagaaaataaagacatgcaggtacagcgatgaattctggaaaaacgtctggtacaccatacgctacggcgattcactgggtgaccggatcatcattccactgctctcactgtgcattctcctctgcatctctttcctcatcttcctgctgacgagctgcacagccgaccctctgcctgttaccgaccccgaaggcaccggcaccgaaggcctgcgcactcccctcaccatcggcctcctcaccatcgagggtaacgatggctacgacggctcagtacccgctaccacacgcatggcgaccgaccccgcaggcaaagacaacgcttgggaagcgggagattgcatcgccgtcagtgcccccaagctgggaaacaacgacatgggaagcaagacgctcaccgccacctatgtatataccgacataacggacaacctctggcggcagataaacccgaatgacaacagcgacccataccgagctcaagctgaagctaccgacatctatcccctctacatcgacgacatcgaccgcaacagtgggaagacgatttccgtagaaacctacggcggcaacctccattgggaaggcagtatcacatacacgaatcaaaccacccggaagaactactgtctacagaactacctatcctgcgacaatgcccggatagccgaagccgacaatgaaatccccggcatcaagcgcggacaactgtacgccgaactccttcaccggcgcgtcagcatcgtggtgcgggtaatagaccagacaatgcccaacgtgctacccaccaccggtgaagccactctcgacggcaccgacgccaacgatatcgatgctgtgaagctgacactgaccggtggccccaacgagaacagcaaaaacaaccaaatcgtctgctggcgtaccggtaaggctacggaaacgataaacggtcggcaacaatccgtcaccaccttccgtgcctatatgtacttaacggacgtgccgggcattacgaccactaccgatgtcagcacaggaaaacagagcggcaccgtccccgacggctctaccttgggtaccctcaccttcacccccaacaccggaagcacaccgcagacgctgattataaaatattctatcaccaagaatgccggcgtcccccccaccatcaccaccggcacgcgcatcacagtgatggcacccttcaatgtttcccaaaacctggacgccacggcaacgttcaacacctgggaagaaatagacgcaggagatacgggaacggagacaatagagctgaaacctgccacaaatccagacggtacagaaaagaaaggtactaacggccaacctatctatgaactctcttcagcccaagacctgctactctttgcacagatcgtaaacgggacggacaaccccgcaggcgacagtgtgaccggaaacctgaagctatggtgggaacagtgacctgtaccaagcaacccaagacagtaacgaaagtccaaaaacaatagaacgattatgaaaaagaaaacaacataccttgccaccctcatcctgttcgccctcggactgatgtcagcctgcacccccagcgaactggacggcgacgacaacagtaaccccgacgccacaccggtgccactggccgcaaccgtcagcctgcccgcaacgggcacggtgacccgggccaacgccaccaccggcagcatcaagttcgatgtcagcggcagcagcttcaccctgaggcgctacgaccaggcacccgacggcaccaccaccctgaccgcctccgccgactacgaaatagcaaaccgcaacgacaacacctccggcagcggcaccagctcgcaatacttcaagctgaagacgtccacgggcacctccgccaacacccacatccccgtcatccccactgaacaagccgacctacgcatcgaggaaaccgccgcaccggtactgatgaacgtccccgcagacatcagcggtacaagcggcactgctgacgatgccacgaccaatgtctacgtccccttccgcacccggatgaagtacggtgccgaagtacccgcaaatcccgacgtcagcatcccctccgccacggacaaagaacggaccggcatcaccctctccgcagacaaaaaggcaggcatcgccgccatcaaccccgcctacaccacagctgccctgcgcctggtgctgaaactctacaacgccggacaaggaaccgtggttaacaacgcatcctgccccctggctatgacaggcgacagccccaccactcaatacgcacctaccgtaacgcacggcacccaagccaccctcggcacggcccccggcagtatcatctacaccgacgccacggccacctgccaatacacagccgtcagccagcagatcgtcatcttcggcgaactgacacccggcacgaacaccagtgaaagctccacaggcaccaaccggctcactccgggcagcacatgcgtggcagtacttaccacctccacaggtgaactgctttccgtcacctggcctacaagcgctaccatcaacgccgtgccacagcccgggaagatgttgacgctcaccgtacatgtgaagggagacatggcctacatcgaccccaacggcattacaatctccggatttgaggacggaaacggagaaggaggagagacggcaggcggaagcccgggcatcgccagtggtctgacggagctaaatccggacatattctgcattgcaaatccaatgtgggtggtgaccggaggaggcacagaggccacttccagcagcaacaccgacagcaaagacgtgacagtcttgaagaatgtgcgcacggcgctgaacaagatatacactccggataacgacagctacaccggccccaactacatcgacctaatgctgacagatgtgaccacactgccaacatacaacaacgatggcgctttccaaagctacaagcagttacgcaacatagagttgcctgcggtgaccgacatcgaggaatacgccttctacaaatgcgaatccctcaccacagcaagtatcccatcagcaaagaccatcaggaaaaacgcctttattggctgccaagctttaacaaacctcgacatctccggcgttacccaaatatggaacttaggaacttcagaacaaaactacctgctcagtgcctttggcagcgacgcctaccccaactgtgacctcgtgctaaattccgccctggaacaatactgctatgccgccgatggcacctcgcagaacggtccactcgtaaaactcaagatagagggccatgatagtagtggctccccttacagctacaccatcaccttccagagcatcaccttcaaatgacggcaacagagacgaagacagcagcacgttcgctttatccgcatcgtccgcgtatccattgaactcataacccaataaacagcatagcaatgaaaaagaaattcatacccaccacattcaccctcgccctggcaaccttgagcctcgccctcatactgcctaccgcctgtacccgggatgaactcataacacccgtccatcccgacgcccccgcaccctccaacggcggcacccccgatgcccccgcactcctcatctccctcggccaaaagcccggatacgcaggagaaaacgtcgagtcgggagagtccgtccccgccacccgcaccagcaccaccaccggatgctggcaggcaggcgaccaagtcaccgtcaacttcacctactacagcatctccgcccaggaagctcaatccgatattccctccacagccgacgacgaggcccgaaccgccgccatcgaagcacgcctcatcctggcccagctctccaccggcgacacctccggaagtacctcacaacagaccctgacctgcaccgctgaaaccaccggagccactccgaccaccccttcacagtggaccgccacgcccttgctcgtcatcgtccccaccggcacacgctccatacgcgcccagtacagctaccgaggtatccccaatccgttgaccggcacttccgaggaaatcagcgccaccaccggcactatccccttcgacctgaaactgacagccgacgatctcgcgcagaaaaactacatcgtccacctccccgccccccaatggaagcgacagacggcactcgtagaagtcactggtatccctcagggaacttacctaacgctacgaaccaccggatggggaaagggatataacaatcagaccaaccaatatgacatagaaatcgacgtcatcgccgactattcctcccggcccgccaccgccacggacggcaccgctctcttccacctgcccctactgaagcagaagcccaccgaagccacggacaacgtgaaagatctggaagccatagtgggagagacacctttctatatatactacagcctgccactggacaacaacctcgttgcccaagccaagctaaccaaagcacaggacaagttcacactcgactactccctcacctccggcggtaacgaagtggacttgcagggaatggtgacagccgacggtctgctggacgacgccacccatggaacaggaaagctgaccaacgtcaatccccgttggacggtgacaagaggcggaacggataacttcagtggcaccacgaaagacgccactgtgctgacgaacgtgcgcacagcgttgaacgtgatttacaccccgagcaacagcaactacaacggcgtcaacggctacatcgacctgacactgcaggacgtgaccacactgccgaagcaaaacaccggcaccggtgctcttgagaaataccaccagctacgtagcgtggaattatctgcggcaacaagcatcggcgagaaagccttctactactgcgaagccctcaccacagcaagtatgccgaaggcgacaagcatcgaaaactttgctttcgccggctgcaaagctctcaccacagtaagcatgccacaaataacaagcatcgggagatacgctttcaataactgcgatgccctcaagacagcaagcatgctattgacagaaaccctcggagaaagcgcctttcaaaactgcaaaatcctcaccacagcaaacatgccaatagcaaacagcatcgggggatacgccttcagtggttgctctaccctcgccacagtaaacatgccaatggcaaacagcatcgggaacaacgcctttttcggctgcaaagccctcaccatagcgagtatgccgcaagcgacaagcatcgggcacagcgtcttcaatggctgcgacgccctcatcacagcaagtatgccgaaggcgacaagcatcggagatctagctttttccaattgcaaagctctcaccacaataaacatgccgcaagtgacaagcatcgggagcagcggcttctccgcctgctacgccctcaccacagtaaacatgccgaaggcgacaagcatcggggactataccttcttcaactgcgccgccctcaccacagtaaacatgccaatggcaacaagtatcgggagtggcgccttctccgcctgctacgctctcaccaaagtaagcatgccgaaggtgacaagcatagggaactatggcttctccggctgcaacgcccttaccacagcaagcatgccgaaggcgacaagtatcgggaacgatgccttcaacaactgcaaagccctcaccacagtaaacatactacaggcgacaagcatcgggaacagagctttctccgactgcaaaaccctcaccacagcaagcatgccgcaggcgacaagcatcgggagcggagccttctacggctgcatcgcccttcagagcctcgacatctccagcgtcacgaagatagagaagctgggaactgattacggttccatgttcttccccgccttcgacaacgccactgaccccgagaccttcaagaactgtgacctcctgctgaactccgccctgaagcagtattgctacgacaccgacggtacctcgcagaacggtccactggtcaacctcaagataccgaccaagataaacagctctgatgagaccgacgcctacaccttcaccttccgcagcatcactttcaaatgacagcagagatgaagacaactcggttcagctccttatagcgaacatgataaaaaccgagtaaaaggaacaggccgaaagcgtcaccaccgcgaacggagcacaataatcagcattcaccacagaggggtacagagggagaaaaaagagaaaagacaaagaactctgttaaactccgtggtgaaaaaagaaaaaatcgataaccccagaattaattgcatcacaatgaaacagaatacccctttcacccaacggcgccacgcccacatcctcaaccggagcctaagccttgtcctgagccttgccctaagcctcagcgcctgccaccccgactccctcgacgacctcgacggtgacaacgacagcggcatcgccctcacacacttccagacagaaatcctgacgtcaacagacgggattaccaccatccccaccgccgcccgcacccgctccgacggaaccgatgacaagggctacaccggcctcgtgaagacccgttttatctccgatgacgtgattcacatcgtactcactgatgccgacaacagcaatgccatcgcctactccaccgccaccctgcaacagcaggacggcagcgccacctccaccgcccggtggatcatcagccccgccatgtccactcctcaaaacggcaacttcgagctcctcgccttctacaacgggcagactgccccctacatcgcaagcagttcccagtccgcccccgaagcggccctgaaggcctatattcaagccgaacgcggctccctgttcaccaccgcccccgacaccccaccctatgtcgatgcgctgacagccctatacagcagccagtccggtaatcaaaccctagccaacgatcccctcaagccctcaccgggagccctcaacctcgcctccgacggtactctcaccgcaagcttccagcaccgcaacgccatcatcaacatctccggcatcactaatcagctgagcgcccccgtcaataccatccgggcaaccatttattcggaagacgccttgaatcacaccctgcccctcacccccattgccgatgcaaccgaagccggcaacggcgcgtgccaatggcaagccatctcccgcctcaatctcaacgcaagctatcagagcagtttctacctccactcactcaccgtcaccctgggcggcaccgtcaatcgtgatcccgacaccggtctgaacaccgtcacgggaggcactcaagtcactgtcaccatccccgcaggcgacaccgcccccgacgcagccgatccctccgcacgcggacgcaggctctacatagcccgccaatacacctaccgcctcagtctgctgcccggtgcctgcaccgccatccctgccaacggagacctcgacggcaacgatgaggatatgaagtgggacgaccagggaaacttactcaccgtgccgcaaggatacacccccatctacaacgaggaagaactgcgcaagataggtgtgaaaaatacagacggggactataattataccaactccgacggtaaaaattatgagtactccctttctgccaactacatcctcatgaccgacatcaacctcactccgggatacgatcccgccaccggcactggcggcacactgcccgataaagatttcaatgacataccagacgaaggcaataccgaactctggacacccatcggcaacgagggtaccagcacctccttcaaaggccatttcaacggcaatggtcataccatcaccggcatgactatcaacacatcaacactgaaaaacgccggattcttcggctatacctccggagccgtcatctacaacctccacatgaaggacgcacgggtgaagaatatgaacaacaataataagaccggtagccttatcggaggctgcgctaatggcaccaccgtttctctctgtagcgccaccggctgcgcagtgagcggcaatgagaccggtggcctgataggtgaaacctctcagactgatattactctgacccgctgtcacgccaccgactgcaaagtatccggcaccagctacagtggtggcctgataggttacaatagctccgtcatcaccgcatgctacgtacgcaactgcgacctcagcggctgcaccggctaccatggcggtctggtaggatgctattctaacgccatcctgttcggttgctacacctccggcaacacgttcggtagtaacacttccgcttcccttgtcggcagcaactacggcagcatcatcgcctctgcctacgctgtaaacgctacgaagaacgataactccggtgatgccactaccatcgggctaatcacagaaaacaaaaaaagcaacaatgacctctcccccaccctctccggcctcgtctcccccttcaaggaaagcagcagcacaggaaacaccgacacgaacggtgagcccaccggattcggcttctattggggtacaggctatcagcaactgctcgtcaccggtgccgataaagatacagccgaaggcgtcaccaccaccactaagcctctttttgcactggacaatgaaataaggaatgactgcacctttagtgtcaccgcccccatcatagaaaacggtacagtcaccaccgcaggcaacaccaccctcacaaatgtctccacggtgatggtaaacaccaccggtaacatctatgcgcagaagcgcaactggaccgccgccggcatctggggtgctacgctcgacgcagcagccggaaacaccgtaggcagcacggatgccacaaagaaggttatcctcgccccgcccatcattcaatggagctatcaaggggagcagtagcatcgctacagcacagcagcatccgggaaactgaccggattaaaaatcccggatgaaaccaattataatcattagaaaatgaaaacaatatgaagcagaatatccaacaactcatcattgccgctaccattattctggcggcaggcaacaactgtgccgtagcacaaagcaacagtacagcaatcagcagtagcaaaacaatcagcacctcctcgccctctccccgcctctccctgcgcagcaacctcctgctatgggcctttggcagcccctcgctcggcatggacctcaccctcggtcgccgctggcaggtaggcctcgacggctcatacggaaattggtcgctcagccaccgcacccacgccgcccgcctcagcaccgccggactgcaactgcgtcgctacttccgccccttcaccaacagagaccccgcctcccacccaaatcttgacatctacatctcttcctcccgcggcgcctacctcggcatcgacctgcgctatacccacttcaacgagcagctactcaccgccggcaccccgggacgcgagggcgacctcatatcagccggaatcctccttggatactccttcgcacttgacccctgcggccgctgggccattgacgccgcacttgccctgggatatcagcaccaaaactacgaccgatacacctggtacgcccccgccgcccaaaaccggctactcggtacccgcacccacaaccgcttcacactgacggcactcgatgtcgcactcgtctaccgattctgaaaacatccccattccgcccaccgagcccctctcagcagcggaagaatacaacagccataaccggaaaaccccaagcaacagccggaaaacaaaaagaaaacaataactcgaaaacagcaagaaaaataatatgaaaacaaaacaatacgccacccacccgctcaccacccaatccgaactaccgtcggcaatcctgtccgcacttacaatagctctcctgtcggcgctcctgtttacctcgtgcagtaaacaccactacctcgaactcttcctcgacccagacggcgaacccatcgaaaaccccggccgaattttgctcagcgcccccggcgtcgccaaccctctgctacccgccatcctcaccgaccccacccgtgaggatcgcatcgttgccaccgtcctccacggccaacctgtcgacgtagaagccggcacctacaatctcctctgcgccctccccaccgatggcagcaacactgaatatttcggcaccgacgccttcaccctcaacggcaccaccatcagcctccccctcctcgacccagacgggcggcttccccaagcccccgatgtgctgactgacgccacgcccgtcaccgtcacctcgggacgcaccattcaaaccgccctcacccccgcaccccgcactcgtctcgtccgcctcgacgtccgcctgcagggagccgacgcatcatccattaccgccatcaccgcccgcctcgaaggcgtcagccgcaccgcacggctggaacaacgctacacggccgtcacaacccaaaccgccgctgaagttccaacccaaacaaactcccccgcccccagtctacgcaccaacgcgaaggccccctactacctcctcactaacctgcaactggaggcctccacccccaccgaccccgaagccaccggtaccttccgcctcctgggcacgaactcctcagccaccggccaacgcatcctcattaccgccaccctcgcgaacggcgccaccctgagctacgagcaagacgtcacccccctcttctccggcttcaacccgcccgccacagccactaccctgcgcctggcagccaccctcaacttcggtatagaccaagtaagcggcaccatcataccctggacacccggatggaacgagggaggaacgggactctaaaaagttcctcttcccttgcttttctcccccacaaaacgtatctttgtctccgcaagacaacaacatcaactttaatcaaaacttttaatgaaacgacaagaacaattccactgtcgctttcttgactaccgtttactcggcagttgcctgctgtcctgtctccttatttgtctggcccgcaccactctgcacgcgtccgaaagcaactttaacgcccttaacgacaccattgccgctgacgtcgccctgcccgacagcctcctcaccgatgacaatgtctatcgttatactttctccaactttcccctggcctgccgtatcatggacgagttgcgcatccgcaaactcctccccacccatcgcttagacatcactgaaggcgacctctacttcaacaacggtcactaccgccacgccctaaaaaactatcgccgtgccctcgaaagcgactccatacgccagaacgacgatgaatatatggatcagctccaccgccttatctccacctacgactgcctgcacaacgaagtcgggaaagccgaatgtgtcaatctcctgctgggcaaagcaaaagccaccggaaaccaacccatgcactccattgccctcttcaatctgggaaagatgatctactaccagggcaacaagtcccaaggctacgagtacatgcaccaagccgtcgacctgatgctccacaccgattacgaatacaagtacgacaacctgcgctacaactacaacaccctgctcgtgatgcagcaaaaggacaaactgtacgaagaagccctcagcacactcgacgccctccagtccgtagtcacccgcgaacagggaggcgaaccccagatgcaagggctcgaacagaaagaactcaaagccctctacgcccatcgcgccgtagttctgcaacgcttgggacgccacaaagaagcagaagaattctacaaaaaattcctcactgtaagtcacgtacacagccgcgacaactacctcatcatgccctacctctttgatcgccgtatgtacgacgaaatcatccgcatgaataccacccgcgagcaattcctgatcagtcagagagacagcgtgaactatcacatggtcaccattaagcgcacattgggcgaagcctacgcaagtaaaggcgactaccgccgttcaacccactactataaacaactgtccatactgtgcgacagcatcaaaaaacgcgaagaacgcaacaccgccttggagctcgccgccatatacgacaccaccgaaaaggaagccctgctgcaacaacaggccaacgaactgcgcgaacgaaatatcctcctcatctcagccatctgcatcatgctgttgctatgcgccggcctggcgctcattgtccgatacaccctcaacatacgccgcaaaaaccgggcaatggcacgcagcatcaacgaagaaatgaacagcaaaaagcgattgagcgaaagccgcgacaccatcaacgccctgcaacagaagatagaacaaatgaaaaccgctgccgaatgcagacaagaagacaacatgccggacctgcaagaccatggaacggaagatgatgaagaaaaagataatgaaccgaagcgaggatacaacacactggaacagatagaaaaccgccggatatttgatctaatggaaggcatactcagcaaacagtctccttatctggatcctaaattctcacgccacgacttgtgcatgctatcgggcacaaaccgaactcgcctcaacgtcatcctgatgcagtgtaccggagtaagctctaccgcctatatcaacaacctgcgcctggaacatgcagtcgaactcatccgcgagcaccccgaatatatcatcagtcacatcgctgaagaatgtggattgcccaatgcgtccaccttccaccgcctcttccgcgagcgctatgacatgacgcccaacgaatacaggaatgccatctttgagaaataaatctgtggtgaacaaatattaaaaccgaaaacaaaccgtaaggaatactgttggaaggggaaacttaaaaacgataacagttatgaattacggtattagtatccttttcagggctatcccattgctgatggcccttttttgtttcggctacggagcctttgtgctcgacatggggacggacacgaaccgattcgttgcggggcccgtggtcttctctttaggaatgatatgtatcgcactgttcgctacggcaggcaccatcatccggcagattatccacacgtatagtacggcggcaaaatatgccctgcccatcatcggctatctggctgccgtggtgtgtttcatcggtggaatgacatacattaatgacggcagtacggtggcccatttcgttgcgggacatgtcatttgcggagtagctttcatcactgcatgtgtagccactaccgccacctcttccacccgcttcaccttcatcacgcaaaattccaagaagactgaccatgccgtacctgccaagtcattctcttcggcacaggcggacatactcatcattctggctgttgtgttcgccgtcattacatgggtttgggcattctggttattgggacaaagtgatatccacaccgcttactatgtggccggacacgttatggccggactggcatgtatctgtacgagcctggttgcactggttgctaccattgtccggcagatacgtaactcttatagtggtgccgaacggaaatggtggcccgccctcgtattggtgatgggtacactgagtatcctgtggggactttgggtgctgacgaatgccgacccaggcaagtcttccaccggatacattatgataggtctgggtttagtttgttacagcatatctagcaaagtaattctgctggctgttatttggcggaacgtctttaagctggcgaaccgaattccgctcattccggtgctcaccgcgcttacttgtcttttcctctctgcttttctgtttgaaatgacaacactgaatgatgtctactttgttcccgcacgcgtattggcaggattaggcggcatctgtttcacgctgttctccatcgtcagcattctggaaagcggaacgtccaattgatgataaatcactctcttttttttataaatcactctcatggatgggttggggtttcgccagctcatccataaacacttccacattccaggcatggtgcgccacataggcagccggaccggtatcacccgaatccagaatatcgcgcacaacgttggacttgtttctgcccgtcacaaagaaaatcagctgcttggcgttaaaaagcaaacagccggtcatggctatgcgcttctgcccattgtaaggattaacacttacctcgtaaggatggaaagaagaaagcaaatactcctgaccggggaaaatggacgaggtatgcccgtcttctcccgcccccaacagaacaatatcaagagccggaaagccatgccagagtggcgcattgcaacgcactatgcgagaatagctattcgcctcatcatcgggatcgttgctgccgtcaataggaaaaatatactcctcaggtattcccacttcatccagcaacagccggcgcatattgccatagttactctccgaatcttcggcaggtacacaccgttcgtccacccaataaatacgcatacggctccacggagtggcatccttgaattcttccgcccacaaatcgaacatgagcgagggcgtgctgcctccactgaatgctatgtgaaaaatcttctgcggctcttcctccatcaaactaataaggtgcttgatgagagcgcgtgccgtttcgacagctgtactatagatataagttttcataactcacaatattgatcagtgttcgtaaggtttttacacggattggtccagtcggcaccatgttcgtgcatcatagcttcactttccagcggcccccaggttccgacaggataaccgtagagaggcgcgtcaggatattcattccaatagcgcagcacaggatcaaagaaacgccaggaggcttcgacagcatcactgcgggtaaagagtgtcgggtcgccctgaatgcaatcttcaatcaggcgggcataagcatcgcccgtggcgcgtccgcccagttggtcgtaactgaagtccatcattacttgcttcacatcgaatcccggtccgggaactttcatgccgaatttcagcacaataccctcgttgggttgcaggcggaggattagtttgttagcccgcggacagtgtccgccatggcaatgaaacatctgatggggcgtttcacggaagtgcactacgatttccgtcaccttggtaggcatctgctttcctgtgcggatgtagaaaggtacgccgctccaacgccagttatcaataccgatcttcatggcgatgtaagtttcagtgcgcgaatcggcggggacgttcttctcttcacggtagccctttttagaaccggaagcggtatattgtccgcggactatatgttcattcaaatcttcatccgtcagaggtttcagtgactcgtagacttttaccacttcgttacggaaattatcggcggtgaagacagcgggaggctccatggcagtgagggccaccagttggataaggtgattctgtaccatgtcgcgcaaagcgcctgtaccgtcatagaagccgccacgctgttcgataccgagattctcgacagcggtaacctctacataatcgatgtaattacgattccacaacggttcaaaaatgccattggcaaaacggaaagcaaggatattttgtgccgtctctttaccaaggaagtggtcaatgcgatagatctgagactcttcgaaaacggaagcatagatatggtttaattcttgtgccgacttcaggtcgtagccgaaaggcttttcgacgatgatgcgggtatgtttacgattcaatccggctgttttcagatgtagagggatgacgccataaagtgagggcggcgtagcgagatagaacagtaaattgtccggttccttttcaccggtgatttcctgcaaacggctgtccagggttccgtaaccttcttctatggcagggtccatactaaggtagtgcaaatgagtgcagaactctttcattcccacttcggccggtgtgacaaaatgttccagctcgttcaggatatagtcgcgataagtttcatccgcatagtcggtacggccgataccgagaatggcaaatccttcgggcaaacgattatccttgtagagcgagtagagtgccggcatcagtttgcgtttcgtcaagtcgcccgaagcgccgaatatgatcattacaaatttactcatagaatcttgtttttttgattagcttctgcaaattagcccttgcaataaattcattagctcttgcttcataattttattaccagggcttcattttatacattataggtgcctgattttgtatctccgccatgtccggtccagttttcatggaagaactgtccgcgaagttcatcggtacgctcaaaggtatgtgcgccgaaatagtcacgctgagcctgaatcatattagcagggagcttcgcagataccagcgaatagaaatagttcaatgcggaagagaaagccggaacaggcagttcctctttcatcgcatgggctacaaggtgcttccaaccggagagcaactctttgatttcttcccggaaataaggagcgagtagcaaatgtttcggcttctgctgtgcctcaaaagcagccgctatatcattcaggaatatactgcggatgatacagcctccgcgccacatacgggcaatggatgccagatcgagatcccagccgaaagattcggacgctttttgcaacacggcaaaaccttgtgcataggataccagtttagaagcatacaaagcggaataaatatctttcaccagttccggcttattatagaccacttgtgagcgctggcaaatgaattgtttggaagctgcctcacgcagatttttctgcgctgaaagactacgctcaaaaacagccgttgcaatcagtcccagaggcatacccaattccattgcattgataacggaccatttaccggtgcctttctgtccggcagtgtccagtatcttgtcaatcaggtaaccgcccgccttatccttatgccgaagaatattggctgtaatttctatcagatagctacgcaacttaccctcattccagtgggcaaaaacggaagccatgtcttcattattcagttgcagaagattcttcatcacccagtaggcttcggcaatcaactgcatatcaccgtattcgataccattatgtatcattttaacaaaatgtcccgagccggccggaccaatccagtcacagcaaggagtaccatcggcagcacgtgcagcaatactttgcaggatgggttttacttcatcccaggcagtaacggaaccgcccggcataatagaagcaccgttcaacgctccttcttcaccgcccgaaacaccggcaccgacaaagcggaaacctttcgattcggccaatgccacacgacggttggtatcttcatagtttgagttgcctccatctatcaagatatctcccggagaaagatgcggaaagagttgttccatcagttcatctacggcactgccggcacgcaccatcatcatgattttgcgcggggtggaaatggactctacaaagtcaggaatttcagtatatccttcaatacttttccctttggcacgaccgttgataaagcgttctaccacaccttcttccactcccggaacagtacggttaaacacggacacatgccatcccttgtccgccatattcaaagctaaattctcccccatcacggcaagtccgattaagccgatattagtcttttgtcctttttctgtcataacttgcatttttttgttattgtttcattgaaatggaaacaatatgtcaagggcatttgttcgtatgaatttcgaataaaaatcgtacttttgcaaacataactctatttcaatggagaaacttaaattcagttttatgaaaaaactacatatcggcttactgccgcgtatccttatagccatcgcattcggtattctttttggtaattttcttcccggagaattggtacgcctgttcgttacattcaacggtatcttcagcgaatttctgaatttctccataccgctgattattgtgggactggttaccgtagccattgccgacatcggtaaaggtgccgggaaactgctgttgattaccgcactgatagcttacggggcaaccctgttttccggtttcctctcttactttacaggagtaactatatttcctcacctgatagagtccggtgccccgctggaagaggtcagcgaagcgcaagggatatcaccgtttttctcagtcgccattccaccgctcatgaatgtgatgacggcactggtactggctttcactttagggctgggacttgcccaactgaaaaacgatacactgaagaatgcagcacgtgattttcaggatatcattgtccgtatgatcagtgcagtgatcctgccgttacttcctatttatatattcggcatattccttaatatgacacattcgggacaggtattctctatcttaatggtatttataaagattatcggcgtaatcttcctgctgcacatcttcctgctggtatttcaatattgtatcgctgcgctgtttgtccgccggaatccttttaaattgttaggaaagatgctgcccgcctatttcacggctttaggtacacagtcttctgccgccactatccctgttaccctggaacagacaaagaagaacggcgtatcctctgatattgcggggtttgttatccctctttgcgccacgatacatttatccggtagcacgctgaagattgtagcatgtgctcttgctctgatgatgatgcaaggtatgccttttgatttccccttgtttgccggtttcattttcatgctgggaatcacgatggtagccgctccgggagttcccggtggtgccatcatggcatccctgggtatcctgcaatccatgctcggtttcgatgaatcggcacaggcactgatgatcgcactctacattgcaatggatagcttcggtactgcctgcaatgtaacgggagatggggctattgcactgatagtagataagatatataagtgacaagccaataagttttgtattctcgtaaaaaataacgaattttgcccc

SEQ ID NO: 6494 - DNA, 9185 bp, Unknown
  gut microbiota DNA sequence
caggacggttcgtttctcgccgaattcttattacagaaaggatatgaagtacacggtattctccgccgttcttcttcattcaatacagggcgcatcgaacatctgtacttcgacgaatgggtacgcgacatgaagcaaaagcgcaccattaacctgcattacggtgacatgacggacagcagctcgctgatccgcatcatccaacaagtacagccggacgaaatatataacctcgctgcacaaagccatgtaaaagtatctttcgacgtaccggaatacaccgcagaggcagatgccatcggcacgctgcgtatgctggaagctgtccgcatcctcggcatggagaaaaagacaaagatttaccaggcctccacttcggaactttacggtaaagtacaggaagtcccccaatcggaaacaactcctttctatccccgcagcccgtacggagtagccaaacaatacggcttctggattacaaagaactaccgcgaaagctatggtatgtttgccgtaaacggtatcctcttcaatcacgaaagcgaacgcagaggagaaacattcgtaacccgtaagattacgctggccgccgcccgcatagcccaaggtttccaggacaaactgtatctgggtaatctggatgcacgccgcgactggggatatgcgaaagattatgtagaatgtatgtggctgattcttcagcacgatacaccggaagacttcgtgatagccacaggcgaaatgcataccgtccgcgagtttgccacccttgccttcaaggaagtaggcatcgaactgcgctgggaaggtgaaggcgtagaagaaaaaggtatcgatgtgcaaactggaaaaacgcttgtagaaatagatcctaaatatttccgccctgccgaagtggaacagctgttaggtaatccgacaaaggccaaaactcttttaggctggaacccgagacaaaccagttttgaagaattggtgaaaatcatggcagcacacgatatgaagtttgtgaagaagctatatctgagatcacttgaaaaataatatataaaaatcagaactataatgttagacaagaacgccaaaatctacgtagccggacaccgtggtctggtaggctccgccatctggaaaaacctgcaagataaaggatataccaatctcattggcaaaacccacaaagaactcgatttgctggatgccgtttccgtacgtaaattctttgatgaagaacaaccggaatatgtattccttgccgctgctttcgttggcggcatcatggcaaacagcatttaccgtgccgacttcatctacaaaaacctgcaaatacagcaaaacgtcatcggtgaaagttttcgccacaatgtgaagaaactcctcttcctgggaagcacctgcatctatccgcgtgatgccgaacaacccatgaaagaagaagtgctcctcacctctccgctggaatataccaacgaaccgtacgccatcgccaagattgccggactgaaaatgtgcgagagtttcaacctgcaatatggcacgaattacatcgccgtaatgcctaccaacctctatggtccaaatgacaacttcgatctggaacgcagccatgtgctccctgccatgattcgcaagatacatctggctcattgcctgaagcaaggcgactgggatgcaatatgcaaagacctgaaccagcgtccggtagaaggtatcgacggcaacagcagtaaggaagatatccttgccatccttgccaaatacggtatcagcaacagtgaagtgaaattatggggtacaggcacacctcttcgcgaattcctctggagcgaagaaatggcagatgccagcgtcttcgtcatggagcatgtagacttcaaagacacctacaaacaaggtgataaagatattcgtaactgccatattaatataggtacaggcaaggaaatctctatccgcgaactggccgaactgatagtttccaccgtaggttaccaaggtcagctgactttcgacagcaccaaaccggacggaaccatgcgcaaactgactgacccctcgaaactgcacgctctgggctggcaccacaaagtggagattgaagaaggcgtacaacgcatgtacaactggtacttagggcggtaatgcattaaattcaccacagagtaacacagagttttattaatttgaactcaaggaaaataaaactctgtggaactctgtgttactctgtggtgagattcatccgtcaagctaaattgtacatcccctccgcttttttcagttaaaaatttgcattctttctataaagccttatatttgcacaaatttcaactaaatgtgcaatatataatatcatggaacaaagttttatcgcctatattgagaacagcattaaacagaattgggacctggatgccctgaccgattataatggggctaccctgcaatacaaagacgtagcccgcaaaatagagaaagtacacttaatcttcgaagcaagcggcatcaagaaaggagataaaattgccatctgcggacgtaacagttcacactggggagttactttcctcgctacactgacctacggagccgttgcagttcccatcctgcacgaatttaaagcggataatatacataacatcgtaaaccattccgaagccaaattactgtttgtgggcgaccaggtatgggagaatctgaacgaagccgccatgaccattctggaaggcatcatcctgatgacggatttctctatcctgatatcccgtacggaaaagctggattatgcccgcgaacacctgaatgagttgttcggcaagaaatatcccaagaatttccgcaaggaacacatcgaatatcacaaggaccagcctgaagaactggcagtaatcaactatacttccggtacgacgagttattccaaaggcgtaatgctaccctatcgcagtctgtggtcgaatacagcatttgcatttgaggtattgccactgaaggccggggataagattatctccatgctaccgatggcgcacatgtatggcctggcattcgaattcctgtacgagttctccgcaggatgtcagatatactttctcacccgtatgccaagcccgaagattatcttccaggcattctcggaagtgaagccgcacctggtggtagccgtaccgcttattatagaaaagattatcaagaagaacgtgcttccgaaactggaaacaccaaccatgaaactattgcttaaagtccccatcatcaacgacaagatcaagacaaccgtacgcgaaggagtagtcagtgccttcggtggacgttttgcggaagttattgtagggggtgccgctttcaaccaggaagtagaacagttccttcgcatgatagaattcccctacacggtaggttacggaatgacagaatgcgggccgatcatctgttacgaagactggtcacgcttcaaaccgggttcctgcggtaaggccgtcccccgtatggaagtgaaaatcctttctcctgatccggaaaacatagcgggagaaatcgtatgccgcggacctaacgtcatgctgggatactataaaaatgaagaagccacccgtgaggctattgatgcagacggttggttgcacaccggtgaccttgcgttgatggatgccgagggcaatgtaaccatcaagggacgcagcaagaacatgttgctcggtgccagcggacagaatatctatcccgaagaaatagaagacaaactgaacaacctgccgtatgttgccgaaagcatcatcgtacagcaaaatgaaaagcttgtcggactggtatatcctgactttgacgatgcttttgcgcatggtctgaccactacggacatcgaacgtgtcatggaagaaaaccgcgttgcgttaaacgcagagcttccggcatacagccagatattcaaaatgaaaatctatcccgaagaatttgagaaaacgcccaaacgttccatcaaacggttcttataccaagaggcgaagggataagaaaaagaaactaacctttataaagtatcatctcaaatgaaaaacgaattattactgtctgctgccatattgcccatgtgtggtatggcaggagaagcgattgcggcatctccggcaaagggagcgccgaaagaaaagcaacgtccgaacatagttctgtttttggttgacgacatgggatggcaggatacttcgctgcctttctggactcaacgaacgcattacaacgacacttaccacacgccgaatatggaacgcctggcggcacaagggaagatgttcacacaagcatacgcttgtagtatcagctcccccacccgggtcagtctttttacagggatgaatgccgcgcggcatcgtgtgacaagttggacattacgcaaaaatacaacgcatgaacaaccggactctgtgatgatctatccggaatggaatgtgaatggtatttgtcaggaaccgggaatcgaacgcactacacaagtcactacgcttgcacaagtgcttaaagagaacggatatcagaccattcattgcggtaaagcccactttggagccaatgatactccgggagctgatccgctgacgatgggctttgaagtaaacatagccggacacgctgccggttcaccggccagttactacggcaagaataatttcggtaataagccggacgggaaaagtccgttggcagcagttccgggattggaaaaatatcatggcacggacaccttcctcagcgaagcacttacactggaagcgatgaaggctttggatagtgcacaacaaaaggatgaaccattcttcctatatatggctcattatgccattcatacgcctatacaaccggactatcgcttctatcagaaatatctggataaaggacttccacccgtagaggccgcctatgccaccctcattgaagggatggataaaagtctgggagatctcatggattatctggaacgcaaccatctgacagaaaatacagtcattctcttcatgtctgataatggcggactggctgcacatacccgtgccggagaactgcatacacagaattacccgcttaacagcggaaaaggttccgcttacgagggcggtgtacgcgaaccgatgatcgtgagctggcccggtgtagtagctccggacacgaaatgtggagattatctgatgattgaagatttctacccgactattcttgagatagcaggcgtccagaagtacactaccgtgcaaaaacgggatggtatcagttttatgccgttgttgacaggaaagggcaaagtcaaggatcgtgatatctattggcactatccccatagttggggaccttcgggcccgggtattggggctacctgctccatccgctccggtgactggaaacttgtatattactttgcggacggtaaacgtgaactgtttaatattccggaagatatcagcgagaaaaacgacgtggctataaagaatccgcgtatcgtaaagaaattagcacagaaattaagtaactatctccggtcggtagatgcacagcgtcctacgcttcgtgccaccggcaaattagccccttggccggacgaaattaaagattgaaaccaatgagacgattatttccatccattattgcattactgatggttgcgggtacactccctgcacagaccactgacagtccgtcaacaacaaagaaagacagagagcctgtcggcatcaacctatccttgtggaagaacatgtctacacagcagactgatactgtcggcagtacctgcctcaacctcggtcttttttcctccatgaaccgcctgaacggcgtgggtatcaatctactgggtggagtggtgttgcgtgacatgaacggtgtacaaatcacaggacttgccaacttagtaggaggcagtatgcgaggcgtccagattgccggtatcagtaacgtgaatgggaataatctcagtggcgtatccatatccggtttagtcggcatcacgggaaatcatgcacaaggtgtcattttctcggggctcaccaatataacaggagacaacaccagtggtgttatcataggtggtctgctgaacattagcggtgaaaactcttcgggtgtgcacctggcaggattagccaatattgcaggtgagagcttcaatggcatcaccacttccgggcttctgaatattgtaggccaaagtctgcgaggcatacaaatcagcggcttgggtaacatcacaggagaagacatgcacggtatgcaaatatccggactcggtaacgtggtaggcggaagttttaccggtgcacaacttgcccccatgaacatggcaaaaagcggaaaaggattgcaaatcggattattcaattactataaggagaacttcgatggtttccagttaggtctggtaaatgccaatccggatacgaaagtacagctaatgcttttcggaggaaacactacaaagctgaatgtaggtgcccgtttcaagaacaagttgttctataccatcttaggcggtggtacgcactatctggatttcagcgataagttttccgcctccctcttctatcgtgccggtctcgaattacctttgtacaagcagttgttcatcagcggtgacctgggcttccagcacatcgaaaacttcaagaataaagattacggtttccctgcacgcctctatgccctccaggcacgcgtcaatctggaatatcgcttaacagaccgcctcggtatatttgtcaccggtggttacggcggcagccgctactacaacaagggagttacttacgataaaggagtgatcttggaaggaggagtggtgctgtttaaatactaagtattaacgtaaattcgatataagaattggcgtataacggtatagaaaggaaggaaacaagttgacgagttgaccaggggacaaggggctgcgcaatgctcctatgccgcatggaaccttgtcccctggtcaactcgtcaacttgtcaactttccctcataacccgaaataatgagtcatttacgttattaggtattaaacatttgtcaatacattatgtgtagcagtcaatacctaatactcagtattcagttcttttcctttataaatcccgtcctatacgctaccagcaacttcttcaggtcctgtatctgcgttaccagtacttttcccttatcggtatctttcaccatcatgcgttgtgaattgaactcgacgacgaaagtattggatttgatatcctgtccctcttctattgctttctgacggctttgaaacggttcatgttgcactagctgtaagccatgtgaatgatataccagcgtatatccggcaattccggtttccggctgatatgctttagagaatccaccgtcaatcaccagcagtttaccgtctgcttttatcggcttctcacctttgataatcttcacaggcacatgcccgttaatgatgtgtgaatgaggacctgtaacctcaaattccgcaagaatacgctcgcaaatatccgcacggttacgcaaagtataataatatcctttggtctccttagacagttctttatctccgatgaaatagcgttcaaacgttgccatcttatccttgtcaaacgatggagcatttgggccacaccacatataccacacataatccagcgcaaaactcttctcctccgtaccgtcttcatcaaaataagctgtacgtatcagctgatccgttttacacaataatttcttaccccaatattctttctttccgatgcggacacgcttgaaactaccatcttcattcagaggcatcgaagcatgatacaacaggttactattacaaatcagatacataccaccatacgtaaataaacagcgcatgtgcttcttcagcttttcactgttcatgaacgaagcatgaatcttatcaatcaactcccgttcctcatctgacaggcgatacggatcagccggatcaatcgtcgggaagttggtatcgcgaagcggatattcctttccttcgtacacaaaaacgcctttctcgaaatcaatcttttccagcaactttcggttctgcatgccaaactcaggacgacgatctataatctccgcttccagtttgaactgtatcaccgtaatggctttatgcatctgggtaatcaaccgcaaagtcttctcgttatagttaccatctgcgaagttcatcttcggtgcaaagattgtacagggatcatccgcataggtatccatggcaaacgtggcaagcggcagcaagttgatgccatacccgtcttccaatgtcgccagattagcgtaacgcatcgacatacggatcacattggcaatacaggcgtcattacccgacgctgctcccatccaaagaatgtcatggtttccccactggatatcgaagttatgataatcgcagagtgtatccataatgatatgcgctcccggaccacggtcgtaaatatctcctacgatgtgcagggaatcaatcgtcagccgctggataagattacacatcgcgatgatgaaatcatctgaacgcttggtagagatgatagtgctgataatcacattgatataggcatgcttattaggctctacactcgactcatgcagcaattcctgaatgatatacgaaaattctgccggaagtgccttgcgtacctttgagcgtgtatatttggaagatacattctggcaaactttcaccagctggttcaatgttatcagataccagtcgtccaggtcagcctcctgttctttaatcagttgcaacttctcttcgggatagtaaatcagcgtacatatctctttcttctcactttcacgcagggtatgcccgaagatttcattcacttttcgcttcacggctcccgaagcgttcttcaacacatgctgaaaagcttcatattcaccatgaatatcggtcaggaagtgttctgtccccttcgggaggttcagtatagcttccaaattgattatttctgtactggcatccgcaattgtagggaaactgcgtgacagcaactgcaaataacgcaagtcgctcatgatactttcaggggtaatattactcatgatatctaattacaaattacaatttacaaattatatatgggcttgtgtcttcattccaaacctcaactctacgtttctaatcctcaactctacgttcccaatcctca

SEQ ID NO: 6495 - DNA, 2378 bp, Unknown
  gut microbiota DNA sequence
acattcccaactcttcactatcaacttaaaaagaacatcaacagcacttgtgcaataatcacacgcaggaacatgcacaaaggataaaccgtagcataagaaactgaaggattatcaccgggaatggtatcattcacataattcaatgccatcggattcgccatacttccacacaacataccggctaccgaaccgaagtccaccttcatccaacgaaaagcaataactcccataatcaatacaggaactaccgtcagcgcacagcccacagctatccacagcaatccttcgggacgaaagactgtatcgaagaaatgagcgcccgcgtccaggcccagacaagccagataaagcgacaaacccagtgcacgaagcatcaggttcgcactgcgtgtagtatacgtaaccatgtgcattctggggccgaaagtaccgataaggatacctacgataatcggtccgcctgccaatcccagcttcaccggagtgcttacacccggaatagcaatagggatagcacccagggcaagtcccaggataataccaacaaatacagccacgagattaggttctttcaggctcttcactgcatttcccagtactctttccacattctgtatagcagcggcctcacctactaccgtcaaccggtcgcccaattgcaaggtaagctctgccgtagccagcagcaatactccgctacgatatacacggctgatattgattccataatgattgcgcagatgaagcgaacccaatttctttccgttcagttccggacgtgtcaccacaatgcgctgtgaaatcagctggctgtcgatggcattccaatcaatgtcttccttgttccagtccgtattttcctgctcaccaaacagtacggttagtgcaggcacattcttttccgaggtgatgaccagcaggcggtcgccttcttttatcactttctcagaagtgggaatgctcacattcccatcccgccacaaacgggatatgacgaatttaggataactcaattgagctatatccttcacactcatattaaagattgccggattgtggacctgaaatgcaacgatatacggtttgttcgcatcgtctttctctttaatctccaaatcttccttacgaaccagtgccttgcgtatcatcagaatgcccaaaattactcccactacgcccaacggatatgccaccgcacatcccaaagccggcgtatttgcttcgatacccatctgtttcagagtttgctgtgcagcacccagcgcaggtgtgttagtagtagcaccacaaagaattcccaccatatccggcagcgatattcccagtccgtaacttcctaagagtgtcatcaccgtaccaatcagcactacccccacagccagcatattcagttgtacgccgcccgtacggaacgaactgaagaaaccggggccgacctgtaagcccaacgcatacacaaagattaccaacccgaaactctccgcatagttcagcatttgcgggtcaatagacaacccgaaatgtccggcaatgatacctgcaaaaaatacaaacgtcacgcctaacgatatgccgcaaatgtgtatttttcccagtcccaagccgatagcggagatcaacgagagtaccacaaccgcctgtagagcggaatgttcaacgaataaactgtataaccaatccaatgtgtttacgcttttaattgatttcggagtgcaaagataggaagtattcccggagaatgagaattaattgcataaaaaaagcggtcatcattatttgataaccgccttataccttgtacaccctcagggactcgaaccctggacccattgattaagagtcaattgctctaccagctgagctaagagtgcattatgcttttttaccgtagtggatacgagaatcgaactcgtattacatgcgtgagaggcatgtgtcctaaccgttagacgaatccaccggctgtttgcggaagcggggggattcgaacccccggtacagttacccgtacgtcagtttagcaaactggtggtttcagccactcacccacacttccttaaacctgcattgtttctcaaatgcggtgcaaatgtatgggaaacttttggactatgcaaatctttccatcatatttttttctgacttttttcaataaaagatgtaatctgttaaaagtcaaaagcaaagcatagaaaaaaaaagatgaaagagtgaaagaatttgtgttcaaattgaaagttccatttatttcttttctgtacggttatgaattaattcaccacagattacacagattcacacagattttattttactgattattagattaataaatctgtgtgaatctgtgtaatctgtggtgagtcttattcatt

SEQ ID NO: 6496 - DNA, 22884 bp, Unknown
  gut microbiota DNA sequence
aaacgaattaattttgatgcggtgcccctgaaaattgactcatatcaattcccctatccttccctttgcgtacctttgcgcgatttttcatcaccgtgtctcaaacacatacgaaatgatacatcaggaaagtttaaaaaagaggcttgccaaacttgccgcccctatttttatagaaactctgctcattatgatgctgggtgctgtagatactattatgctgagtcgccactccgatagtagtgttgcggctgtaggggtggtcaaccagattataatgctcacttttctcgtattcgaggtcatcaatctcggaacttccgtcctttgctcccaatatctcggtgctcgcctgcaaaagaaagtagtgcaagtggttggtgtttcaatccttgtgaacatagtggtaggcgtatccatcagcctactccttttctttggtgccggacctatcctgcgcctgatgggactgacttccgaactgatgactgacggcatggactatatgcgtattgtaggcgcgtttgccttcttccaagccatttcattaacgctttccgcctccctgcgcagtgccaacaaggccatttatccgatgttagtaaccgttgttgtcaatatcctaaatatagtaggtaattactcactcatcttcggtcgctttggttttcccgagctcggcgtagaaggagctgccatctctactgctttcagccggggtgtatctatgatacttttattcattatcctgtttcgcaaacatatccatcgcttccccgttgcctatttccgcccgttcccatggatagagctaaagaacctgatgaaaatcggccttccctccgccggcgaacaactttcctacagttcttcgcaagtagtgattaccttcttcatcaatatgctgggagtcgaagctcttgccacacgcacctattgtgtcaatatcatcatgtttgcctatctgttcagcatctccatggcgcagggtggtgccatttgcatcgggcatctcatcggagaaaagaaacctcatgccgctttcctcatgggtaaatatgttatgaagaaatccgtcatgatcaccgttatactctccaccatccttgctatattcggaaacataatcttccattggcttaccaccaatgaagaaatcatccggctcggaaccaccatcctcatcatcgacgtcattcttgaaatcggacgtcccatcaatattttcgcaacaaacgccttgcgtgccgccggggatgtcacctaccccttctatgtcggtctggttgttcagtggagcgttgccgtcggcttgggctacatcatcggtatccctctggagtggggaatctgcggtatgtgggtcgctttcttgctggacgagaacatccgtggagccatcttcgtaaaacgctggtacagtatgaaatggacgacaaaagggtttgttaagtgattagtagcctgaacaatgctaatcacttatcactaaccactaatcacttaataagatttgatataaatcaaatcttttatacctttgtccccggaaacagttacagaaaccagcgaacaattatggatacactattaaaagaaacagttgatgccactgtgaactcccgttatccgggcatggcacctgaaggtagaaaactgatagaagatattctgatccgcaaagagctggaaaagggtgaactcttattcaaggagggacaagtctgccaccacatggtatttgtcggaaaaggcatgatgcgtcaattctattataaaaacggtaaggacgtcaccgaacacttttcctacgagggttgtgtcatcatctgcatcgaaagcactctgaaacaagaaccgacccgcctgatggcagaggccctggagccttgtacagtctaccttctcccctacgacaaattcatgagattgaccgaaatctcctgggaaataaatatgttctatcgcaagatattggaatactcactcatcgtatcccaggtgaaagccgattcatggcgtttcgagacagcccgtgaacgctacaatatgctgatgcacacccatccggaagttatcaagcgggcgccattgtcacatatcgcatcttatttgctaatgacacccgaaactctcagccgtgtacgttcggggatattgtaagaaatacgataagaatattcagtttttgatttatatcaaatcatttttccctgaaactctctacctttgcgccatcagaaaagaaatagaattagtttttataggtaaaagagattagtttttagggtataaattaaaaaagaggtaacaactgaataaggttgttgcctcttttttcgtttacactacaaaaatcatttaaaaaacatgtaatgatgcaaattaatttatatatttgtacggatggaaatgaagacacacgtatcactactgaaaacaatattgtttcttacccttgtactggtcggatgccagggaagttcagataaagagacacctccggtagagctaccacaagaactattccgggatggggatatcgctttcagaagaggaacagggattaccagtagagtagtgttggctgcagaccgggaaggtgcttattcgcataccggcatcctgaaaaagaaagccggacaatggtatgtgatacatgccgtgcctggtgaaccggattttaaggatgaccctgatcgtgtaaaaatggaaaccgtagaagtgttttttgagaaaagaaaagctgttaacggagctatcatgcgtgtatcaggggattcggtagccagataccgggcagcaactcacgcggaacatctttatgagagccatgtgttattcgatcatgattatgatttggcagacaccaccaagatgtattgcacggagttgatagactttgtatacagaaaagagggaatagatttacccgaagggcgtgtcagccacgtaaatattcccggattcagaggagattatctcctgcccaacgatattgcgcagagcaagcgtctctgtttgatatactatttttaaatacacattaatcactttaaaaaaaagcgtatgaaaaaggtattttattttagtctgatggttatgactatgtttttaatgacagcttgctcttcaagtggcccgggagatgctatgaaaaagtatggtaattatctcatcaaaggtgactatgagaaatttgtagacggacttgcattcgatgagagcgtaggtgcggagaaaatgaaagagcaaaaggacgggcttgtgtccatgctgaaagagaaagtttccaaagaatatgaaaaaaaggacggactgaaaagtatagagatcatatcagaagaaatatcggaagatggaaacaccgcaacagtaaagattaagcaaacctacggaaacggagaaacgcaggatggtacacaatcaatggtaaaaagagatggcaaatggctaatgtcagtagataagtaagcttttctttttgcttagtagagctcaccttgcccaacttccgtaaagagttgggcgagcttttctattactggttttacataatgtgctcctttttctgctgaagctttcttgggattccctaccccactatctatcgtagctttatcccaatgacgaggtgcccagcccaccttctcattcagcgaaggaatggcaaacggtttggattctccatcgcctgcttcatccagattcactaattccggatggtaatgcatcatcacagaagtttccgattcaccggcatgatcgtctatttcagcttcaaagtagcctttgggagaaacaatactgaaccagtcagtggctataatcaggaaatccggataggcaaaagcaaggtcacgtatcatgcctttgaagttattgcctccatgcccgctgataataatcaatttacgcatcccctgagcatgcagggaagctacaatatcttccagaatggcctgctgggtagagtagcgggtgtgtatgcagaaaggaagttcacgctgtccgggattatgagcaccaaaaggtacgggaggcatcaccatacagcgcacacctgaatgctccagtgccaaagcagcggcatctacggctatatcatggggcagaatacaatcagtaagatacggaagatgcagattatggggttccgtagcaccccaggggagtatgacaacatcatacttcacatcctttacttttccatagcaggatacagtaagatcaatttctcttttttccatgctttcttaatttttgagagtatttgatagctgcaaaaataaagaatattccgacactgtgtactattgcttacgatattctttcggagacatacctgtgtgatgcttgaagtatttgccaaagaaagactgattggcaaaatgaagctcgtccgagatctcctgaatactcatttcagaagatttcaacagagctttggcttccagaataacaagactgtcaatccattcaccggctgtctttccgctcacttcttttacagctgtagaaagatgcttggctgtgaggaacatcttgtcggcataataagccacacttcgttctaccttatatgattcggaaatcgaacgaataaaacgttcaaagagatcttctttccgagttttcgtttttctgaccgcaggctcattgccctgatagatactatatatctcataaaacaaagaaagaatcaatccttgtgtaatctctttacggaaagggttgtccttcagttttactttcttctgaaggaaagaataatattcctgaatggcatccatctcttccggtttaaggtgtacacagggctgttccttaatcatgaaaaacaaagggaacaactgctgcaccgtaggaagtacatcatcaatgaactgtccggatactacaatgaaaactccggtaaaatcatccgagcgctccacttgctgcaatatctgctcgggcagcgtgaccaccaggacacctgcggttagttcatgctctttcagattgatgcgtatccggcaatgccctttcaggcaaagtgtcaggcaagacgcattcagacgcgtagggtaaccaaacaagggaatgtctcctatattgtcgaatatggcaaaatcattcccgataaaatccattgccggaaaacggcgaatagttgctatgtctacgttctttatatttttcatctccctttcttaattacgcggcaaacataagcaatatttcgctgaaaaccgtccgaaatctcctaaaaaaaagaaaaaaggaacatttgtataagaaagggcttctgaaattatgctcttacaataaattcataagcccttgcaataatttcggaagcccccgcaatattaaatttagaccttaatctaattcataatcttaaaaccgataaaaaacgttctcggctgtgtaggtccgtaaaagtaaccggagtcgcggaactcccctttatccaggtctttttggaaactattaaagatattttgtacaccggcattgagttgcaacttgatatgctcatgcaaaacaaaagtgtaattcaacttcagattgagatcgaagaaatcgggagtattctccatacggtctttctcgatattacagaaagctccttcaggagcatctaccggtgcatagtgaggaacgatcatcttaccggtgtagatacccgacaaagagaaatcaaagttcttcaacggcgcagaagagaaagtaaaataaccgtagtaatccggtgtacgcatcatacgtttggtggtcaactcttcatcatctacttcggtccaaacttcagctttcgtatagcggctacgctgtgccgtgaaacctaactggaactgcgcttctttgccatgagccagctttgcatccagattgacaccgtatacacgtgctccactaccattgcgacgttcttttatcttgtcaccgttctcatctttaccgatatcttccaacacgaatacatggcgcagatctgtgtagaaaccttccaacagaacgtttgcctgccagtgtccgaggtatgtactccaatctatagaaccgctgtaactattagagcgctcttcacgcagattgtcagccagcttaatctgaacgccctcaccgcctacagcggtcacatgcaagtcttcatcataagcctgtggtgcacggaaaccggtagaatacgtcagacgagcctgaaaatcttcagtcggcttatagaggaaattgacgcgcggactgaaaattagtttgtctatcagattatgcttgtcaaggcgggcacctaccaacatggtaagctgactcatcttccattcattctgaacaaaagcactggcaatacgtacatcctgcttcatatcacggtgataaccggtcatgacatcatgcagggagttattctgatattccaatccaccggtaaaagtggccggagcaaagaaacagttattcatattaccaacatacataccaccggcaacccaggtcagatcatcagtcttaccataagcattcaggtcttgctgagccccatagtaactgtttctgtctgtatgctgcacagagccgtaaagagatattttatgcttatattcacgccagaacaggtcgtagctggcacctccactattgatgatgtgcttggtctgttctgtgatgtcggactcatggggctgcaaatcaaacttattgccaccgcgtcggaactcgttggttgtatgatattccaaattgatgcgactgaagtgtgtaggacgatagtaagcacggaaaccaaaggtattcatgttcagcttaccgagttcggagaagccgtcatcgtcacggtcatagggattacggttgcgatagctttcatacaaggcaataccataggaattatctttagcaaccaaggagacattaccgcccatatattgctcccacgactgtccgtccatgcacgaaaacatactggaaacttggaaggaattactgatagggtctttggtgataatattgatagtacctcccactgcattcgctccgaacagggcagacccaccaccacgtacaacttctacccgctctatcatatttacaggaatttgctccagtccatacacgccgctaagggcactaatgatcggacgactattaatcagaatctgagaatacggaccttccagaccattgatacgcacctggggaaagccacaattctgacaattgttctctacacgcaagccggactggtaattcagagtctttgccaagtcggtggagttcaccatctcaaaaagtttggtactcatcacattcacaacaaccggggcattcttccggctcacttcattgcgattggcagatacaaccacttcatcagtcatgaagctttcctccgccatcgggaagtgcacaactgcggtaaaatccttactgacagtcacttctctttcctgtgtcttataacctacggctgatacacgaagcgtatattttccggcaggaagcttgcgaaattcgaactggccttcttcatttgagactgttccctggccgttttctttaatcaatatagttgcataaggtatattttcttctgttcctttcacaatcacgtgaccggaaatcatgttgccttcctttataggatttacagcatagaggctgatgcaaaccaccgtaagcaccagcgcaagtatatgttttttcattaatttgcgctcaaaaaatgtatgtattgataaaaattaagtaacgcttaaaaaagaacttggtgcataagcaagttctgagagtaagcttataaatgataatttatcggcgtagcgctggagcaaggttctccttcggcgtgcaagtaatctttcagacacggatgacacggatgacgcggattcttttttccttcggtgtgatatgccggtatgtatagcgcagctttaaaaatccgcgtcatccgtgtcatccgcgtctaaaagattaaagtccgcgttcgtccgccttatccgcgtagtccgcgtacccattccctcgctgataaattatcatttacgccgcgagcgccggcggagcacgaagagaaatagtctgttttccccctccttttatcaaaggcgacacctgttctgcttccagcactgccagaagtattcgcatggggtgcagatcttcatatacatcaacctccggagcctggaaagttgacaaacgaccaataacgagaagttcggatttggagtgtgtatgtttaccgtgaaacggatgggagtgcgtaatgatgactccattgacatagtgaacatgagtaaaagctgtaatacttgtctgatatgccacaaacagcaccaacaagcatacagctcctataattcttttcatctctttgttcacgttcctaccacccttttaaaatttgcgactgcaaagatagcgattatttttccacttttccaaacaagtattcataatcccttttggcggcaggctctacccattcttcgggaataaatttccattgccctaatgcatgtggctcaatcacaccctttttctctatatactgcatcaagtaataacgcagatctttatctgtagagaacaagatacgccctttcaattcatcttgaggaatcccggctcccttagtcaacaattctccaccaccattaccacggtatgaattcagtgctactttatacatcttgtccatagaaaaaggagtgccatcagccatactgataatagtaatcttctcccctttcggttttgttacatctaccgtatatatgatgccggctgccgaatcaaagttaaaactaaaattctggaaagaagcacgatccgttgcaccttcacgacgctgtttgcggaacaataacagatggtcatcagctgatttcatctgattcgtccacaagttatatgacatttccagcgcatccttcacctccttaccggacagtttcatggtatagagcatgttctcatacttatataagttgaacatatcgctcacaaacacatcccccttgttaatttccgtatcatacgacaggggcgcagcaagcgatatatcagcattggttatttcaagctgcaacaaatgaatcaggtcaataaaggcagaagaaccgaaataggcaggacgcgtggaaatggtctctgtgaagctgcctattttcttggatacgaaatcctgcaccgcattaaactggggagcaaaatgcttcatgaaatcctcacttgcagcataatctttcatatccgtcaaagcaccgtcaatatgcttctctatgacttttccttttcgaagtttcaaagttacatctgcgtttgccacaacaattcccttgcttgcgggatccataatcaagacagaatctccggctatatttttaatcttcttcaattcacgggcatgatcgtgtcccatcaggacgatatcgaatccgggaacgttacgagctacttctacagaagcattttcacgatacttaccgcccatcagcaatgcatcctgtccggcatggaaaataccgatcaccagatcaggcttctctttttcccggataatcttcatccatttgcgagccgtttcttccatatcatcaaagcgcagtcctttccataagttctccgacaaccatacaggaatagcaggagtaatcatacccaacactacgatcttcacgccatctcgctccaatacttcataaggtttgaaatgagtctttcccgtagccgtatcaataatattagcgcctaaaatgggaaacttgcagtcgtctgcccaacggtcgaacacggcacgtccggtctccacatcatgattacccatattgccggtattatactgcatatagttcaacacttcagctgccagatgcggagaaatagtgtcaatataattgtaataataggcacaaggctggccttgcagaatatccccgttatctaatagaagcaggttatctttatagacttcgcgctctttctgcacaaaagcatgtatgcgcgccaaacttcctccagcttcatggcgaagtatgaaatcataaggataatagttcccatgtatatcactggtctctactattttcagctttacgatcttatcctgagctgatacagctactatcaggaggaatatccaccctaaaaaaaaggaaactctcttcatagttattagttatttctttggttgttcgatgtctaatggatgtgtaaatacaaatcttgccccatccgtatatcccggatccacccagatctctcctccccacttctctacggtcaacttacagatggaaagtcccaatcctgtgccctgtacgtactcgttcagtttttcgaatcgctcaaatacaagcttctgtttttccaaaggaatacctgtacccgtatccgagacagaaaacaggacttctctctgcttctcatcgactttcagccccaaagtaatcttaccattccgggtaaacttatcggcattggaaagcagatttatgataacctgttgcagacgctgagtgtcagtgcgcatatccatactttcacggtcacactcaaagataaattcattttctgacttgcgagcctggctgacggaagccaaaacacgttggcacaacggcactacatcacattcctcaaatgtaaacgtaacccggtccgcctccagacgggaaacatccagaatatcatttatcaggcgaagcagcaaatcagaattggttttgatgatatcaacatacccctgctgttcatcttccgaacttcccccggaagccaacacatccgagaatcccacaattgcattcagcggagtacggatttcatgactcatattggcgaggaaggcactcttcagacggctggactcttctgcacggtctttcgcatctctcaaagcactctccgactcttgcagttcatctttcagctttttggtatggtaatagaagtacaatgaaacaaacaaccccgcagataacacgactaaaatggttgcaacagtccagatatgatatttatattgttcgtagaacgatggattttcattcaccatttctatcggctgatgaataaaagacagatccagacgcttttccttcacaatcttactatccatcatcactttattagagatgacttctacttctatacgatcactgtcagctccttgcagcagacggactgcctgatacgccatatccttgcctaatggccgataagagggtgtcactccacctatagcccaataaccgataccgacagaactaatggaaaatgtaggtacatcacccgcagcttccatcatggtataagttgcattacgcataaaatatccgtcgtacatatccacacgccaggtacccatcaacaaagctgtattcgggggcaattcatgaagtttatcactgatggtataaatcgtattggtacgtccatccaatagaatcagatttaactccggatgtttcttcatctccgctactacatgggcttgcaaggaaacgcccccataactgttatcagaaacaaaagctatattcttagtattcggatataagtgttttatcagattgatattggcttccacatcatattcataaacaaaaccggctttgactgaagaatcagtaaagtcattaaagaaatccactgcaccaggcatccatgttttcagatttacagaatcatccggaagaataatggcattgcggcttgccaacgaagtcagtaccgggaactttccacgtatagaatctgcttgcgacagataggcagcccatgcctcctgaccaattaaaacaagtaatacaggcgcgcgctttccctcatacttatccagtatctccgccattttcgatttccactgtggcgactcggagaagcttttgcagttcatgttttccaaagctatcggagcttttccacccagacgctcaaactcttccatgaaatcgtatatatttccggaagtctgacgagcatccggattatacgaactgataatcagtacagggtgttctccagtcaccgcaaaggctgatgaaagcccccaaatggatatcagtaagaaaagaaaaaaactatatattattttcctaaataagcccattcagtgaatatagaattgtttcggcaaatatacaataaagttataaggatagaaaaaaagttgtagaattttaaactataaaaaaagaaacgggcggtaagagatagtttatcaaactaccgtcttaccgcccgttattataaaaaaaaacaggatatttttatttagatattcatcgcattgtttcctaaagccggagactcatttttattttcccttttgaatatgcaaatgaaaataccttctcataaacaacacataaatgccactcaacaatacaattattcccaacaaataccaataaccatatctcacgaaacagaaataacctaatatgaccaaagcctgtgcccccatataaattaatgataccccaacatgaggtattttcaactcgtttgccatcaattgatacatgtgttttcggtggggcaaaccgatgttctcatgaagcatcaggcgatgaatgatagtcagaacactatcgacaccataaacggataacaggattatccaactgaaatcttctgttttaatgatgagcttccctatcagaaaaaggagaataaaagcgatactcacagaaccgacatcacccgcaaaacacttcgccttcttacggaaattgaagaaacaaaagaccaggactgaacaaagaacggtattaatcaaagccggttcaacaaacgtagtgatctcagaattgatataagctaatgcaccaaggataaccaatgaataaccacctgtgataccattgatgccatccataaaattataagcattgatgatacccgtacaaataatcaaagctataatgatccaccaccaggaaagcgaaaacaagccccattggtaaaacattagagccatagcagtaaagtgaaacgccaacctcagaccttgggaagtagaacggatatcatctacaaaactgataaaagtgatcagagtcaatgccaacataaaccatggatactcccaatgattactcaggaaataggctaaagctccaaaatagaagattataccgccaccacgcaaagtaatccgtgaatgagaactacgctcattgggcttatcaatgatattacacttatcagctactctaaaataaaaaagttctgctacaaagagcagaactaatataatgatataatacacgatttacaatttataaataggttagaaactccgtattgttttcattattccatccgcagcacggacaggcatccggtcaatgccaagagctaattttatcttctcattacttaccacgtaattctcagtcagttttctcagccgttctgtattcaaaggcaaatgaagcagcgtacccaagcctgcgcaaccttccatcatttttctgttcattttccagatgtgaggctccttacccatagcttcacacataagagcaatcagttcattcgtagacaaagcttcgtcatcacccatgtgataaataccgctcactacgtcttttgtcaacaaaccttccactacatagcaaagattatctatagaagtaaaagaacgcttgttctcaaaatcgcctaaaggccaggggatacctttctttaccacattataaagcaagttcagattacccttattaccaggaccgtggatcatacaaggacgcaaaatatacactcgcttatcgcgctgcatagcaactttcaattctccatgctcgcttctcaatttactaagaatatattcttcagccgcaatcttactttctccataaggaccaaccggagtcggtatcacatcttctgtcagcatatcccccactacactgtctgcggcagctttcacagaactgaaaaagataaacttcttcgcagatgatcctaaaaagaaatcaaatatcttctgtgtcagccctgtatttatatcaaaatatacctgagaagcagactgattctttgtatcatgcgctttgcctgccaaatggatgatagcatcaaacttgggtaattgttgcatgggaaaagaagttgtttcaatatctttccaagcaaaagtctttaccaccccctccttttcaggagcgacaatatcaagaccataaagggaatgatgtccttttaaggcaataacaagattagagcccacaaagccgtgaactccggtaataagtatattcatggagataaaataatcttcagatattaacgcaacttaaaatactttcgtctgcagtttagagtttcccaatacatgtgtattcaacccctatttcctgcaactcattcttatcataaatattacgaccatcaatcactaatggttgcctcattgttttcttcaacactccccaacttggcatcctgaactctttccattcggtcactaccagcaaagcatcagcatccaatacggcatcatacatatccgtagcataaacaaccttatcacctactctacgtttacactccttcatggcaattgggtcatatactttcactgtcacaccggattccaacaatttatctatcagtaccaaagccggagcttcacgcatatcgtccgtttccggtttgaacgctaatccccacatagccacctgtttgccttttatatcacctttgaaatgcttcaacaacttttcgaaaagaacactcttttgtttttcatttacctcttccactgcttcaagcacccgcatcggataaccattcttttccgctgtttttattaacgcttttacatctttcggaaaacaggatccaccgtaaccacaacctggataaaggaacttgcttccaatacgactatctgcaccaatgcccttgcgtaccatatttacatctgcacctaccagttcacacaagttcgcaatgtcattcatgaaactgatacgagtagccaacattgaattggctgcatactttatcatctcagcactcggaatatctgtaaatatcaaacgataattattcatcatgaaaggtttataaagacgctccataatgtcctttgctttttcagattcaacaccgaccactacacgatccggtttcataaaatcatccactgcatccccctctttcaggaattcaggattggacgccacatcaaactcaatctcctcatgtcgcttatcaagttcttcctgaatagtagcttttactttctgtgcagtgcctacaggaactgtactcttagtaactaccagtacatactttttcatgttacgcccaatggtacgggctacttcaagcacatacttcaagtctgcacttccatcctcatcgggaggcgtccctacagcgctaaacaccacctctacatcatccagacaatctgataaacaggttgtaaagttcaatcgccctgcattatagttacgatgtaccatatcctccaatcccggttcataaatggggataattcctttcttcaaattctcaattttactttcttgtacatctacgcaagtaacatctattcccatttccgagaaacatgtaccagtcaccaaaccgacataaccagttccaacaattgcaattttcataatttcctgatttactttttataattgataaaaagaacgataccactctattgtctctttcactccttccctaatagatttattaggtttaaatcccaattcattttgcaatgctgtagtatccgcatttgtctgataaacatcaccaggttgcatcggaagaaatatcttttctgccagatacccaatcgcttcttctatagcctgtataaagtccattaacttcaccggctgcgaattaccaatgttataaatcttataaggtgcagttgaagtactaggatctggtgtttccgcttgccaatcagagtcaggagatggaatatgatctatcactcgcaaaacaccctctacaatatcgtcaacataggtaaagtcacgaagcatatcaccgttattaaatacctttataggacgatggtgtaacatggcatctgcaaacaagaaaggagacatgtcagggcgtccccaaggaccatataccgtaaaaaaacggagacctgtcgaaggaatgccatagagatgactatatgtgtgagccatcaactcattagacttctttgtagcggcatataaactcaccggatgagctatactatccctttctgaaaagggaactttaccattcaaaccatatacactactggaactggcatatatcaaatgttttactttgtaatgacgacatccttctaaaatatttagaaatccatccacattactttctacgtaagcataaggattttcaatagaatatcttactcccgcctgagcagcaagattcacaaccttatcaaaatgctcattggcaaacagcatccgcatagcttgtttatcctcaagattcatacgaacaaaacggaaagaagaatattctgaacttcctacaaacttataccagtctatatcatccttaaagatacccagtgtacccaaacgaccatatttcaagttcacatcatagtagtcattcaaattatccaacccaaggacctcatcaccacgatccagtagatgcctacacacataagagcctataaaaccggctgcaccggtaactaaaattttcatgctttactcaactgactatatatttcaagatgtctatgtattacattctctattgaaaaatctttttcagccaaaatacgcgagttgcgtcccatatttcgtctcaaattctcatcttcaaaaagaatattcaacttctccgccaaagtttcactgtcttttacaggaattagataaccattatagccatccaccacagtttctttacatccaatggaattcgtagtcactataggacgaccaacagcagcagcttcaattaatgattttggaagcccctctttataataggaagggaatgctactatgtggcaagatttcaataactccaatacatccgtacgatatcctagccactgaatatatccaccatcacatacagctttaagttcctcctcttttattgcttttgggttatcatccaacccaccacaaagcagaaactctactttatctccatatttttctttaagtttcaacgcagcatctactagtacaaatacccctttttctacaatcatacgggcagtaaataaaactttgattttctcactttccagttcaggagtataacaatattggttcaaatctactcctgacccttttatcatgaaagcctgttcttcttttataatcctgttttttaagaataaacctttatcttcttcattttgaaaaattactgcaagatttttacgatggtgagaaaagcgaagtaccttagggagaagttttgaaactaatgatttattttcctctgagaaaaagattcccaacccactaacagcattaacgactccatgtacttttgccagttttgcagctaaagtcccccaaagtatagcctttaggcctacatgatgaataatatccggtttttcacgtcgataaaaacgatacagaaaccaacatgtatacaactcttctataatgttttgcccggaacggttcataggcaaatcaatcaccttcaagcccaaagcctcgatatactgtttcttaccggtatcttttgtcacaacagtaacatcataaccgtttttttgagcacttaaagcaatgtctttacgatgagagagaaaaaaccaatcgacgttgacaacaatgaataatctaatcatttacaatatatctaataattttagccggattcccggcaacaatacaattgtccggaacatctttgaccacaacactgccggcaccaactatgacattattacctatatgaacctttccgacaattgtaacattagctcctaaagccacattatcccctatttgtggtcgcccattggatttttcacccagagtagtgcaatgcctgcacgaaaagttgtcgcctatgctgtctgcattcagaatagtcgcatacggatgagctataacacaagccttacccatttttaatgtcttcgagatgatgaagtacttatcgcccggtcgataccatccaatcagcaaagacagaattgggcctattctgaaatagaacaaggaccgaaaataagcgttattatgcaaaaaatacagtagagctacccagcctttaagttttatatcaagagttctggtcattgcactcacatctgaataaaccatctttttactctcaatcacactaacaaggagtaaatgaggaaggtatacaataaaaaaaacgaaactaccagtaagccgtaaatagtcccttattttccttttattcatcatcgcatatcttatgatttcatttacacaagcaactctcgatacacttcttgatatcgtaataccatcttgctaatatcatactctttggcacgttcataacaacgccccgcaatagtgacatagacagcttcatccttcaacatttcgttgatatggaatgccaatgtttttgtgtcacctacttcaaacaagcatccggcaccttctaccacttgctttaaaccgtttacgttagttgccaccacaggtttatgtgctgccatcaattctacagcagttagaccgaatccctcccaaatagaagattgcacaccgatatatgcttgcgctatcaattcagaaatatcccctcttgcacccaaaaattgaactctatccgctaaacctaactcacgtactacctcctcacaatgttctttgttgggaccatcacctactaaaatcaattctgcatcttcatttatgtccgtcatcgctcggataacagtttcttgatccttcatttgggcaaaacgtgataccataataatctgctttttgtttatagaaactggaaccacagaagaaaaagtaaccaaattaacgccattctctatcaccacaaagcgtttatcgtcctgttttgctttcaaccatttcatcagactatcttgtgtttgctgactaatacctatcaatttatcatacttcctataaatatagcactctattggacgaaacataactttatctctgcgcttattatacgttgaatgttctgtataaaccaacctaactcccttacaccaatgaacagccaatgctacccaataaagtgtcggaaatagatgtacgtgtacaatatcacattttttcataaatggtatcagcttctttattatcaaaggattatggaaacttctacaatgcaaatcaataatttcaataccactggcctcaatagttctttgaaaaacagtatctacacctttcaaaaccaataacttcacatcattattctgtttctgcaaaggcaataaatcagaaagtaaacgctgtgcaccaccaatgtcaagggataatataatatgtaataatctcacttttccctatatatatatattcagtaatccttaatactatattcgacagatcagtatagtaaacaacaatactttcatttatcctttgattttccttaaagtaaaatacacaaaagatagtaatctgtctataatagacttctgcccaatcctgctcgtatcaatgtcattaaaactgataaaatattcaatatttgttttaatgaaacattcaaaaatatcaaaagcagcattatccattccattagggtggaaacaaaaagtccagtaacctcctataggaggtctacgaaattgtcccatttggcaaggaatcatagtaaatacaccttgtttataaggttgtaaagctatcgtatcacttatgattcgaatgggactttcttccacaagagcttctaaagtattctcatcataagtatgactaggagcaaaaaagtattttggaaataatcctatagctatcaaagttttatagccttttgaaattttttctctttgttcaactaatgaaagtcctgcaaattcagaacggttatgtacaggattaattcctcctgttgcagtagtacacacatgattatatccatgtaaagctattgcccatccttttttttgccagtttagtactttagacttaaaatcagtatctactatatcaacacaagttacaggatcctcattatgaggaattatacctaccatcggctttatcccatatttatctaaaatattttctatacgttgccattttaacttgttcatttgtggacaagcatcatcaagacggactaaatagtattgtttcatttattttcatgtatatattaaatctatgttatcatcatctcaagatctcatccccccaaaactattaatcaatatataattttcaaacagttttgttaattatagcatcatatatttctcaagaatcacaacacattaagaccactgtattattatctcctaattactaaagctacaattttcaaattttaaatatcttgtttcttataaaagcaaaaaatggtttttgatcctttccattataaagtaaataacaactagtcttctttttatcttctaaccaccgtttcatgctcactcgacctttcatcacatgcacccaatcacgtgtatctgccataaaatagcaaggagtattaagattacaagggtgaactataggttcgccaactagatacttacaccacaaataatgcaaatttatccccatagatgtaggaacataaccattaccatcattacgcatattaatctcaagaaaataagcaataccatctttaacaacaaattctacgctaaaaagaccttcataaccaatctctccaacaaaagcttttatcttttcaagctctatttcaggataattcttataatcatcaaggacggaaaaggaagatgagccactatttacaggatattctctaatcttacgaatcacgcctggtataataaaatcattaccatgattatatgctaaagctactatattcaattcataatccttctcaataaatgcctgaactaaaaaatccttattacttgcaatattcacttccaactcccttatatttctgtttacacagatttcatttttcccacctacaatactactacagggtttcgaaatacatggaaactcaatatctgtcggtaatacatcaccactttttagataccatgatttagggactgttaatcccaccttcatagccaattcatgcatattatccttgttcaaaaagtaatttatacgaccttgtttctttgcattaggcaataaaaataaattcttcaaaaggtcataatggctatctatcacactaatagaaacatcttctgcacaaataataatagccttattagtttcattcacataatctctcaacagtatatcaataacatcatttggtttatcaaaccatatcaccttatttatatatttactctttgtaatgaaagccaatttcaaattaggtaacattacaataggtaactttccttcttctcctaaacttctaataatacctaaagtattatgatgatctgtgcctattactatgacttgattatccatatttttacaaactagcaaattcttgaacaataagttttttgaatgaattaatatcaggagctttttcaaaaatctcactcgctcccttacttaactttgctcgtaatgttctatcagataaaatacgaattatatattctgcaaaatgttttgagtttaaattatccgccaaatatccattaattccattttctacactatatggcatcgcagagttattaaaagctacaataggcaaaccatatcccattgcttccatgagtaccataccatacccttcaagcaatgaaggaaaaacaaaaatatcagccgatgcatataacctctccttttgttccaaactaacgaaaccatgaaatgtaacatctaacttatattcttctacaatttgtttcatattttcaaagtaaatttcatcaactactttacccactacgtcaagaacacatttcacatttgcattttttacaaacgtcatagcctctatcaaatacttaagtcctttacgtttttcaacagttccaacaaacaaaagtcttccctcttgtggattcaatttctgacaaagcttcttttcaaaaggtatgggcaaatagaaaacactattgtttaaccttagacattctactaactctttcacatatggactcggtataattaatctatctgcgcagcgaagcaataatttctccattacattcaatggatattcataccatttacaatccaaatacataaaatgatgatgtattacatacactcttttattccctaataaccggattaagggcaatactagaatccaataaataaacttactagaattaaaaatgacgacatcatcatttctaactttattcagtattctaacattaacaataggagccacaacctttctaataccacgagcccacttctcatttgtttgtatttttactctaatagacggtatactctttagaacattaacaaacagatattcatagatttgcccaccagtgactggctttcccccaatcatataaaacaactttacttccataaaaaacggctcagaaaattacaaataataagaattggacatcaaatttctttctataaattatcttttcaaaaaactaaaataataaagatttatatggcaatatctcatcagaaaagatagcccctgaccaataatcataaaaacggaaaatgtaataacaaataaagatcaatacaaaaatatatttaacccatattgtatctatcctctttataataaaaggaacagatc

SEQ ID NO: 6497 - DNA, 197 bp, Unknown
  gut microbiota DNA sequence
cagagatgcaaggtggcacaggctgccagaaaaacaaggatggacaaggcaaccttgttgaacttacggacaaacagtgcgtacaggatattgccgatatattcataatagagcgaccatgccggcccgttcaacgggtgcatttccgtccacccgcgaatgtcccacttcaaaggaaggggaagcaacgtacagcc

SEQ ID NO: 6498 - DNA, 4433 bp, Unknown
  gut microbiota DNA sequence
ctcacctattttttctgtataagccatacgaccataaagatgaacaagagctatagcttttgtacgagaagttataacttcctctatcttatcctcatcaatctcaagtgtattcagtcttggctctacaagaacaggcttcaaaccattttctgtgatagcaagaatagttgcaatataggtatttgccggtacaatgacctcatcacctggttgcattacacccatctcaatgtatgcacggaaaatccaaatcagtgcatccaagccattggcacaaccaactgtatattgtactccaacaaattttgagtaattctcctcaaaacgttcgttctccttgccttgaaggtaccaacctccgttaaccacacggcttacagcctcatttatctcagctccgtgaagagcggtcacatcttttaatgaaagaaaaggtatcattttgtttttctttatttatcagctatttttctaagaaatttcgcaggattacctacccagatttctccggcaggcacattctttgtcaccacactgccagcaccaatcatggcatcctcaccaatggttatccctggaagtatcgtagaaccagcaccgatagatgcacccttgcacacctttgtcttaagaagaacccaatcctcattcttcgactttggatacatatcattggtaaaagtcgtattagcacctaccattacattatcttccaactcaataccatcccaaacttggacaccacacttaatagtaacattattaccaatcaccacattattctcaatcagacaatgagaacagatattgcatttctcgccaatcctggcctcaggaagtactacgcagtactgccagatattagtagaagccggaatattttgattcttacaatcgcttaacggatgtatcattactaatctccctaaattcaagaaattcatcataattacgaatatagtcttcctttttatatacatcagaagccaaaaccatgcaaacagcaccagaagaaaaatcatccaagtcacgccatatacccggttttacatataagccttgataaggacgattcaagaaaaaagaacgtttaaccttgccatcatccaaggttacacgaaaggaaccggatgcggcaaccataaactggctcaaatctctgtgagcatgtgctccacgagactcacctcctgggacatcatacagatagtatacacgcttcacatcaaaaggaagagtgtcgccattctgcactacagtcaggttacccttacgatcactgtgatgcttgtccagctcaatcattgaacaatcaaatacactatatttctccattgccccttaactgtaaataatcgtcataatttctaatatagtcatctggaatataactagttgaagcaaattccaatgcaagagaatttgtagagaaattgtctattcttctccacaaccctttcggaatataaagaccataataagaacgattaagcgtaaacttattctgtctctcaccatcatccactatcacatcaaaaccgcctgaaagtgcaactatgaattcttccgtattcctgaatgcatgacttccacggcattctcctcccggaacatcataaatccaatatgtcctcttgatttcaaacggaatatgattgttctgttctacaaacgaaagattccctctcatatctaagaatttggggagttcgatgattttacaatctttgattgacattttataattcaaaatacaatatggatattttatttcagttgttatggacaagccattaaatgtggatgctgataattcaatgataaataagacaggggatcgttatatgttcaagttttttatttaacaatcaaattattcaaatataaatcagcggcattcttatctgtcaaacgacgagcagtctcaattgctctttctgaaacagctaacctttcatccggagtgagtttatttattttacgaattatatttgcaagctcttgaatgttacccgcttcacataagaaaccgttcacaccatcttctatcacaccatcaaacccttctttcttggaagctatagtaatgcacccacgagccatagcctccaaatagactaatccataaacttccctacgactaatcattatcatacagtcagcattgtcatacttagcctttatttcatctcgcggaatcctgccacaaatagtcacttgactctccaaatgatatttttccattttcaattttacagtttcctgttcatgaccattgcccacatagtcaatgtgaaagtttttatcctcataaacattaaccaaagcctcgataatttcagccggatatttacgttgaatcatctcaccaacatagataaatttacttaatggtttctcaaatgaatgagtattgctttctgtaatataacttgcgggaacacctgaataacagataaaagaatgcttaagcttgccatatctctcttcgaaatcttctctatatttctttgaacggaatccccacaaatcaattttattataaaaacatttaaatcgtttaccgtaaacaccatccagatcaaaattctcatgcattataatagcagttgtcgctgaagaataaatacttttcaacttcgcgaccacctctatctgaggattaggaaaatgccctactataatatcaggtataaaatcagcttcagcattactattaactatttgttgaatagattttctgatagaaattgataaaaatctcccatgaggaatcggtttgaataatggcattctcaacacttgcacaccatcccattcatattgtgtacccttatcacgttttgtataaactaccgcacctgttttcgcagtaatcaaatctctcgctacccgagccgcccaatagtaaaagaaaggatatacagcctgataatgtaccacacgcacattatgaccttcttttgcccactcctttgtaaagtaatgacataccgaagttcccttattttcctttgaaggaagcgggtaaatggttgataatagaagaatattcataatcacatgcaaattcgcattcccggtatatacagctttgcgttagctataaaacataggaaatactacgatttacttcaaattaatatgtttagaaccgatttcagtaaatgaatttagctcatttataataagtaaaagtctattggggtcaataatatataattattttcacgagtctcgtttaaatacatctctagtataaaccttctccttcacatcatccagacaatcgtcataacgattagcaatgatggaatgactcatcaatttgaatttctccaaatcattattcaccttactcccaaagaaaagactgccatcctccagtacaggttcatagataatcactgtagcgcccttagccttgatacgtttcatgataccttgaatagcactttgacggaaattatcagagttacttttcattgtgagacgataaataccaatcacacactctttttcctgcgttttatcatatccattttgttcactgtaactataatagcccgcttttttcaaaacttggtcagctatgaagtccttacgggtacgattactctcaacaatagcagtcatcatattctgtggtacatcgttataattggccagtaactgtttcgtgtctttgggcaggcagtaaccgccataaccaaagctgggattattgtaatgggtaccaatacgagggtcaagccctactccttgaataatagcctgtgtatctaatcccttgatttcagcataggtatctaattcattgaagtaactgacacgaagagccagataagtattggcaaaaagcttcacagcttccgcctccttcaaacccataaaaagagtgtcaatatccttctttatagccccttcctgcaatagagaagcaaaaacatgcgccgcatcttcaagatcatcgcctccaatggtatggataaccttattctcctcatcaaactgaccaatcattttgggataacccacgattatgcgactaggatataagttgtcatataatgccttactttcgcgcaggaactcaggcgaaaagagcaaacgaaatttgtgtatagtctcccaccctttctccttaaatttttcagtatacttcacgtacaaggaacggcaataaccaaccggaatagtacttttgattaccattgttgcatcgggattaacctctagtaccaaatcaatcacatcctcaatatgatgcgtatcaaaaaaattcttctgggggtcgtagtttgtaggagctgcaatcactacaaaatcggcgtcactataagccgttgcaccgtccaacgtagctgtcaggttcagtttcttttccgaaaaatacttttcaatatattcatcctgaataggactgattc

SEQ ID NO: 6499 - DNA, 15774 bp, Unknown
  gut microbiota DNA sequence
ctatttgggcaacttatcttttttttatgttttcggaaaatatttctgtttggttacagggtaaccacatcccaatgaaatttcttttaatttctcacctgttatatactgccattaaactgtgactgacagaagggtgagcgttatcaatgctggagtgctgacaacttattggaatactttattgaagctgaacttcttttccccgcatgaaataaatgtgataactttccccacttcatatttattcgtacttttggggtgcaaaatataaatagatgattcttatgaaaactggaaatgcttgttttttactattgatgtgtgtaagcctcctgtttacaagttgtggaaactctcagagtaaaaagggtgaagagaataaggtgggtgatgataaggatgctcacggttgtatagcttccgcaggatatacctggagtgaggttctgaaagactgcatccgtctttgggagaaaggagtacgtgtagccgatgtggcagataaagaaaaagccgcctatattgttttttcgcccgattcgctgcaagtagaactcttcttttctgacgaccgcccgagcgaaatactggatcgccgctctttaccttcggggggatacgcatggaatgtagaggatgatgatacgaagaatgtccgtctggagaacgataaatggactattagtcaacggggaaatctgatttatcagcaggtggaggaaccgtaataggacctttggaatttctgaattatggaaaactttgctgccatagactttgaaacagccaacgaacagcgtaccagtgtgtgcagtgtcggtgtggtgattgtgcgggaaggagagattgtagatacttattatagtctgattcgccccgaaccggaatactatacctattggaatacgcgtgtgcatggattgacactggcggatacggcaaaagctccggtatttcccaccgtatggcaggagatagcgccgcttattgaaggattaccgctcatagcccataataaaggttttgatgagagttgtctgaaagccgttttcagaacttatagcctagattatcctgattatgaatttcattgtaccttgagtacggcacgaagacggatcaaaggtttgcccaactatcagctgcatacggtagctgcctactttggttatgagctggagcagcatcaccatgcattagccgacgctgaggcctgcgcctggattgcccgggaaataatagaataacaaagaaaaagaatacgaatatggatttagcatcacttaccgcaaaagtttgccgcattgctatggatgcaggaagtttcttgaaagaagagagaaaaactttccgcagtgaaagcgtggagaagaaacatgcgcatgactatgtgtcttatgtagataaagagtcggaaaaacagattgttgctgaactttccgttttgttgccggaagccggttttattacggaagaaggttcggcagtgtatcaggatgaaccttattgttgggtagtggatccgttggacgggactacaaattatatccatgacaacgcgccttattgtgtatgtatagctcttcggtctaaagaggaactcttgatcggagtagtgtatgatccctgtagggatgagtgtttctatggctggaaaggtggaggtgcgtatgtggatggccagcggatacaggtttccaatgtgcagcagatggaagatgcttttctggtaattgaattgccttataactcatgtcaatatgcccgtacgggagaacatctgatacataatttgtatggtaaggttggtggtatccgtatgactggttctgcagctttggcaatatgctatgtagccgccggacgttttgatgcctgggcggaagctttcatcggcaaatgggattattcggctgccgcattgctggtgctggaagccggcggccgggtgactgacttttatgggaatgagaattttatagaagggcatcatattattgctacgaatggatatctgcatcctatattgcaacaactgatacaagaagtccctccgttggggatgtgacataaagaaatagcctgatgaaaaatactgtgaaatattggttcggtcctttgttccatcttttttttccacgctgctgcgcagtttgtggagcatcacttatagagggtgaggatactatttgtactcgttgcaatatagatataccgcgtacgaattatcataaaatgaaggataatcctgtagagcgtatgttttggggaaagtttcctctggaacgtgccacctcttatttcttttatcggaaaggaagtgatttccgcaggatcctacatcaattgaagtatggtggaaggaaagaactgggagcggtgatgggacgttgcatggcggcggaattactgccgaccggcttttttgaagatgtagatgttgtcattcccgtacctttgcatccccgtaaacagagagctcgtggatataatcaaagtgagtggattgcccgtggcgtgtttcaagtgacagggatacctgtagatacttcttccgtgatccgcgagaaacataccaatacacagacccgtaaatcgatttatgagagatgggagaatgtggaaggtatttttaaactccgccatccggaacgattagtagggaagcatattctgattgtggatgatgttttgactacaggagctacaactactgcctgtgctgatgtatttcgtgagataggagggatacgtatcagtgtattgaccttggcggttgcggaagcttgatgaagataactaaataatgaaaacaaaaaaggttcgccataatgacgaacctttttgctcttcctcttggacttgaaccaaggaccctctgattaacagtcagatgctctaaccgactgagctaaggaagaatttgcatttaagtttttcgctcttcctcttggacttgaaccaaggaccctctgattaacagtcagatgctctaaccgactgagctaaggaagaatgttgttttttctcaaatgcgctgcaaaagtaataggatattttgaaatatgcaatatctttgcaaaaaaaatatcgaaatggacaaaataattggaatgggcaatgcccttgttgacgttcttgctactctcaacgacgaccatattcttactgaaatggaattgcccaagggaagcatgaccctgattgatgaaacgaaactgctgataatcaatgaatgtttcagtgaaatggaaacagaattggctactggaggctctgccggaaatgcaattcgtggtatggcatgccttggtgcgggaacaggattcattggtaaggttggtaatgatgcttatggaaaattttatcggcaaagtttgttggaacggggaacggaagcaaatttattagtttcttctgagttaccttcgggggtagcttctacttttatatcacctgacggggaacgtacttttggtacttatttgggtgccgccgctacattaaaggctgaagatctttcgcgggagatgtttaaggggtatacttatttgttcatagaaggttatctggtgcaggatcatgatatgatacttcgtgccattgaactggcaaaagaagccggattacaaatctgcctggatatggcaagctataatattgtggagcaagatcacgatttcttctctttattgataaacaagtatgtggatattgtgtttgccaatgaggaggaagcaaaggcatttacgggtaaagaaccggaagaagcattggatgtgattgctaaaatgtgcagcatcgccattgtgaagttgggtgccagaggatcgctcattcgtaaagggacagaggaagtgcatgtgcatgctgtcactgtggatagagtgatagatacgaccggtgcgggtgattattttgcagccggctttttgtatggactgacttgtggatattcattggagaaatgtggcaagataggttctatcctttcaggaagcatcatccgggtgattggtgcagaaatgcctgccgagtggtgggaagatattaaaactagaatcagtgaactataataaataggatatgaagaaaatactgaaagtacgctggataactaccttactgttagtagtaggtgtagttgtcttttttagtttcaagagtggtgatagccgcagtttccagattgcaaagaacctggatatattcaattccatcgtgaaggaactggatatgttctatgtagatacattggacccgaataagacaatacgagagggtatcgatgcgatgttgtattctctggacccatatacggaattttatccggaagaggatcggagtgagttggaacaaatgcttaaggcttcttatggaggtataggttccatcatccgatatgagcctaaattgaagcgtacagtaattgtggagccttacgaaaatatgcctgctgccgaagtgggattgaaagcaggtgatatcttgcttgaaatagatggaaaagatttgaccggaaatacggatgtgagcaaaatacttcgtggacaggtagggacaagtttccaactgaaggttgagcgtcccggtgaggcaaagccattggattttacaattgtccgtaaaaacatccagttgccgtttattccttattacagtaagttggataacaatatcggttacatcaacctgagtactttctcaggaaatccttccaaagagtttaagaaggcttttcttgatttgaagaagcagggtatcacttcattggtagttgatttgcgcaacaatggcggtgggttgctggaagaggctgtagagatagccaactactttctgccccgtggtaagacgattgtaacaacgaaaggcaagataaaacaagcaagtaatacgtataagaccttgcgcgaaccattggatacggatattcctattgctgtattggtaaatagcggtactgcttccgcttcggaaatcctggcgggtgcattgcaggattatgaccgtgcagtgattgtaggtaaccgcacgtttgggaaaggtttggtgcaggtgccgcgtacattgccttatggcggtacgatgaaggtgactacttccaaatattatattcccagtggtcgttgcgtacaggcaatagattacaaacatcgtaacccggatggtagtgtagggcgtattcctgatagtttgactacagtattccatacagctgtcggacgtgaagtgcgtgatggcggtggtgtgacgccggacgttgcagtggaacaagaaaagttacctaatattttgttttatctggtaaatgataatctgatctttaattatgctactcaatattgcctgaagcacccgacaattgcttctcccgagaatttcgaagtaacggatgctgattatgcagagtttaaggaaatggtgaagaaggcagattttaaatatgaccagcagagcgagaagattctgaagaatttgaaagaaatggcagaatttgaaggttatatgaaagatgcttccgaagaattcaaggctcttgagcagaaacttagtcataatctggaccgtgacttggattactttgcaaaagatatcaagaatatgattgctcaggatatcattaagcgttattatttccaacgtggtggtatcatacagcagttgaaagatgatgatgatttaaatgaagccgtgaaagtgctgggtaactcggaggagtataagaaaatgctgagcgtaccggaaactacggtcataaaagagaaggggaaagaaacaagcttggtgaattttaattcataccgaaaaagcagtctgatgatttttgactatgtagtgtaggttatagtttgtagcttcttaaaataagtaaccggataattttatggtctatctttacctttccggaaaagataatccataaagttatccggttttttggtggaaaacaattacctttgctggcaggttacttgtaaatcaatatatatgagagtatctctgttgctattttgtatattttctctttttagtagcttatcacgtggttcctctattcctttttctcccatcgtgaggagctattccgtatcagattataatgcaggtattcagaattggtctatcgctcaagatgataggggagttatgtatattggcaataacaaaggtctgttggagtttgatggaaatagctgggaacttcatgaattgccttccaggaacatagtacgctctgtatatatcggtaaagacggcaagatatttgtgggctctttcgaagagttcggatatttcgaacgtaattcattggatagccttgtgtaccactctttaaaagatgaagcgaaagatttccggttccataatgatgaaatctggacgattacgtcggcacatggggagattgtatttcaatctttcggttctctgttcttttatgacgggcatactgtgaaggggattcgtacaaaaactcttcctttgaatttatttcaggtaggtgatacggtttattctcaacagataaacggagggctttttgttcttgcaaagaatgggctggaaaatctgattgaacgaaaatcattgggcaacagtgatgtggtggcaggacttccgtataatgatggcgttttattcctgacacaaaagagtggcggttttgtttatcaaagcggaaagatactgaagtggcatacagaatgtgatgccgagcttgaaaaatactctgtgaaccgggctgtaatgaccaaagacagttgctatattatcggtacgctttctaatgggatttatgcaatagataaagaaggacgtttactttggaaggagaatacggacagtcgcttacagaataataccgtattaggactgtattgtgatgccgataacaatgtttgggcagctttggatgaaggtatagcctatatacaaaataactccttggtatattattatgagcctccttaccggaaaataggaatggtctatgatgtgctggtgaaagaggatgaggcttatatcgcttccaatcaaggactttaccggattaggaacagagtccccgaacttgttccgggactggaagagcaggcatggttcgttggtgaatggggaaaacagattttatgcggacataataaaggaacttttcagatatcgggttcgcaggcatcgctgatttcggatgtgagaggagcgatgtgcatgaaagaagtcaatctggaaggacgttcgttcttattgcaaggtacctatacgtttctgaatttatacaatgaggagtcttcgggcatctggaggtttctgcggtcgttaggcgggtttacccacatggtgcgggagatcgagatggatccccaggggaatatctgggtgaagcatttacggaaaggattattccgttttcggattaatccggatctgaaacgggtagaagatgtcagaacctatatggaactgggtgatgtgaaagatggggacttctctttgtttaagatcaacggacgggttgttttttcaaatggggaaatgttttacacttacgaagatatgaatgattctattattccttatgaatcgatgaatgagcaattggcggatttgaaaggaatacatagtgtgagtcatgcaaaaggcaatctgtactggtttgtaaacagcaagatggcatatttggtgaaatgtgaaatgaatgttttccggattgaacatagaattccgttttctttgtttgatggtttgtctatagaggagagagcagcgatggtttatgacaaggcgagtggcagttcttatctctgtttgaataatgctgttgcccggattgattcagatagttctcttttgtacaagtcctctattaggcgctctttgtggatatcggctataacgactgagtcggagtggacgggaaaaataaaaagattgtcggtgcaaaaagagaacaagattgatgcagatttgaataccgtatgcttctctttatgctatccggtttataatgactatacttacaaggtaaggtataaattggaaggactgtccgatcagtgggtggaaggtgaccgcagtctgcagaagaaatatacccgtttgccatttgggtcgtatgtttttaaagctgagatttataatgagaatgaagtattggcattggtaacgctaccttttgaagtcttgagaccttggtttctatcatattgggctatcaccggttatgttctgattgggctgttgttgttattgttgttgcaatacatcgtttatcagtctgtgaagaagaagaaagacagggtgattgaacagcaacgcattacccatcaagctgagatagaaatacaggaaaagaagattatcgaattggagaaagagcaactggaagctgatttacgttttaagagtaaagaactgtccggagttgtgatgaccaatattgcccatcaggagtttttgaattcgttgaaagaagaaatacaacaacagaagttatcagggcagtatacgcggaagaatctggataagctcttggtattgattaatcaaagtatcgtttcggatgaggaaaactggaatatgttccaggcgaattttgaccggatacatgagaacttcttccgaaacctgaaacaacagtatccggatctgacggcgggtgatttacgtttctgtgctttactccgcttgaatatgccgacaaaagaaattgccaagctgctgaatatatcggtgaggggcgtagatgcggcaagatatcgcttgcgtaagaaatttaatctatctcaggaagatagtctgacggattttatgattaattttaaatagttgattattaacgttataatgtgaaaggaagtactaaaatagtacctcctttttttgtgttttgcactaaaggtacttttgttgtagctctgtattgtggcagtttaaggtgctttctctttatttgcagcgaaatcatttttctccaaaaaataataaagaatgaaaagcatgagacaattaatccttaaggtacaatcgtttttaattttattggtgctggtatctgccaatgtgcaagcacaaaaatctcctgtcgatatggatcgctttattgatgatctgatgaagagaatgacgctggaagagaaaatcggccagttgaacttacctgttacgggtgaaataaccaccggacaagccaagagtagtaatgtggctaagcgtattcgtgccggtgaagtgggcggactctttaacttgaaaggcgtggagcgtattcgtgacgttcagaaacaggcagtagaagaaagtcgtctgggtattcctcttttatttggtatggatgtaattcatggatacgaaactgtattccctattcctctgggattatcctgtacctggaacatgaaagctattgaagaatctgcacgtattgctgctatcgaagccagtgctgatggtatttgctggacattcagtccgatggtggatgtttcccgtgatccccgttggggacgagtttccgaagggaatggtgaagatcctttcttgggagcggagattgcgcgtgctatggtacgtggttatcaagggaagggtatgagtagtaatgatgagattatggcttgcgtaaagcactttgctttatatggggcatcagaagcaggacgcgactataatacagtggatatgagtcatcaacgtatgttcaacgaatatatgttaccttatcaagctgccgtggaagaaggtgtgggtagtgtgatggcttcattcaatgaagtggatggtgtaccggctaccggaaataagtggctgatgaccgatgtacttcgtaagcagtggaactttgatgggttcgttgtgacggactataccggtatcactgaaatgaccgatcatggtatgggtgatacacaaacagttgcagccttggctctgaatgcaggtgtcgatatggatatggtgagcgatgcttttacaagcacacttaagaaatctctggaagaaggaaaagtttcagtaaaggctgttgatgctgcttgtcgccgtattctggaagctaagtataagctggggctttttgataacccctataaatattgtgatataacccgtcctaaaaaacaaatctttacgaaagaacaccgtgctatagcccgtaagacagcttcggaaagctttgttctcttgaagaatgagaatggtgtactccctctggcaaagaaaggtaccattgctgtagtaggtcctttggctgatagccgtagcaatatgccgggcacgtggagtgtggctgctgtgatgaacaaatatccttctttgattgaaggtctgaaagaagtagtgggaggcaaggctaaaattcttacggctaaaggaagtaatctgatgagtgatgccgaatacgaagaacgtgctactatgtttggccgtaccctgcatcgtgacaatcgtacagataaggaactgctggatgaggcacttgctgtagctgccaagtctgacgtgattgttgctgctttgggtgagtcttccgagatgagcggtgaaagtagttgtcgtacagacctcgaaatgccggatacgcaacgtgcacttttgcaggaattgttgaaaaccggcaaaccggtggtattagtgttgtttaccggtcgtccgttagtattgaattgggagcaggaaaatgtacctgctattctgaatgtgtggtttggtggtagtgaagctgctcttgccattggtgatgtactgtttggaaatgtaaatccgagtggcaaacttactgctacttttccgaagagtgtaggacagattcctttgttctataaccacaagaataccggtcgtcctttgcctcaaggggcctggttccagaagttccgtagcaattatctggatgtagataacgaaccgctttatccgtttggatatggcttgagctatactactttctcttatagtgatattacattggataaatcgtccatgaatatcaatggagagattacggcaactgtaacggtaaccaatacaggtaagtatgacggttcggaagtagtgcagctatatatccgcgatcttataggcagtgtgacacgtccggtgaaagaactgaaaggctttgaaaaaatcttcctgaaagccggtgaatccaaacaagtgtctttcaagctaacagctgatatgttgaagttctacaattacaatctggattttgtgtgcgaaccgggcgactttgaagtaatgataggtggtgatagccgtgatgtgaataaggccctattttcgcttcaataagtatctgcctggtagtagatagataaagaacgaatacagaaactttattgaaaataaatatctgataactaattagttctgcgagtgtgtagtagttataaagtagtaccatgtttaggcgtggtactcttgtggtagcctgttttttgacttaaatcaattattgctatacgtttgcagagtaattttaaatcaatacaaaatgaaaagaaatctattaattacatgtgtgatgttgctgtttgctgtcgtttcgatggcgcagaacaagattacagtttcgggtgtcgttacagataagacaggcgaaactgttataggtgcttctgttcgggtaaaaggacaggagaatatgggaactattacggatatcgacggaaaataccagattcctggcgtaccggcgaatgccactttgatattcagctatattggtatgaaggaacaggaagtggcgcttaatgggcgttctacagtgaatcttatgatggaagaggatagccagctcattgaagaagttgtagtagtaggttatggtagcgccaagaagcgtgatttgaccggttctattgtaacagtgaaagctgccgagattgcttcaaaaccatctaccaatcctttggcttctattcaaggtaaggttgccggtgtgcaggttatcaatacaggacgtgccgggcaggatccggaaattcgtgttcgcggtacaaactctatcaatggttatactcctttatatgtagtggacggactgtttacggataacatcaactatctgaatacagcggatattgaatctatggaaatcctgaaagacccttcttccttggctatctttggtgtgcgtggtgctaatggtgttattatcattactactaagaaggcgaaagaaggtaagactcaggtcagcattaatggttcggtgggttggaaaaaggttacagaccgcgttagcctgactaatgcagagcagttcaaaatgctttataatgaacaacgcatgaatcagggtggcgatccgtacgattatacagtatggaatgcagatactgactggcaggatgagatgttccaaacaggtttccttactaacaatacagttagcattacagcttcgggagatagaagtaagttttatctgggcttgggatatgtaatggaagaaggttccatcaagagtgaaaagctgaataagtttactgtgaatttgcatagtgaacataaagtgaccgacttcttacgttttggtttccaggtgaacggtgtacgtgcattatatcctgatgcaaaaggtgtaggctctgctttgaaagcagctccgattgctcctgtttatgatacggaaagcggtcttctacatactcttcctgattttcagcgtgctcaggtttggaatcctatgattgaacccgtgttgagaggtgctcataataaatctgcaaattatcgtatggcaggaaatatctacggagaacttgatttaatgaagaatctaacctttaaggctactttctccctggattatgcttccagccagtcacgttcttattctccgcttatttatgtgtataacccggatgtagaaggtggtaaagaaagattgacggataaagaaagtattagtcagtcgaagtctacatcaatggcagcacagtccgattatgtattgacttatattaatcagtttggtgatcatggtttaactctgactgccggtcttactacgaattataatgaatattctgatttatcgggtggccgcagtcaattgccgggttatggtgtttccattggcgaagatatagataagtggtggattactatgattgatgatgctacatcagctactaatggtggatcccaatacaaacgttttacaatgtcttatctgttccgtgcattgtataactataaaaatcgttatttgctgaatgcttcttatcgtcgtgacggttcttccgtatttaagagaacaggaaatacatgggataatttctattcattcggtgccggttgggttatgagtgaagaggcattcatgaagaaacagaatgtaatcgattatctgaagttgaaaggttcatggggtgttttgggaagccagaatacaggaggttcccgctatccggcctatcctaatattacaagctcgggttctgctgtctttggtgataatgttattgcaggtaagggaccggataaactgatttcacagacattgggatgggagcgtaactattcatgggaagttggttttgatatgcatctgttggatggtcgcatgcagatttctcctgtttattacaataagacaaccaaagacttgctgacaagtgttcccggtctttcaggtacggttcctgcattgcagaatacaggagagattcgtaaccgtggttttgagttggcagcatcctggagcgataaaatcggtgaaaactggcgttatggtgtttcagccaatctaacgactattgataatgaagttgtatcattgataagcaaggattattcaataattaatggcgtttcccgtgtatctgaaggatatcctatcggctacttctatggatacaaagtggcaggtgtttatcagaatgaaaccgatatcgaaacttcagcacctaaccaggtagcttctgtgaagccgggcgatttgaagtttgccgatgtaaatggtgacggtattatctcagagaaagaccgtactatgattggtaatcctactccggattttacttatggttttagcgtaaatctgggttacaagaattttgatttgagtgtagatatgatgggtgtttatggaaatgaggtttatcgtaactgggatagtagtgcttatgcacaattcaactatcgtacagggcatttgaaccgttggcatggtgaaggaacatccaactgggatccgattcttgatccatcccgttctgtaaatctggaggcttcttcttactatgtagaagacggaagtttcttccgtatccgtaacatagagttgggatatacctttgatccccgtttgttgaaccgcattaaactgcaatctttacgtatctatggtaatgtgcagaatcctaaaacatggagccgcaataccggatatactcctgaagttggtggtagtgcaacagcgtttggtgtagatggtggaggttatccgatgcctgtagtttatacattaggctttaacttatcattctaaacatgaaatctaataaaagaaaaacgatcagtatgaaaaagatattttattatgtgatggctttggcactgggatgttcccagatgtcatgcagtgacctgttagatcagaaaccgcaaggagtattgactgaagatgacctgactggtggtacttatgaaacacagatttttaacatgtatgccttgcttcgtggttatcatattgtttccggaaatacggcgttggctattcatggtatgcgttcggaagatgcggaaaagggtagtacactatctgacggatctgcaacaggaaaaatgtttgatgattttgaatatgctgcaagtgacggcatgataaaaagttactggaatgctaattataccttgattcataaagcaaatgatgtattggaggagatgaagtcgaatccttcattgacaggcggtgacttagttaataagggagaggctttattgatgcgtgctttctgttatttcaatttggtacgtgcttttggcgaagtgcccttgattgattttaaagtagggagtgtagcagatgccaatattcccaaatcttctgtagatcagatatatactttgattgatgaagatctgacaaatgcagaatcttacttgccgaggacttgggaagcacaatatgtcggtcgtcttagctggggagcggctcgtgccttacatgcccgtacttatatgatgcgtaatgattggaacaatatgcgtgcggcagcagaggacgttatttcttccggtttatataatttgaatacaccttatgaagatattttccgtgagaaaggtgaaaactgtggtgagtctgttttggaacttcaatgtactgctactgctgctcttccgggatccaacgaaattggtagccagtatgctcaggtacagggctgccgtggggccggtgaatggaatttaggttggggccaacatactcctactcaattattggctgatgcattcgaagaaggtgacccgagaaaggatgagactttattgtattttattagaacaggagaagatccttcgaccattcctgcaaataagccttatggagaaaaaccggttgccaatgccgatgtgatagcaaagtactttaataagaaagtgtatacagatccggctttgcgtgaaaagtatacgaagagtgggtattgggtgaatattcgtctgatccgttattcggatgtcgtactgatggctgcggaagctgcttgcgaactgggtgataatacaagtgcaagaagatatcttgag

SEQ ID NO: 6500 - DNA, 501 bp, Unknown
  gut microbiota DNA sequence
cgaaagtgcccggtataaagcacaaagatgcgaaggttgtcctttgcatggaagttgttttaaagcacaggggaaccgtattatagaagtcaaccaccggttaaaccaatataaacggcaggcacgggaaaggttactctcagaagaaggaatcaggcatagaggcaggcggtgtatagaaccggaagctgttttcggacaaatgaaatacaacatggcatacagaaggttccggcatgtgggagaagacaaggtgaaaatggactttgccttctttgccatagcttttaatatcaaaaagatgtgtgcaaaactgagaaaagcaggaaaggagctcattacacttgctaaatctatatttattggactatttataacccgatacaacgggaagatagcaacttgttaccaaatgaatgagaaaaaagcggcgtagacaaaagaaaagataacaggactataaattatagaaaaaggttgtgccaacgttttgacacaacc

SEQ ID NO: 6501 - DNA, 212 bp, Unknown
  gut microbiota DNA sequence
tctcggaaagcgggtgcaaaggtaagaactttcaagcatatcttccaaatatttccggaagttttttttcttttttctgttagaatgctgtattcctgatcggaataaaggctaaaaggaaagaaaaacgttggagttcctacaccgtttctgtcagaatgtcaatttcaaggctgaccgtctcttggttagcgggtgcaaaagtagccgat

SEQ ID NO: 6502 - DNA, 8328 bp, Unknown
  gut microbiota DNA sequence
ccaactacctttgctgcgatcaagccctggaggattcgaagggagctggccgtataggacttacccgttttgcgagtgcaaaggtagataaaaattttaaatctgcaataccttcccctaacttttttcaactttaacaagaatacagggtctataaccaatattatttataactttgcgccatatttctaagaaaaatggcagaaaataaaggttacatgcaatatgcaatgttgttcggcacctatttgggaggatattggattttaaaattcatcctcttccctttaggattgacaattccgtttttatctttccttttcgtagggctcacgttatgtgtccctttcatgggctattattatgtacgaatgtatcgtaatactgtatgcagcggcagtatcagtttcttgcatgcatggatattcacagtattcatgtatatgtttgccgcattgctgacggcagtggcacactacatttatttccgtttcatcgatcatggtttcgttatcaatgcctacgaatctcaaattgatatcttaaacaaaagcggtgtaccggacatagaagcctatacaaacatgtttcaagaaacattggagactgtgaaatcgctcactcccatagatatcaccatgcaactggtgtcatggaatgtattttgcggttcattgctcgcgcttcctaccgccttatttgtaatgaggcgtaaaaaggaatgacaagaacagacaaatttcaaataaatcaggtatagtataatatagtaaaatcgtaaataagcaaatggatatttcagttgtcgttcctttatataatgaagaggagtctcttccggaattgtttgcatggattgaacgggtaatgaaagcccatgacttttcttatgaagttatttttgttaacgacggaagtaccgaccgttcctggcaaataatagagcaattacaaacaaaatctgataaagtgcgcggaataaagttccgtcgcaattatggcaaatcaccggctctctattgcggttttgaacaggcccagggcgatgttgtgattacaatggacgccgacctgcaagacagtcctgacgaaataccggaactataccgcatgattacggaagatggctacgacctggtgtccggctggaagcaaaaaagatacgatccgctgtcaaagaccataccgacaaaactgttcaacgctacggcacgcaaggtttccggcataaagaacctgcacgatttcaattgcggcctgaaagcctatcgcaaagatgttataaaaaacatagaagtgtacggcgaaatgcatcgctatatcccctacctggcaaagaatgccggtttcaagaagattggcgagaaagtcgtacgccatcaggcacggaaatttggcaagacaaaattcggcgggtggaatcgtttcttcaacggatacctggacttgatatccctctggttcctttccaccttcggcatcaagcctatgcacttctttggcatattgggttcgctgatgttcttcgtcggattcgttgccgtcattattgtcggcgccagcaagctgtattacatgaatcaagggatgccctaccgccttgtgacagattctccctatttctacctgtcactgacatccatgattatcggcacgcagttatttgtggcaggttttctcggagagctgatatcccgcaatgcaccagaacgcaataagtaccaaattgagaaaatgatttaaccatgaaaacattagtcagatttataatgttcggggctgttcttttccctgttttcagtatagtaatatcctgttcggaagaagcggactgttcaatgacaacgcgaaccatgatgcaatgttacctatatacattggatcctgacaccaaagtggtatccaatgataccttagactctttaacggttactgcctttggcacggattccgtcatcatcaacaatcaaaaaaaagtgcacgatctctcgttgccactgagatataccgccgactccaccgtactcgtgtttcattacagcaagacattgacagatacgcttgttattcaccaaaccaacacaccttacttcttgtcaatggattgcggttatcaaatgaaacaagccataacagatgtccgatacagtcgccacagtcttgattctattcgcgttgcaaataaagaagccggaatttatggagcagaaaatcttaaactattctattagtctggcgttctgtttgctgctgtctcttccattacaggcacaaaacagtgacatttccgccccgccggcaaacactccgcccaaaaaggagaaaaaagaggccaaagaggaagtgcactatccgctgtacaatggtatttctgtcagtgtagatttatggggacccggaagcaaactgttcgggagtgactttttcagcagtgaggtagccgtcgatgtcaatcttaaaaatcgctttttcccgattgtagaattaggatatggcaatactgatacttggagcgacaaaggaatacattataaaaccggtgctccctatttccgtatcggtatggactataatgcgctttataacaaaaagcacggacatatgatactcgttggcctgcgctatgcggcaacgagctttaaatatgatgtagaagcgttaggcatcaacgaccctgaatacgggggaagtttgggtaatccgaatttgatagacggcatttggggaaacagcctgccttttaattataaaggaatgaaaggctcgatgcaatgggccgaattttgtgtcggtatacgggcgcatgtatggaaagacctgtatatgggttgggcgttacgtttcaaattccgtatgagttcttccgttgccgagcatggtgatccatggtacgtaccgggctacggaaagtacaatggaaacacaactggggttacctatacaataacttataaactaccattctaagagataatgacaggattagaaatctggttgcttgccataggacttgctatggactgtttcgctgtatccatagccagcggcattatattaaaacgtgttcaattgcgcccgatgctgataatggcattggctttcggcttttttcaggcactcatgccattgcttggctggataggcgccagttttttcagccatctcattgaaagtatagaccattggatagcttttgccattttagcttttctgggtggacgtatgattatggaatctttcaaggatgaagattgccggcacgagttcgatcctaccaagctgaaagtagtagcggcattggcggtagccaccagcatcgatgccttggcggtaggtgtttcgttcgcttttctgggagtttgcaactttgcatccattctgtcccctatcagcatcataggatttgtgtcgtttgccttatcactagcaggattgatgttcggcatccggtgcggatgcggcatcgcccgcaagctgcgttccgaactgtggggcggcattatcctcatcgttatcggaacgaagatattgatagagcacttgttcttttaaatgaagagtgaaaaacgaagaaacggcaggctgtccgataaaaggcagtctgatagaaggataaaaaaagaagatcgcttaatttatttatacagcatcatacattcattatggagaagaaagcacaacgtaattttttatgggttgccctgcttgccctcggcactatcggaatacttgcacgccacaaccgcgctgttccttatcaaactgtcagcggactgatattcggaacggtctataacataacctatcagtacgacagcaatttgaaagccgagatagaagctgagcttaaacggtttgacggttctctatctccgtttaacgatacggcaacgattacgcgcatcaaccggaacgaagaaatcattcccgatactttcttcaccaacgtattccgccgcagcatggaaatctcccgggagacccaaggtgcttttgacattacggtagccccgcttgccaacgcatggggattcggatttaagaaaggcgcatttcccgactctgctatgatagacagcttgctggacatcacaggctacccgaaagtatcgttatccgccgacggaaaagttatcaaacaggattcccgcatcatgctttcgtgcagcgccgtagccaaaggctatgcagtagatgtcattgcacaattgctggaaaagaaaggcatcggcaatttcatggtagatataggcggagaagtggtggtgcgcggagaaaacccgaaaaaaagtttatggcgcatcggaatcaacaaaccgatagacgactcgctcgccgtaaaccaagaattgcagaccatactgcaagttaccgatgtgggcatagccacttcgggaaattaccgaaactattactacaaagacggcaaaaaatatgcccatactatagacccgcgcacaggctatccggtgcagcacagtatcctgtcggccacagtgattgcctgcgactgcatgagtgcagatgcctatgccactgctttcatggtcatgggcctggaagaagccgaacgctttgccgattcacaccccgacctcgacgcatgcttcatatatgcggacgaaaaaggggaactccggatgttctacacgaaaggaatggataaatatatgacggtaaaatagcgattcgtcccggttttcatcctccgcgaagttttattttgaaaaacatctgtcacgctatcacaaaaataagataataagctatcatacaatagactatagcgtgacagataagtatgacagataaaaatccttacaagtagcagtcacacgttgtgtcgtcctgtatcgtccagatttcggctgagcagttcaacagctccgaaatgagagaaagtacacctacttgtttattcaacagccaaacaatagccaacgcattagttatcagcataaaacttttagttcaggcggcaaaaacaaaaagtttcccctgataaagctaccggttccaaccgttagacatcacattcatcctatttataaaagacaaaatataccgccagtaccagacaaacgaaagctgcaaaatgattccaatgcagagattctcctttaaacagtacggtagtgaatattgtaaagatgataagcgtcactacttcctggataaccttaagctgcatcaacgaaaaaggaccgccattgcctatgaacccgatgcgattggcaggaatctgaaatgaatactccgccaacgctatcatccacgagaacaaaataacggcatagagaggccagttggagataactttcatctcctgcaacttcaaatgcccgtaccaggcaaacgtcatgaagacattggatacaattaaaagtaaaatggtgtaaaaagctttcatataatgattagtgattagaaattgcttgtcaacggcttgtcccgccttcattcttccggggcagcaactcttcctgcacattgctcatgctcccccacaaactgtaccgggcttcgggattcatctcttccagacgatgcaggatacctttcatcacgctccggctcgactgcgactcgtaaggacaattcttcacctgcttccgatagtttcttatcgccgccaattccgccaaatctgattcgtgcacaagacacatcgggcggataatcgtcatgtcgaacttcttcattaccagccgcggcggcatcgaaccgaacgccccctgatacgtaatattcatcagcaacgtttccagaatatcatccatgtgatgccccaaggctattttgttacacccctgttcctttgccacagtgaacaaagccttgcgccggttccacgaacacaggaaacaaggagacttgcgggtatccgtactcgcatcgaactccgtttcgtacagcacgaaaggcactccctgcgactccgcatagcttctgaggtaatccgtatcgctctgataagagatatttctcattaccacatgggcagcaaccaccgaaaaccgtggcttcagaatccgggaacgacgcgccaacagttccaccaacgccaaagagtccttgccgccggaaagcccgataaggattttatcgccctcttctatcagtccgtactccaccactcctttggcaaagcgtttctctatacgccgtaatgtcttctcttcctctgtaaatagtgccataaaaatcagttgaaaattggctgcaaaagtaactgaaaagaatcatttaaagaagaattaacataatagaattacggaaaagagctttattccggattaattcgtatttttgaactcattaaaaaagattttttagtatgaagaataaatatatattgcttttcttgtttggtttctttggaatacatgcttcagcacaaacccttgcccaagcaaaaatactctatgaaaaaggacaatacgaacaggcaaagcccgtttttaagaaatttgtaaaatcacaacctaataacgggaattataatttgtggtatggcgtatgttgtctgaatacgggagaagcggaagaagctataaagtatctggaaacagccgtaaaacgccgggtcaccagcggacaactttatttggcacaggcttataatgccatttaccgatttgaagatgccgtcggcacttacgaagactatattgcagaactgacaaaaagaagacgttcgaccgctgaagccgaaaaacttctggaaaagagcaaagccaacctccgtctgctgaaaggcgtagaagaagtgtgcttcatcgacagttttgtcgtagccaagaaagattttctcgaagcgtacaaaatcagtcctgaatccgggaaattgttcatgtacgatacctactttgaaaattccaatagcaaaggtggcactgtatatgaaacggagttagggaataaaatctattatagcgagttacagaaagacagtacgctcaacatcttatcgcgcaataaaatgatggacgaatggggcaaaggcaatatgctccccggcagtatcaacgagtccatgaatgccagttatccatacgtattggctgatggcatcactatctattatgcagcagacggtcctgcatcaatgggtgggtacgatattttcgtaacacgctacaatacaaacacagacacttatctgaccccggaaaatgtaggcatgcctttcaattcgccttataatgattatatgtacgttatagacgaattcaataacctcggctggtttgcatcagatcgttatcagccggaaggcaaagtatgtgtatatgtattcattcctgcctcatccaaacaagtatacaactatgaaagcatggataaaaacaaactgataaagcttgcccaactccattccatcagagatacctggacgaatgaaagcctggtagccgatgcaaggaaacgcctgcaggaaacgatgcaggaaaaaacggaaataaagaaacggcacgaatttgagtttgtaattgatgacaggaatatctatcattatgctgccgatttccgctctccgcaagcaaaagcgcaattcaggaactatctccaactgaaagaaagctataaccagcaacaaaataaactggaaaatatacgcatccaatattcgcgtgccaaccagaacgaaagaaacaaaatggctccggctatactcgatttggaaaaacgagtgctacagttggcaaacgaagtagaccgtactgctatccaagtgcggaaattagaaaagcaaaccattaaatagaacagttatggacatattcatcatcgcaattttaatcgttgcagcagttatactgttcctcgtagagctattcatcataccaggcatcagcattgccggacttttggcaggcggttgcatcatttatgccaactactacgcttttgccaatttaggagcaacagccggattcatcacacttgccatatccatcatcacctgcgttggttcattagtgtggttcatgcgttccaaaaccctggataagatagctttgaagaaaaacatcacttcaaaagtagaccgtagtgccgaagagaaagtaaaaattggcgataccggcattaccactacccgtcttgccctcattgggtatgccgaaataaatggtgatattgtagaagtaaaatccacagacggttttctgaatgagaaaactcccattatagtaaaccgcattacagacggagtgatacttgtggagaaaaacaaaccgtaaattgcaaatcattaaataagtaatcattaataactaaaatcatggatccaagcacaatgtatctcactgccttcaccatcat

SEQ ID NO: 6503 - DNA, 2393 bp, Unknown
  gut microbiota DNA sequence
tggtaacaggagcgttgtcatcctgcaatcatgccgatgagttggagccggtttctctggcaccacagattgtttttcttttttctccaagcggattgggcgacatgagctataacgactgcatccttgaaggcgttcagaaattcaaaatggaacataaagagattgacatttatatctattcgcccgaatcattgcttgaagccgagaaaatcttctccgactggctcaaacgaccggaaagcgaaattccggtgttgtttgttttgggtagcagcgattatgagccaatggcagaacttcatctggcggagcacgacttgacacccaacaaaagtatcctgctttttgaaagccggaaacaatataaagccgagaacattcatacattccagatttcaatgttcggagcttcatacctcgcaggagtatgtgcaaaacaatgttcagagatgacacctctgattttgcttgccaataataccgacagtcccatcaacatagccaaagacggttttattgcaggctacggcagtgactgcaatgtggagtatcttgcggatgattggacgggatatgtgtcggcttcgctcgcttaccggaaaatgagtgattgggtggttgattacgacttcattttcccagtggcaggtggctctaatgccggtatataccgctactcccgggaatttgagtactcaccatttctggtgggcatggatatcgaccagtcaagtctctccaaccgaatcactggctcggttattaagcatatcgaccaattgatttacaggtatctgacggaatgggtagtcacggggattatgccggagaaccaactttacggtcttgaaagcgggtatgccgactggctggtcgccccccgatacgtgaatgatttcagcagcttagtcaatggaatgcgtcaccaggctattctttttgagaaagagtattatgaaacgagtggttattaaacttattgcgccgctcctctgcctgatcggtctgtggagctgctcggacgatgagccttcttattctcctgacaacaagcagtggacagagaaggttgttgccgtggtgcttcccatggagaaagggcttgatgtacattggaaaaggacattgggaatgtttacaaccaactttgagcgtgcattcaaaaaccacgaagcaggtataaggttaaagtttgaatactacgatgaggcaaaggtcgatgtgcaagaacttgcccaatcgctggcattcaacgatgaggtgtatgccgtaatcggtgggctgtattcatccaacgcggcaatcctcgcggcagaactgacccttgtgggcaaaacattcttcactctcgccaccgccgaacaactggttcgtgcatatgcatcgacaggctatctctgggcgatgaccgagaccgacattacgcaatgtgaggtgcttctctccaaggtgattaactatgagggtgaaagcgtggcgcttttggccaaggagaacgacaattacggacaaacgttcattgactggttcgcatttcaggcacgcgaactcggactgaaaaacatgggatgctatacttacacctccgaaaatgtagctgatgtgtctcgccaagccatgcagtcaggtgcagaatatgtgatatgcatcccctctgaaatagaagagatgggaccgatgcttgaagcgcataaaacacaaagcctgaacgggtgtagtgtaccgagaatgctgttttcggatactgcctacggtgcggatgtgctcaagattcacggtgatgcagctgaaggtatagagggagtcgcatttggtgccgatcctgaatcgggatttgacgtgagttacaagacgtttttcaatgccacacctactcttggtgagtcacagctctacgatgctgcaatgctcatcggctatgccgcatggtaccagcagttcaaaccggagttgtcgttacaaaaatcattaagggccgttgtttcgggtgaaggcttgaacatgggtagctggacaggtgaggatatggggcttgtggtggatgcgcttgctgccggaaagtcgccgtatgttcgcggagcttcggggcatttgaggtttgatgcaaaggtgtttaccaatgtacttgccaccacctactataatttcaaggtttacaacggacagtatatcatccttgactataacaccagcgacggagggaaccgcacggatgcgacacttgccggctggaactggaaagcctcgcagatgcaggatttcaacaattcaggggaattcaattaccctgcacataccggcaactgggcactccttgttgcttcctccaaggaatggaccaattaccgccatcaggcagatgtgctcgctatctatcagcagctcagaca

SEQ ID NO: 6504 - DNA, 6479 bp, Unknown
  gut microbiota DNA sequence
gtgaagaatgtacggagcaactacgtctcagatacaatccaggtaagaagcgaacacattctgaatcatcttatcaaactgataccttatatcatattttgcaagacaaaaaatccattttcctcattatcgctaacagacacttcaatcaaagctacgcttccagaatattacaaccactgttttgaagatttacatcatctatccagagcaaacagatggttcatttatcctaaaccgaccatctattcagaccaatcgcacggtctttcttccctaaaaaagtaagtctcatttgccaaggctacaccctttactccaaaaggtgacaccataataactaaagggtgacgccatcactcacaaagggcgtcacccttctaaaaaacacatgatatttattctatttcgaagagaaacggctaccaagaaaaagtaacatttataaagaatatccgggaaacagattccaaaacatcttccatttaaggattctataatcttaaaatctcatttcctcatcaattactaccatttcgcatcaccccatcaaacattctctgcatcttttcgtccaccatagtaattggtacgaaaaggaaagattctaaggcgttagaatttacattttgtcattttgcaaatcattcccaatatagtgtattctcttaacctgatcaaatccggtatgtttttactgactccataacagacaaatctgcctcttttttcataaatttgcccccattatggaacagcaacaatcatctttcaaagaaaaggaacgtacagatctacgcgaaccgcagcacttcaaggtgatcatctataacgatgacttcaccacgatggagtttgtcgtcaagatacttactaccatattctttaaatcgacagcagaagcagaaacgctgatgctacaggtacacaagagtcaatcagcagtggtaggcatctatacatacgacattgcacaatcgaaagtacagaaagccacccgtatggcacgcgaagagaattttccactccggctcaccgttgcgccggaagaagaataagaattaggagaagattatggatatacaaaatacagtgcatgtgaacagcgcattcacctatgcacaaaaaaaggcgatatcttatcgccatgaatttatcacacctgagcatttgctgagtgcatttctggaacagagtccctttgccaatgccttaaatatgtgtttctgtgatacccaggaacttgctttctctttagagaattatttcacggaagaactggaaagcgttcccgcagacatggattatgaactggaagtttcaacccagctcaacgaactgatacaacatgcctatctgatgatagactattcaagtgctgaagcattgaacgtccctcatctagtgcaaagcatgctccagctcaaggactcctgggcatgccatatcctgaaagaagctcttgaagaagatctacccgaatttatcagccaactcatctcgcgatatgaagaagtggaggaagaagacgatctgcaaacctctccacaggaaaaaagcgaaccctggcgaaactttgtaacttgtctgaatgactgtctgcaagaccacaatccactcatcggacgggaagctgaactggaacgaaccattcaggtgctctgtcgcaaagagaaaaacaatccgttgcatgtaggcgaaccgggcgttggcaaaacctccctcgcttacgggctcgctgcccgcattgaagcacgtgaggtccccgaacgactcctcgactgccgtatctacgaactggatttaggtactctactggcaggtacgcaataccggggtgactttgaaaaacgcctgaaaaccattatggaaggtgttcgtaatgaaggacgtgccatcatctatatcgacgagatacacaatctgataggtgccggacgtacaggagacggttccatggatgcatccaacatgctgaaaccctatctggaaagcggagacatccgtttcatcggctctactacttacgaggaatacaaccgttactttgcccgcagcaagggattggtgcgtcgcttccaacaaatagatatacttgaaccaagcattgaggaaaccatccatattgtagaaggactgaaagaaaaatatgaagaatttcatggagtaacctatcaacctgatgtaatcccttacgccgtcaaagcgagtgtccgctacatcagcgaccgctttctgcccgacaaggctatcgacctggtggatgaagcaggagcttaccgcgaaattcaccctataccttccggagagcaaattgtagacaagacattgataaccgatgtactcgcccgtatctgcaaagtagatgcactcgccatgaaagaagaagataccacctcactggaaactttgcatgcacgtatcagtgccaaaatttacggccaggaagaggcagtgcgccaagtggtggaagccgtacaaatgtccaaagccggactgctggatgaaaacaaaccgctggcaagcctgctcttcgtcggtcctaccggagtaggtaaaaccgaagtagccaaagtgctggcctccgaactgggtatttccctgcaacgtttcgatatgagcgaatataccgaaaagcataccgtagccaaattaatcggttcacccgccggatatgtaggctatgaagacggtggtttattaaccgatgccattcgcaaaactcccaactgcgtactactgcttgatgaaattgagaaagcccatcccgatgtgttcaatattctgctacaagtaatggactatgctgttcttacggataataaaggacgaaaagccgactgccgccacgttgtacttatcatgacttcaaatgccggtgcacaatttgcccgtcaggcatctatcggattcagcagtcagattacagccggggaagccatgttgaaacaggtcaagaagaccttcaagccggagtttattaaccgtctgtccgctactgtcgttttccacgatatgagtcgggaaatggcctcactgatcctcgacaagaagcttggggaactgagcagcaagcttgccgcacgccagatagagatggaactgagcccggaagcccgcaactggttattgcaacgtggattcctgcccgaatatggcgcccgcgaaatggatcgtgtgatagcttcgcatctgaaaccactcctgatgcgcgaaatcttattcggttccttaaaatccggtggtaaaacttgcatacaggtagacaaagatcagttagtcttacaactttcaacaaagtgatactatggtctttgcactaactgacgaaattacatttcccgatccgcactacggcgatccggacggattgctggcagtaggcggtgacctgtcgaccgaccgcctcatcctggcttactccaacgggatattcccctggtacacttttcaggagggaatgatacaatggtggtgcccgctggaacgcttcgtcattttccccgatgaaatccatatctcccactccatgcggacgctcataaacaaagggaagtacgatgtcactatcaatcaggctttcgatgaagtcatccgtaagtgcggagaactgaggatggacatggaaggtgcctggctcggtccggagatgatagaggcttacacacttctgcatgaacagggttttgccgccagcgtggaaatatgggaaggggaacaattagtaggcggactctatggagtcaccttggggcgctgctttttcggtgaaagtatgttttcactggttcccagtgcatccaagttagccctcatccacttagcacaattcttcggagagcatggcggcgtactgatagactgccagttcgaaactccccatctgaaatcgatgggaggaagatatatcagctacgaagaatatatgaagtttttgcaatcataactacctttgctggtcacaccagcgtaaattgcaaatgttcatccgtactacgtccctcatcgtatgcaaagccctcccacgtaaacgctttcaagtcttcgggattttcaatgcgatttttaataatatagcgtagcatttctccgcggcacatcttggcatatatcacaattgtctttagctgcccgcctttccatacctggaattcgggagtaatgacacggacttcttcttctactcgcttccaatcgaacagatctctcatctcaccactggcaagattaacgagtatgccaccctgacgtttgatatccgctataaaataatccgtcagcaaaggtttccagtaatcaaacatagtcatccctcccctttcgggcaggcgtatatctccttccatacgataaggctttatcccgtccaacggacgaagcagtccgtacagaaaggaagtgatgcgcatgtgttcttgagcgtagcgaaaatcatcttcggaaaaatctttcggtactatacgtttgaacaccgcaccggtataggcacagatagcgggcattgcagaatttgcctccgaaaagaaatcctgatagcgcagataattctcagcggcaatcttggaatttatacgtaacagacgttccaggtcagcagctgaaaattgccccatatccaaggcattctgtactgcttccgcctgaaagtacggaacagttatttcagggactcctacagatgtgcgtgccgtcatcgttttggcacaagagatgaatgtcaacatatcacgttcaaagtttttttgggaaacaaagataatacaaatcgaatgtagaactttcatgctcgcatgaaaaagttttgcgcaaagtttttccgcataaccttcctctgtttccatactttttcgtacttttacgccttgttggaaaaatacaggcttttcccgagagaaacgaaacctcttccaaccacgagactgaaaaaaggaaaaaacaatatataaaatgactcacaaatggaattatcaacccattacacccgaacaggcagagacaagccaaaagttggcccaagaattagggattagcccgattcttggcggattattggtgcagcggggaataacgaaggcacaggatgccaagaagtttttccgcccgcagttgcccgacttgcacgacccattcctgatgaaagacatggatgtggccgtggagcgccttaataaggcaatgggaaagaaagagcgtattctgatttatggtgattatgatgtagacggcactaccgcagtggcactggtctacaagtttattcaacagttctattcgaacattgactattacatccccgaccgctacaacgaaggttacggggtatctaccaaaggggtagactatgccgcagaaaccggtgtaggattgattatcgtactggattgcggcatcaaagctgtagaggagataacctatgccaaagaaaaaggcattgactttatcatctgcgaccaccatgtgcccgacgatgtacttccacctgccgccgctatcctgaacgccaagcgtttagataatacgtatccttacgagcacctttccggttgcggcgtaggcttcaaattcatgcaggcatttgccatcagtaatggcatcgagttctatcacctcattccactgctcgacctggttgccgtaagtatcgcttcggacattgttcccatcatgggagaaaaccggatacttgctttccacggattgaaacagttgaacagtaatcccagcgtaggtttgaaagcgattatcgacgtatgcggattgacagaaaaggatattaccgtcagcgacatcgtgttcaagataggcccgcgcatcaatgcctccggacgtattcagaacggaaaagaagccgtcgacctgctgactgagaaggatttctccatagctttggaaaaagccaatcaaatcaatcaatacaacgaaacccggaaagatctcgataagaccatgaccgaggaagccaaccagattgtagctgatctggaaggacttgccgaacgccgttctatcgtgttgtacaacgaagattggcacaaaggtgttatcggtattgttgcctcccgcctgacggaaatttattatcgccccgcagtagtgctgacccgtacggacgatatggcaacaggttccgcccgttccgtatccggctttgacgtgtataaggcgattgaatattgccgtgatctgctggaaaatttcggtggtcatacctatgcagccggtctttcgatgaaagtggagaatgttcccgcctttaccaaacgcttcgaggaattcgtttcacagaacatcctaccggaacagacaagtgcggtcataaatatcgatgcagagatagatttcagggatatttctccgaaattctttaatgacctgaagaaattcaatccttatggtccggataatccgaaaccgatattctgtacgcataatgtctatgattacggtaccagtaaagtagtggggcgtgatcaggagca

SEQ ID NO: 6505 - DNA, 163 bp, Unknown
  gut microbiota DNA sequence
aaactggatgaacagggaattgagacccgtcccttgtggaaacctatgcatttgcagcctgtctatgcaactaatccttgttatgtgaatggtgtttctgaacgtttgtttaatatgggtttatgtattcctgccggtccttgggtgacggatgaagatgtgg

SEQ ID NO: 6506 - DNA, 44728 bp, Unknown
  gut microbiota DNA sequence
actataaattatagaaaaaggttgtgccaacgttttgacacaacctcataacagcggtaatctttttacttctcatagtactgtttcttataagtaattctttattaatatcaaaaatcaatttaatctgtatgtatcatttcaacagcaaagcaaatatattgctcatttcaactatgtatgtatctttgccttagcctcctttctttagtagtttaggaacaggccgtacgtatgagtcagcaaaacgttctctgcccattccttttatttcaaataaattagtataaaccatatttcaccaccgattcatcactattcacatccgtagcaacaattcttccattcaattcatctaccgatataccatacacataatgatccagcacatatttccttataggttcaccggtcagactaaatacatatatgtacctcccaccatccgtcatatcacctttctgcattttccgcgaaatctcttcaaaagtatccccttggaaaacagcataaatagcagtatccgtcacctgtacatcactaaatcccataattccgataggcacaccataaccttctgcaacttggaacttcggttcaccatgcaaaccaacacgaaccacatgggtactatctttcaaattataaatttcaagcacttctcctaattgagtaacagcagccagaatcccattacgagggttataatcaatgaaactgcgccatgcttgtgccaatgccggacgggcatgttttaaagccgcctcattcacagtaggaatagcccccattctatgcaacaacttacccgttcgatccacccaacaaaaacggctttctcctgaataatcaggaataataaaagtggaatcatcatagattacaaaatccaatcctcgaagaatctccttatccaagctcactgtctctttacgaagcagcgagtcattggacaaagacaaaccaaaccgagtcaatatggaactatttgtatccaacgtccacaatgacttcccattccatcggatattttcggcagaaagcatctcttccggtgaatctccacgtttacctaaagaagtaatgtaagaaagatcgggatagtgaaacaaatgaataaaatgatccacaccatgcagatccattattgccacagtgtccccttgtatctttatccggaaaggaaagcggaagacgaccgtatccataggcatagtacatgcaatcagattttctgtttccggaaaatccgtatacagtattcccttgtgcgcaggtacagaagtgcatgcaagaaaggaaaacaggaacaatatgttaataagacacttcaagactgtaaccaattacgacccgtcttactttaccaccgagaggacaatctactgttcctgtacccatgcaacgaagaggaactgtttcctcaatagctgccaatgcttccacatttttcagcatcaaatcatccatttgctgaggggatttaaaacaccacagagaaactgcaacagcaataataagtaaaccgaaaataataactttgctcttcataagaaatcaatgttttagtattagacatcacgatctatgtaaacttatgggcgcaaagttaccggcaaaaaagctctcaatccaaactttctcactgacgaatactgaccaaatctatttttgacaaactacaatgttacatttttctttgcctatgttacattgtgtacagagccatatctactttacaattataactaacacatttacaatagagtaccactacattacactatctttcgcaatttcatccacagcagaactttttaattgatatacgtcattctcatagtcaacaacaagatgcgttattccatctaaggacttgcgtaagcgccgaattactgtataaattctgtcctgtgttccactaccatcgggccataaagcctcatctattttaccggtagaaagccgatatccttctgactctaaaaacaatttcaataaataagccacttgcggtgccaattttttcgtcagtctggcatccttcaataccttttcttctgtatcgaaaaacacaccttcttccaactgataaatatgagattcttcagctttcacagcaataacaggtactattgtttttacagtgataatcttatgctttatgaaccacttctctaatataaacatgattttttctcgcgaaaagaataaaaaagcgaagataatccatggtaagcaaatagcaagatatccccagccactgaacgcttcgtaccagccataagaaataaaacctgtagcttccacctcgcaacgttcacctaaataataagaaagtaaactatctgcagaaagcaatccactaatattttcagaatgagcgactgacgtacgctcctgaaagtcggtaacagaaacacgtgtacgggttttcacaggaatatctgtcgagactaataaactatcccacattttattcaaagtatcagggatcagaggataatcttccaataaaatactaagaatactcctctttaacccttctttcacaagactatgatcaaacttttcttccgatatcatatattctctttctcccagttcatctattatctttattggtcccggtgaaggttcatccaaagagaaagtggagtaccccatagattccctatgaaataccaaaaccgtatcgcgcttctgcaactccaattccagcgcctgcctaaatgtagcagatgcctgttctctccagtatttagctccattttgatataaagcgtatgtaatacctccggaaatcaacagacatacaatagtcccccaaactagcaatttcttatcatgaactttcatgtgctcttgttctttacctttgggatgtaaaaataagaaaatcatatcaaaaaaagtaacaataaagaattattcatcagcagcaagcatgaattaatcatcatacaactactgatatagactatacccgagatgcacttgctccgtaccatctccactcacaggtacctctgaccgaagaaagtacggccttggtacggagcaagtgcattccgggtgtaacggagacaggtcataatacaataaagaagatcaaagagttatctacgcaaattgacgcaaatgaacgcaaaaatcacaggaagcgggttgaagagatttattttccatatatttgcgcagtgacagaaacaagtaattaaaaacacgatatcatgggaatcatcaaccagggcattctcggaggtttctccggtaaagtgggaccgatagtagggttccgctggaaatcaaactactatatacgtgcacgggctgccaaagtcagcaatccgcgtacaccgaagcaacaggaacaacgtggcaaattcgccacggcattcagcttcctgaaagctataaaacctttcatacgtattggttacaaggaatttacacaagataagtccgccttcaacgccgctatgtcctacacattgaaaagagccgtgactggcagtggaaaagaaatcaggattgactttgaccgggcattggtttctatgggaaccctaatgccgatatttgaaggtacagctacgcaaaacggaaataagatgtacttcaactggcaggacaatagcggtatggggaatgcagaagatacagatattgctatgttactggtatacaacaaaaacaaagaaacggccgtttatgatacgaaaactgcactgcgctcttcccaacacgctgaactacaacttccttccgactggcaagacgatgagctaatagcttatctcagtttttgcagtgctgatggaaatactatagccaatagcattcgactgtcggtttctgtaattgacacaccggaaaatgagatagaaatactaacagaaccaattcctaaaaactataaaaatcctacctccatcaagaaaaaagggactcagattcagataaaacaaaattcatcatacgctccccccaaggacattcggacatggaagttcaagccaccacaatggaccgatatttcaccccaggctccgctacccttaattccctgcacacaaagagccaatatcctgtcaacaagaagttaactccttgccgacaaggtattaacttcctgttgatagtttttacagtttacaagacccccgcgtcagtatcgctattctgcatttttttattattactcttgtaatcgcgtccgaagttgatgttccatgacaatgtaacacaaatcatgcgggcaacatcatcgatgtgatactgataactgtatcctgcatatttgttccagtcctcctcattgcgtttgtaatccttctggaaaggattgaacatacgcagtccgacattcaaccgtttccaacgatattgaaggtcaattgcatgtgcctcttcaccggtagccagaacttcgccaaagaaataatcactattatgctggaattcaacagaagctgtgaagtttttatacataaaggtagcagctacatcccaaccgatgctgtgctgtgtatggcgaaaatcaataccgttactccaatatttacgactttcgatgcttccactcagttgcaacacattccaaagcatacctacacgtccatccagaccgacagtccagtcctggaaactggaatgattagcgtaactatggacaaatctatcatcctcacgataaatatgaggcatgatggccttatcacggtagttatactggttgcgcaatccgatatcccatttgcccttactgtaattcaaacggaaagtagaacggtaataagaataaggtttcaggttcgggttaccacgttccgactgcaaagaatcggtcagttgctctacagcacttaactgcgagagcgaaggattcattgtattgacatttccattcagtgagatgctccactgatcgttgaaggcatacgtcaggttcagacgcgggttcaaagaataggtttcataatcttcctgccctatctgctgaaaccatgagcgggtgacacccattccgagacgataacccagtttaccccatttaccattatactgtgcgtaagcataagtatcagcctgtttcatctgcgaactgtattgcagcgtaccattataatcattatccgtatatccctgagtatgacgtacgcctgcactcaattttcctccatctttaaaagctttctcatagataccttcaccgatcaacgaatattttttaccgcgtatccccgaatagtaatctactaccggctctccggacaacaattcggtatagctgctacgattcttggtattaatatatgtacctacgacattgagagccaggaattgcttatgcttcaggtttttctgaaaataaagatctagataaggactgaggttgcggtcatgattccactcttcacgatcggttatggaattgggaaattcttcggtatacagtttgcctttcattcgtaaatcaggatcattatagtgagaaaagcccacggtagcgttcagcacatacttgtcagtctcttgcagattataggttacagcaccccattgttgcaaattcttctttttgtttgcctcagcatactggctgcgatggtactgactaccatcttcaaaagtgaacgtttcattcttatcgaaccatatctcgttgaaatattgcaggcggttaccgtagtaaaagctaatctccgattgcttgaaatttacttttcccgtcaaattatgattgccaaagccactcttcaggctttgcataccattgtaaccgaaagagcctcccacttcataacggcgaacgatgtaatttaccaccgcacctgcatcgccatagcgcagacctggatcttcttgaaactcaacacgtataacctcttcaggcaacagggcagtgacttcttcttttgtagcttttcgtccattgatacagagttgtacactgctaccatcggtcatgcctacactgccatccatactattgacacgaagccggggcaacatcagatggcgcaacatgtccacaccattgtttgatgcactaatttgttttttactgggaaatatcaatttctgatctgcccgactcactctgctggaagcggtaacagttacttcacccaactcttgcgaagcgtctgccaaagttagcgtacctacatcagcagtacgttcaaagccttggagagaaagatacaacgattgataaccaatgctggaaatcgccagccgatagtctccggcaacgattttctgaagtttgaattcacccttttcaccagtagtagttccggttacaaaggcagaatctacggtttgcaacactacgttagcataaggaagcggttgctgcgcttcatccaccagttttccactgatattttgtgccataaggctgatgcatgcagttaagcaaagcattgacaagataatccttttcatttttaatatgtaatatgtagtagtttcatcatgaatcgtttacttaaatcaaataaaaagaggaaactccattgaagtttcctctttttatctcgaaattagagtatagctgattagccattaactcttttttctttaattcttgctttcttaccggtaagagcacgcagatagtacaatttagcgcgacgaaccttacctaccttgttcacttcgatgctgtcgatagccggtgattcgattgggaaaatacgttctacacctacggtaccagacattttgcgtacagtgaaacgctttttgtctccatgaccggaaatcttgataacaacaccacgatacagctgtacacgttctttgttaccttcgatgatacgatatgctactgtaacagtgtcacctgctttgaagctcgggtgttgtttaccggtagcaaatgcttcttctgcaattttaattaaatccattgttattattcttaaattgtttgatcgttacaacgcaacataccaggcttctctcgtaggtcctgacagcgattgcgcgaaagcggtgcaaaggaacgaattattcggcagatacacaaataattcgctcgttttttgcttagcgacgatcacctgaagaacggctggaactaccggaactgctgcttcttgttgaagaagaaccgctgctgcgtgtactgcttccggaagaactccttacattggaagaactgctttccttacgtccggtactcggtgtagtactgctgctacggcgggaagagcttgtattgctcttcgtttcactactgctattggtacgcgtactgccactgttagtacgagagctgccactattacgtgaactactattattggtacgcgagctattattagtgtcagtagcactactcttcgtactactgttggtacgacgtgaactgctgctggtattagtagttgcaccgctgttcgtactttccctgcgggtagtgcttggagtggtagtgcgattgctacttgaactactgcgacgggtagtgtacacatcatctctcgacggcgcacggtcagagccgggacgtacagttacagagccaaaatccgaacggcggtgtgttgtataggattttgtatcacgaattcgatacgaaccattatagtatggatgtttgtagcgtccgcgataatagctcacattattatgatgcgtgcgatagtgccctcctacatacgtacggtagtgatacggacgagggaaatagaaatgattgtggttggtatacgtgatataaacacggaagtaccaacggtttccactggtatagatggggcggtaaaaatactccgcctgcataaagcgggcatactgtcggctactaagcacccagcggagatcgtcattacgtacatccagatagtcataatatcggttaagtgcccactcattaccatatagcacatcgtccattacatagcgtacaccggaaatgaagtcatagttgatttcatatacatcattgtattgttcggtgctcaggttcagctcgtaagccattttatctgtgaggaaacgagtctccttacgtactttgctattactcatagcattcgtgcctgcgctgcaaacagcagtactcaaagtggcaagcaggataaataatattcgtttcatgatagcgttttttacttagtttatgaattgtctattctttgttggaaacaaaaataggggaagattatcccctatccatttgtttctctctattcttatatagggatttccctaatctgtttaggactttggggattttgccaacatgatgccgtcctctttcaaaaggatgagatgtttcttatagaggtcgcctacacctttcttgaaagttttcttgctaacgccaaaagtggcataaatgtcatctgccggacttttatcattcagagatatctgtccgccattatcctttatatattgcaacaaggttttcgagaagtcatccactttttcaaagcccggcttctgaagtatcaagtctatcttaccatcctcacgtacttgcttgatgaaagctttcacctgatcgccggtatgcaagggttggaatatctcgctatcatacaacaagccaccatacttattctcaatgatcgccttgaagcctaaatccgttttttgccagatgaggatattcacctcatctccggcttcataaggcgctgcctctttagaaagatagcggtctactttggctgaagctacgatacggtagctttcatcatccagatgagcatggataacgtatttctttcctacctgcatcttcatcttctgttcacggaaaggcacgaagaggtctttcatcaatccccagttcaagaatgctccatactcatttacccatgctacttccaaacaggcaaattcacctacctgtaccaacggtgtcaatgttgtggctacaaggcgttcctcgttatccagatatataaatacattcaattcgtctcccggctggcaaccttcaggcacataacgcaaaggaagcaggatttctccatcttcaccaccatccagatacataccgaactccacttccttgactacctgcaagatattgaatttacctaattcgatgctcataatttctttcgtttggggcaaagataatgcaaaccgaaggcagtacaaaataagcttgattatttttaatgctaagatgcagcttatcttcgcttttaagcaaagattaagcataaggcataacttttcaatctaagccataacttttttctatgaacaaatctcttggaaaacagttatttttgtatcgggaaactaaagataagaaaaattatattcaccttttaaatacataaaagttatggaatttctaacaaacgaaaaacttacgattgtaggagccgccggaatgattggttctaacatggcacagactgccattatgatgcatttgacacccaatatttgcctgtacgatccgtatggaccgggactggaaggtgtagcagaagagatgcttcactgtggtttcgaaggactgaaccttacgtatacttccgacatcaaagaagcgttgaccggagccaaatacattgtatcttcaggtggtgccgcccgcaaagccggcatgacacgtgaagacctgctgaaaggtaatgctgccattgccgaagagttcggtaaaaatgtaaaagcttactgcccggacgtgaaacatgtagtagttatcttcaatcccgccgacataaccggattgatcactctgttgtattccggtctgaaaccttcacaggtaactactctcgcagctctcgacagtacccgtttgcgtagtgaactcgccaagcatttccacatttctcctgataaggtagaaaattgccgtacgtatggcggtcacggagaacagatggctgtttatgcttcaactgccaaagtagatggtaaacctctgttggaaatcatcggcacacctgcccttactgctgaacaatgggctgaaatccaaagcaaggtaaccaaaggtggcgctaacatcatcaatcttcgcggacgctcttctttccaaagcccggcatacgtttccatagaaatgattgctgccgccatgggtggtaaaccattccgttggcctgcaggtacgtatgtacacagtcatggtttcgaccacatcatgatggcaatggaaactgaaatcaccaaagacggtgtacactacaaagagttgaaaggcactccggaagaggaagccaagctgaaagaaagttatgctcacctctgtaaattgcgtgacgaagtgattggaatgggagtacttccggctattaaggattggaaaagcatcaacccgaacattgactaaattatatataagggaatatccccgagaactcctgtttagactttccctcttgcgctcacacaaaccgggcgcagggggaattttcttttattttttcagaaatcctttggctgtattaaaaaaactatttatctttgcacccgcaaacgaagaaggtgccatagctcagttggtagagcaaaggactgaaaatccttgtgtccccggttcgattcctggtggcaccactcgtaagcaaagtatcggaatgtagcgcagttggtagcgcactacgttcgggacgtaggggtcgggcgttcgagtcgcctcattccgacacaaaaaaggtctgattctcaaaaggagttagaccttttttgttacattctcaatcccccaaacaacattattctaatccgattctattatgcttgacatcatactgatcatattaggaagtctatgcctcatagtaggcttattgggatgtatcctccctataattcccggaccgcccatttcatacgccggtttgttattactccatattacagataaggcgcaattttctacatcgcaattactgatttggttatttctggtagtgatagtgcaagtattggactacttcactcccatgattggaagcaaatacagcggaggaagtaaatggggcagttggggctgcctgataggttcaatcgtcggaatcatctttcttggcccgtggggaattgttatcggtccttttggaggagctttcatcggagaactcttgggagacagaagtgcaagggatgccctaaaatcaggtattggagcactgattggttttctggtagggacagtgtttaaggtagtaatttgtggatacttcgtgtggtgtttcgtaaaggcattgatataatttcaccacagagtgacacagagtcccacagagtttaatttgaaatcagaactctgtgggactctgtgtcactctgtggtgattatactattatcgttgtaatgtaattcccatcaacccaatcaccacatcattagaaagagtttcaagaacgaggtgggaaagtttcttatcaggattcaagggcatttcaagcaatatggcagcaccaccatccaattcacgggaggcacctggaaagcctaattcttctccaaagttattgctgatctcgcctgttttaagacgcaggcgataaagtgccggagcatgtcggttgaaagccagatcatcttcaaagaaaatatgctcaatgggcgcccagttatcgggattacgcaaagccatcttatcgcaagtaccatctttgtaataaacacggatcagcccattgtcaatatggcattgcatgtgattggtgctacctgccatgagtaaataggcacgggatgcctttcctttgagagagaccgtcaaactatccggataattatcccacaaggatgtgaaagctatattttggccctcagcaggagtacggaaaggaactcccagcttagtattcaacactcccttctgaacggaagagcgaagtccggaatcatcaatatccaccgtatgcaaaggatggcaccattcaccgataccttgcttgggtatctgcaaagtggtatatggagaccgaggtgaaagatactcattacggaatatatctgtaacggcagaattgaattgttcatccatcacaaccggttcacacttagaagaattgactttagcgaaggcggagaactgaatagaatcatccttatctgtggacagcggattatctacaggaacccaccatttcatatccccttgttgcatcggaacaaaacatacaggagcttcagctgaaacagcttctatctgagactttgtcggactaccaagcacttccccgccccattcaatgttaatttccactttttcatccgaggaagcagggataacgacggaaagtaccggacggctgatggagttctctaccaatgtccatgttgcaggctttccattgactgtaagcttcgccacttccgagcgctgagccggaaactgaagttccaatgtacgtaccgcaggtaatcggtggataattgcataggatgttgcagtttcattagtatgcttaaagtcaaaatcaatatccggagtatgcagagatgcaaaaggccaggaggagggtaagccgggtttcaccagcaggcgtccgttcatggcatcaggaaggataccatagagtccttgtatcaatacacgggaagctacacctataggatccccgaaatcacggtaacactctccacgagcagcatcataaaaactgatttgcccgaagttaccggggctttcacccagatacataccatcgaggacagaactcttgagcagatgaaaacctgcatccgcacgtcctgcctggaaataagcaagagcagtatgcatcacttcggcaaaagcaacattgttgatactccaggaataaggcaaccagttcgtagtggagatagtagcataaccttcatctttcaaaccatcaccatgaacggggatatgcggtatttcgcgatccacataactggtggcaagataagcttggaaaggatcagcgatgtcactatccaatgcatgataaatagtccatacaccgggactggtatgcagacgtttatgccccatgaaatcctgaaactcagcccaatgtccacgttcgggcatccaaaggcgggcattcagagctttcagtattctgtcagcttcttcacgatagggtgcagggtcttctccaatcttctcggcaatcatagctgcgaggcgattggaacgatagttataggcagaagaatgagtgaccgcaccactattataataaagggcatcacttgcccagatgcaggcataggcatcataaagtccgtcattatcgggatcatagtttcgtttttcccaagcaaggtgacgggtcaggacaggccacatacggcgagcgtattccaaatcaccggtccagttgaaatgccacaagagttcatcaatataacaaagattcatgtcataatgatgcatctgatcgttccgacgggggttacggcagatataaccgttactatattggggtgttccccacttcttttcggaacgtgccaaagcaagagttgaatcctgtgcagggtgtggaatcgtgttcggcacttctgtcacctgactggcggcataagcattgaagtgcgtacgggcacggtcgtgccaacctaaggcatcaccggtataagcagcacgccagccactgagaggcatgcgccagccaatagcaccatgcaaccagacttcaccatcccagatgccatcagcagctacggcaagggcaccacccagagtattaaagtatggatcgggggttgtgatcctaatacgtgaggtaagatcggcacgggcttgttcagacttattataaagggcaatgccttcttcctgtaaaggtactaccaaggaatagtcacgtacaagtacataaacatcctgccggtcgaaaagggagatacccaatgattgtaattgttgaggttgctcgggtgcatcaaaacaaccgggaggatcggcccccatatcaccgttacgactcaatctgttcaggcgaatttcactcaacatagggcgcaaaaccgcacctacaggcatatttacgggggtaatcttccaaatggcagcatcctcatccggcaaagcaagagcagagatttgcagttcagcatctgttccccaggaggggtgcttcagacgataggaacgccgtccgggagtgtaacgagactcacaccaatcggtttcttccaatggagtcactgaactatcagccagtacgagatggaaatgtatattcttactgttgcgcttttcgtagacagcaaaaataggacggtcactcgtttccaggcggaaagcggtatggctgccataaagggcacgagtatagcggttctttccattgacacttacaaaatcttcaccgtccgggtgatattgcagggtacgggcagcaccccgcttatgatcattgtaagaggtggattcgatgcggtcgccggcactttgcagtttattaccggtggtatattgcgcataggcgaaagcaggcaacaaagagatgaggatataaaaaaatagttgtttcattacttttcggttatgaatataattttaggcgcggattacgcggattacacggattaatggctgcgctatcgcactatattacaggaaaagaatccgtgtaatccgcgtaatccgcgcctaaatcattatcagcatttagttcattactgtaccgttacggcatcggtttcaaaccttcccaacggacatcccatgttccgtcctgtgggaagcccgggttcttcacctggcagccatcccaaccggcacacattaatgctacggcagtcagcaagcctccattaccgggcaggtaacagcgcagacgaccatcctggtagttatgtccattctgcaaatacgtattcgtgcgcttatccatcagcaaggcaccgacagctttttccggctcgcccagacgagtggcattcatggcagtcatcggataatcccatccccaggtcttaccccagttccagttgtcccacacccagtgcagggtattcttcatgtagtcgtcacgaatgagtttattcatcggaagaatacctacagaccccaatacagccatgtgatcgctggtaaaacgaatatctttgtatgtatcaacagcatcttcagaagcaaggtaaagatgatcctcattataggcaagcggagaaagtttatcaatcatctcatcccactccagattacgcttctctccggcacgctcgcgccacttctgcgcagtctgcatggcaaagtgccagtaagacaattcgaaaggcgggttgatggtagtagctgcacgcaacgtctcttgtgcagggatagctcccttcagaatgaaacgtccgtgaaactcatcataagttgcaaaagcatacatgaactcggcagtttcctgcaccagacgattgtatttcttaatcacttcatccgaaggattggcacggtagacaagttctgccagatagataaagtgcggttgttgccagatcaggaaagaacctacattcgagggagcttccgtaccactgggatcggtcattttcatccagcgtacgccggggaacccttgacgacgtgctatttcacgagcaacaggctctacagtttcgtaccagcccagtgtacggtccagcagattggcatgtccccaaagaggttgccatgcctgatgccaccaaatcatttcgagatggaatttaccaaaccaggagttataagtcaaacctgtttcctgcggaggtacacttccagccgactggatagcaagcagatattgactcaacaacacgcgacgttccaattctttggcacgcggatccgtgcaatgagagaagtcaacggcagcaccattcttccagaaatccgtccagtatgtagcactggcggcagcagtttcggtgaaagcgggcaatgctttgtcatcggcatagacagcaggttcactttcgaatacggttccctgaaaattcggtgtaaacaggcaggaaaaggccaacatatcttcttcaggagtcagtacgaaatagttctttgacttctcagccagattcgccttgccttcccaacggagggttacgtaataagttgtttcgtcaagtacacgcttcaacaaagcactttgagcatcctggcgaacgatagttgtggaatgtttgtcgttcgcattccaattgcaggcatcatcggcatgtccgcctgtaggataaggaaaacgcagattaacccccgcatgcgcacgactggtaacacaagcagaaatcatatcctggttaggatggcagactgtctgcacatcgaaagcattgccattcaacatgaagtggctggtgatttcacctttccacatattcagtgtctgctgaatctcagtaatatcagaagctttcactccctcgcccagttcgaggcctataatgcccagatgcaggcgatgcggattcacacgaaaccaatcggaagattctttctgacggcccggttccttgaactggcaggcatagagttcttcgtgaccacgaccgaagtcaaatgatttcagtgtttcctcatgcttatatcctttaggattggcaaatgaatgccagccccactggctctgtgtgcccaagggtacacctttactatacatggccggaaatgtctgcaaaccggtagcatctaccgtgaacgcaaattcaccgttgccgacactaagcgaagccaacgaatcgaatgaggatacttggggattgttacgggccaccaatgcttcacggtctatcggagcttgtttctccgaaccacaagccgtcagcacgaaagcggcgagaagggaatgaaatacttttttcatggtattctttataacagatagttagattaatagctgggacaaaaatagcagttcccggtaaagcaggcggtgcagggtttgacggaaatgataaggaaaatgataatttagcggcgatagaatttaagatacttccgcgtaacaattctatcaccgctaaattatcatttatctgaaatcaaacatcaaattcaatctcaatccctcatcccccttcttgatacggattattcccggttggctctgtggtccgtgctgactaataggtttgaagcaacggatagcaggaatatcgagcaggaaggaaacatctccggcagggaagtcgggcatggtgttcaggccatcctgacgtccgcgaggttcttcgggggtaaatactcgcaggaatatcccgtcactcgccgcataaaccgtaaatggagcggtagaactttgcaaagttgcccagtaaagattagcatgatagcccttgaactccggataaaccagacgttcggtactttcaccggtgattgtattattataatctttctgccaaacaccataatttgcccccggaatacgattcttccatacacgatatggaccgcgtcccatccaacgcataccggaacactcggactcaggataagagaaagtaaggccaagattcagcacttccgtgtccgtgaaagcatcgtcgaagccaccaccaccggaagctcggttcagcaacacagcatccatcgaaagcaatccgtccggcgtcagacgccaaacaatagagtccgccgcaccacgataacgggcacaaagaaccgcatctccattttccgtacgagcagacagatcagccaacaccatcttcatcccaacagcaacagggccatctttcagcgggatgattcgtccgtcagcattcctcgtcacagaagtgatagtggcatcactctttcggaaagagacagtgacggcagaagaacgcaacgtaatcagagtatctgtttcctcaacatggcaattacttgcagccgcactttgcgaaccggacggatgagcatctgccctcttcggctgtaactcacctttcagatagtctttcgcgtaatgtatcgggaatgtacgtgtacagacactctcgccatctgctccataagcttcaagttccagaatatctccgttgaagaaattatccggcagattcatgcgtgcaaaccccgtttctccgggaaccaatgacggcaactgcaccattccactgtccagcacctgacgccatgcccgtgcacctccgtcagctactgtcacaacttccccttctccatcaccattcagtggtgacgtgcaatgaagcacgcgccagcgcatggagcatgcacccaggtttgtaaacagatatctgttcgatacccggaaatccccacggaacgaaggagtaatcatcaacggttctatatgtattggcgaccagacttcacgaactgaataataactgccctctttttcccggaaaggccccagaataccatccggtgcattataatcttcactgtccagtgccccgccgcgatccgaacgacgcactgcctcatcactatatgcccacatgaaacctccggcaaagagcggatgagcggtgtagcgtgcccagaaatcttccagtccggcaccatgtccctggtcgtactggccgtgcatgaactcggcaggcataaagactttatagccattggtgaaacgggccactcctgtgagataagcgggatagtgatgggtatccagttcgtcaaagtccgcccagggatggatgacatgacgtttctggggatcgtatgtacggaacaggctgtcgacggcagtattccatccgccttcgttgccattgctccacaacacgatacacggatgattcacatcgcgcgtcagcatttcgcggacaagccgggtacccgtcggggtatcgtaagcattctgccagcctgccagttcatcaatataaagcaagcccaacgagtcgcaggcatccaggaaatgttcatcaggcggataatgggaacggacagcgttcatattcatttctttgatgagcttcacgtcctgtatgctaagttctttattcgtggttcgtccaccatcgggatggaaagagtggcggttgattcccttcataaccagcttcgtaccgttcaggtagagcccgtcgcggggacggaaatcaatggtgcgaaaaccgatgcgggtatccacaaagtgacgtggattcgtattcttatcacacaaatacactctaagttgataaaggttgggagattccggagtccacgggcaaatatcttcccaacggcttgtggagtgcaacgtagatgcgccttccttaaattgaacaaatacgactgtcgtttcttcgaacaatgtatcctttttctgcaaaggttctacctctattcccaggtacccttcctcagtaacccctttcaaatacacatccagtttcagtgtgccatccgcctgcgcgtccacagccagacgttctatatgcgttgccggttttgcttccagccataccgggcggtatattccaccgaacagccaccagtccgctttacgttcggcggcatttactgtacggttgtcggaatgtttcttcacccgtacttctatttggttggaatttccgtatttcagcaattccgttacgtcataagagaagcgatagaaaccgccctgatgcaccggtcccgccgattgcccgttgactaaaacctcggtatcggtcattacaccgtcaaaccagagacgtatgttctgtccctgccagttgcggggtacgcggaaagaacgtttgtatgtaccttcttccatcgaagggttcttcacgcccggctttttataccaacggccgtaggtgtattcgccgaagccttgcaattcccattgcgaagggacttctattttactccagcgtccgctgttccggccttcggagacgcggaattgccaggtcaccgtgttgcccagcccggtgccggaaagatattggcgttctgtttcctgggcttgtacaacccaagtggtcaataagaaaaggaggattccgagaaagtgctttctgctcatagtatttggctttattattcgattttacaaagaaagacattctcaggcaaacaggaaataaacagaatgattttctagctgtacaaaatgacaggaagagaacgactaaccatttagactcttgtgcccaccaataaaagatataacttagttttttccctgtgtccttacttcatccactttagcagtacttgaattactcttattgtaaagtataaccaagttatatgagggtatgtcacactgataagtataaccactctcgttgaatgttttagtagtggtataatagttcgtctgtgcatgcaaatatgacacatagaataagatacaaatagaaacaattaaagttcttattagcaaattcatacgcacagacgattattacttaaatgacttactatttaggttcttgcgcccaccaataaaagatataattcaatttctttcccacggtagtcggagcataccagatattttcctttatttcggtttcaatcctacgataaacagaaacgggaatagtggcgtaaggtctaaaatttggaaactcaaagcttacttcatcaactttaccagtacctgaatttatatacattattatagtaaagtcatgcccctttattctctgtttctcactagcagagaatgcggaattgacaatagaaaaacgtttagaacgtgtccaagtgtcactttcaagcagcttaatgccatcaccggcttcatcttgtacaaaacttttgcctgtatctttatagaccggataaatatttatccatttattgttcttattataaagtgaaacaaatctagaagcagctacatcgcactgataagtgtaaccgttctcattaaatgtcttggtagtggtataatagttcgtctgtgcatgcaaatatgccacatagaataagatacagatagaaacaattaaagttcttattagcaaattcatacgcacagacgattattaattaaatgacttactatttaggttcttgtgcccaccaatagtaaatgtagcttaactcttttccttcagcagtaggagtgtaccagatatttttctttatttcagtttcaatcttacgaaaagttgagatgggaatggtggtataaggagtagatttatagaattcaaaattcacctcatcaactgtccctgttgtcgaatttatatacattataatatcaaaatcatgcccttttactctttgcttttcacttgtcgaaaatgcttcatttacaatggaaaaacgtttagagcgcgtccaagtatcgttttcaagcaattcaacgccttcatcagtctgtgcgaaagtttcgcctgtattcttgtaaaccggataaatattattccatgtgttacttttattataaagagcaataaagccagaaactcgcacatcacactgataagtgtaaccactttcgtaaaatgtcttggtagtggtataataattcgtctgtgcatgcaaatatgttacacaaaacagcatgctaataataatagttttcacctaattatcgtatatttacaagcgtttcaaagcacttaatttttcctaccactgaagcatctccctctttaattatcctaatagataatttagttgttacaactatactttttgcattcaaccacttttctttattctttagagtaatgccaaaacatttttcttcatttggattcatccaactcatagaacgatatttctttaaagtatctgctttttcatcatattcccacatcaaaaacatcgcgtcatcagaaaaaggactttgcgggctttccctaatgtaaataatactaccatcaaactcattcgtgccaatacgaccattaaatagtccaaatgatttgctgctactttcgttttttacttttataagtaaaaactgtttctcttttaaataagacacatccacctttaattcattttgagataaacacaaagtagaaaatgtgaacgaaattaatatgcaaataatatatttcataatctataatttatttatattcttctattgctattttatatttttgttgatgtaaccacaacccatactctctttcaatgctatatgaatccgtaacatttttaactgtttcaatttcatttgtataggcattaatatcatttaaataatactccggaggcaaagtagtagcaaccataagttctgtatatttaatatattcatccaaactcgttccactagagtgtgaggagttgtattcttctatatgtaatgctcttaaataattcatcaaattatcaggaggagtatcaaaatatcttatactatttaaattttgcaacttagaatcccaatctgtttcactatttacatcgttgcgtatatgatagatttcatgatagatgttagagcaaatactattatcatcccaaaacatgtgtttttcatattctgatttcatttattttgtcggaacaaaggtagaacattatttacagacaaatatgcccttacaaaattgagacgcaagcatcaaattcgcaactaactatatagcaaccaattagtattttatagacaggaataaatactctttttataataattattactctaaattctatagttcagcatcacttttgtaaaaccataagaaaacacaactctcattagcatacagctattcggttgttttttcacttgcaagctacactaaatgcagatactttgcattacggaaaagtaatgaatttgctcaccacagattaacacagattctcacagagtttaattaattaaaaatcagagaaataaaattctgtgagaatctgtgttaatctgtggtgaattgattcataacccgtacaaaaatgcacaaaacataaccaatagaaatttaactcatattctggatattagctatatacatcggacgcacagcatctatatatcgaacatgtcgcatctatatatcggacatgcagtatctatatatccaataccaccgatatatagatgctaaaagagcgggatgaaagaaaagtgttcagcctttctaatacagatgttcctatatcctcgaaaaacagttctccaaatgccacacttaaacgtatgaaatgccacatctgagtgccttaaataccacacttgaagaagtgcgaagtatggcattccggacgtttaagtgtggcattctggttactgagatgtggcattccggttacttatatatcaaagcccccttaaataaaagttgatgtgatttactctcactactctcacttttgaaataagcagttgataaacaaaatattaagtgtgagtgagagtaaattttgagcgtgggggtaagttccctaccctcacgctcaaaattttattcctacagattaacttgctataacacaataagatattccgcatttggcgtagatgccgtataggcccgtaatccggtatttttagctttttcccccgcataaacggcggtatgtagccctttccaaggattattctcctaataaatgtatcgtttctgtagagttcatgggggagggaggctatccgcgtaatccctattcatcctgtcaaccacgaggttcatgcagtgtaagaaaaccgaaaaatctgcagtttctccttttacaggaagttaggagtttgctgacaagaagttaacttcctgtcgacaaactcccaacttcttgtcgacaagaaattgggagtttgtaacatattgataatcagcaatgaatttccttgtgtaaaaagagtattcgtgtgcatatattactcacttttacatgaatcggacttgcctgaaattacattgcttgttgtagataagaacaagcaatgtaatcattcattgcattgcttattctggatcataacaccgcttgttttcagatgttattcaataagtattttttcttcctgcagtctttcagttttttccaaacgccctgttcatcggcatttcagctgaaagatacctgaaactactataaggcgggaagtttcagccgtaacgtcgatgaacaggggattccgtgaggcctgaaagaacggaaagagctttttacggaaaaatagtggatgcagagtgatagttcataacaggtacagaaatgagtcaaatggtcaagtaatgctatcttaattctcctccagttggaggaggggaattgagatactctatttacttaatattggaattatcatttagctcataaccgaaaagaaataccaaaaactatccgatatatatcgctggaaaaacaactatacttcgctaaaaagagaggatacacgggagttaagctgccgaaccggcacttttatctctttcctttacgactgttagggaaaaatgtagtatctatttattctttccaccgtggtggaaagaataaacctttgcagaaaaatacgctaatcttccgcagaaaggaacttaggagatgccggtctccgttttatcttcttacgtatccacaggtaatatccggtcagcggaagacttgcgcctatcaatgctgcaacgaaagtcagtatccgcgtcagcataccgccccaactgcccacatgcacagagtaaatccagccacggattttaccggagttatccaggtccttatagagagtagtttcagtaatctcgccattacggggattgaacttataacggtctgttccccgttggttaccgaaacgggggacagcaacactggcagaaccgtcggaaacactaatctgcttgtagtctggatttgcctcggccaactgttcatatacctgttgccaattagtataaggagaatacctgtgtgcgccacggccttccctaccctccggtttaccgtcccgcttaccgcctttggcggtcgcattggccgccgcgttgccgtgccccatactgggctgcacttccacgccaaaggttttataaaatcctgtcctgtaccactggaaagaccacgtcaatcctgtaagagccatagctagcaagaatacaagtgcatacattccgcccgccacatgcaagtcgtaccaaaagcgacgccaacctttattcgctacaatcttcagactgttcttcaatgccttgcgcgtacgcggccaccagacgactacgcctgatatcagtacaaacacgaacatcagcgtactggtgccgacaatcatcttcccccagaagatgccgccatcctgcttcatgctgtccagcaaccaacggtgcatccggaacataaagttgaaaaagggcgcccgttcatacttccccgtaatctcacccgtatactgatccacatacatagatgcacgacgaggtttggaaagcgtgacttggtaagcccgttcaggatcagacgaaatattaacgccggtcactgacacgctatcgggcaaggttgccgccactttagtcatcaattgctccatgggtagcggagcagcctcaacctttttcacaaagtagagctcacgatggcaaagttccatcacctctttctcgaataccagtgctgcacccgaaaagcagatcaacgtaatcagtatcccgaaaggaacggaaagccacaagtgtatattacggaatatctttctcattatgtcaatttatgaagttcgtaaaaaagagcctggccggcacataccagcaggctctttatccctaattataatcaatgaatgtttttgcgcttatttagtaggtgtcaaccggcccacaccgctgatctgagtagcttcaatggtaactcccttcgttgcagtggcgctcgacggattgatcttgtagatggcaggataaccctcggttgtcgttacagtcagataaacattgccattttcggtataaggcgcgttgccgaaaccggaaatcaaattagtctcaggcaagccggttacataagtcagcttcttgtcgcctgccttgaagatggccagttgattcgcagtaaaatcttcttcagtcaaaggacggtcatacatcaacatcaggaagtagtcacccgtaatgtgccagcaacggaggaaagattttccgccactttgagcttccagatcacaatagtaatcatcaaagtcttccgtaccgttaggaatacgtactacaccggcaggcaaagtggtctgttggcgcacatcatccatcgtctttgcaaaactgggagagaaaacgtagatatcaccgttgtctgcttcccagattgtctggtaatactgagatttattgcgtccgcaagcatagctgattttatctgtactgatcagtttcttgctggtaagagtctcatcatcgaagatagctacccaacattcattcggatattgcgtccattgcaactctccttttttatagctgctgctgtttgagccaccgtcttccttttttatcaggtcttgattacccggtaacacccattcgccattattatacgctgcgccatactggctcagccccatcggaacagctgcgctataaatcttgttgccgtgttgcaaaataccagccagcgtcacaaactcaccatttcccaggaaattctctgagagataggccttattttgagtatcattggtcttataagtttcggcctctacatccagataagaaagcaggaatgttttaggtaagtaaccgttatcatcggcataccccgtatatccgtcacctgtagaagaagtgatgatatatcccccgtaaataccatagctggtgaaccgcttcactgcatactcgcccgaccgtgccaccatttcataatttgaattcatgacgaatgaacgggtagtaccggcattaccttgattgtaggtcaaaccatacagatattgatctttataaaatatccactgtgacgcaccgtcattcacaaggccattgtttatggcggaaaccgttcctttatccaatgtttcggaagtcagcagaacgttcgtagtatttcccgaagctgtcactgaggatgctatcacatactcacctctaccttcggtgccaccaccaaggctcggctcattgtcagtacatgctgtcagcgccagtccggttattgctgttgcaaaaaatccagtcaaaaagttattcttcttcatcttacttttacctttaattttaatctaaactatataatctatgaatctttaattaccaaaatacacacgcactttcccgtagaatgcccgcccgggcttctgaagactgaaattgtcatacagtttctcgttcgtaaaattgcggcactcaaacgacaaattataccgtccgttgcgcagactataagaaagcgccagattgtgcgagaactgattaggcaccacataatcgttcttattcgatccgatattagatgaataataagtaaaactatgcagatactggttgtcataggaaaccgtcagcgtattacctttcttccaaaggttgcgccaatagaacgtcacatccgaatcggcaaacatatacggcagattgggcatacgctctttataggcaagattggccgcactgctggagatcgaggtcttcatgttgtcacgcacgttcatctgcgtaaagtttcctccaacactcagccatcttccgaaaccatatcgggcggaaacattaaagcctttcgtcaacaccttaccataatttatataggtagcagctgatttacctccactcaggtcggcaatgttacgctgaatatagtcttttgtattacggtatatcaagcctccttccacatatacggagtgtttcccgaatgtccgggtatagctgaggttaaggttcaagttgtcgctattctcaggcttgatgccgatatctcccatttccaggtcttcatcaccgaacatttcttcaatagtaggcagtcgataggctttctcataggacaatttggcctgaagaccgggcaatatgaaataggttccggctgcaccataacccatggagctcacatcgcgagtagtgcgcacatactcactctgattactggatgtagccatcggccctcctacaaactggtggtaatatttgccgaatacggagaagttccagttttcagacggcatcaggcgataggacaggccggaaatattcttgcgtgtttccttggcgatagcctctttttgctcttccttggcaagcagcgaggtgttagaacggtggaaagcattcaatacatgattgaaagtcagcatctgtaccctattgatgcggtagttcacagtcagcgtaccattccaattgttattgtccgcccgtgaatattgataagactgttcaccgggagagttcatcagcgccttctgcccataccaattgtacttgtatgaggcagtatccacattagtggtttcattcttattgtaattgacggtcagtgccacatccagacctttggtgagcaggtcacgcttgctatattccaatgaaggcatcagtgaatgacctttacgatgcttctgaccgtatacgatttcctgacggacaccggtctgtatatccttatacatgtgcgaataggtgaaacccagcaacagacgatccgcccattccttatctacaaaaccaatctttccgataatggcttcgttatggtacgtatcgttgaagcgctttacacgtaccttcttatccctgtcaattctgccggtttcgaaatcttctaccggtgcctctacatgatagtcgttatccgaataattctggaaagcattgatttcataagtaaaaccattcttgaaggtttgtccgaagttgacgtatgatttatgtgtattaaatgagccataagaataggaggcatccagaaaccagcggcgacgtttcttgttagttacaatattgatgaccccaccgatagcatcggtaccgaatcccacaggtaccactcctttatagacctcaatccgatcggcaaagttcacaggaatattgttcagtccgaaagaatttcctacgccttcctgcggtacaccgtcaatgaatactttgacgtgctttccactgaatccatccagcatgagttgcatatccgaacccacaccacccgattcacgaagtttcatacccggtgccttggttaaggcgtcactcagattcttagtagtgttctgtaactctttcgtatcgacagccactgcattaaaggctgatctcttcaaacgggtcacccctgtagaaacaatggtcacttcatccaactgctgtgtctcgggagtaatcgtgaggttctgtttcacacgctcccctgcaatcagcttcacttgtttctccactgttttatagccgatggcagacacgatcaatgtatagttaccggcgggtgcttttatatggtaaataccttcctgattggtagttccaccataactggtacccttcaggtagacagtcgcaaaatcaacgatttccttctcagtagacagtatcttaccggagatcatcgctttgtcttgtgaaaagacagataatgaggaaattaacaagacaacgagaacggagagttttattatatttgctttcaatttacaaagagttttatacgattaataaatcgctgcaaaggtctttataaaagggaggcaaaacaatcgctatatgcaggtaaatatcttacaggaatattcgataggagtatacgccgcaatcgctattaataggtatattgcattaacacaaaaggatttcagcatagttctttacaaaaaaagaggcggcatactcataatgagcatccacctcttcatccactaactaaccttattacccctatttatttttctttccaaatcttattccaactattctcccatgttccccggtctttcttatctacaaaaggttgttctttcgccggataaaccaaaccatcagaagtaaagtcagcacggataaatccgattttctcccggaaatgagattggctgtcattgccgaaatagctgcaccaccaattaccttctttatctttaaagaatccggtgccaccaccgcaaggtatcgattcatggcgtttttgatagggtccgtaaacattatcagaaattgccaaacaagtagaatatcttccttcataattgtcagccgctcccagatagtattttccattccgcttgaacaataccgcgccctcatgtcccagatcattcataccacgacctacacacttcttagcatgatggtccggattatgatccggttcagtcaggacaaccttacgaaagggttcagccaggccactcatatcatctttcaacagagcaatctcagttgccttcccgtatgtgaaatagactttaccatcctcatcctcgaataaagtggcgtcaattccctcaacaatgggacgatcaatagtaaaagcgtttacgtaaggcccttccggcttgcctgtactacttttcaatattccaatcccatccgggcacatgctgaaacagatgaaataattgcctttgatgtaatgaatttcaggtgcccaaacagcacgaactgcacgtttcgggtgcttacgccatgctttcacccaatcgtccgcttccttatcaatatcccaaaccagacctaaatactcccaattatgcaaatccgcagatttccacagttctataccctcagcccaagcccaaatattatcaccggaggaacctgtaagatagtaatttccatcgccacccaaagttacaactccatcacgcaaatgtagttcccacgcaggcttaatgggaggtaccaatcctttttccacagctgaacccgtacacatccggagatttccttcctgatattccggacggggatgattgccatagtatacaactccttcagtaccacttctccagcctccacgaccatctccctctacaggcattcccggtccgctaacgccagagaactgtttagcccactctatttgttcttgcggtgcaatatatatatcttcctgagcaaatgcccaacaggaaaacaaacaatttaccacaagaaggagactccttccaaagcttgaattaaaagaaaacattctctgattcactctcatgtttttctatatataaaattaatctacttttacacaacgcacggagaaggcattggcacggctattcttccctgccgtatctaccttatccttgcccacgttcatgtaacttgcatctgccccattggatgcgaaggctgtactttgccaatagtaaccggatttctccgcatcctgaagtttccctgttttacgattacgtaagccaccaagcggataccacaactcctgtccattataatttaaagagtaacctaaattctccgcatcccaattagaggtagagagaaaaacactcgcctcaatgccggatgtagaagaagatgaattcaaccatgtatcacgtggtgcaaccatataaccttcaggacaaggatcgtatacagatttctgaatagaagcaactgacggataatcatatccttcgggatttccccagagagcattatcaccccaatagagccagtcatatgaataatagtaaggtggggcggaaacattgctcttggaacgtgaatacttaatatacgtagccggattccggacagaataggccaccgtacctctttcttcactaccactttctattttcaggctaactaccccactctggtcatacatctcagcttcagtattctttcctatttcactggttgttacaaacgggtccttacgcccccattgataaagtaaccctatggctcccgcatcacccggagtagcagaaacagcacccagattacgatccataactgtataactattgcctttgctatttactccgaaaggctgatctgcaacatcagtaacccaaatatgataagaccagagaatagtagcatcttctgcatcagcatcttccatgtcataaatagcgacaaccgcattacccggttgcccattcaaagtagctgtaaaagatttacggtcggaagataatgatacattgcttataaaatcggtagaaacatcattccaaagtaatttggcagaacgagctaatcggctatcgtccgaagcatgattctcgtaagtgtacttcagactggtagtatagtaaggagtacaatcaacagttactgaagttgtaccgggagccactatgattgaattggccttaccataataattggtcaccgatacccattcaatgctctctaaagcaacagaaagtactttaccgcgttcaatgctctttccgttcaagtctacagagcaagtccccattcctttaggagaaacaagtgttatatccaacgtactgctcaatgccatcggcggaagagcaagatacagttcctgaccttcggatatgtttatatcacctttcaacataagtgttttagatgtattctccaggaaagtaacctgtcccgtcgttgcatctacacatacatctcccgcaagcatatcgttcttggactcaaaagtaacggaggtaagagaagcaaaatcttcattagccggaactatcagtttcaatcctccacaggctgcattcattttcatattattcaaaccgtcattatccgtcaggcaataaagcggacaagcggactggtctatcgcaccttgtgtataagtctgaaccgtcggtaaagaataatccagattattacccgaaagttgggcattagcaggataataaatcagatattgattggcaacaggaacatcgtacatactaacgcatgcattcgacaatacagagtattccgttccattgatgcctattttttctccggtctggatttctaccttcaattcatcttcctgattaagggttaaagtaaacgaattgggctgttcataaattaattgttcggtatcgtcacaactaaccataattaccactaatgcagcaacgagatattttatcagtgttttcatactgtttcttctccttatgtttaagagttaattattaagtttagcatcaagtgtaaagatatagttttcgatattcgtataaccgttgtttgctatctttgcagcatcagaggggtcattcttatccaagccatatttgtcttcaaattcatcaggcataccgtcattgtcgctatccaaaggtttctccccgttttgaatagtacctacacctcccaatgaaaactgctgtacatcttgttcattctgaataatcgttccctttttacccagtgaagtcagctcatcaatcagatattggtccacttcgtcacgaaccggaagactggcacctacattctttacaatccagttataggcttctgttgcagatgtttgctggctaatagcaggatgtttatccgaaggcgcactcaggaaagtaggttcccctttgcaatattcggcccagttggcttgcgtcagttcaaaaccattgagcgaaccatccttatcattatcataataatttcctttataataagctctaaagtcggcattacctcccagaaacggcggagtaggactcatcggaactttttccaccttaatagagttatcttcttgtcttacattctgccagttgtccacaggccctacaatgaagtagttatcctcaatagttgtttccgactgaccggacgaatcaccgcccatattataagcggcaccacttccccagttataaaccacattgtttacaaactgattcagacctttcactttcggattacgtgttttattatcagtataaagattacggaaaagggtaatgcctgattctgtatctgtttgaatcaaaccaccgcaagaatgattttgtaatccctgaccaagaattgaattctgaatggtaatattgcgtggaagtgttcctttactatcccagttgatggagaagttttcatcacgtccccaagtaacagataaatgatcgaaaatcatattttcaccatttgctattccggcagcgtcttttccatcaggcccattcgttcccatacggatacgcaagtaacgacaaatcagattactggctccagtaaacgaaacgcggttaccataaaggactacaccatctccaggagctgtttgagctgcaatagtcagattcttggaaaatacaagtgcctctttcaggttgataatacctgcaacatcgaatacaattatccggtcgggtttacttactgcagcacgcaatgagccttcttctccgttgtcttccaaagtagtaacatggtaaacgtcaccaccacgacctcctgttgccccggctccataaccttcagcaccgggaaaggccaaaactttaccataatcagggaaaggaccgtcgctgcctttctttataataacttcaatatcattatcactgcaactcattcctaatgttgcaataaggagtaaaaccccggcattcttaaagaaattaaatagagtagttttcatttttaggttgatttatacaggtaaacattttgttgttcgttaaaagcaataaagattgctgcctctgtccggaaggacaaaagccaatcttttaatagttgaaataaattacgagaaagattgaaaagatatagccttaaattcgtaaagtcgattacctattgcaggataaacacctctgcgaatttaaggctatagacattaaaagtatgtcaaagagtggttattcaccgctttgtaagtagcctggatgttgtgtcaggttaggattgtcaatcatcggatgtccggaagacttagcagcaaaaggtaataattcacatttgtttttctcaaaaccataatacaagccgtcactaccgtctgcagcctcaatccagttcggataagtaccaccattttccgcagaaccggtcggtttcgtatagataatattacctatctgcaaagcattataaccattggtaaatcctactgccttacgtgcgttaccattataagtacttgtataggcttcgaacatattgacgggataccatttatctccatcggccatagttataccgtgtgctttcacaatgtctgccaatgtttcctggaaagcatcatactcagcagaattagtaggcacagctttaaccaaagctatttcattagcatctgtcagatcaatataatctaaggccaggaatttatcaccataagcctgagcatctacctggaacttatacaaacgatataccggcacatccgcatactcatttctgcgatcagaaagatctttcatcgcctgtttacaagtagccaactcatcagccagcctgttcatacgagttaaatcgctacgtaatgtaaactcaccagcaaattcccacttacgttcctgaacaatagcgtcctcaaattcctgttgtccagtaggtatttccatagagccaataccggcacgttcgcgaacttctttcaaagcatctttagcggcttgagtcggtccattattcaaatagttctgagtttcagcatacataagcaatacatctgcatagcgcataacaggaatattcaagttacgttgtgatgctcctgccggttctacacaccatgaaatacggaacttacccggcatgatacaagagtaagtagtaccgacatctacccatgtgtcgccagcggcacctttattcagaaaataaacactataagatgtacaagaaacatcacggcgggtatcgttctcatcaaatgacaaatagtaggtaggcaacatgaactgcatggccttacgcgaaccatacgtaccacctcttgaacccggatgtgcatatacaccaaaattagagttagtggtagtaccatattgggcaagttcccaaatcatttcaccactggttgcggagaaattacgttgacaataattataccataggtactgaaaaccagtcatattattttgtgctttaaccagagagtgttcgctacgattgataattgccttacatgcatcatcagcaatctgataaaactcctttaccttagcatcatcactacgccgagccatctggagagtactcggatcattggtttcgaaattccaacgcaatgaatatcctcctgcataaagagctacgcgagccagcaatgcataagcaccttgtttggataaacgttcaggagtaccataaccactttcactgtaccaaggcaagtattctactgcctgctgaaggtcagctacaattttatcgtagattccatcccgaggtgaacgtttaggataaaaggtgttttcatccgacggatccatctcttccaagggttgaaatatggaaggtacatcaccatatatacggataagattatgataacaaaacgcacgaatagcaagcaattcacccattaaagcattgcgtttgctcgtttccggcatattactcagttgactgataccgatatttgtagattcgatgatacgatattgttccttaaaaatagtagtgaccgtagccggcatggtcggatcatacttatagttacaaatcatatatttcgagttatttgtagtaccatcttcactggcatgcatcactgtttctcccatgcccaattggtaaaacatttctgagtgaatcaagccacgatagcaaccttgtacaaacatgtcagctttatactcgttttcaaaaacgaagtctgaatcttctgccgttaaatctggcatttcaagccagtcctggcaagaagatattccgaaagagaaagatactatggccaaagcaataaatgtcttttgtatgccagccaatatgattgatatttttttcatgataaatctttatttagaatgttaagttaagaccaacaacataacttcttgaacgaggataagtagaactatcatagcccggtgtacaaaccacgttatcattagctgacgatacttcagggtcataacccgaataaccggtaatagtagccagattgttagcggtaaaatagacgcgtgcattagatatcattatcttttgcaaccacttcttagggaatgtatagcccaatgtcagctgtgcaatacgcaaataagaaccatcctctacataataagaagaaggataagtaatataacttgagttggttgtattcaaactccatttacgcagtgattcattaggattcaactctttaagacgtgccagtgtagtggctttctttcctgttgcaggatcaaccaaacgataataattattgccaaattcagccggaacattctgatagagagcataaggactcatactgtgctttgttgcattatacacatcatttccaatagagaatttcatgaatacactcaagtcaaaaccatagaaagagaaagtattgttgaaacctccaatgcaatcaggagtaccgttacctattttcacatattgtctcgtaaactgatcgccagcttcattgtcagctgcaaactttatatcaccaggctgaggttgtccatcaaaaggtttcacaacaccatcacgcaaaatgaaagaaccatcttctccctgagtaaaatcatcagtagtataaatgccgtcatatacgtatccatacatatcacccaatgcttcacctaccacagcataataggttaacgtacccgaacggttactaccagctgcgaacgtcttatgatcttctactccttctagagccaaaactttagaactgttgaaagcaagattcaggtcagtagtccaacggaagttcttcgtgttgatgttcaccgtattaagagtgatttcccatccacggttacgcatttcaccaacattctgatactgacttgagtaacccgttgaagacggaataacacaattcatcaacaagtcactgatttggttattataccattcagcagtcaaattcacgcgactgttaaacaacgatatatccagaccaatattcgttgcatgtaaagtctcccatttcaaatccttattacccaatgtagtacctacaacataagctgaattattctcattattacccatagggtaagtggtttgtgaatagttagtggtatatttactactaccaatagcattattaccagtcacaccataaccaacacgaagctttaaactattaactacattcatcaatttactgttcttccagaaattttcttctgaaatacgccatgcaccagatacggaagggaatactccccacttgtttcctttggcaaaattagttgctccatcaccgcgaactgtagctgttaataaataacgttcgtcaaatgtataattaaaacgtgcaaaagccgaaacaataccactgtttttatggctcgttgattgttccttaactgttgcatcagtaatattatccagtccatgatttggataagggaacttgataagtgtcatcttatcactctcactttctgaataagtaacttcatgacccataagaacatttaccttgtgtttcttggcaaaagtctggctgtaattcaaggtattggttacttgccatttatatgactctgaattactgatactaccgtttataccagtattactgggatccattatataggaagtagaattctcatcggcaaaagaagtagatttactatgcgaccatgtataactacctgctgttctccaagtaaaatgtttcaggaagtcaaattccagacctgcatttaccgtatataatttggaacgtttattcgaagtagaagcatcattctgtacaatcggattggcagtatcaaaagaagcatcaagtcccgagaagtccggataagtctgcgtatagagcaaatcatcacgggtaaacatgcttcctccattaataggctgaagaagtacattcttcattccggaataagcgccaccaccatctgtcgaattgcctgaaaacattgtgttaagatcaaaacgaacccctttataaagttccgtattaaccttcgcacggattgaattcttctttataccatgattagcaagcaaaccttcctgatcactataattataactcaacatcacctgggtcttttcagttccagtagaaacattgacattatgattttgtgtcagggctgaacctccaaatacttcatcttgccagtcgatgccataagcatctccatattggctattgatacgtccataaactcctgaataaaaatcactggcatcaataccttttccattatcaaatacattactccacactgctgttttaccttgcagttctgccatctcatattgatacttcacaaaatcctcagcattagacatcatatccagttttttggaaagtttgtcaaaagagaagtaagtattataagttatctgtgtctttcctttcttaccggactttgtcgtaattaacacgataccgttagaaccacgtgaaccatagatagcagtggccgatgcatctttcaaaatatcaatgctttcaatatcattcacatcaatattggtcaaagcatcactcatttcaaaaccatctacaatataaagaggttccgtgctctgagtaatagaagtaccaccacggacagtgatattaataccagcaccaggtgcaccactttttgtgacgatgttcacacctgccgccttaccctgcaaagcctgagcagctgttattgccggaacagctgctaactcactgcttgaaacagaagaggtagaccccgtcaaatctttgcgcttcacctttgcataaccaatagcaacaacttcttccaacatcacactggattctttcaatgtaatgtcaaaatgcgttttgttaccgattatcaccgtatggttgtcataaccgataaaagagactatcaactccttggcagaagctggcacagagagtttaaagttaccatccatatcagtaattgtaccgacagaactattacctttcaccgtaacagaagcaccgattaccacgtcaattgcatccctgacggtaccggtaatcgttttgttctgagctaaaatgcttagaggacagcttattaatatgagcattaataagcacagatttttgtgtaagattctcatagattattaatataattgattaataaataaattcaagcctaacaaattacaccatgaccgttatcggacacagaacttgtgtcagcaaaaatagaaactcttacgtctatataaaatgcgaattttgaccgaaacacttttgcttttgattttattcatgaaaagaaaagcacttcagaagctaaatcaacagattcacaaaggattaataatgattttgatctaagactaaacgttttgattttacaataagtcctcttcttctacattggtttcacgcccaaaagatctatattccaagggggtaaatccagtacgttttttgaaaagagagaagaaatgctcagtggatttataatcgagcataaaagatatttccttgacagactgggatgtacctactaacaactgctttgctttacggagtttcaattcctgaaaatatttggcaggtgcatatcccgtataatccttaaaaaccttgcgaaaccaggaatagctaatattcagtttcatagccaattcttccggatcaatatctttgaacacattttcattcataatgattttcgcttgttcaatcttttgatcaacatcaccgacctcaaaaatcttattcttagaaatggaaaggatcattcctatcatatgcaacacaataccagaaagatattgctgagaagaaatcttatcagcttcagcaatttccaatgcacgcgagaaaagagtaactaattcctcattcaatcctacctctaatacttgattatctttagaaaggaaaccacctttcaacatatcatctatgaccggtccttcaaaaccaatgtagtattcattccatcctgtctgctggtatgggtggtatgtgtgccactgtccgggaaacagcaccatgagccttcccttacaaacttgcttctcaggagtggtctcagaggtaaataatcctcgacctttagttatgtaaaccagctgatactcacgtaaaacacgtcctttttgagcattgaagaagtaaccagaagggtgatccttcaagggatagggagaattcggctggatagactgaaagcctacagtatttacccacagaccgaatttctggtccatgtcatttacaatcaagtacttaaattcaacccctaaatcattatagttcttagtcataatacgtgtttttacaggataggataggtaagggcaaaaatagaaattatttgcgaataaaaaaatgtccgctccgggttaattctaaaaatataccggagcggactaataaatacgaataaagagaaagagtctatttctttacgacaatcttatcatattgttgttcggccttgatttctgtatacttaggtgcatctatcatctcgataagtgcacggagtacagggccttcacccataggatcgttctcctgggtaggacggttgtaatagtatgccacagaaggcataatgccggttcctacacaaatagaagttacatcaccatcatctgagatttttttcatcatacccttcaaaccttgttcagccacatagataaagtccggatgcaaccaaccctccttcacaccacgggcaataccgaacacaaacatagcggtaccagtgatttcttcataagaatcttccttatccaacaattgatgccaaagtccgttcttaccttgatagcgtgctacaccactggcttgctggcggaaattttcaataaccgcttcacgcatcggatgatctttcggcatcatactaagcaaatcagcttgtgccataaacacccagccgttggcacggctccagtgagctactccatgttccttgttgtctgtatgataacagtgataataaatctgcttttcaggacaccagagatagcgattataattcaatacttgattagcggcatcattgaaatacttctcatcaccggtcaacttacccatacgtgccaaaaaagaaattgccatgaatgcatcgtccgcccagatagtattaacgtgtggccagatgcgggcaatggtaccatcaaccagacgaggttcaccataattcagatgttcggcagtctcattaatgtaacccagaaatgaatcattaggatacttcaactgcaactctatcaaactggctcccatcggtccattatcgtccagacgtttgccacggaagatcatgtgccaactcaatttgcggacagcattccaaccatcccgcttaaaagcttcatcatattgtttacggaagaaatcaaggttaccttcattgaatacgaagttcatattcttcaaaacatatttctcatacttcttatcaccgagcttatcacccagttccatcaaagccatgtttgttaccccattggtatagtgccagttattatacttgcaagcaacctttacatccatatcaagaggtaacttcttgacggacttatatatttcaccagtcttcgtattcttgaactcgtatgtagtgctggcaagaatgcggtctgcaatctttacggcagcttctcttgccgtcatcttagtttgggcggtaagggttgccactgccaacagcagggcgagggaaaagaatgttcgtttcatgatatttgtttaagtacttggttatcatttaggaagattaaatgcgcgagtcatttcctgcatttgctcctgactcatgccatcaggctcaaagcccatgtttttggcagcaatataaatcaaggcagatttattcaatacatctacctgatcgaaagcagacataacatccacatctacagcaaaaacaccatgtttttcccacatagccacgtcataatcttcaagttgttcaatagttgcttccgccagtttcacggagcttggcagttcgtaaggaatgatgcctaaaccacgcggacagaaagcctttgtttcaggaatcatactccaaagtaaattggtagccacatctttctccaggaatttcttgcaatgcgtcatagcaatcagttcgataggatgggtatgcaatgaagctttatagggagatcctttctcaatcaagcgattgtgcacactaagatgggcaggaagttcggaagtaggcatcaccggatgatcggcaatgatgacatagctggcacagtcatccagaatacgaattacagaaccgtgctccatcggccaacgggccagatcgcgcatccgtttattggtgcccttgcaatagaaatagcaatctttcagatacggaagagtagcaccgatttgtttcacttcgctgatggcaggcaatgcttttatttcatcgtctacaaattcagtaatattcagggtgatattaccgccattacgttcggcccaccctttttgccagagatatccggcaacctctgccacttgattgactgcataagtcaatgccggacggttttcgagaattgatttcattataataaattaagttacgggttacgaactacaagctacgagttgctgcgctatcataccgaaaggcacttgtaactcgtaactcgtagctatatatactattacacttgtgccattgccaccacaataatagaagatatcagaactaccaaccccagaataagaaccgcaatcgtagtattgctgacacctttccattccttcaacagaattccccagacattgctgaacgttacgttcaatgacatcaggatactccaggagaaagcaagcagtacaggactgtctgtcaggaagctcttacccatttcaaggccgaagaactgagaataccacaacacgcctgcaagcgcacagaacaacagattattcgtcagtaccgaacctttcacagaaagatattccttacccgtcttattcttgatattctgccaaatacagtaagcggcattcgtacagaaacctccaagagttaccaggaaaattacaggtaatccggcatagagcgcttctactccaccagccaaagcagcctcttttatcggtgttcccgcatccagaccgagagcgaaacaagcgctcatcacacctgccaacagagccacaagcagcccctttgtcagagcaaaatccttaacggcagcgcgtttctcctcttccgtcatatttttagaacgaagactaccggcatatccaataatagcaatacctgccaacgtgatacatacgccgatgagcaacatcagtccttcgccatgaagcaagtcttttccggcaaacaaagccgggaaaagtgttccgaaaccggcgcacgtaccgagggcaatactctgtccgagtgctacacccagatagcgcatactcaaaccgaatgtcagtccacccacgccccacagaacgccgtaaaccattgcaggcaaagcgcctccggccccccaaagttcaatcagcgaacttcccgccggaatggcaagcaacgcacctaacaatgggaaaacaagccatgcaaagattccctgtacaagccagaaactctcccacgaccagtttttcaccttgttaatgggtacatacgaactactctgtccgaagctcccgatagctataatcaacaatcctatcagtgtattcatgataataacgtttagtgataaatgatgagtgtttaacacaaagaaccgtacaaagatacagctttctccgctaaacactcgtcactaaccattaatccctcaattacgtttcgacgtaacgtctgcttcgtatttctgtatctcagtaatgaattcctcacctacaggtacaccgttcttcagacagaacatatcccaaacagcattccaaggcagagattttccttcttcgagcagagcaaggcgttcaaacagctgatcgttcgcctcgtatttacgcaatgtatccagcggttc

SEQ ID NO: 6507 - DNA, 11418 bp, Unknown
  gut microbiota DNA sequence
tcatgaagaaaaaaataataaaacatatagattattctaaataaaaatgtccaattttacagataaaactttgttgattactggtggaacaggttcctttggtaatgcagtattacgtcgttttctggattctgatatcaaagaaatacgtatattttcaagagatgaaaaaaaacaggatgatatgcgccatgcattacaaaatcctaaggtgaaatattacataggtaatgtgcgggataagtcgtctgtagatgtggcgatgaatggcgtagattatgtatttagtgctgctgctttaaaacaagttccttcttgtgagttttttcctatcgaagctgtcaggaccaatattatgggtactgaaaatgttttaaattcagccatagaacatggtgtacagaatgtggtagttctttccacagataaggctgcctatcctattaatgcaatgggaatgagtaaagctttaatggagaaagtagcaatagccaaaggtcgtgagttgggtgaaggtgctcaaacaacaatttgttgtactcgctatggtaatgtgatggctagccgtggctctgtgatacctttgtgggtagaacagatgatggaaggtaagtctattactattactgatcccaatatgacacgctttatgatgacattggacgatgcggttgatttggtaatatatgcttttacccatgctcataatggtgatttgtttgtgcagaaagctccttctgccacattggaaactttggcgcaagcattaaaagaaacatatgctagggttgatggaaaatatcttgatacagaagtgaaagttataggtacccgtcatggtgagaaattgtatgaaactttggtaacccgtgaggaaatggttagagctattgatatgggggattattaccgtataccttgtgatactcgtgatttgaattatgataagtacttcacaaagggtaatgaagagatttctaaggtagaggattatcatagtcataatacttatcgcttagatgtagaaagtatgaaggagctcttactgaaactccgttttgttcgtgaagatatgggacttgagccaaaggctaaggctcgtgaaatcagaagtgaataataaatataactatagctatgttgaaagttatgacaattgttggtacccgccctgaaattataaagctgagtcgggtaatggccgaactggacaaatatacggaacatgtaattgtccacactggtcaaaattatgactatgagttgaatgagatattttttcaagagcttcatatccgtaaaccggattattttctaaatgctgcgggtaggaatgcagcggaaacgatagccaacgtaattcgtaagtctgatgagttgatggaggaagtgagaccggatgctgtattgttgtatggtgatactaatagctgtatttctgtaatttcggcaaagcgtaaaaagattccaatcttccacatggaggctggaaatcgttgctttgaccaaagagttccagaagaaatcaaccgaaaaatagtggatcatctgagtgacatcaatatgcctttatctgaacatgctcgcaaatatcttctggctgaagggttgcgtccggaaactgtaataaagactggttctccaatgacagaagttcttttatatcatagagatgaaattgaaaaaaatactgttctggagaaggaaggtttgaaaaagggagagtattttattgtcagcactcatcgtgaggagaatgtagattcggaagataatttctctgatttgcttgtttctttaaatgctattgttgagaagtatcataagaaagtgattgtatctactcatcctcgtacccgaaagaaactggaatccattggctttgtaaattcaaatccaatggttgagttcatgaaaccttttggatttatggaatatattaaacttcagcaaaatgctttttgtgtgatttcggatagtggtacgattacagaagaatcttctatccttcattttccagcgataacaatccgtcaagctcatgaacgtcctgaaggtatggatgaagggacattgataatgactggattaaataatgatcgcattttggattcaatagatgtagttacgtctcaatatgcagagagtgcagatgctattcattctatcccggactatgcggcaaacaatgtttctaaaaaagtagttcgtatcattctttcttatactgattatgttaaccgtacggtatggcataaaacattctaaacttacatttgaatattagatgaaaaaagttttattgttcggcgccacgggtatggccggacatgtagtctattactatcttcagagtacaggcaaatatgatatctccaatgtggtttatcgtactcctttgactgaagatagtataattgttgatgtgacaaatcgtgatgcggtcgctgatgtggttcatagagtgcatccggaaatcataatcaattgtgtcggtattcttatcaaagggtctagagaacatcctgataatgctattttgataaatgcttattttccacatttactaaagagattgtcagatgaagttggagccaagttaatccatataagtacagattgtgttttttcgggaaagaaaggaaactatacagaaaatgattttcgtgatgctgatgatgtgtatggccggagtaaagctttgggcgaaatcattaatgataaagatttgacgattcgtacttctattattggcccggaattgaaagaaaatggtgaaggattattccattggtttatgcatcaatgtggagaaataaatggttttaggacggcgatatggggtggcgtgaccactttggaattagcaaaagccattgacttttctctggataatggaatagtcggtttgattcatctgagcaacggggtgggaatatcaaaatttgatttgctgaatttgtttaaggagatatgggggaaggatactgtgataaaaccgtatgatggaaatgaagttgataaatcaattgaaaagtctcttcgcctagattatgaagttccaagttaccgacaaatgttagttgagcaatttgaaatgatgaaaagttattctaatttgtattcagcttattaagctatgaagaaaatattggtggtttcttctgtatatcctcctgagcctgttatttctgcaaaagtatcgtttgatattgcacgaaaattggcggaatcaaatagagttacggtaatttgtccacacccttcacgtcccttgggatatgagtttggcaagattgttgatgaagaaaaaattgagaggatagtattggatagttatgtataccccaagtctaattttgtaggacgttttaaggagagttttagttttggtaaagctgttagtcgatatatcacattgcatagagaggatattttaattatatatatggttacatggccttttggtgcaacttatatcccaattaggacttcgcggaaaaataatatcccaataatagttaatataacagatatctatcctgaatcaatgacctcaagattaggaataatgggaaaaatcctggagtatcctttaaaaaagatagattcatattatcttagaaaggcaacttcaattatatctgtttctgaattaactaagatttttttggagaagacaaggcaactgcctgttaatagagtacaaacagtgagagtatggcaagaggatagcatatttaatgcaaaatataagaaacagtacgaagatttcatatttatgtttgtaggaagtattagtcctgcagcaaatgttccttttataatagaagtatttaaatcgttgaatcttaatcgtgccaaactatttatagtaggtgatggatcggaaaaggaggaatgtttgagattgtctaaagggtataataatatatgtttttcttcagtagcaccggagaaagtccctgaaatacaagctcaggcagatgtgttattattgactctcaaatcaggtgtaggcagaactgccagtccctctaaacttcctgcttatatgttctcatctaagcctgtaattgctagcttagataaagatagtgatgcagcaagtattattgagagtgctggatgtggttatgtttgtgaatctaatgattttatgggttttcaggctttgctaaagaaaatgattgaagttcctgaatgtgagcgaactcgaatggggctaaatggtaaaatatatgctcagaattatttgtctaagcaggttaatcttgataaaatagtacatattattttgagttctataaaatcgtgagtatgttgaatgtacgaaaggccttaattaatgatgtaaacacaatcgttactattcattgtgatgcttttactgatttttttttaactaatcttggttctaactttttgtctttttattattcgtgctttattgaaagtaatgaaggacttgttgtttgtgtagaagaagatgggaagataataggtttcgcagcagctactaaacggtgtaaaggctttaatgcatctttgataaaaaataatattggtcgttttattagactttctttagagttgtctttatccaatcctaaggcactaatcagattggttagaaatctaacgaagaccaatagtcgtgtgcttgataaaggagaatatgcggaattatattccattgcagtaaagagagaagggcaaggaagaggcctaggcaaaaggcttttattaacaattgaagagatgttaaaggctgataatattaatcagctatcattgactaccgattattatggtaatgagtcaactatagctttttacaaatcaatgaattttaatgtgctttatgaatttattgcttatccaaaacgtagaatgtatcgctttataaaaaaaatatgattagttattggtcgttgcatttagataatgattaattattcaaaacggaatactaacattttaattatagattattcatgaaaattccattttcgcccccttatattgacgaggcggtcatcaacgaagtcgttgattcgttacgttccggctggataacttccggtcctaaagtaaaagcattggaagaagaaataaaagtattctctaatgcaaaagaagtgctttgtgtaaactcatggacttcgggagccattatgatgcttcgctggttgggagtaacagctgaagatgaagtaattgtgccggcgtatacatatagtgctacggcattagcagtccttcatgcaggtgcaaagcctgttatggtagattccggagaggatttcaatatctctgtggatgctattcgaaaagcaattacgccaaggaccaaggctattattccggtagatattgcgggcttcccttgtgattacgaccgtatcatgcgactcgttaatgaaccggaaatacgcaacctgtttcatgcgacgtcattagtacaggaaaaattgggacgtattcttgttatgaatgatgcggcccattctttgggtgcttattataacaagaatcagcgtacaggatgcgaaacggatattgctatcttctcccttcacgccgtaaagaatgtgacgacggccgaaggaggagccatctgcctgaatttgcccgaaccgtttgataatgcggaactctacaaagaattgcgtatgatgagtttgaattgtcaaactaaagatgctttttccaaatccaaagcaggcggttggcgttatgacatagtcggtctgggaatgaaaataaatatggctgacgtaaatgctgctatcggtttggctcagatacgggaatatcctgagctactgaaagaacgtaaaagagtattcaatacctattctaaagcatttgctgattgtgattgggctattttgccaccttctgaagatggagaaaaagaaagctcatatcatatctatgcattgcgtatcaaagatttcacagaggaacagcgtgatcgtatgattgatgaaatcgcgaaaagcgaggttgccgtgaacgttcattttatcccgatgccgatgctttccttcttcagctcattgggatatgatataaagaactatccacaagcttatgagaattttaaaggtgaaatctccttgcccatttatccacagttggatgaagaaaagctggactttataatcaaagctgtaaaagatgcataccttaaagtgactgttgataggtgatgattcgtttctttgatattttattttcctttctgggcattctattcttatctcctgttttccttttcctgtatattgctatccgtctggaaagtaaaggtggtgggttttataaacagctacgtgtgggacgtggagagacggatttttatgtctataagttccgttcaatgcgtataggagctgataagcaaggtttgataactgtaggcggacgagatccccggattactcgtatcgggtattttatccgcaaatataaattagatgaactacctcagttattcaatgtactgaaaggtgatatgagtctggtaggcccgcgtccggaggttcgtaaatatgtggaactctacactgaagaacagcggagagtgttgtctgttcgcccgggaattacggattatgcatctatagaatatgtagatgaaaatacgattttaggacaggctgaggatgcggacaaggcatatgtagaacaaatactgccggataaaatatgctacaatatgaaatatatagagcatcgttcggtgaaggaatatttcaagattatatttctgactatatggagtattgtacattgatcaaatcggtaataaaggttatgagatggttgtttatcccatattatgtttggaaaaagtagtttaaaataagatatggaaaaggtcgaagctcagtttcggccttttttattctttcaacactgacacgcttgtgacaacctcaaactactattcggtgtctggaaaagtccgaaaccaatgccgcaaaggattaatcgaagcctgatacaaaatatccccataccgatacttcccaatattctcggatgaatacattccatcaaataaccggtaaccagtgcggcaactaaagttgcaagaggccagggaattaataataacccggccattacctcgctacaatagccaattgataaccattgacaatccaagtaatcacagagtccgaagttccaaaatcatgtgcgagggtagggaggattacagtatttcctgtgattttccatcctgaaccatataatttcttttatctgcgaattaaacaaaacgttcaatctgctgttcggaaacctgcataaaaataagtttttttagaaattgtctcgtaggaaagtaacgtggagaagaaacttctttgtacctttgtgcccgtcaatactaaaatcaataataaataataggatttatgggaggatttttcgggacagtctccaaagcgagctgtgtgacggatttattttacggtacagattataattcacatttaggaactaagcggggcggacttgccacgtatgatgcagaagagggcatgtttgcccgatccattcataacctggagagcacttatttccgaaccaagtttgaagacgaactggataagtttaaaggaaatgtcggaataggaatcatcagcgacacagacccgcaacccatcatcattaactcccacctcggacgcttcgccattgtaacagtagccaaaattgtgaatctggaagaaatagaagcagagctactttcccaaaatatgcacttcgccgaactgagttcaggcaataccaatcaaaccgagcttatctcactactcatcatacaaggaaaaacttttgtagaaggtatagaaaatgtttaccgccgtgtcaaaggctcttgctctatgctgttgttatcagaagatggcagtatcattgcggctcgtgacaaatggggacgcactccgattgtaattggccggaaagaaggggcatacgctgcaaccagtgagtcaagcagtttcccgaatctggattatgaaatagaccgctatctcggtccgggagagatcgttcgtatgactgccgatggagtggaacaactgcggaagccggaggaaaagatgcagatttgttctttcctgtgggtatattacggttttcccacttcctgctatgaaggtcgcaatgtagaggaagtgcgttttaccagtggcttgaagatggggcagaacgatgattctgaagtcgattgtgcttgcggtattcctgattccggtgtaggtatggctctggggtatgccgaaggaaaaggagttccttatcaccgtgctatttctaaatatacaccgacatggccgcgcagcttcactcccagtaagcaggagatgcgctcattggtggcgaagatgaaactgataccgaaccgtgccatgctggaaggtaagcgcttattgttctgtgacgactccatagtacggggaacgcaacttcgggataatgtgaaggtgctgtatgaatatggtgccaaagaagtgcatatccgcattgcttgtccgccgttgatttatgcttgtccgtttgtaggtttcacggcatccaagagtccgttggaactgattacacgtcgcgttatagaagaactggagggagatgcagacaagaatctggagaaatatgccactaccggttctccggaatatgagaagatggtcagcattattgccgaacgctttggccttacaactttgaagtttaataccctggaaactctcattgagtccatcggattgccgaaatgtaaggtttgtacacattgttttgatggaagtagttgcttttaagtaactctaaatactaacattttgtaaaaaggggcgtgaattgcttggcagttcacgcccctttttctacctttacggcagaactattgactactgttgatagataattggtagttcatattcttaatcgtaaattgaaaattattaaatcgtaaatattatggctttagtagaacgttttttgaagtatgtaagcttcgacacccagtccagtgaagagacagaggtgactccaagtactccggggcaaatggtatttgccaaatatctgaaagaagaattagagtctttaggtttggaagacataacgctggatgagcatggctatttgtttgccacacttccggcaaatattgataagccggtacctactattggttttatcgcccacatggacaccagtcccgatatgagtggcaaagatgtgtctcctcgtattgttcaaaactatgacggctcggacatcgtgctttgtgcagaagagaatgtagttctttctccgtctcagttccccgaactgttggatcataaaggggaagacctgatcgttaccaatggtaagacattattgggagcagatgataaagcaggtattgccgaaatcgtttctgcgatagtgtacctgaaagaacatcctgaaatcaagcatggcaagattcgtattggtttcaatccggatgaggaaataggattgggcgcacataaattcgatgtggagaagttcggttgcgactgggcttacacaatggatggcggtgaagtaggagagttggagtttgaaaacttcaatgcggcatctgccaaaatcaccttcaaaggtcgcaatgtacatccgggttatgccaagaataagatggttaattcaattcgtgtggccaaccgtttctgtgcgatgttacctgctcatgaaacacccgaacatactgaaggttacgaaggcttctaccatctcatcagtttcaacggcgatgtagagcagactacagtggcctatattatccgtgatcatgaccgtgcacgtttcgagagccgcaagaagaaaatagaacgctttgtcagtgaaatcaatgccgaatatggtgaaggtacggcaacgcttgaactccgtgaccaatactataatatgcgtgagaagattgaaccggtaatgcatatcattgatacggcttttgccgcaatggaggctgtaggtgtgaaaccgaatgtgaaacctatccgtggtggtacggatggcgcacagctttctttcaaaggtttgccttgccccaatatctttgcaggtggtctgaacttccatggacgatatgaattcgttcctatccagaatatggagaaagcgatgaaggtcattgtgaagattgccgaacttgttgctataaaataatttaataccttaagacatgaaaaccactccgtttacagaaaaacatatctcgctgggtgctaagatgcatgagtttgcgggatataatatgccgatagaatattccggtatcattgatgaacacctcaccgtttgtaatgctgtgggtgtattcgacgtttcccacatgggagaattctgggtgaaaggccccaatgcgttggctttccttcagaaagtgacttccaataatgtggctgccctgactccgggcaaggtgcaatatacctgtttccccaacgaagaaggcggtattgtagatgacttgctggtttatcattatgaaccggagaaatacctgctggtagtgaatgcttcgaatatagaaaaagactggaactggtgcgtttcgcacaataccgaaggtgctgaattggaaaatgcttccgaccacatggctcaacttgccgtacagggaccgaaagccattcttgctttgcagaaactgacgagtataaacttgtcggaactgccgtattacacctttacgcatggtgagtttgccggtgagaaagatgtgattatttccaataccggctataccggtgcaggaggttttgagctttacttctatcccgaagctgccatgaagatttggaatgccgtgtttgaggcaggtgaagaatttggcatcaagccgattggcttgggtgcacgcgatacgcttcgtctggaaatgggcttctgcctgtatggcaatgatctggatgatacgacatcacctattgaagccggtttggggtggattaccaagtttgctgaaggtaagaactttatcaatcgcccgatgcttgaaaagcaaaaaacggaaggtactgtccgtaagttggtcggttttgaaatggtggaccgtggaattcctcgtcatggatatgaactgttcaatacagaggatgaagctatcggagtagtaacctcaggtactatgtcgcctactcgcaagattggtatcggtatgggctatgtaaaaccggaatatagcaaggttggtacggagatttgcattgatatgcgtggacgcaaactgaaagcggtagtggttcgtccgccattccgtaaataagaggagtctttttcaccacagattacacggatttacacagattaaattatcaatataaatatctgtgtaaatccgtgtaatctgtg

SEQ ID NO: 6508 - DNA, 745 bp, Unknown
  gut microbiota DNA sequence
atattttataaattctcgtatctacatttatttttaatgaaaattcctcaatataatccaacttttcatccagaatatcactgacattctcagcattttgccacatttgtttttctgactgcctgatcagttcctgttttgacaaatggaagataaataaacccaaaagcacaacaggaataatggaaatacaaataaatgaactaatcagcagagttttaaattttgtatattttaatttttccatcatcacccaactcttttgcgaaattcttcaggtgtcatattatgacgtttcttaaatgccctgttaaaataattgggatccttataccctacttccaatgcaatcttccttaccttatcagaagatgttttcaaaagattctctgctttctccatacgaatatctgacaggtattcagaaaaggaaattccgaatctctgcttaaataaagtactgaaatacgaagcattaaaatgatacaatgcagcaatctgctccaggctgatctcgtcctggtaatgttcctctatataccgcctgctttcatccaaaggatctgtctcctgtgaatctgctatttcccggaaagcgattatattttttattaattccgctgacctttttttcaattcagaataccactgactttcgatcagacgattatccaatgcatttaattctgacaagtgttcagctttcagatagggctccatataacgtaagattctgaaaaaaaag

SEQ ID NO: 6509 - DNA, 1051 bp, Unknown
  gut microbiota DNA sequence
aagaatatctgaaaaggtggcgcctgatactgggcggaaacgaagccgacggaacgggtattacactgacaccggaagagcaacgcatcgaccagtcattggaagccgtatatgacagcgaccgccgcggaggactcggatcatccgccccaaaggtaagtcgctggttgggagatatccgtgagttctttccgcagactgtggtacaggtcattcagcgcgatgccatcaaacggctgaatatcacctcactgttgacggaaaaggaaatgcttgaaacggtagtgccggatgtgcatcttgtagctacactgatgtcactcagtcgggttattcctgaaaagaataaggaaatggcacggcaggtagtccgcaaagtggtggacgaactactgcgaaagctctccgcccctacccaacaggctgtgacaggagcgctcaaccgttctacacggcggagaaatccacgttataacgagatagactggaagaccaccatcaccaagaatttgaaaaactaccaaccggaatacaagactatcatcccggaagtccgtatcggttacggcagaaaacggaaagcgatgaaagacatcatcctctgtctggaccagagcggttcaatggggacatccgtcatttactccggaatcttcgggtctgtactggcttccattccggcagtgaacacgcggatggtggtatttgatacggctgtggtagaccttaccgatgacttgcaagatccggtagacttactcttcggtgtacagttgggtggcggtacggatatcgcccgcgccctgacctattgccagggagtaatcacccgtccgcaagatacggtgctggtactggtgaccgacttgtatgaagggggcgatccgagagaaatgcgaaagaagttcgtatcactggtgaacagtggcgtgcaacttatcgtactgcccgccctgaatgatgacggtgccccttcttatgacaaaaatcatgcagaatttctggcaaatatcggtgtgcctacctttgcttgtacgcccgataagttccc

SEQ ID NO: 6510 - DNA, 1040 bp, Unknown
  gut microbiota DNA sequence
cagtatgtacctgcttttatggttccgaatgtattccgccaggtggagagcatgcctcttacaaagaatggaaagattgacagaaaagctcttacagctatgtatcaggaggaaaagaaatgagttcctatggatttataaaagaactgatcgagaaagaacatactccaactccagcttatgtttttgacctggataagatgaaggaatttgtaaaaaaagtgcagagctgtcttggagagagcgcacagttatgttatgctatgaaagcaaacccttttcttacaggacccatgatggatgtggttcctacatttgaagtgtgctcaccgggtgaatttcgaatttgtgagcgtgttggtgtgccgatggagagaattgttctttcgggtgtgtataagaaccctaaagatatggaatatgtactttctacatatggaggaaagggagtgtatactgtagaatctttgcagcatttacagattctgaatgatactgcagtgagacttggcatgaagattacggtgctgatccgtgtgacaagcggaaatcagtttggcgtagatgaagcagatatcaggaaaatcatttctgacagaacagattatccgggggttgagatagagggacttcagttctattccggaactcagaagaaagatctcagtcagatgaaaacagagctggagcatctggatgaatttatcggggagctgaaatctgagagtggatttgaagcacaggtgcttgagtatggtccgggattttttgtcccatattttaagaaggataagagcgaggacgtggagaatattctgagtgagttcagagcacttctggaaagtcttaatttcaagggtaaggttgttcttgagatgggaagatttctggcagcagcctgtggatattatgtgacatcaatcgtggatatgaaggtgaataaagaacagccgtatgtgatcatggacggtggtatcaatcatctgaattattatggacaggcgatggcaatgaaacagccgtactgtacacagcttgat

SEQ ID NO: 6511 - DNA, 1919 bp, Unknown
  gut microbiota DNA sequence
tctttactcaaaaaagaaaacaaaatacaattacattcataggcaaaatacatgcggtcagatttctcgtttccgggaaatccatatatgctgttccctcatgcatagctacagaagtacatgcaacaagagagagctgggagaatatttaataacgctattcaaggctgtaaccaatcatgacaaattttgtctttccgcctaaagggcaatccaccgttcctgtacctatacattgtattggcacataatcctcgccggcagctaaagcctctatattcattaagagtaagtcactttgcaccttttccggcttagccatataggaaaccagaataattaacacaaacagcacaccaagcatccaagattttcttttcatacaatattaaatttagtattagatatttaaattagacctgtctcggaagcgaaggtagcaatcaaagaaatccgctccaacaaatctgactgacaaacactgaccaagcttcatttatcagaatttgtcagtccctgtcagaatttgtcagccacatactatccatgtttttaggcattagtcaaagcatttttctcgatgaaatgggggattatcagatgataggaatcatttttgaactttatttgaaaagctgttaactcaccgagtgattttcgtaaacgacgaataagcgtatgtattctttcctgacttccgctaccattcggccatagagtctcactaattagtgacgtagaaagcgtgtgtccttctgcctgaagaaacttttccaataagacagccgtttggggagtaagctttactacttgctcctcttttatcaattccattcgctccgcatcaaaaaaagtatgctcccccaactgataaacaggtgattgttctgcagtcaccactataacggggagaccttcttgttcgacctcctcaggctgccttttctttctatagcaatacatttttccaaaaatgaaaaataacaattcaatacctgcacaaacgcctcctatggcaagcaaacgccagtcactaagcagccaccaccactcgcaagaagcataaccggtagcttccacctcacaacgaaatcccatataataagaaaaaaggctgtcagtctgggagaacttctgcacgtttttggaaaaagcagaagagggctgctcctgaaaatcccaaacagtaatacgagtatgggttttcagaaatatatcagattctttcaacaacttgttccaggttccatgtaatgagtccacatctaagggagattcatccaaaagtgcagtaagaagtccgcgctgtataccccctttcacaaggctattctcaaatttaaaacatgggatttcatattttcttttgcctgaatccaatgcaatctctaccaccccgggatttacctcctctaaagcagatatagctgtccaattgcttatatagggaattgagagagtatctcttttctgcaactcctgcaataatgctgttttaaatgtggcacgtgcttgttcatcccatttttgatgaaccagaaaagttccggctcccatagccaacgaatacacaagcagccttatccatagtatctttttgcgttttattttcatcattcttcccgctccatttttagtagctgtttctcaattgcaaaagtagggattcatacacttaaagaagaaaagcaatgttacagaaactttcgttcacgtttcatcattaccaatttatagctaaaaaaaacttatccggattatacctgagacgcacttgctccgtaccttctccactcacaggtacctctgaccgaagaaagtacggccttggtacggagcaagtgcattccgggtgtaacggagacaggtcataatacaataaagaagatcaaagagttatctacgcaaattgacgcaaa

SEQ ID NO: 6512 - DNA, 3143 bp, Unknown
  gut microbiota DNA sequence
aagactgcccgtgagatttatgacgagtgtaatgagaagctggctcaaccggaatactctgctcgtggtatgatgcgccgttatcatgtggaagctgtttgtactacggatgatcctattgattctctggaatatcatattcaaacacgcgaaagtggttttgaaatcaaaatgttgccgacatggcgtcctgacaaggcaatggctgtagaagttcctgctgacttccgtgcatacgttgagaaactggctgaagtaagcggtgttgctatctctaatttcgatgatatggtaactgccctgtgcaagcgtcatgacttctttgctgaacaaggctgtaaattgtctgatcacggtattgaagaattctacgcagaagactatacagatgctgaaatcaaagctatatttaataaggtatatggtggagcagaactgactaaggaagaaatcctgaaattcaaatcagctatgctggttatcttcggtgaaatggactgggaaaaaggctggacacaacaattccactatggcgctatccgtaacaataacagcaagatgttcaagttgctcggtgctgatactggtttcgattctatcggtgaatttactactgctaaggcaatgtctaaattcctcgaccgcttgaattccaaaggcaagttgacgaagactattctttataacctcaatccgtgcgctaatgaagttattgccactatgttgggcaacttccaggatggcacgattccgggtaagatacagtttggttccggctggtggttcctcgatcagaaggacggtatggagaaacagatgaatgctctttccgtgctggggctgctgagccgtttcgtaggtatgttgacggactctcgttcattcctctcctatccgcgtcatgaatatttccgccgtacattgtgtaatcttgttggccgtgatattgaaaatggtgaaattccggcttctgaaatggaccgagtgaaccagatgattgaagatatcagctactataacgctaagaatttcttcaagttctaaaagaagaattactttttactcatagcaaggagtgcatcaaagttatattgatgcgctcctttttttaatacgcatccatcgcttcgcttcttttaaagataaaatgcgtccaaattggataccaatttcctttttactatatttgcatataaatcccataaaacagaagattatgataataattagcacaagagatttcagagctaatcaatctaaattcatggatatggctaacaatggagaggacattattttgaagtcccgtaaaaacggaagttttaaacttgttccggtaagtgaaagtgatatgctgataagcaaagaatatattcttgagccagatgcagatcttgatcgggctataacaatggatgaacttcttcaaggtgtaaaagcagacattcatgaattgttcagggataaaaggaagcaagaataatgaaagtaatagcattaccagaggtgagagaatacctcatggagctgattcagattctctataaaaaagaatatttcggagaagatgttatacgctacgttccggaaaaataaggctacacaatggtatgtatttttcaatgtctatcagaaagacggtgaaatgatttttattatacgctatatcagcaataaccatgtaacagcgcaatatttataaagcactctaaaactatcgcatcactcccctgactactacggcagaatgacattgtttcttcttaattctggtttgtaaagatgttgccttgagcataaacatcccggaaagaagagttactttttacccatagcaatgtatcaaagttatattgatgcgctccttttcttttatatatatatacaacgcttctttaaagaatgatgttacttacatgcacatgttggcactatcaacacccggatgttagcatcatcaacatgtacatgttaatagcactaacatgtgcatgtaagtaatactattctttaataataatcgggcatatcctttaaccttgcatgagatattatatatatgggagagaaaatttctctatgttattggcttttataaattattcattaactttgcgacacctttaggaatattctgatatactcctaaaaggctacatattaaatagttagaagcgtttaccatattattcttgtcaaggaaatcgccaaatttcaaatgggtataagaataataggcaacaaaacgctcatgctcgctgtatatccaaatgtatagtagagcgtgggctgttgtctttattatctatatccgggtgtttggcgatacctcttgacagataatggcagcagttcccacgctttcattttatttataggtgtcgtatggggactttcggcaccggatatacacgatgagaaatactatatctgtcttatgtgcggcaacttttctgtgcctgctctgttcttcctgttcatcaagcaggcaagtatcctatttgcaaaagctgaatgagggattccgggacactcttatagaatatgatgcccgcatcatgcctaaagatttgcttaccatctccgtcagttgttctgaaccggaagccgccttgcctttcaatttagtggtacctgcttcgcaaacaggaatcaattccactaatttagtttcacaacctaccctgcaaaactatctggtgaacaatcagggcgagatcgttttccctgtactcggcactttgaaagtaggtggaatgaccactcaggaaacctctgaactgattgtggggaaactggaacgctacttgaaagagcgtcccatcgtgactgtccggttggtaaactataagatttccgtaattggagaagtaagccgcccgggagtctataccgtaaataacgaacaggtgaatgtctttgaagctgtagcaatggcgggtgatctgaccatatacgggaagcgggataatgtacgtatcatccgcaccgtagacggcaaacaaaaacttatcaccatcaacctgaatgatgaaaacatcatttattcccccgacttctatctacggcaaaacgacatcgtctacgtggagccgaacaaggcaaagaaacagagtgccaacattggttcttccaccaatctt

SEQ ID NO: 6513 - DNA, 26053 bp, Unknown
  gut microbiota DNA sequence
accaatcatacagacactaatcaaatgcaggaacaagaaatagacctgattgaactattctacaaattgttagcacactggcggtggtttctgctggctgctgtggtagcacttgccggagcatacatttatgtacatgtagctactcccatctatcaggcgacggcttctgttgtcatcaaggattcggaaggaagcaataaggccattgatgagctatttcagaaagtcgctccttcttccctcaactctacaaatacgcagattgaagatgaaatggagatattgcgttcacgctctatcctgctgcaagtgattaatgagctgaatctgcatacgaagtacaaggttaaagatggacttttctacaatgaaaccactacacctcccatcattgcttctatggataaagcatccatggatacattgagcgggacattgctgatacaagtagagaaagcaggtgaacgttatgccgtgagtagcgccttggacgatatttgtgtaacggagactttcacaggtttccccgcttttatagaaactcctgccggacgatgcactctaagattactgcccagacatcagttttccgaggccataaagataagtatttgccgtcctattgatgccgtaaacgattattccggtcagctggtggtcaccactacctcaaagaaaacttctatcatcagtctgaccttcaaggatacggataaggatcgtgcggaagcttttcttgccaagttgatcgaagtctacaaccgggatgcaatggatgataagaataaggtgacaggaaatacactcatctttttggaagaacgtttggacagtatcagcaacgaactgggatttgtagaaaagcatctggagcaatacaaacaaaaagaacgtctgagcgatttgaaaaccaacatgactctggatctgaatacaaacaatgagtacgaaaagaagttgctggatgtggagatgcaactaaatatgactaactatatttataactatttgtcggatgataaacaccgtttttcgctattaccggtgaatacggggattgccgatacggaactggtgcaactgattaacgaatataacaaggaactgctggaacgtgaacggctgatgaacaccatgaaagcagataatccgacggtggtaaatcaggatattcgcattgatgcattgagaagaaatgtagtaagttctgtggtcggtgtgaaagacggactgagcatagcacgcactgatattctacgtaaaaccgattatttcaactcccgtatcggaaatatgccgaagcaggaaagggagttcaataacatagaccgtcaacagcaaattaaggcaaacctatatctgatgttgcttgaacggcgtgaacaggcagctatttctttggcagccacaatgaacaaagcaagagtgattgatgctcccctatctgctgacagaccgatagctccgcgaagtatgatgatttatgccggaagtctgtttctggcatgtgcaatgacggcaggagtgattttgttcggaggcattttccgtactaaaataatgtcggtagcagaagtagagagtacacaaatttctgtaatgggaatcattccgtataccaaagaaggtggtggcgttgaagaaggacaaaacggcatcatggaagaatcttttcgccgcatgagaagcaatctgcgttttcttactgaagacggtgataaaaaatgtatcctgatgacctccaccattagcggagaaggaaagagtttcatcagcatcaacctggctctgacctttgcttttttgggatgccgggtactggtagtaggtctggatatccgtcgtcccagactggcggagtatttcagaataaagagtcatgtaggtatgaccagttacctttcggacaatgagataaaaccggaagatataatcttcccgtcaggagtacatgagcaattattcgtcgcacctgccggacctatccctcctaatccggcagaactgttggaaagagcccgattgaaagaggcattcgcgtatttccgtgaacagtttgattatatcattgtggactcggctccggtgggattgattagtgatacattgagcttgagtaaagtgactgatttcacactctatgtgtgccgtatgaattatacgcacaagaatgtgttgtctgaaattgtcgagatacaacgatcagggcaactaaaccaaatatctttagtagtgaatggtggtaatctggcggaaaagaaatatggttacggatatggctacggatatagttatggttacagagatactcataaaaagcataagtaatatacacttatttttttcatctcacttttttttcttctcaatgaagatactgctccggactttcataagttaggtaaagtccggacagtattttctaaaaccaccacttcttctttttattctgttccgcagggatattgccttgcgtatagatatcccggaaggttttacgttctttaatcatctgatagataagtccccaatcgggcaatccgcccagattacggtcatcaatgaaaaggtctactttcagtttacgggagaatccacagtcctgctgcttctcttcgggataatcacgattgacagcatagaattccactcctctttctttgcaccaggcaacggcttcttccagaagttcaccttcgcgcacactccacaaaataagcctgtgctgatcttgctgcaacagttttaaagtgtctgttgcaaaaggaatttctctaccgatacggggatagcgatgttctactatagttccgtcgaaatcaactgctattgtcatagttttatgctgaaaaattacagaacaaagatacgaatcttattgaaaaaacaaagcgttctctcccttttacaataggcaaatatgaaagaaatttgcatataatttcataaaaatgtatttttgcgcttaatttttcactaacaacataatattaggatgactcaatcacccaaaaatgtatctaaagggttcactaaagccttttgggtaagcaacacggtcgaactgttcgaacgtatggcgtattatgccgtttttatcgttctcactatttatctttcttctattttaggcttcaacgaccttgaagcgagtatgatttccggtttattttccggtggtctttatcttttgcctatcttcacgggtgcttatgccgataagataggtttccggaaatccatgattgttgctttttcgctgctgtctgtcggatatctgggtttaggaattctccctaccctgctggaagctgccggtttggtggaatatggcaaagcaacccgtttcaccggactgccggatagcgatagccgctggatgatcgttcctgtgctgtttgttatcatggtgggcggatcgtttatcaaatccattatttcagcttcagtggcaaaagaaactacggaagcaaaccgcgcacgcggttattccatcttttatatgatggtgaatattggtgcatttaccggaaaaacagtgattgacccgttgcggaatgttattggagagcaggcgtatatctatatcaactatttctctgctacgatgaccatattggcattgctttccgttgttctgctctataaatctacccatacggcaggcgaaggaaaaagtatgcgtgaaatcggccaaggcttcctgcgcatcataacaaactggcgtctgctgattcttatcctgattataacgggattctggatggtgcagcaacagttatacgctacgatgcctaaatatgtaatccgtatggcgggcgaaactgccaagccgggttggatagccaatgtaaacccatttgtagtggtttgctgcgttagtttcgtgacgcgtttgatggcgaaacggtcggctattacttccatgaatatcggtatgttccttatccccttttcggctctgctgatggcatgcggtaacctgcttggaaatgatgtgataagcggaatgagcaatatcacattaatgatgatagccggtattgtgatacaggctttggcagaatgtttcatttcaccgcgttatctggagtacttttccctgcaagcgcctaagggtgaagaaggtatgtatcttggatttagccatcttcattccttcctctcctccatcttcggttttggtatcgcgggagtattgttgacaaaatactgtcccgatcctgtcctctttgagactcgtgaagcatgggaggctgccagcaccaatgcgcattatatctggtactatttcgctgctatcggtctgatatctgcactagcactgttagtatttgccaaaatcacccaatccatcgacaaaaagaagaaagccaaggtctgaatatctcattttttatgtatatttgccgtcactttgccataaaagtggcggctttttctaaattgaggagaacataatgaaagtaaaatttataagccttgcgagcggaagtagtggcaactgctattatataggcactgaaaaatacggaatacttattgacgctggtatagcggtacgtactattaagaaatcattgaaggaggtgggcatcggtatggaaacaatacgcgcggtatttgttacacacgaccacgcagaccatatcaaagctgtaggcggactgggtgagaaactgcacatccctgtctacacaactgcacgtatccacgaaggaatcaacaaaagttattgcatgacggagaagctccactcttccgttcattatctggagaaagaagaaccgatggtactggaagattttcacattgagtctttcgaagttccccatgacggtacggacaatgtgggttattgcattgaaatcgacggaaaagtattctcgttccttaccgaccttggtgaaatcacccctactgctgccaagtttatccgtaaagcgaactacctgatactggaagctaactatgatgatgaaatgctgcgtatgggtacatatccgcagtatttaaaggagcgcatcaccagccgtacaggacacatgagcaatattgcaactgccgagttcctggctgaaaatatcacggaagatctgaaatatatctggctttgtcatttgagcaaagacaataatcacccggaacttgcttacaagacggtggaatggaaattaaagagtaaaggtatattggtaggtaaagatgtgcaactctgtgctttaaagcgtagcactccttccgacttgtacgagtttgattaaaaaaagccgctttcatcgaaaaaagattttattttgcttggatgaataaaataaaaggactacttttgcacccgcaaataagaaaaacgatgcactcttagctcagctggtagagcaattgactcttaatcaatgggtccagggttcgagtccctgagggtgtacaaaggtaaggttctgaaaacaattgagtttcagaaccttttttatcgtcactggatgtgactttgctactagactaaaagaatcttgaaaatctcccgtatgtagatgcaacaacaggaggcatttatctgtttttcattatatagtttcactctcatcatgaataattggaagaaaaaatttatcataatatggagcgggcaactattttctatattaagtagttccatcgctcagttctctattgtcttatggattagtctcaaaacgggttctgcggaagttttgtcctttgccatgattgccgccttgttgccgcaagccttgttaggggcatttgcaggcgtatatgtggatcgctggaaccggaaatggactatgataggtgcagatagtttcgttgcactctgttccggtatcatcgctttgttattttacctggatattgtggaattgtggcatatctatatattattggcacttcgttccattggtggttcgttccattcaccggcaatgaaatcatccattccattgctggctccggaaaaggaactgacccgtattgcggggattaaccaggctatccagtctatttgtaatatcggtggccctgcgttgggagcggttctgcttctggcattcgatatgagtgtagtcatgttattggatgtggcaggcgcaatcattgcctgcacttccctactgtttgtttacattccgaatccgaagaaggaaaatatctcagctaagagtgtcttgaacgatatgcgcgacggtttttatgtgattatgcgcaaccgaggagttagttgggtgatggttacagaaatcctgattactttctttgtgttgccgatagtcgccctgatgccgctgatgactttacatactttctccggaacagcttatcagattagtttgatagaaacacttttcggggtgggcatgttggccggaggggctttattggggatttggaatcctaagatcaggaagatactgatgatcgcgttctcttatgcggtacttggtctggcattggctatatgtggtatgttgcccggcaatgggtatgtcttttttgccatactgacggtggtacaagggcttatcgtgccatttttatccggtccctttaccgctctattgcagacgcagttcaaaccgatttatctgggacgtgtattctcgcttttcgacagtataagtttgttcccttctatcatcggtctgcttgtcacaagctttgtagctgactctctgggaataggcaacatatttatatactgtggttttgccattgtactgactgcaattttgatgatgtgtattccttctgttagaaatctggagaaagaggagatcaggaagaaaaagtaaatgaaatatgaaggtgtgtcataatgcagtactatctcaattctcctcctcccgggaggaggagtacccgtagggggaggtggtaggtgaatgcgtaagtctttagtatttaatgttatatgtttgtctaccaccccgccctttgggcacccctcctcccgggaggaggggagcttaagttactttccagttttgacacaccttcatattttatttatagtattattgcgcgtctatacctctttttttcagcatctcaaagtcttcttttctcattcctatatcatccagtggacgcggttcattatgatcattcagataaaccctcgatttctctgtatagagagggctggtgacagatagactgtcattgcgatacggagtttctattccggccagttccatcatggtctggaaaaaagaaatgctggaagatatatttttctgttggttcatcgaagcagctttctctatcccgggatactcttccctataactgtcggatgtccacagcaggaaaggtacgtgtagctgataataggacggaacgggggatgcatgaagaaacaggtgtcggccatcgtcgaagatatcttccccatggtcggacgtgtaaagcatactggcatctacttgctgctcctccaataggtggatgatacgtgccaggaaactatccgtataccgaatggaattgtcataggcattcatcaggttatctttgtatttcacttctgcatctacggggaaatccggtaagaaaaaagcggcagtttccggataacgttcccggtaattgaagtgagatccataggtatgcaatacaatgagctgtttccgatttcctttctcaagttctttttctatcaacattaacaggtcgtcatctgaagggttatattgcgaatcctgggaatcttccttgataaaatcataagtatccgcttccattccgaagaagtcgatgaaagaatggttataccgctgatttgagaagaaagctgtctggaaaccggcttctttgaaagcggtaatgatgcttttccgataataaatggaatcaaaattctgtgcagaaacaggagaaagcagcattggtacactcttgtgtgtagtattcgattccgtcagaacatggcagaaagaggtcactccttctattttagaaagttcagggttcgtatcccgatcatagtcgtaaagactccagtttagggcgcgggatgtctcgcccactaccataatataaatttcgcgcctgtcttccggatgggaaggctgggcgttaaaagtaaagttctctgatgtgcggtgatacgtccttgtttgggcattacgctggaatgcgagtgctacattgtaacacacgttggccggatacaaatccgacttcagctcataacgtttatccagtccataagcggcgcccagtgaaataaaaccgatgagcaaggtaatccatgcttttttccgttcccgacggataaattccggagataatttccgcttctttataatggagattgcagccagaatcaatgccggtatataaaggataatcacactcactaatgccggaacaagattatccagcaactccatagcttcactcgaattagtggttaccaggttcaggaacatatccacagcaataatggactgtccgaagagataaagcagtactatctggaaagctccgaagaagatgaataggaaaaggatccagaacatctttccacagtttctcgacaaagtcattaatagataatagaaagcaaatggcaacagtacattgcacacttttgccaccacaggcatcggctctgtaaaacagaggatgatattgggtactatcaggatcaacaggaacagatagaacaaatactcctgattttccaaccatttctttatgtttttaaaaagcttcattgatgttgaatataaacccggtctggccttttccaaaccctaaatctaaccttacgttcactctctttttgaactcccaccgataaccaaaaccataattagggaggatatgtttaacttcgaagccggagaattgaggaaatacggttcccgctcctgcccatacagctacgccatttcgcctccagacgtgctgacgaagctctatctgcgcatccatagcacatttatcacggtaacgcccttcgtaatagccacgcatggaataagaacttcccaatgttgccatcaatccccaaggcggattaccgtaattcagcaacgtatgaaattgccctgctaatactcctcctttccatacaggatgataatagctggtagtcagctctgtgctactgaaagcatatttattaccgaggaatgcgggactgaatcgttggtctattctcaggtaatagccactataggcatttgtgaggaaatcccgtgaatcatagagtaatgagaatccgaggcttatattggtagtccgtgctttcattccttcccacagttcgggcttttcaaaatcgtggccgtagacataatcaaagacagccatcggaccgatatagaagttgcgcgctacacgagtcatgaagtctacctttacttgtgcctggaagcggtcgtaatcactttcattatcgtcattagaaccgttttcatatccttttccccaatacaagctggggaacgaatagaaataaagattgtaattcagacggtatttgtcttgtggaaagaggtggtttccacgtacacccaacaaatagaaacctaccgtagatacatcaccgtataaagatacattagatggcggaaggatggtgtcattcaggtctgtacgatataatccggcggctaccagaccgataccgaacttggtatcactggagtaatgaggccctccgataacgctgaagtcaaacttcttgttttttttctctttattggcatcattaaaatagtccaggaatttcttgaagaaacttttcttttgtggtaaagtgtcagttacagatacagaagattcgactgaaacatctgttcctgtggggccttgtgcccatatatcggtggctattatcaatagcagcaccggtaatatccatctcgttagtttagcgtccatgattatacctgtagaaaactacgtcggcaaatttagttttattttaaccatataacaacaattttgtgaagtgttttgttcaaacttcttccattaagaaaaaagggggaagaaataagaatttcagaactttattcccgttttaacgttattcttttagaacgaataacgaacttcattatgaaaacaaaaatggatattcccgataaagagggacgaaaacgacttgtaattgtgggtggtggcttcggtggattgaagttggcacgaaaattgagaagtgataaattccagatagtgttattggacaagaataatcatcatattttccaacccctactctatcaggtagcaaccgccggtattgaaccgagtgcaatttcttttccttaccgcaagatatttaaaaagagaaaacatttccatatacgtatttgtgaggcgcaacgggtaattcccgaagataatattctggagacttccatcggagctctttcatacgattatctggttgtctctaccggatgtcgtaccaactattttggtaacgatgggctatctcaacggacaatggccctgaagaacactgcggaagctttgtttaatcgcaaccagatactggaaagttttgaaaaagcacagaataccagcaatttggagaaaagaaaacgtctcatgacatttgtcatcgtaggtggtggcgctacgggtatagaactttccggtgcattggcagaaatgaagaaatttgtgcttccgcaagactatcccgatcttgatatgaacctgatgcgcattattcttgtggatggtgctccccgcctgctttccgctttctctgaaaaatcttcggaagaagtggcaaattacttattaaaacgtgacgtggagatcataaccagtgtgcaggttacgaattatgagaatggaacgatgactctgagtgataacagtaccttggaaacgatgaacgtcttttgggttgcaggtgtacgtgccaacagcatagagggacttacaaaagaagcctatggccccggtaaccgcctccttgttgatctctacaactgtgttcagggttataacaatatttttgccatcggtgatactgcacttatgatttccaaagaatacccgaagggacatccacaagtagttcaaccagccattcagcaagcccgtaatctgatccagaatctggatagaaaggaacgggggcttgaaatgcaaccttttgtttatcacaacaaaggttctatggctaccataggacgcaatcacgcagtggtggaactgaaaaaccttcgtttcggtggtttccccgcgtgggcagtatggttattcatccacttaatgagtattgtcggtgtaaagaaccgtctgtttatctttgtagactggatgtggagttactttacatacgatccttctttgcgggtaattataaaacctttgcgtagagataaaccataatgccttatttttcgttatattaaatataaatgtttaaacgaacgactatgctttacaaatttttattcccgtctaaaccggatggagcagcaacatctgctatattattaatagtgagaattatatttggtgtgttactaatgaaccatggtatcgagaagtggtccaattatcaggagttatccgctgtatttcccgatccgctgggtgtgggcagtcctctttccctgggattagccatattcggtgaattggcttgttctatggcatttatcattggtttcctttaccgtctggctatgctaccgatgatatttacaatggggatggcattctttgttattcacggaaacgatccgtttgcggtcaaagaactggctttcatatatctggtggtatacgtactgatgtatattatcggtcctggaaagtttgccgtagaccactggctgggtaaggctttgactcccaaaaagccttaattttaccggggctgtttaactgaaaaattgtttttgtctcttatttaagtgtatttttcacaaaaagcacttatatttgcccgaagaaaaagagcaaagagttaaatcaataaactcagtaaaacaaaagaaagtaattatgaaaaagagtaatttgaatttggctgcaaccgtgatgatttgtggcgcatttcttttcagttcttgtatcggttctttcggcctgcacagtaaattggtaaattggaaccaaagtatcggtacaaagtttgttaatgagcttgtttatctggcttgcaacattatccccgtatatcctgtttgctatctggcagatgcgttggtaatcaactccattgaattctggagcggttccaatccgatggctaacgtgggtgatgtgaagaaagtaaaaggtgaaaacggaaactatctcgtaaaaacattggagaacggttactctatcacaaaagaaggtgaaaccactgctatggagctggtttacgacaaagaattgaacacttggaatgttgttgcagaaggtgttagcactgaattgctgcaaatgaacggtgacggtactgcacagatgtatctgccgaatggtgaagcaatgaatgtgacattggatgcgcaaggcgtagctgctgctcgtcaggcaacgatgatcaacacttattacgctgcacgctaattaagaaaagaatttgaatatgcgggcggatgagcaatcattcgcccgttgctttttatacccttcccgattttttagaatgggtaacctactgcaaagtggaaagcaaagtcacgtccgaagtcaggacgcagaatgggataacgatcctttcccttttcagggttaatagccttcataccaccatcaaagcgaagtacaaagaaatccagatccagacgtaatcccacaccgtaagctacggctatttgcttataaaactggtcgaacttgaatttaccccccggctgatcctgatattcgcgaatcgtccagatatttcccgcatctacaaacaaagcacctctaaatttccagaataaacgtgtgcggtattctatactggcatccagcttgatgtcacccgactggttcatgaagttacctttttcatcggagaaagtaccgggaccaagactacgtaccgaccatccgcgtacactgtttgctccacccgagaaataacgtttctcgaaaggaatcatccgtgcgtttccgtaagggatggcaatacctcccccaatatgaaatgcaatggagttacggttatcgatgacgatatttttggcaaagtccaggtcaccttttatatattgtgcatacggaatattcaagatagtgtattcatcctgatcattcttctttaaattgctcattttagaaagcacatacaggagatttcccgcagactcaaagttaaaacgtatactataagaattaccaatcactgcattgttcatcaatgcttgtcctgcgctgttatagatatagctgtacccggtacgaacaatcaaacggtctttatagttatactccagcagatagttcttctcatcgttcaggaaattgtttttaaactcgggttctatccacggcatatacaaatagttgatgtccagcaagtctatacgatgctgcgaacgctgtcgctgcaaaccccatttataactccatgaaccggatgcaacgatgcgtgtaaactcgggacgcatctgataattatattgcagcccgaattctgtggttgcccttatcttccgcttaaagtcattggatatgaacggaaacatgaagcggggaaagtttatactggtttccacaccgagttccgtatagttgtcattcttataccctaaaccggaaacagcttcgtaagctccgcgaagcttaaccaagaaagtttcggaacctctgaatacattgcgattctgaaaagatacagatgccgcggcacccaaatcacccgcagagttcgttccctccagttcgaaagatacagactgatgtttgttcttcgtcagcataacataagcattcagctttgcgctatcatttacctgtgtttcgaagaaacgtacattggtatatttcaataccggcagacgtccgaagttggagtaagtgcgctgcacatcctgttcattgtaaagatctcccggagttatccgcagattatcagtcaaaactttaggacgcaggtacaatttatctttataatatatgggaacccctttatagtgtatcgaatcattgatttccacactactgagagctgaagattgcagcacgtcatagtccgcaatgaaattcactttattaatcgtatactgtggatgatcctgcaattcagcaccggaatgctgtctgtatcgtgccagatgcaaggttagatccacctgataagtgccacgtaccgtatccgccgtataagaaatataatctttattgaatttataataaccgttgcgaagcaggttacccgtgatccgttggcgttcactgtccagtatgttggcattgaagtacataccttcggataaataggtcgatgcagaatctttctgcatatattcccagattttttcatcctgaacatcatatttcaggctacggacaatatacggctctccggtgtttactttataagccagttttacctttttcttcttgattttgggaatgtactctacggtagcacccatgtaccccatattctgaacggctttcgtcatttcctcccgtgaacgttcggtttcttccttactatagataacgggggcatctcccagcctgcgtaaagcccggttcacccaacgggtagaatcacgtcccgaccagttgtaaacatacaactgggttttaattagactaaaccatttggagttcggattttgccgcacatatatggacaaattagaaggcttcacatttttattatcagtatgtatgcgcacttcatccagcaagtatgaaccatccggcacatatttggtggtcgagcaggaagctaatgtaagtatggcagcagtaagtagtgcgtagtggaagcctttcttcataccagaattaataaattgcgcataattgactacaaatataaatctattttttcttttccgaaataaaaaaccggatgaagtgtgtttcgttttttgattatatagaaataatcacgtacttttgccaaacgataacatttaagctatggcactgagcaaaaaccgcatcaaatatatccactcgttggagctgaagaagaatcgtaaaacagaaaaagtctttctggcagaggggcctaaactggtaggtgatttgttaggacattttccctgccgctttctggcggctacgcccgaatggttatcgcaacatcccaagcttccggtagaagacgtttcggaagtgtctgatgaagacctttcccgtgccagcttattgaaaactccccaacaggtacttgctgtattcgagcagccggaatatgaaacggatgcttccgttatcagccattcactctgcttggcgctggacgatgtgcaagatccgggaaatctgggtactatcattcgtctggcagactggtttggaatagagcatatcttctgttccccgaacaccgtggatgtatataatccaaagacggttcaagccaccatgggaggcattgcccgtgtaaaactgcactatactcccctgcccgacctcattcaaagcctgaaggatatacctgtttacggtactttcctcgacggagaaaatatgtacacacagaagttatcatccaacggattgattgtgatgggcaatgaaggcaacggaatcgggaaagaagtggagcaactcataaaccgcaaactttatattcccaattatcccgcagagagggaaacgtccgagtcactgaatgtggcaattgctaccgcagtagtctgtgccgagttccgccgacaggcagcatcgttgtaaaattgaaaggataaagtagataagcatttattccggaaggagacgtttcttggcagaaaacttccggaagttcctgtaatacctcatttgctttctgaaatataccggagtacccttcggaaatatcttcttcattattcaataaagcaataactccgggaaaccattccactccttcaatctcctctgtcaagggaaaggcggacacgacttgtccttcttccacccctaccacatattgtttgagataaccatgtccgggcagaaaaataaagtgtgaagcaaatcgtttgatcatcagggattatctttacggaattgaacatgttccggattgtccaacttctttagtgtaggttccgaagacggacgaggacgggcagcatcacgtctgcgcggattatcatttatcttctcttccacaggtttcagttcctctttcttgagttcctgaggttctattttctctgtcttaacagaatctttctgaatagaatcattcttagcaaacgacagtgtatccgtagcatgataacgcatcagtgaaatgcggtcggtcagcaatgtacgggtagcctgtgctgcaggataatagatatacccacgtatttcccggatttctcccaacgtatcggcaaagagggaaaccgtttccatacccgatttatatactttctgaatatcactgattatgctgtccttatagacaatctgcatagccatgacgggagcatataaggaatctggcgcaccgttgtggaagcggaaacgaacgttccaccgcaaagtatcgcggtctttaaagttggtatctgagggtaatacgaaagtaatcttgttgtccatcggcatgcctgtcagctgatagatacgttgccatgcccatacatcaatgctgtcacccggaagactttccttcggcttattgtcacgtatggcaattaaatgattgacaacatcccgctccgctttcagccttgcgtttactttctcgtaaatcttggtgagtacttccggattacgtgtgaaccaaaccattgaagagtcaaattcggcttgcgtaatgccatgctttttaaacaccgattcaatgtacaacacccttttatagccatcggtataaggaacttcttcccccatagcctttgctatatggtagtcataaagcacattttccatcttagcatccgatataaccaccttcggtcttttcacctgacaggctgtcaaacaagatgctaacaggaatatgctaaaccattgaattcgacgcagacctttcatgatttctttattgcatgataagagtcattcaaatatttgctgtaaaataataacagggcaataataccacaactgatagcggcatcggcaaggttgaatatcgggctgaagaatatgaaatgatccccacctaccaacggcatccattgaggccagttcgtatcaatgatagggaaatagaacatatccaccacctttccgtagaacaaaggagcatatcctccgccttccggcaggaatgaagctatctgcgaatgtgtactctcattgaacaacacaccatagaacacactatcgatgatgttacccaacgctcctgtaagaataagagatacgcatacgatatagcctgtcttcaagccctgcttgattattctcgttaaataccaccctatcgctcctactgcaacaatacggaacaaggtaaggaataacttaccgaatatctccataccgaacgccataccgttattctcggtaaagtaaatataaaaccatgtaggcggttctgcatctaccatgcccagtttctcataaagccattttatggcgttttcgctctgatgccaatacatgtgagtcttgacatagatcttgattatctggtcagcaattaataccgagaaaataacgagcagcgcaatgcgacctttcgtgaggtatttgttcatccttacttcttaccgttatttttggcctcaatgctcagtgtagcatggggcacagcacgtaaacgttcggcaggaatcaacttacctgtttcacggcaaataccatacgttttgttctcgatgcgtaccaatgcggcctgcaaaccctggataaacttcaactgacgttgagccaggcgtgtcgtttcttctttggacaaggtgttggcaccttcttctaaaactttgtacgtaggagacgtatcgtcggtatcattaccatcggctccggttaaactggctttcagcaattcataatcgcgttgtgccaattctaacttctcattaataatggtgcggaattcttccaattcagcatccgagtatcttgttttttctgccataactttacgtgttaaatcgttagtattattattcttttacaacgcttacgtacagggagaaatcgtcaaagttaagttccgtgccgttttccacctcatcggtcagcgtcagtgaggttcctaaaacctggttacaaatatagtctttatattcgtttaccgcatcatctgtttgctgattttttgataatgtaatctttattttgtctgttatctccaaaccgcttgacttgcgaatattttgaatacgattaaccagttcacgggcaataccttcgcggcgaagctcttctgttacggttacatccagggcaacagtcagctttccttcgttggcaaccagccatcccggaatgtcttcgctgaagatttctacgtcagtagcttccacaagcacatccgtaccatccagttgcaaagtataagaaccgttcttttccagttcggcgatagcttcctgtgacatttctgctacagcggcagctacggctttcatctgtttgccgaatttcggtcccatcttcttgaagtcacatttcactttcttcaccagcacaccggcggcaccgtctacgaacttgatatccttcacattcacttcgctcatgataagtgcctttactgcttcgatatgggcacgttgttcctcgtccactaccggtatcatgatacattgcagcggttggcgtactttgatgttcaccttgcggcgcaaagccaataccatagaagttacgtcttgtgccatttgcatgcggacttccagttccttgtctatcatgtcctccttatattcggggaatttagccaggtgtacggataccacgttgtcgcgtcccgttgcagtaaccaagtccatatagagcttgtctgcatagaacggagcgatgggcgacatcaatttggcaacggtttccagacaagtgtacagagtctggtatgcggataacttatcctgcgtaaattcaccaccccagaaacgtttacggttcagacgaacgtaccagttggagaggttgtcgtttacgaagtcggatatcagacgtccggcctttgtcggctcgtattcgctatagcaagtatccacttctttcaccagtgtattcagcacagagagtatccaacggtcgatttcagggcgttcagccatcggcacgtcagcttccttgtattcgaatccgtctacattggcgtagagggagaagaaagaatacgtattatataatgtaccgaagaatttacgacgaacttcttcgatgccgtctacgtcgaatttcaggttatcccacggagaagaattggtgatcatgtaccaacgtaaggggtcggacccgtatttctcgatagttgagaaaggatctacaccattgcccagacgcttggacatcttgttaccattcttgtcaagtaccaatccgttagagataacagccttgtaagagatggtatcgaataccattgaagcgattgcatggagcgtaaagaaccagccgcgagtctgatccacaccttcggcaataaagtcggcggggtaaacctgatggctatccagcaattctttgttctcgaacggatagtggatttgtgcatacggcatggcaccggaatcgaaccatacgtctatcaagtccgcttcacgcttcatgggcttgccgtctttggatacgaggatgatatcatccacatacggacggtgcaagtctatcttatcataattttctccattgtactcaccgggtacgaaacctttatccttataaggattagacttcatgaatccggcagctacggatttctctatttcattataaagctcttcaaccgaaccgatgcagatttcctcgctgttgtcttccgtgcgccagataggcagcggagtaccccagtaacgtgaacggctcagattccagtcattcagattttccagccacttgccaaaacgtcccgtaccggtgctttccggtttccagttgatcgtcttgttcagctctatcatgcggtctttgcaagcggtagagcgaatgaaccagctatccaacggataatacaataccggtttgtccgtacgccagcagtgcgggtaattgtgcacatgcttctctatcttgaacgcctggttgttggctttcatcatcatgcagagacttacgtcgagactttcgtcctgatctgtcagattcgggtcgtaagcgttcttcacgaaacggcctgcatattccttatataaatctacgtttacgcgctctttcacgaagttctcatccagttcgtccaatttatagaacttaccggtcaggtccaccatcgggcggagttcacctttcttattgatgagttgcaacggcggaacgccggcggctttcgctacctgggcatcgtcggcaccgaatgtcggagcgatatgtacgatacctgtaccgtcttccgtagtcacatagtcacctgagattacgcggaatgcaccttcacccggattcacccaaggtatcagttgctcatattccatacctacaagttccggacctttatattctcctacaattttgaacggtatcagcttatctcccggtttgtaatcttccagggcgatgtcttccgctttcttattgaagtgcgtgtagagcaaagctttggcaagtacaacggtgattttctctccggtgtatccgttgtagctttgtacggctacataatctatcttcgggcctacgcaaagcgcggtattcgaaggcaatgtccacggagtcgtggtccatgctaagaagtacggagttccccactctgccatttccggcttcgggttcttcatcttaaattgtgccacacaagtcacatccttcacgtcgcggtagcaaccgggctggttcagttcgtgtgagctcagtcctgttccggcagcgggagaatacggctgtatggtgtatcctttataaagatacccttttgtatagagttgcttcaacagccaccacaaagtttcgatgtagcggttgtcgtaagtgatataaggatcggtcatgtctacccaataccccatcttgtgagtcagatcttcccattctttggtgaacttcatcacgtctttgcggcaggcagcgttatagtcggctacggaaatcgttttaccgatatcttccttggtgatacccattgctttttccacacccagttccacaggaagtccgtgtgtgtcccagccggctttacgtttcaccaggaaacccttcatggttttgtaacggcagaaaatatctttgatggagcgagccattacgtggtgaatgcccggcataccgttggcagagggcggtccttcataaaaaacgaaagaaggacagccttcacgttctgtcatactcttggcgaaaacctggttctcgtcccatttcttcaacacttccgcgtttacctttgagaggtcgaactgcgaatattcggcaaacttcttacccatcttatttgcaatttaactatttacaatttaacgattaaggaggcgctttgagacgtgctaaagcgaccctccttattttaagggtgcaaagttacaaaaaagttagagaaaagatattattgaatagaaaaaaacatatctaattggaatacggctcttcaaagaagtgttattcacaaatctttttgttatttttgcctgtcataattgattattcacccaaacaaaacatcaaaaacaatagtatggacaaagatctaaaaaaggttgtggtgcttctggcacaccccaacatggaaaactcacaagccaataaagccctgcttgatgccataaaggatatagaagatgtggctatatttaatctatatgagatgttagagcaagatatcctcaatatggatgcatggagccggattatatctcatgccaatgcagtggtatatcagtttccattttattggatgtcggcaccatctttattaaagaaatggcaggacgggatatttacctatttggcaaaaactccggcagtagctggtaagcctttattggtggttaccactaccggttctgaatttgatgcgtaccggagtggagggagaaatcgcttcacggtggatgaacttttgcgtccttatcagggtggtgctgtgcatgcagggatgatatggcagactcctttcgtggtgtatggtatgggaacacccgatgcggaaaagaatattgctctggcagcggatctttataaaaaacgggtgatggcacttatcgggaaagataaatcggaagatagctggtaaaatgtaaagtatcagtcaaaacacttgattttgcctttacgatgttgtatctttgtagaagctttaagctgagttttattgtaaacctaaacctttagtaaaatggcaaaagttagtctttctttttcagaagcctttaaacagtgcattaatttgacagatatcttatgtgagacagcctgcctgccggataaacatgggtggttcgctcgttggcaaattaaatagattatagttatttcagatgttcgacatttggaataataataggcaaaaaagaagataaggtggtatttcctcacaaggatttgccaccttttttgttgatttatatttggggtaggatttaaagctcatttttgcgctgttaataaacgttggatacgttcttaaaaaacgttccggttattctttaaaaacgttgtttgcagttattagtgaattggtttaaatgttactattttagaatattgccacaactcaatcaagtcattcaaaagcagtcatcaaatcacgaaatattttaaaggatacaaaatttctctttcctacaatatagcaacgggattaaatatatagcaacctcttattgcagacttattctttcacgagcattacaaaaaagataagacatataacaagaggttattatggaaaggtatcaatatagaatgtacacgacattcaaatatagcttttatgattatctatcgcttgatggaaggagcttttgttgatctaccataattcatttcccaccgtttttgaacgttccaactccaacaatcctttttttgcatcaagaccgcccccataacctgttaatttatggttactaccgatcacacgatggcaaggtacgaatatagagatgggattagtagcatttgctgatgctacggcacgcaccgctttcggattacggatgcgacgggcaagttcaccgtaggatatggttgttccgtatggtattttcatcagctctccccatacagtacattgaaattccgacccggtaaaaacaaccggaatatcaaatattttgcgatagccagcaaaatatgcatcgagttcttcaatcgcccgttggatgatttcggaagttccctcttcgtacttcgcattcagatgtcgctgtatgcgccggtctattgtatagcgacgtttctctaccgcccaatcgcaaatacacagtttgtcaccgtaagaacctacaatcatgtcacccacaggcgactgataacgtgtaatttttatagtttccatattattgtttttatagtcatgatattcttctttcatacatattttgcacggtctatacccagtttgtaaggcatcattgagagtgtcataaaacacgatgttcttttccaagggttttgctggacaatccggcgtacaaacaatctttgttgttttgacggcaacgaaaaatttataacgataacttttatcgcgatttcttaccgcttttattttctcttctatttccattatttttattgctaaccgatgtatagtctttcattccatctatcgcgcctcctgccacagcccaaaaataaagacttgctacggaagcgtaaggcgaaaagcgttttttataccgggtgaacaactgtttatttattactctgtggtgatagaccatgcgcatgcctcgtaagagtgcgagatctccaaaactgaatatattgcggcgttgcatggaaaataacataagcatttcggcagtccatacacctataccatcaagttctacaagtttggtacaaacatcttcatccggcattgtcctaagagcttcgatttcgaattcacccgataatactttttgcgctgccgatttgatgtaagccgcctttttgaacgtaatgccgaaccgctgtagctcttcatcgctgagactgtcaataacatggggagttatctcgccgagagcagtcaccatcttttcccagattgttttgtgcgcctttgtcgaaatctgttgccccacgatggaattgatcaaagccgcaaacaagtcgggaatgactttccgttctattggaccaactttgtctatcacttcagcaagcctcttatctcgttttttcagataagaaatttccgcttcgccatagatgaaaatattataatctgccattccccagcttatgacgaaaatattcgttagaatctactggagcctcattgcggtagcagtcatcatattcccttatgacagatgcaacggttatccgataactctcaaaaagtttctcacgtccttctaactggctcatgcgatggttaagttcattacgccatttttcaacggcttcttcactttcccatacattcaatgacaacaacttgctttctgcattcaaactgctgaatcgttcggaacggataaagcccttcgcgtttgaaagcaatggttttaattgagaggcaagttcaagataacgttctttaccctctgcggtgggcgttacttcgaaaagtacgaccactttctgtttgtggctttctaagttttctatcatttgatttctatatctttagttgttgttatcttatggttcttctacgattattgtcgctgtttttctggcgttcttcaaatcaccggcaataatgtgtttcaatagtttttcgtgagaagtctgtgaatttataaaacaatctgtgccgttgtaaatgcgattgaactccgaaagcagatgagtggctgcggaacgataaatgtcagccagtattcggttgtgagcggcatcggcaatggcaatatgaaaattcaagtcggcttcgatgcattcttccaacaagcctttttccgcatttacttttcttttttcaagtgaagctcgcattcgttctatatctttttctgttcttcgcgccacagctttctccacgattgcaatatccagtatttttctaacttcgtccagttccgttcgatctgcggtgctcatttttatgttgacatcatcattattcgatggaacagctacaaacgttcccgaaccttgttggactcggacaactcccatgtttaccaacagttttaccgcttcccgaacgcttgacctgccaactccgaaagttttcatcaactccggttcggttggaagtttatccccaaccctataggtcccttccgtaatctgttgcttcaatgtctcggcaatcatatctgccaaagacttcttttgtataatcataatgcttgttttattagtcatatcatctgatgatttgcaaaagtagatatttttatatagagagcaaaataattaatgataaattgtttggcaattggtatttgattaaaatctaaaataaacacatagcgaaaaagtaaatttgggtaaaacgtagcgaattagctgatacagcgttcgttacgctttgtttttctatgggacagagccaacgaaataccacctcgaagccaaacagcgcagaagttcagttaccacctcattacccccgtaacgggtgtgaatttcttgctaaatggttctgtttctgcgatttgcgtaattttgcatagcagtcggtaactcactaataactaattttgtaaccaaaaaaaggagtgagttatgc

SEQ ID NO: 6514 - DNA, 1401 bp, Unknown
  gut microbiota DNA sequence
ttactcaatgttataaagtagaaagataaaatcactccactccatgtgttgtatgaatgaatctcttattagcctccttcaaccgaaataaattaaaaaacatcaatagaaacgaatagggaacaaaacatactgctctaaccaagcgccatttccagaaacgacgagggatagctaccactaatgccaataacaacaatccgaatatcacccaccacttacacgctaacatcggaaaccatattgaaaaacacacagaaaaaataaaagtaaagcctaacaataagacccgtgagaacgaagcttgctgaaataacttatcacaaaaatcccatttccgttcacggatagctggaagcaaatgatgaacaaactcaccgaagctatagtattgcgcagacaaccaacgccttctctgttgatagaaattcttagtcttctgtattttttcatccagcacataggtatctggcaagtaatgaaagaaaatacgatgataaagcaatttcatttccagaactctgtcgaagcctccgactgaagtattactcatcatcgctttatagaacaaagaatactcaaaagccataccggaacctatcagggctgctgacattcctaaattgacatgccccagacggaatattgaattatttatttcctcactaatggcatccaaataagccatatccgtattcaaattctttgctacacgatgagtctgtacaacttgcactttcggatctgcaaacgcattatttacctcagaaagatacgaagagttaataatattgtctgcatcgataatcaaagcaacatcatatgaattctcccctagatattcaagagcagttttcagagatttagtattcgtgcttttttcaaaatccacttgaagtaacttaataggcaatgcacgcaatttctcattcgttgaagactgcatatgatctgaaattacaaccacatcatacttattacttggataattctgcgccaaacaagcttgtacagtatccataataacagcgtcttctctatatgccgctatcaataaagcaaatcgtttgcattctttcgcagatactgccttatcaggcttacaccggagcgatgccaaactataaactaataaatacaatacgtttattgcaaacaatacgtataagatccaatcgagtataagcagtacctgttccaaaattaaaactttatgtagataatggcacaaatatacaaaaaatgactgaaataatcaccatttcttaaaaaaagaaaatatcccattttcgtaatggaacataaaaaacttgcaggctctcatgcgacatacatatcgtctgatttcattttcatagcactgaataaaacagcttcttgcacctctgaaaaacgagaaag

SEQ ID NO: 6515 - DNA, 1115 bp, Unknown
  gut microbiota DNA sequence
ggcaggtacggaaaaagggattgaggatgtgatgttaatcaaatgatttatagggcaaagaagtaggataatgcgactgtcccgaattgcataaaaagtgtatgattggatagttacttttattttttaactatcttcgccttagaaaatcattattattgctatatgaaattcaatcaagagaaatttttgcaagatgccttccgcttgtttatgtgcatgaattatgagaaagcaagtttcacaaagttagcccatgtaacgggaatgacgggggcaggtatgtcttactattatccgaataaagaagctatatttaaggctgttgtggataagttcgtattacaaacacatagtcccgaaaataaatttaatgtaactgcaaccacactgaaagactttatagtacaatatgtagaaggtatagagcaaacaatgaaaaagctgagggtattttgtgatgataatctgactttgcaggaatgctcacgcaataactaccatttcttgatacaagcaagccgatattatccggggtttgatgcaaaaatcaatgaaatgtttgaaaaggaatatgatttatggcgacagattattacaaatgctaaggatacaggagagatatattcgggtgtggatgttgaaaagactgcatccatatttcggcagatatattggggattggcttttgaaatgtcttttacagtgggacttgatactcaaaaattattagaaaacttacaatatacatacagtctgcttgttcgatgagatttcttctattcaatacctgcattaaataaccctttgatttatatttagtatgtgggaaaaaaactttttctaatgatcattagaaaaagtttttttcatatatttgcaatgctatcagacattcaaccattagctattttatagaatgattgctaacgggtgttcatatctgaaagggagctatcatatcgactaaataaataaaattatgaaactaagggcgttgtttaaagttgtattgtttttttctttctgcatggtttgtatgacttcatgtctaaatgacgatgaaactaaggataagattgaaaacataaaaatgtatgtttctgcggaaacag

SEQ ID NO: 6516 - DNA, 133066 bp, Unknown
  gut microbiota DNA sequence
gtttatgatcttgatattaaaaaagaaggaatgaaggttagagaaaaggaaaatatggactgggctgttattccctttagcggaatagatggattcgaatatgagaaaggatatgaatatgtgcttgaagtaaagaaaataatattggctaatccgccaatggacggcagtaatcttaaatacgaattgataaaagttgtttcaaaggatagaccgacacgttaaggctattagcaatatataagtctaaaattatgtttgtcgaatttaagtcaatgataagattacaaccatgaaaagaatatatcatctttttttagtattgctcattctttgttgcacacagattttgtttgcccaaaataatgttgatatgctgttcacgtctgtaagcgaagggttggcggggcatccgtcggaacttgtgtacctgcaaacaaacaagggtatctatgaaacaggggaagatttgtggttcaaagcctacgggctggatgcgcagtctttcggattgtctgaccgcagcaaaacgctgtacctgcaaatgatggacgctaaagacagtgtggtatggcgggagaaatatcctatcgagaacgggattgcggacggtcacgtgtacatggatgaaaagctggtggaagggaatttttctctggaagcatatacccggcactcgttttttaatgacacgacggaaatgctggcggcacgaaatatcaaggtggttaagaatatcgcccatgacagcggacaagcggagaaaagaaaaaaaagggaattaagattcgacctttttcccgaaggtggaaatttggttgccgggttaccttcccgtttggcttttaaggcaacggacggcaacggttatccggtagatgtggaaggaacgttgtatatagatgaaaatcctgccacaacgttcaaaagcagccatgacgggatggggctcttatcttttactccttccgtcggcaggaattaccggatagaactgaaagatggaaagagttactctctaccagagatttattcacaaggtatgtcattccagttattgaagcacaataaggaatggatggagtttgtgatttcccaaacagaaggggtgcctgaacaggacgtttatctgttggggcaaatgcggggagtagtctgctgcgtggcaaaagggaagttgaagaataacctgagaataaagattcctgcaatggaatttccatatcaggggattgcggaatttacattgtttgacggtacaatgcagcccatagcggaacgtttggtatatgtccacccggaaaagagactgaatatcagtatcgaactggacaaggacaattatgtacttcgtgaaaaggctacgctgaaaataaaggtgacggatgatggtggtaagccgatacaggcaaatctgggtatcagcgtattcgacaaaatatatgtgaatccggctgatcctgcaaatatccttacacattgctatcttacctcccagatacgggggattatccataatccggcttattatttcaatgaagagaataaagaccggatggaagcaatggatttattgctgttgacacaaggttggaggcggtatgtgtggaggtttggacgttcaccatatcatggcgggatattcctgacggatgaaatattgggtactcaaacggtaaaaagcaagaagaaaagcaaggaaacacaaagcacggagcaactgattctggtgtcgggtgcggaaggaaaatcggcgtttgtctgggctgattcgacgggatgcttcaaagtcggtacaaatatgatgaaggagattcgagggggatatgtgtatctgaaaccgatgttatcaaaagagtttaaaccgaaactggaaataatagattattttccgctgatagatagtatcagaaaaaacaagccgtcctgttatccgatcatggatttatcgcaagcaataaagcagcaggttcttgatatgccggtggtgagcaatgacagcacaatcctactggatgaagtggttgttacccgaaaagctcgcaaaccgttccgtgataagttcatggggaggttggatagtttggcacaagcaaatttaggaagtgcttatgtctgtgggtgtggttatttgcagaactacaaaccgggatatgatgcccatccttactggaagccgtgcagcatttccgctgataaaagaagcaagccgattgagggggaaaaatattatatagttaaatttaaacatttaggtggtaacgctttttctgttgaagatgaacaattagttacttatcatggtgaaacctattcggaagaagagttattgcacatgaataacctttaccgcaccaaaggttactatgctgcccgtgagttctaccagccggatgaaatagatatgcagctatctacgccggatgcccggaatactctactgtggcaaccttctattgatactgacgagaaaggcgaagcgactatttcattctattgctcggatattaataccgagttcataggtgtagtggagggaacggacggagcgggattgcttggaacaggaaagtgtgagtttagggtggttaggaatataactaattaagagtaaaagggttatacaaccatccaaccccttttttatagaagatgtagaacaatcaaaacaacttttgtatggggcaacgtagtttaagaaagtatttgtacgatattccgaagaatatgcgcagttttattgatgattttgtgggagaacataaagctataaaagaataacagaatcatttaaaaaactaaatgattctgttattcttttaattatatatcaatgtccttattctccttctttttctccttcagcctccggagccttatctatcaactccaggaattggtcgagtcgaggtgtaacaatgatttgtgtacggcggttgcgctgtttgcccagttcggaatcattgtctgtgataggattgtactcaccacgtccggcagcagaaaggcgtttagggtcaacaccatatttattctgcaattcttgtactacagatgaggcacgcagggcactcaaatcccagttattgcggatattggtacgtgagatgggtacgttgtctgtattaccctctaccagtacttcgtaatctttgtagtcggtgataatcttggcaatcttgctcaacgtttcgccggcgcgttcgttgatttcgtaactgccgctcttgtagagcatattgtctgctaaagagatgtaaaccacacctttcagtactttcacatctacttctttcaattcctcgcggctcagggagcgggtcagattgttggttagcatgacgttcagggagtccgatttactcttggcatccactaattgcttgatgtagcggttggaggcattgatttcatctacgagtttggagatgttgatattcccttgcgagttctgctggaggctcttgtcgagcgatccttgcagggtagcgtaactgttacgcaattcctgattattttttcgggcttcgcttagacgatcctccaagcttttagattgtgtacggtattcggcaagctggatttgtgcgtcctgatatgacttgtcgagagctgacttttcgtcttttagtttgttataatctgtttgaagattcacaaattccttcttggtcacacatcccgtcaggaatagagttgcgaccaacagaaaggatgcagctaattttgtacgtttcataaatctttctttattaaatgtttactgggcgcaaagataagaaaatccccgtactccggttgcggagacggggatatattatttgttttataggtactttatgaaattatgcgttcagagcctgttcaatatctgcgatgatatcgtctacgttttcgatacctaccgataaacggattaggtcgggacgcactccggcttccagtaactgctcatccgataactgacgatgggtatggctggcagggtgcagcacacaggtacgtgcatcggcaacatgtgttacgatagcaaccaattgcagtgagtccatgaacttgatggaaacctcgcgaccacctttcaatccgaaggagataacaccgcaagaaccgttcggcatatacttttgtgccaactcatagtatttattgtcgggaaggccacaatagttcacccaagctactttgtcatttttagaaaggtattcggcaactgcctgtgcatttttacagtgttgcggcatacgcaggtgcagagtttccagaccgagattcagtaggaaagagttctgcggagactggatgctgccgaggtcacgcatcaactgggcagtagccttagtgatataagccatcttaccgaaagcttttgtataagtcagtccgtggtatgactcatccggtgtgcacaatccggggaatttgtcagcgtgtgcatcccagtcgaacttgccgctgtctacaatacaaccacctacgctggtggcatgaccatccatatatttggtcgtagagtgtactacgatatcagcaccccattcaaacgggcggcagttgataggagtcgggaacgtattgtctacaatcaaaggcacgccgtgactatgggcaatgcgggcaaatttttcaatatccaatacttccagtgacgggttggaaatggtttcaccgaacaatgctttcgtattcgggcggaaagctgcggagatttcttcttcgctggcatccggactaacgaaagtaacttcgatacccaatttcttcatagtcaccccgaagagattgaatgtaccaccatagatagcggacgaacaaacgaagtgatcgcctgcctggcagatattaaatatagcatagaaattggcagcttgtccgctggacgtcagcataccggcaacaccgccttcaagagcagctatcttggcggcaacagcgtcgttggtagggttttgcaagcgagtatagaaataaccgctctcttcaagatcgaaaaggcgtgccatttgctcgctggtttcatatttgaaagtggtgctttgataaatggggagtacacggggctcgcccttcttaggagtccatcctgcttgtacgcagagggtttccggtttaaattgctttgccataatgctatttgtttttatagttttttatcaattaacgcatttgtggacgcaaaagtagagaaaataattgtatttttgtccacaagatgaataaatggaaaatgaaacagttattttgctttcttattttgcttttttgtatgtcattctcttacgaagcgttggcccaggaagagcgggctacgccgaaaagcggtgaggggatatctggttttctacagcgtaacgggcgtaccggaaaagcgtactatcaggagttcctggaactgaataagaaacaattgcgaggtaaagaggagttgcggctgggagtgaaatatttgcttccacctctgaaaaaggggagtggcaatacggctgcttcatccaattcatctgcttcaaactcttctgcttcaaattcttctgcccgttccggcaacaaaacaattcgtgaacctcttttcggaaaaagccttgctgaagttaaagtgacgggaaaccgcctcaaaggtgcgtgtttctacgtggtgagtgggcatggtggccctgatcccggtgctattggcagggtaggaagcgtggaactgcatgaggatgaatatgcctatgatgtcgctctccgtcttgcccggaatctgatggaggaaggcgctaaggtttatattattattcaggatgccaaagacggtatccgtgacgatcaataccttaataatagtaaacgcgaaacttgtatgggtgctcctattcctctgaaccaggttgcccgccttcgccagcgttgtgagaaaataaatgcgctctatcagaaagaccgcaagagttatacgtattgccgttccatcttcttgcatgtagatagccgtagtaaaagtcaccagacggatgtattcttctatcatgctcccaaaagtgtgaatggtaaacggttggcaactacaatgaagaatactttcgaatctaaatacgaccgccaccaacctaaccgtggcttttcgggaactgtcagcccacgcaatttgtatgtgctggccaattccagtcctgctggagtgtttgtagagttgggtaatattcagaatactttcgaccagcgccggtttgttatgagttccaatcgtcaggcattggcgaagtggatgatggaaggtttcattactgactataagaagagcaaataattcttattttctttctgttttcttttcatgccacaccactaccgtcactgctgacagtatcagtagaatacctaaagcactgtgcaccgtgaaattttctttgaatacccagcatccgatggctacggcagtaagtggttccaaggctccgaagatggaggttagagtgggtccgatgtgtttaatagcctttaccaaagttatatttgaaatggctgttgcgggcagtgccaatccgagaatattcagccatgcatatccgtctgtggtcaggcggataccgctcgtcagacatcctcctataataaagaataaggctcccaaccccataacataggcagtcagtgctgtagatggaatgtttacagcccggctcttgcgtactccgataatgtatccaccgtaaaagaaaacggagcatatagcagcgatcaatcctatggttgtattgcctcctttaaagtcaatctctcccgatgatagcaatgctgctcctatcagcgaaatcactacagcaaacagaattgagaatgactttttttcccggaagaagaacatcatggcgagggcaacagccaatggatacatgaagtggatggttgatgctactccgctggctatgtgttggtatgcgatgaccaggctcaatgaggttgcggcacggaaaagactcaatatgaacactgttccgaaatccttccggttgatacagaatgtttcacctaaaaagatgccgaatatgattagtgtaaatgatgcgactccccaccgataggctaatacttcgaaagaagaaaaacctgaggatagcaaggatatggtgaaaaaaggtgccaatccaaatgttgaagaagaagctgccgcgtatatataaccttttatgttgtccatagttctgattgaaattatagatcgaatttgaaatccggtgcaaaagtacaaattgcaaaggtgaaaaaaactataattgagagcaaaatcgcttttatattgttattagcacaatgccggttaaatctggttggtgttcactttaaaataaaaatcttatgggaaagaatttattagtcttaagtgtatgggtaagcgtcctgatgcttgcctcatgtgtaggtagcaagaaagaaacggtgacttatactcctgaagaaatagcagatgcggggcaggtgatgaaatactacgacgcctcattggctctgttgaaaaatatggtaaaggagagggatgtaaatgcagtattgggttatatggaacaaaagacggaagtacccatgttttcatacatcatgtctcccgtcatttcgaaaaaagattctgtggaggtgatgctaccgggtgaatgcttcggtgcagatgtcagacagaacttgatacagaattatgcggaactttttcagtcgagaaatcagttctatgctaatttcaataaatacttgtttcttctgaaagaaaaaaagaccgaagggatggctgatttgctgaatgataactatgaattgagcgtggtaatgtctgaatgtaaacagaatatatttgatatattgagtccgattgcttcaaatgcccagcgggttcttctggcagaaaatcctgtgaaagagcagatcattgcgatgaaaagcatgagtacgactatgcagagcattatcaatttgtatgcccgtaagcatgttgaagataaatcccgcctggatttaaagattatggaactgcgacttcaactggatgcggcagagaaactaccggtagtaaaaggacacgaggaagaatcagagaatttcaaggatttcctgtctaaaacagaaggatttctgaaaatagtacaagatgcccgtcagaagaactcatatgctgatgaggactttgaggaaatcagtagctatggattgggtattatataagttcttttgctacacgtggcacaatcattttatggaaaggcttaataaagaagaaataagcctttcctaatgcattgtgatattgaaccacggttgttatatctatcaggtcgtttcctatcttggtaatggagacataaaacaataagtgcttatcatctttcctcatgatagcctcattttccgtatcttctattatacaatcttctgttttcaacacttttccggtttcaagccccaaaggttttaccagaatattcctgactttcattaaaaaactgagccacgccggggagtgattgaatatttttttgattagttctttgggaattatctgttctgcaggctttctggatttcaaaacgaatgtatcatgataatctgccggaagatatttgtcgataagtctttccatatctttgaataaagttgggttagttaaatgtcctgtacaaagatagtgtttccggatggaataatgggaatgtcttaatcatcatttccagaaatttgatatctttgttgcgaacagtaacttaactattatgaatactttgactttaaccccagggataagcgttcgaagattagacttatctgaatataaagaggccgcatctctttctttggaaatatatcttcagacgggtgaagaggattttgatgaacaaggattggaaactttcaaaagcttcgtcaatgataaggcgatgataaacagcttggtcatttatggtgcatttgatgaggcaagacttgtgggtgtgatggcagtcaaagatgaagggaaacatatttccctgtttttcatacgggaggcatatcaccggaaaggtataggcagaagattattcgatgcttttatcgaagagacttctgtgccggaaatgactgtaaattcctctacgtatgcagtgcctttctacaaaagtctgggatttgagcaggtaaaggaaccgcagattacgaatggactgaagtatgtgccgatgaaaagagagataaagtaatagttatatattgcggacaaagactatttgcccgcaatatataagatgattattctaccggaatgaagatttctgtcaacaaatcctccggtttcgtattgcacggatcattcagatagcgttcggcactcgactcgtctctcatcgtacattccatttcgggaatgaactttccgtaaatcgtgtcgtatacactttgcagatactcataagatcctttgtaggtaaacactgcataacgtccggcaggcaattgcttgaaaccgacatctcctttgggagttacggttacaggcatcaccatgcaaacatcggtgcgcaacttgtcggcaggcgtcactttgggatcatcgtggtacatgcaataaggggccatgtcacccatcggcagtttttcttctttgatgaattggaacaaacgcatccatgtgcctccgtaatcattcattttatagtctccgaacaggcggatataaattacatttctggcaggcacttctcttatttctttctttaactctaaatcgggtctgataattgctggtttcataattacaaagtttttattgttacgatactcattaggtgaaattccatagaactgcttgaatactttcgacagtgacgatggtgaggaatagccgatgcgataagcgatatctgcaataggcaaatccgagtaacgcaacaggcgggcggcagattctgttcgtgtccggactatgaacatcccgattggctcgcccagaaatgctttcatgatgcgatggaagtagaacggagagaaatgagaaatcttggccaacgatttcagatcaatctcttctccaagatggaggttgatgtaatctactactgcatttacgcatttctgatactcttcacgcgtggtcttcttgctatgttccataagttcttctttgaatttcacgatgcaaaaataagggtaaatagaataggggacttgtccaaagttgctataaattcaatatctttgcccccccatgattttaaagatatgaccaaagatataaaaaagaaactacaggagtgggcaaagacctatcattgtgcggattttattcaaaatgatccggtacaattcccgcatcgttaccggcagaaacaggatatagaaatcagcggtctgctgactgctattatgagtttcggcaatcgtaagcagattctgaagaaagctgatgaattacacgattgtatgggggcgtctccttatcaatatgtactttcccgtcgttgggagaaggattttcctgctgaggaaaaacgtagcttctaccggatgctttcgtatgccgatttttattcttactttgaacgcttgtatgctgcttattcccgttttgaaagtttggaagaggcacttcaattgtattccggactaccaatagagaaactctgtgcttttctggaagtatcttcccgcagtcctcagaagaagctgaatatgtttctccgctggatgatacgtaaaggaccggaagttgactttggaatttgggaaagttttgattgcagggatttaatcatccctttggatacgcatgtctgtcgtgtagcccgattgctggaacttaccgagacggaaactttttccttgaaaaatgcacaaaggataactgccgcattagcggaagtctttccggatgatccctgtttcggtgattttgctttgtttggctatggggtgaataataagtagggaatgtcccttttttactatttctccccattccttttgtctacttttgcggcaattcatgagatatatcatatatttgtcgtatgcaaacttttcgtatcgtaaaacctgctcctgcattggctccttatatccgttattattggatattacgggatgatgcttttactcctgtgtcggaacggacattgcctgttggctgtatgcaattggtatttcataagggtaggcaattagtatcattgcaaaattcacaattacaaccacaatcttttatttgcggtcagtctttcggcttttccgacgttatgtcgacgggaatgattgaaatgataacagtagttttccagccctatgcggcaaagactttcctgcgaatcccgctgcatcttttcttcggacagaatatctctacggatgaagtggaagatacggaactctctgatttatcccggagaatcgtggatactccggataatgaccaatgcatccgcctgattgaagacttcttcttccaccgtttggtttcctgttctgaatacaatctgaaaagactttctacggttttgagtgaaataaacctccatccacaggtcagcacattagagctttctgatgtagcctgcctcagttccaagcagtttggccgtatatttgctgattatataggtactactcctaaagaattccttcgtattgtgcgcatgcagcgtgctctttatactttgcaacaagatccgacgttgccttttgcccaggtagcttatgagtgtggcttttccgaccaatctcacatgattaaggagtttaaactcttctccggctatacccctgccgaatacctttccgtttgtgctcctgtctccgattatttttctactctttaaagatgtcttttttcttctattgagggttacaggcttgccctatttttgcattgtctttgcaaaggcatagtaaaaaccataaaaagaaaacaaaatgaaaaaactaattgcattttttgaaattccagctgctgatttccaccgggcaatcgatttttatgaaaccgtgttgaatatgaaacttccgacttgcgaatgtgaggaagagaagatggcatttttcactgaaggggatgaatttgtcggagcagtttcttatgcttctgatttcctgccttctgaaaaaggggtgctcattcatttcaatgtagatgagattgagcctactcttgaaacaattttgaaaaaaggcgggaaagtcgttattcccagaacaaagattgaggcagaaggtaggggatatttcgctgtctttgttgatacggagggaaatcgcgtcggtatttatgcagataaataatcagcatttctgatttttctgtttacatttgcagcacacttttaaattgtacaaatatgattagactgaatgtttttattcaagtaagtgaaagtaaccgtgctgcggtgttggaagctgcaaaagagttggtggcatcttctttgaaagataaaggttgtattgcctatgatgttttcgaaagcgctacccgtaatgatgtcctgatgatttgcgaaacctgggaagatgcggaatcgctgtctgctcatgagaaagcagaacattttgttacattggttcccaaaatacagggactggcttccatgaagttggagaagtttgacttctgacataagtagagaaggtatgttaaaatgaagtttagaacacaaattacgcaaattgtataaataatataagattcatgttgttgaaaatcaatgattaatgaactacttatttgcgtgattcgcgtaatttgcgttcacttttcctattttggcacacctttttgtcttgtcatattattcacctgaatgacagatcataatttgtggtaatcgactttatctatgaatttcagttataagcaaatttggctaatagcgtatcctattcttatcagtttactgatggagcacatgataaatgttacggatacagcttttttaggtcacgtaggtgaagtggagttgggagcatccgcgttggcgggagtgttgtatatggctatttatatgctcggttttggattcagcatcggtgttcaaattctgattgcgcgtaaaaatggcgagcggaagtatggcgaaataggtggaatattcatgcaaggtgcctttttcttgctggcattggcagccgtcatgtttttcttgtgtgactctattacaacacatattctcagccgtctgatatcttccgatcaggtttatgccgctgcttcttcttatttggagtggaggaggtacggacttttcttttcctttattgcaattctgttccgggctttctacattggcatcactgagacgcgcactcttacgcttaactctatagtaatggtgctcagtaatattgttttcaattacattttgatatttggaaaattcggttttccggctttgggtattgcaggtgcggcaataggttcttcgctggcagagttggtatcgttactgttttatgtggcatacacctggctgaaagtggataagaaaaaatatgctttattccaacagtttagtttcaaactgtccgaatttaaacgcatttggaatatctcatgttggaccatgcttcagtccatattgtttccttcacaatggttcttgtttttcattgctatcgaacatttgggagagcgtcctttggcgatagccaatatcatgaggagtatcaatacttgcttctttatggctatttttgctttttccgatactaccagttctatggtaagtaatctattagggagtggaaaagagaagagtgaaatctggcttgcctgtaaacgtgctatacgattaacttatatgataggtataccgctcctattgctgtccgctttgttccctaccgtgttattgcagatatataccaatagtcaggagttggtacaagcagcattacctactatgtacatcatgttattaggatatctcctttcagctcccggactggtgctgtttaatgctgtttccggcacaggaaatacaagccggtctatgaaaatcatgttgataaccatttccatttatgttgtttatgtggttgttatggttatgtacctgcaagtggatgtcgctatagcgtggacaagtgaatatatttacgggggtatgttgctgttgctttcctgtctgtatctgaaaagcgggaattggaataaaagcatttaattacgattcttgtataagaatctcttaattttcttgcgggtgaggaggaggttgggaggcttctattttatttcattctatcttttctcctgtttgcaataaatacaataatcgtagtgtacagttcttggcttattacattcaggacaggcatattttttattctgatttgcttagaaagctttttctccattgttttgaatataatggagattatcaagcatgctcattccatatctcattctgtattaattttcatcttttattcccaaagtactgcgatattcctgttgtttctttttaggtaatttcttgattacctcttctattgaatgattgattaattcctttataaggctatccggcacatcactttccagatatatggtaatccagtgtttcttgtcggaaaacgggccgaatgcaatgccattatatagctccatcagttctgtcgacttggtggagtcacattttgtgtctgcccaaaattgtccatctttaggatttaatggagcaaaagtgaacatcttgtccatgattttatagacaagggtattttcgccaaaggggaaactttctgttgctcctttgatgcttaaacaatattcccgatattcctcaatattcatggctttactctttttgtattgtttccttcctcaatcaggcttcaaaaatacgatttcttttcatgaagcatgcaaaaattccattaaaagaacggattacccaaaatgcacgctgcatgagttaaaatatcagcattaagaagtattacatgtccttttctcatccttctctttcagcatttatatatgggtggtgttagatatatagatgctgcgcgtccgatgtatagatacaacatgtctgataaattgatctaattgtctggaaggggtgaactcaaaaagctcaattatacaaaagagttttttgccagcactcctgcacaggtgtacctcaaaccctttattgatcggcatttgaaggtgtgctggcaacctgaaaattagtgctggtaaactgtttgccagcactaattttgcagtgaatgtttacaatatttccatctatctggttgatttatagtgagtagcccgataattaccgaattgagcttttctacacgaatctatgcgaaaaatgtgctattttaactcttttttactctaaatgcggataatttcccgtagacttcgcaaagatctccgcgcacactgtcttccgtttcagcaggtggcaccgactgtttcaataggggaaacactttgtttcattgcttgaaacactctgtttcacaccgagaaacacttagtttcaataggggaaacatttggtgtcaacgtgcggagtgtcagatatgtgccagtctgattattgttttactcgttggcggagttagctctttgcgtgtaggaatgaagtaaatgataagtaatactatctcaattagcttcgctgacatattctctgatttttttcatttagcccataacctttacaagaaagaaattaattccgccaacgggtattgttttatataaaaccgccttatcccttttcttatctcgataaaaacttgtaactttgccctccgattttaatagtaattgaaacaattatggcagcaaaacccagtattcctaaaggaacccgtgacttttcgccggtagaaatggcgaagcgtaactatatattcaataccattcgcgatgtatatcatctctatggtttccaacagattgaaacgcctgcaatggaaatgctttccacactgatgggaaaatatggtgaagaaggtgataaacttctgtttaaaatacagaactcaggtgattatttctccggactaaccgatgaggaattgctgagccgtaatgcagccaaactcgcaagtaaattctgtgaaaaaggtttgcgttatgatctcacagtgccatttgcccgctacgtggtgatgcaccgtgatgaaataactttccctttcaaacgctatcagatacaacctgtgtggcgtgcagatcgtccgcaaaaaggccgttatcgtgagttctatcaatgtgatgctgacgtggtaggtagtgattctttactgaacgaggtggagttaatgcagattgtcgatactgtatttactcgctttggtatccgtgtttgcatcaagatcaataaccgtaagattttgacgggcattgcggagattatcggtgaggcagataagatcgtggatatcactgtggctattgataaactagataaaataggtctggacaatgtgaatgccgagttgaaagaaaaaggtatcagcgatgaggctattgccaaattacaacctatcattctactgagcggcaccaacgaggagaaactggctaccctgaaagaagtacttgccggaagtgaaattggtcaaaagggagtggaagaaagcgaatttatcttgaaaactctatcggctttcggtctgaagaatgaattggaacttgatttgacacttgcccgtgggttgaattactataccggtgccatttttgaagtaaaagcattggatgtacaaatcggtagtattacaggcggtggtcgctatgataatcttaccggtgtattcggtatggcaggagtttccggtgtaggcatctcctttggtgcggaccgtatctttgatgtgctgaaccagcttgatctttatccgaaggaagctgtaaacagtacgcaacttctatttatcaactttggtgagaaagaagctgctttttccttgaatgtacttgcccaagtacgtgcagaaggtattcgtgcggaaatcttcccggattcatctaaaatgaagaaacagatgggctatgccaatgccaaaaatattccgtttgtagctcttgtaggagagaatgaaatgaacgagaataaggtgacactcaagaatatggagactggtgaacagaccctggtttcggccgaagaattgatacaaactttaaagaaataaaaacttcataaaagagtaagctctttgtaatccatcttggttatctttgtagtactaacctaacaaagataactattatggatgttttagaaccaaagtattacgcagccatcggtatggtgatgacgttaatagccgtaatattcctattcttgatggggagtgctttagtacattctaccaagagcttctggcagggatattcgactgaattgagttgtgatacagacttggatattgactaaactttcttagttttgttatttatcagtcgtcaatagcttgttgataagaacttaactccctgttgacaagaagttaacttcttgtatgcaaagtcttaacttcttgtatgggggattttggggtaaaaagaataggattggtatgccttaaaccggctatttacagttgttcttttgcccaggcaatcattaattcgttgcgatctgaaagccaagccagttgataaagttggcgaactacattcaaccatgactggttacggtgttcatcattatctcccacatctgttttacctccatttttgtaatattgagtacggtttgtactgcaaatgcgggcatatctgccggtgtttggttttaagtcggcatttgtcatatgcaggtaaaactccagttgctcatcggtgcaatgcttatctgtcggcattttggtactatctgctacatatacggttactccatctttgaaaatatatggttcatagaagttcttggtatacatatcctcgtatactactccttgtacagggaattgtgcccctgattgccgtttgataaattctgcgagtttatacaggtatgtggtatctgtactttgcttaacttcccagcaagtggtggcaatccatgtggcaagttgttctgcacttgggttcagcaagtataccagtccgcgcttggctactcctttttttatatctttcccggtgtaatattcatagagtttcaccgggtacccttcccaaccggggatatctgtatgttcgcttagtagtttctgggtcatgtatgctgatgcaagcactgtgcggcaacgttctaccaacaatgggaaaccgttttttaagaatgctttaggcagagagttaagggttgtttcagcaggaagggctttggtgggagcgggcgttgttactgttgtaaatataacttgctgatagggcactaatgcagactttagttcatcccatatattctggtataaatcgctattctgactgacacctttgtcatcgtagtaatagacatgaccggattcgctgcctccccagtgcttttcttcgcaacgaatatttaaagttatctgcgataaattctcattaataggcctgatgacaaaattcaaagttctccgttcatttggtttgaatactttttttatttcaacaggtttctgggcttgtatgaaacctgcttgcttgtccagcgatagaatgaaatattcattattctgtacgaagtcaatcagtttgtcaaaaagaatattctggtcagcgtttacataaatggccttaactggttttgtagtttcttgtgcaatagcagttaagcagatacaggagaataacaacagtccgaggaaacttttatttttcatattaatattgttttaggtttaccttactatggtgattctcacaaatgtagtaatttaagtctgaatatagaaaaatatactactttaatttacaagtttgtgttatttccgcttcactattcccacatatactaatagaattatattcatcatcagtgcataaattatagccggtatggcaattatgtcattattgaaaataaacgggctacttgcaatagcaatactttgggctgcattttgcatgcctatttcaatgataagcgtacgctgttctttcctgttcaatttcattaactgggagattaaatatcctccacccatagccaataatatcattagtgtgatgcacagacctaatcgaccgatctgtgcagctatcgtttcgtgatgttgtatgaagaaaacagtagctaataaaatcaaggcagggaaggcaaccttggataatactttgtgtattcgttcggctgttttagggcaaaagcgtttggttaaaacgcctattgcgatagggagcaacatgagcagtagattctggataatgaggctgccgacaggtaggtgtattgttattccactattgtctcctgcaatttgcgtagcaaactccataatgacaggaatagtaaacaaagtaataatactgctgagtgcagtcagtgatacggaaagtgcgacatcacctttagctatcatagagaatatattggaagaactcccacccggagaacaagcaataagtaccaggccgataaagaacagaggttccaaatgaaacagataacccaatgcaaaagccaatattggtaaaaggattatctgtcctatcaatcctgcaaaaacaggatagggacgttgacgaaataatttaaaatctttaatttcaagtgttagtcccaactcaaacattaataatgtgagaataggtaaaacaatccagactgcattcatgttctaaaaacgttttttgagggtgcaaagataatgcaaatagaaagcataactttcatgcttgcatagaaaagttatgctgagatgccgtttatcttctctaaaaataatggtatattgtcttattctttgccaaattggcagtttaatactgacagaaatttcgctttactgtttggcacgattttcgcaatttgttctgcgtctcactaaaatgagacaagacattactataataaatgtataacatataaaaaacaaaagaactatgaacattaaaccattggcagacagagtgctgatactccctgcacctgcagaagagaaaacaattggcggtatcattattccggatacagcaaaagaaaaacctttgaaaggtgaagttgtggcagttggtcacggtacgaaagatgaagagatggtattgaaggtgggcgacactgttttgtatggcaagtatgctggtaccgaactggaagttgaaggcactaaatatctgattatgcgtcaaagtgacgtactcgctgtgttaggttaatatagtaattataaaatatttaaattgtaaatatcattatggcaaaagaaatattattcaatatcgatgcccgcgaccaattgaaaaaaggtatcgatacactggcaaatgcagtgaaagtaactctcggccctaaaggtcgtaacgtgattatcgaaaagaaattcggtgctcctcacatcacgaaagacggtgtaactgtagctaaagaagtggaactgtctgacgcataccagaatacgggtgcacagttggtgaaagaagtagcttccaagactggtgacgatgccggtgacggtactactactgctactgtattggcacaggctattgttgctgaaggcttgaagaacgtaactgccggtgcaagccctatggatatcaaacgtggtattgacaaggctgttgccaaagtggttgactcaattaagtcacaagctgaaaaagtaggtgacaactacgataagattgaacaggttgcttctgtatctgcaaacaatgatccggttatcggtaagttgatcgctgatgctatgcgtaaggtttctaaagacggtgtaattactatcgaagaagctaagggtaccgatactactattggtgtggtagaaggtatgcagttcgatcgtggttatctttccgcttacttcgttactaatacggagaagatggaatgcgaaatggaaaaaccatacatcttgatctacgacaagaagatttctaacctgaaagatttcttgcctatcctggaaccggctgtacaaaccggacgtcctctgttggtaatcgcagaagatgtggacagtgaagctttgactacgttggttgtaaaccgtctgcgttctcagttgaagatttgtgctgtgaaagctccgggattcggtgatcgtcgtaaagaaatgctggaagatatcgccgtattgactggtggtgtagtgatcagcgaggaaaaaggtctgaagctagaacaagctaccatcgaaatgttgggtactgctgataagatcacagtttctaaagataacactaccatcgtaaacggtgccggtgacaaacaaaatatcaaggaacgttgtgaacaaatcaaagctcagattgctgctactaaatctgattatgacaaagaaaaattgcaagaacgtctggctaaattgtctggtggtgttgctgttctttacgtaggtgctgcttctgaagttgaaatgaaggagaagaaagatcgtgtagacgatgctttacgtgcaacacgtgctgctattgaagaaggtattgtaccaggtggtggtgtagcttacatccgtgcactcgatgcattggaaggtttcaaaggtgataacatcgatgagactacaggtgttgacattatcaagcgtgctattgaagagccgttgcgccagatcgtagccaatgcaggtaaagaaggtgctgtagttgtacagaaagtacgcgaaggtaaaggtgacttcggttacaatgcccgtactgatgtatatgaaaatctgcatgctgccggtgtcgttgatcctgcaaaagtagctcgcgtagctttggaaaacgctgcctctattgcaggtatgttcctgactactgaatgtgtaattgttgagaagaaggaagacaaacctgaaatgccaatgggtgctcccggcatgggcggtatgggtggcatgatgtaatacccgtttttccctgaattcataattataataaatgaccacagcatctctctgaagggactgtggtctttttttctcttttttggcctgtttcttcttatattacctgtatattattacgaaactgttacaattttgattaaaaagaatatcttttgttcgttttttatgttttataaataaaaagtgatatctttaggctgataataggataacctaaacaaatcaccaatcaattatttaacctttttaatgacgaaaagagatgaacaaaagcgacatcggcctgaacgcaggcaaaatttggaggttgcttagcaattatgccaagtgggactatgggactttgaagagaaagtccgggctgaaggacaaagaactgggagcggccctgggatggttagcttgtgaagacaagatcgtattgcaccaggaggacggagagctctacatttttttgggcgtgaatgtttatatcgggtaagaacgaaaaaaccgattgaaaacctaaacgaaagcgtggattgtaaaatccacgcttctttttttctactaacgaattatttcgttcctttgcatattttttagagctaaaggattatttatacgctataactatttatcgataaaatcaatataattatgagaagttttgcttcagacaacaattccggtgtacatccattggtgatggaggcgctgaaccgggcaaaccaaaatcacgcagttggctatggtgacgatccttggactaaggaagccgttcgcaaaattaaagagacattttcgcctgattgtgagccactgtttgtcttcaatggaacaggaagtaatgcggtagctttgcagttggctacccgcccttataatttaattctttgtgcggagactgcacatatttacgtagatgaatgtggtgcacctgcccgtatgacgggatgccagatacgtcctattgcaacgccggatggtaaactgacgccggagttgatacgtccttatctgaagaacttcggggaacagcatcattctcaaccgggtgctgtttatatttctcaatgttcggaattaggtactgtctatactccggaagaattgaaagcgctgactaccttggcgcatgaatatggtatgtatgtgcacatggatggggcacgtttagcgaatgcttgtgttgcgttgaatctcagcttcaaggaactgacagtggattgtggcattgatattcttagtttcggtggaacgaagaatggattgatgttaggtgaaagtgtaataatcttcaatccggacctgaaaaaggaagcgctctatgtacggaaacagtcggctcagttagcttctaaattgcgttacctttcttgtcagtttacagcgtatcttacggatgatttgtggaaaaagaatgctgcacatgccaatgcgatggcacgtaaactatatgaagggttgcaaacattgccggatgtacaattcacacaaaagatggagagtaatcagttgttcctgactatgcctcgtccggttattgatagattgatgaagtcttacttcttttatttctggaatgaagctgaaaatgaaattcgttttgtgacctcttttgatacgacagaagaagatattcagtctttgttgcaggcagtgaaggatagtttctgattcttcgttatcacgcatttattaaaatctgacaatagaaaaagctccggaccttcgcaggcatggagctttggtttgcaactttttcccttgggggtgggaaaaagtctactgaaaacaaaccgattgaatattaccttaaatacctttgcatgataacctttaactaacctttttataataactatgggtatgaattatattcctgttgcttcaaggacgggtacgaaagtataacctttccgtttcagcgttttaatcattttgtccagataaccattgtagaacttatctgtacggcggtcgtcggtaccgaagtgtatcaacatcaggtgcccgtttaatccttcttttttctctacctccatgattttgtcataaatgaacttactgctacggtatttggcacccatgtccggagtggtatagtccgcattgctcatcgtgccgggtgtatagttgataagttgtatacccatattctttgcccatgcggcaatttctttattataatattcgtaaggcggaatatataccggagcatctttgtattcgatacctgctttgcgcataacttcgtaactcttcagcatatccagctcaaattgctcgcgtgtcaccaataatgaatcacggttttcccatggcatatacaataagtgcccatagctgtggctacctaccagatggccttctgcacgcagtcgttttactacatcgggataaagctcataaaattcaccggtgaagaagaaaccgcctttgatgccatgtttcttcagtgtgctgataatagcatcagcaccgtctgctttatcggcggcagtaaagacaagcgttatttgtttctttgatggatcagtgcggatgataccgtcatttacatatacattcttatcactctgaatgtccgcctgcttcataccttctttctgcatggcggagagataataagtgagacaagctgttccgtccatggtcggttcgttcgtggagtagtcatgaatggcatcatgatataccatcaggtcaggctggaaacgttcataatcctgtccgggagtaccgggaatacctgtcatgtttactccgcggaggctttcgaaaatagtgcggtatacagggccgtctacgagaccgcctgtagtatttcctacacctgcgttgagtaatgaagagtgcggttgagaagggtaatctccatatagagggagttctacaatcatgctggttccccagggattgcaaccgaacaaccagtcaagcatgccggcttccatttctttataagtttcgtcacctgttgcttcacgatacagacggcattgtgtcagcatggcagttgtcaggttattggaacaccaggtgtaaggaatgccgtgcatgaaaggactttcaacggctttctcgtaggtgcgtgctatgccggcatgcatattccggataaattctttgctaaggcggtcgttatgtacttttgccagatgataatgtcccatattcatgaatggataccattggtaatggcgggcactgtcagcacccatccatggagtaacaggttcgcgacgtccgtattcaacggcttgctccaggtatttaaaatctccggtacttttgaaaagttccatagcgcccagttccatatcgtctacccaattatcttcttcataaatataaggagacttgacggaggctgtctgacaagcacccggtttctttacaccttcctgataagctgcatccgcttttgcaccaatctccgctgcaaattccggatagaagtcttttaataggcgggcaccaagagcgaaacaggaagcaaacttacctgctgtgcttgccacgcctgtggtagcattcataaattgaccgcgtacctgaggttcgccactacagaagtaaacggggcgtcctttacccggaccgtaaccataatctacctcatctttattgggcaggcgcataccggcatggtcgcggtcgtcggcaatctgattatatagttcaccgggagcagggttcatacgattcagccagtccagtccccatttgatttcgtccacaatgtcgggaatgccgttagcgccggggagcccggcagcatcatagaaatcaccgaatgagtttggattttcctgataggcaaacatcatctgataaatggcattggcggaagttgtggtatattgcaaataatcagttgcatcgtgccaaccgcctcgaacatcaatgcgttgtcctgttttggtgggatggtacaggatgtagccgtcgtgcacatggcaactgtctttcaaaaagggattatagccgcaacgttgctgacgcatgtagttcagcaagaagtcagcagtcccattgtacacatgattattgatgggaaaacgaggtgagaccgcttttcccgctttcagataataagttcctggctggttaaaatcactgaagtccagacgataggtactcttcatgagtcccatttttccggttgctttggtagaattgaaagttcggacggtttgtcccgtgaaggcgtctatcagtgcatactcttgtatgtcagctggttcttcactcataaatactgccacttttacagattgtggcaagtagccaagttggttaatacgtatccatgaatccgcttttacttgcagaacgatgaaagtgagtgctaccgtaagtagccaatggttacttttcataataagtcaatatattaaggttgggggaaaattgttttctgtgactgcattactcacatacaaataaagcgttttctatttattttaggaagttttagtatgaataattaattgatgttatgtgtcgtttacattattttgaaaattgagtagcataggtaaaagcttttactactggttaatatgttgattatctttatattattgtttttaatacttctttttaattttcgtttacgtattttagtgttcaaaacacctgattggtgcgttatttgtgatagggtatataagaataacaaaattaatagactatggcttatatagattattatcaagtccttggggtggacaagacggcaagtcaggatgatataaagaaagcgttccgtaaattggcacgtaaatatcatcctgatctgaatccgaacgattcttctgccaaggataaatttcaggcaattaatgaggcaaatgaagtgctgagtgaccctgagaaacgtaagaagtacgatgagtacggtgaacattggaagcatgccgatgaatttgaagcacagaagcgtgcccgtcaggaagcaggtgcaagtggctttggtggttttggtagcggttcgggtgcaggatacggtacggatggtaacggatcttattggtattcgtccgatggacaggaattttccgggcatggtggtggcttctccgatttctttgaatctatgtttggaaatcgggggcgtggaggtgctaatgctggcttccgcggacaggattaccatgcagatttaaacctctcgcttcgtgatgcagcccagactcataaacaagtgttgactgtaaacgggaagaatgtacgtattaccattcctgccggcgtggcaaacgggcaagtcattaaattgaaaggttacggtggcgaaggtgtgaatggtggacctgccggagacttgtacataacgtttgtgattgcggatgatccggtattcaaacgtttgggagatgacttgtatgtagatgttcccattgatctttataccgctatcctgggtggagaccagctggtagatactttggatggaaaggtaaagctgaaagtgaaacccgagacacagaacggtacgaaagcccgtctgaaaggcaagggattccctgtatataagaaagaaggacagttcggtgacctcattgtgacttattccgtgaaactgccgacgaacttaacggaagcacagaaagagttgttccgtaaacttcaaagtatgaactaaaaggaggtatcactatgcagaatgaattaatcatagtcagcgaatattgtcgcaagtgccacattgagccgtcgtttatcgacttattacaggaaggtggcttgatagaagtaatgactgaaggtggagaacgttatctgacgtttactcaattaccggacgtagaacgttacagccgcatgtattatgacttgtctatcaatattgaagggattgatgctatccatcatctgttacaacgtatggaggagatgcagaatgaacttcatgagctacgcagtcagttgaggttgttccggtaaaggtgctatttatgacaaagaaggctgtcccattcgtttgagacagccttctttgaatatagttaatcggttaattacttacggtagttatccagttcttcagctttgaacttgcggatgaaattgaagtgcttttctacttcagcttcagcgtagttcagatagacaacagctgactttgcaaacagttcaggtgcttttgttgcatcctgaatgagaagatgagacatcacacatacagcagccatttcgtaaagacggcgagctacgaagtccagcagctcttggtttgcagcttctttcgttgcgttggtgacagcttcaaacttattcgtcatctctttcaggcgatccatcaacggttgcatttcttcgctgcaaggaattgtttcgtaatcgcggagagtagcagcgtatgaaccgtttgttacataacggatggcggctacagtctgcaactgagtcgtaccttcgtagatgctggtgatacgggcgtcgcggtagatacgttgacaagcatattccaacatgaaaccggaaccgccgtgaatctggatacaatcataggcattctggtttgcatattcggagttcatacctttggccagcggagtaaaggcatcagcaagtttggaatacttcttttgttcctgacgttcttccggagtcagtttacgttcgcgagagatatcatccaaagctttgtaaatgtccacatagcgagatgtttggtacaacaaagcacgacctgcatccaacttagctttcatgatagccagcatgtcatatacagccggaaattcaataatagctttactgaattgcttacggtcttttgcgtatgccagaccttcattataggcggcttgtgacaaacctacggattgtgcggcgatacccaaacgggcaccgttcatcagcgccattacgtatttaatcaaaccgagtttacgatcaccacaaagttcagcctttgcattcttgtaaacaagctcacaagtaggagaaccgtgaatacctaacttattctcgatacggcgtacatctacaccaccttcgcgcttgtcatagatgaacatggaaagtccacggccatctctggttccttcttccgagcgagccagtacgaggtgtaaatcagcgtcaccgtttgtgatgaaacgtttcacaccattcaggcgccagcagttttctttctcatcaaatgtagctttcagcattacactctgtaaatcggaaccggcatcgggttctgtcaagtccatagacatggtttctccagcgcagatacgcggaatgaaacggctgtgttgatcttcgttgccgaattcatacagtgtttcgatacagtcctgcaaagaccagatattaccaaaaccggcatcggcagcagccacgatttcagcgcacatggtatacggagtgatcgggaagttcaatccaccgaagcggcggggcatagtcataccgttcaggccggctttcaccatagcatcgaggttttgtctcgtaccgctggcatattctacgcgaccattggcacagtgaggaccttcttcgtccacgccttcggcgttcgggttgataatctctccggtgatttctccggtgatttcgagcaccttatcataagagtccattgcatccgtatagtcttgcggagcgtagtcaaatttgtctttatcttggtatccgcgctctttcagctcacagatacgttccatcatcgggttgttcagttggaacttcaattcaggaacttcggtataaaaattagccatagcttacttactgttctgtttgtagtacttaatcattttcggaatcacttcttctaccgtaccgttgattacataatcagcgatggtattaataggagcattttcatcattattgatagagatgataatgccactttcctgcataccggcgatgtgttggatttgtccggagataccgcaggcgatatagagtttcggacgtaccgtaataccagtctggccgatctgacgatcatggtcgcagaagcctgcatcaacagctgcgcggctgccgcctacttcagcgtgaagttctttagccagttcgaacagcatgtcgaagctttcacggctacccataccataaccaccggctacaacgataggagcacctttcaggttgtgtttcgctttctctacatggcggtcgattactttcactacatagtctgtagtcggtacgtatttggcaacgtcatggttgataacttcgccctgatacttatcgttaagaatttctttcttcattacgccttcgcgaacggttgccatttgcgggcgatgttcggggttgacgatggttgccacgatattaccaccgaatgcgggacggatctgatataacaggttttcatataccacacctgcttttttatcttcgtgttcaccgatttccagtgaagtacagtcggcagtgaggccgctggtcagtgcagaagaaacgcgcggaccgaggtcacgaccgataactgtggcgcccatcagacagatctgcggtttttcttccttgaacagattgataagtacggaagagtggggcagtgaagtataagggaacaagcccggagcgtcgaagacgtgaagacggtcaacgccgaagggcaatacttgtttttcgatgcctgcaaggttagtaccggcaacaacggcttccagttggcagcccagttggttagctaacttgcgtcctttggtaaggagttcgagacttacttcggcaactacggtgccttcaagctcacaatatacaaatacgttattcatatttcttttaagtttttgaggtgacgagttgacaagttgacgaggacatgccttgttaccttgtctcttgtcgccttgttaactacccaatggtgtggttagcgagtagttcaacaataagatcttctacatcctggtcgcttccggtcagtgtacggctctctttggcttggaaagagatgttctgaatggtttttactttagtgggcgaaccgctgagaccgcattgtgccaggtcaccgttcacgtctgccacactccattcggtgatgttcagataagggtacttctcgtagaggtcggcataaggcagggtagcaccttctttggtgatagctgctttttcctgtgcaccgagagcacgtttgtacttctgtaccaacttagcgttgcgtgggcggcagggagctgcacttccgttcacagtgataacgatgggcagagggccttctacagtttccacaccaccgtcaatgtgacgtttcacgacaacacgtccggtagttttctccacattcagaatttcttcggcataagtgatctgtgtcagaccgagcttttcagcaacttgcggacccacttgagccgtgtcaccgtcgatagcctgacgtccgccgatgatgatgtcatactcgcctatcttcctgatggcagtagcaagagcgtacgaagtggcaagggtatctgcacctgcaaaagcacggtcggtcaacagatagccgttgtcggcaccgcggaacattccttcacgaataacttcggctgcgcgtcccggtcccattgtcaggatggttacggtagagcccggatgtgcatctttcagtcggagggcttgctcaagagcgttcaagtcttcggggttgaagatggcggggagtgccgcacggttaatggttccgtcggctttcatggcatctttcccaacattacgtgtgtcgggaacttgtttagccaatactacgattttcaaactcatgttattaattattagtattagtatttctttggagcgtcagtgccgggaataggagtaggaggtacatagtgtccagctactgaaattatccggttaactaattatcagcgtgcaaaattagtcaaactgttcgttctgacaagaaatgcgggcaaaaaatgcacatacagaacggttttgagcaaaatagggcagaagaactacatcgtttttgattgtgtttatcgttaaaaatcacttgttggttgaatctattttctttgtttcactcctgcggttacatttgtcgcagaaacgaagcaggtatgataacagaagaaatattgaaggatatagtggaaatgctggatatattcggtcctgtcacgctggaagaaatgagtggtatccgattgatgaacaggacggatacgaaatatctgctgcccttggaaacgctggctgtgcttttgcattatgctgccgccgattatcgtgtacaggaagtggcgggagaacggaacattgtctatcatactgtttatctggatactgtagacaaagcaatgtatcgggcacatcaaaacggacgggcggtacgtgagaaaatcagggtacgtacctatgttgcttcccaattaacttttcttgaagtcaaaaataagaataataaaggtcgcacggacaagcggcgtatacgcatcactgctcttgatgaactgtctgctgaaggtgtggatgacttcttgtctttgtatgcctggtacaagctgccgcaattgtctccacagttggagaatcgttttcagcgcattactcttgtcaaccgggcaatgacggaacggcttactattgatacggatatttgcttccgaaatctggtgaacgggaattatgctgccttgccacgtcttgctgtggtggagttaaagcgagacgggcgtacatcatcgcccatccgcgatatattaagtcgcttgcatgtacatcctgcaggttttagtaaatattgcatgggttgtgtactgacggatgaaaacttgaaacagaatcgtttcaaaccgaaagtacgtaaaatgaggagggcagaaattccccgaaatatagaaacattaataaatagcatatgaacgattttgctgaattagcctttatggagacgccgcttatagatgcggctggatttatggaattgatattgcgcttcgttctcaacatggtagtggtggtggccattattcgtttcttttattacccgaagagccgtcgtcgcgattacttcttcacatttacgcttatcagtatcagcatttttctgatgatattcctgttgggcagtgtgaaactgaaaatagggtttgcacttggattgtttgctatcttcggcataattcgctaccggacagagtcgatgcctgtgcgtgagatgacctacctgtttgtgattatagctatttccgtcatcaacgctctgtctgtacagttgagttatgccgaactgacggcaacaaacttattatttattctgtgtatctggttatgcgaaagcaatcgttggctgaaacatatttcatgcaagctggtgcagtatgatcgtattgaattgattaccccgcaacgtagggcagaattgattatggatctggaaaatagaacgggacttagcatcacgaaagtagaagtgggccatattgatttcctacgagatgcagcgatactgaaggtttattatgaaccggagagtgaagagataaatacaattgatacactaagacggataccgagggaaggagaatgaagaaaatgaatagacgaataaccttactggctgtttttctctgcacaatggttgcaggagtatatgcccaaagtgatgacttcggcatttggaccagtgccgaggtaaagaagaaaatcttcccgggctttgatgcttcggtggaaggtgaattccgtactcgtgatggtgtggataatgttgaacgctggtctgcaggggcgggtgtggcttatcgcatcacttcttttttgaaagcggatggcggatatacttttatttatagccatcgtccgggagagatgaccaagaaaggcaattatgtttctgactactggtcaccccgtcatcgtatgtacttgtctttgacaggtaaattgaactggcaacgctttgaattttccttgcgcgaacgttaccagtatacgtatcgtacttcgcagcttgtttccaagtacgatggggacgatggttcccaaaaagcagatgaggaaattaccggcaaaggtaagaatatacttcgttcacgcttgcaggctgaatggaatattaagaaatctcgttttgtaccttatgcttcttgtgaattatatcattccatgtccgatagttgggcactggataaaactcgctggacactgggtaccggatacaaaatcaataagaagaattcgctcgattttttctatcggtatcagaatcatgcagatgatgatgagacgaacgggcacgtagtaggtgcgggatatacgtttaagttttaagtgaatgatttattagtcacataaataaatgatggaaatgaaacgaatacagaaaatagggatttatgcagtgtgtttctgcttgtgtgtcgcgtgtagtgctgatagtccttttgatgattggggagagaacggaatggatgggggaacgaaccccggtggaagttcaggcagttcggatgcttcgggtacattacttgactttgatgtttcgtgggaagatatagctgataattcatatgttgaaatagctgaaactatcataaccgacaagaatgatgatgaatatgatgactttatagaaaattcatcattcgcttcttccatacaaatagcatatgctaatggttcggcaacggtgacaggctctgtgagtggggttacagtaaccacaaacggagcacatgtcacagtaaatgcatccgtagcaggtgtagaatatgtgcttaatggtttggcatccaacggctctttcaaggtatacagtgataagaagtttaaactgactcttgcgggtgtttcgctgactaatgacagcggggcggcaatcaatatccagtccggcaagcgtgtttttgtagaagtgaagacggaaacggagaactatctggcagatgcttcttcttactccaccgtaacgggcgaagatgaaaaaggatgcttttttagtgaaggacaacttatttttagcggtacgggtgcactgactgtgacaggtaattacaagcatggtatttgtagtgacgactatgtgcgtttgcgtagcggcagcaatattaccgtagcttctgccgtgaaagatggaattcatacgaatgataaaattattattggtggtggtatcctgaaggtgaaagcatccggtgatgggttagactgtgaaaaaggattcattgatatacgaggcggacttatcaaggctgacatctctggtgatgcctctaaagcggtaaaggcggaaacggacatcacgctcagtggggggcagttgattctgctgacttcgggctctggggtctatgaagacaatgatctgagttctgccgcaggtatcaaatgtgatggtaacctagtgatgaatggtactactcttttagtcaaaagtacgggtgctgccggtaaaggtattaattgcgacggaactctgagtatcgataatagtacggtgaagattattactaccggtaaacagtatgtctataatcgtctggattcctccgccaaaggcattaaagcagacggtaatttgactatcaattccggtactatctgggtgaagaccccgggtggtgaaggaagtgaagggattgaaagtaaaagtacccttacggtgaatggtggtgacgtcagtgtctattcttatgatgactgcatgaatgcttctaaaagcattgttatcaacggcggtaatatctattgttacagcagtggaaatgatggtgtcgattctaacggtactctgactattaccggtggtacgattgtctctatcggtactacatctcccgaggaaggatttgactgcgatcagaatacttttaagataacaggaggaactatcttgggaatcggtggcggcactagtactcccacgtccagcgtttgtacacaacgcacggttatctatggcggttcgggtagtaaaggtacgcttttgagtattcaaggttctgatcaggtgatgtcttacactattccccgtgcttattcgcaaatgacattgttgttcagcagttcgaagttggcatcgggcaccacttatacgatttatacaggcggttcggtgaccggaggtactgaattctatggactgactgttggtggcacctatacaacaggttcacaggtagcgacttttacgcccagcagtatggtgacttcggtaggaaacgtatcttccggaggtcctggtggtggcggaggtggttggcattggtaatgagaactttgccgatgaaaagctcctcctcgtctatttcttttgtcagttaatcgaaagtcggctatatttgccatgacatctctaaaaaggaaacaaaccatgaagaaagtgtttgcccgtgctacctataaacgttacctgccggaaatgatgatctacattgctgtgtggcttatcgtactgatggtgccggtggtaagcaatttcttcgaacttttatcgggtaaggtggaagtgatgcggtggaaaggagtttttattttatggctcaatgtgttgccattctttttccttttcttattgaataatcgtgtgcttgctcctttccttttcctgaagcagaaagtggtagtgtatgtagtagttgccatattattatctacgttcactttctgggtagtggatatggtgtctcccagtcgtcctgtcatgaagcggcagcaaatagaacagagaatgcgcgaccggggaaaggaagggcccgggccgagagagcatgatgctcccggtaagcctcattctgacttcccacgtccgcctttcgaagagatgcctttctttgtgcccctgtttcgtggtccttttctggggcgcatgctgatagctttgcttatgttcagtttcaacattgctgttaagctgttttttaagtcagtacgcgatcaggaggctatgaaagaactggagcacaacaatcttcagacggagttggattatctgaaataccagataaatccgcacttcttcatgaatactctcaataatatacatgcattggtggatattgatacggagaaggccaaacaaaccattgtcgaactttcacggttaatgcgctatgtgctttatgaatcgaataaccgcttgatatcgctttccaaggagttgcagttcctcaatcattatatagagctgatgcgcatccgctatacggataaagtgcggatagatgtgtcttttcctacggatacgggcgaagtacaagtaccgcccctattgttcgtttcgtttgtagagaatgcttttaagcatggtgtcagttatcagcatgcttcattcgtatcagtctgtttgcaggtggtgggagaggaaattcatttcgtttgttccaacagtaattattataggtctgaagatcagcaccacggtatcggtcttgataatatccgtaagcgtttgcgtctgttattcggtgagcgttataaactatctattgatgatacggccgattgctttgatgtgcagttgcttgtgccggtgagttaatacagaatggaggtatattatgataaattgtatagctattgatgatgagccgttggctcttacccaactgacgggatatatctcccgtgtaccttttctgaatcttgtagcttcctgccaagacgctttcgatgctatgagtgttctttccgcacagaagattgatctgatgtttgttgatatcaatatgcccgacctgaatgggatggactttgtgcgttccctgacggaaaagccgttggttatcttcacaacagcttattcggagtatgccgtcgaaggcttcaaagtagatgcactggattatctgctgaaaccgtttggctttcaagacttcctgaaggcggtggacaaagcgtataaatggtgggaattccgcaccaaaggtcatggaacagttgctccaccgtcaactccgtccgaactttctttcaatgacggtactctgtttgtgaagagtgattatcgcgttacgcgtatcaacttggcagatattaaatatattgagggaatgagcgaatacgtacgtatctttgtagaaggagaggctaagcccattatgcctttactcagcatgaagcgtctggaagaaactttgcccccctctcagtttatgcgggtacatcgttcttatattgtcaatttgaaaaagataacggaagtttctcgcctgcgcatcgtttttggagagacctatattccggtaggagagaattataaggatcagtttacggaatatattaacagtaggatgatgaaatagtgattagtagtgagtgataagtgattagtaccatgcggcaatgacagcacagcactaatcactcaccactaatcacttatttaactcccagcttcttcagcaatgctttgggcactgcatctttgtgtaccaggatattgatagttttgtaagcaacgaaaggtttagaagcataccaagtacctttgtatttgttgttggtaccccaggagttctttaccatgtagtattccttaccgttctggtctttggctataccgtagataagcataccgtggtcatcagtagtttcccaattgtcgaatgctgtttggcgcatttcctgagttacggtgatttccggtaatggacgggaagtcagttctttgcgtttgtcggcggcagtaagacctgtccagcgtgccatgtcggaaccggtgagttcggcaccacgatccgcatcgggcataacggctataccgtcacgagtgaaaccgctttcgctgacgtcgctaccccaagctacagtgtaaccgttgttaacggcattgtcgataacagacatgaattccatcaaaggcaggttataagaaaggccgttgcgccagttgtcctgaatttcgatgttcatctgagtgtagaatggatggtgggtaaatgaagtcagagatatgtaatcgtccggattgattccgagggattcggcaaatgtcttcggagtatattcttttcctttgtaagtgaagttttcgggacacttgccgaggtaagtatcatagatagagcacaggcctttcttccataccggagtcagtttggtcagtttgcctttggcaatagcgtttacgtaagcaccggccacggcatccaactcgttgtgtaccggcaatgtgtcaccgtacatgatgcccggcatagcttcctgcggaacaagaccgtagtttctcaggcagaacatgatgtcgtagaagcttccaccgggtgagaaagaactgtcaccgtgatagcgtacgtagttcacgccgcggtccatcatggtgtggtgcaccacaaacatttctgataaatcatattcgcctttgcccatacgcagcaattcgctttcaaggaaaccaagagccgaaaaactccagcatgtgctggaacggttttggtttttaacggaagtaatcgggttttctttaacggttgtgaagatgaagccttcttccgctttcggagtgtcctgtgctgacacattgaaactcaataagcctaaagtggcaataagtattgactttttcatcataattaaattgatattaaatgattgttactggcacaaagatagggagatttcggaaacaaaagctatctttggagcgttttatcagataattatggagaaaaagatacatatcaaaccccagacaggattggttcttgaaggcggcggcatgcgtggtgtcttcacttgtggcgtgctggacagctttatggaccgtggcatccgcttcccctatactatcggagtcagtgccggagcatgtaatggactttcttatatgtccggccagcgcggacgtgccaagtacagtaacattgacttactggagaaatatcagtatatcgggttgaaatatttgttgaagaaacgtaatattatggacttcgatctgctgttccaggaatttcccgaacacattcttccttatgattatgaagcgtatttctcttgtccggagcgctatgaaatggtgactacaaattgtgtgacgggtgaggctaactattttgaggagaaacgggacaagcatcgtgtgattgacattgtgcgtgcttcaagcagcctgccttttgtctgccctattgcttatgtggataatgagccgatgcttgacggaggtattgtcgacagtattccgctgatgcgtgccaggagtgagggatttacccataatgtggtagtgcttacccgtaatcatggttatcgtaaagaagcaaaggacatacatataccttctttcctgtaccgtaaatacccgaaagtgcgtgaggctttaagccgtcgttgccgtgtgtacaacgagcagttggaaatggtggaacgtatggaagcggcaggagagattactgtaatccgtccgcagaaacctgtaacagtcgaccgtatcgaacgggatatcaggaaattgactgatttgtatgaagaaggttatgcatgtgcggcgaagtatgactttcagtgattaatcaaaatattgtaaacgcattgccagataatgattgccactttatagcaatcattatttggcaatgcgtttttttattcttaatctttgttggcctacaaactttagtaagtctgatgtgaacaatccaatgattcgttcactatattaaactgaaggcacttcccactaggactgaaggtacctcccactaggactgaactcgtgtttcattacgactgatcgtgatggaacaccaagtgcgttgtcacacagatggttacgtggtatgtgaaactcttatagaactctgtgaaactcagtgttactctgtggtgaattaactcagtaatagctaaccttcacagcgctgatttccaccgttcccgaataactattaatagaccatggattcttctgcataccatatatgcggtttgtataagccacattatcattgatataaaccacgcagacagagttgtccgtacagatagttacatgataagtattatcagcaggtctgtcgaacagatacccgtctattccgtcgatgaatcctttaccttcttcaccttcttcttcgaagtttatctttcgcttgttattgttgtcttccggattcactacaatggtataatactttttggagtccgtaccgcgtaccagagagataccgaatctatctgcatcgcctgccgtctttacggtaaacgaaatcttgttgtttacatttaagcgattgaataggatataagcattatccgtcagagtatagttaccgttgctttctgatactccgctactcttttccatcacttttacagtagaggcggtggcatatttctggctgataccttctactaagcctaaagtcaaagtaccatccgcatgctgaactactttgtgtgcaaccaggcttcctgcccattccggttcgttcggagaagctcctacggcagtattgtcattgcccgagcgggtggggcaccatccccagatgtagcggttagttccgtccgaagccgtcttgcctgcatagaagccacgtgagtcaaggaaaccttcgtggttgtcgggccagataccggcatcgttggcggtggttgctttcagttcttccagtgtacgtcccttgaaatattgaactttgcgtacggctgcatgcatctccgagtagaccagataccaccagtctcccatcttgaagacatcgggacattcataaaagcgatcccacatcatggtcatgaatacacctgcatgttcccaagtcttcatatctgtagaagtatattcggccagtacccctttgccgcttttagtagtggaaacaagcatgtggtattttccatcttcaccttcaaaaacgaaggggtcgcggaaatcattcttgctgtacccgtcagtgtcacccttcagataaaaagtgcgattcttggtccaggtcttgaagtcgggtgaggtggcatacatcactacctgaccgttctcggaagaagtaggctgatatttgttacctgtgtagaaggtatagtacaatttatccgaaggattataaatagtactacccgttccgatagcggcatcctgctccgacaatcctccgcaagaaatcagttcacccatagatgtgtatgaagcggcgtcctgagtacttaccgcccatatcgggtggtaagtgcctgcttggttcggacggtattcctgtagatacataatcttgaaatcttttgcctgcggatcatagaaaggcatcggatcgcctacataaccgacagatggcttgtagtatgtatcgaacttcatggcatctgccgaagcaaaataagtggtggttccgtcccagtctttctgagttaaaaccggatcattgtcatcgctacagctgctgaaagaagtgatcatcagagcagccagtgtgagtgaatatatcattgttttcatatattagttttatttacccgttaaatagtcaattgcattctctgtcagtttggctacattgccatgatacttgtctgctgaagcatctatgccataagcataccaatcgtaacatcctgagccgatacatacgatacctccgcgagagtcttcaggcagatattcccatgccacgatagcaccatcgccaccataacccaggtcaacaccgccatgattggtacgccatacttcattcgtagcatagccgccccagtcggaaccgatgtgccattgtgccgtactgttggtggttcggtaaccggtatcgaaggtatagaccttatctgtttcaccgctgttcatcaccaggttctggtagagggcgtgcgactcgtgtccctggataaagaagttccatgcaccacccactatttcaccggattcttccgattgtccccaacagttgttcgggttgttgccgtccagggtagcacccagtttggcggcataataagtagcatagcgggtaagcagcaggttcatgccattgttataaaggtctttcatcttcaccaatgcgttgattgctgcaggcgctgccttttcaaacttatccatgttgtcgatgccgccgtctatatgcagatgccaccacatgatttcacattcgctcaggtctactcttcctgcctgcacatcttcgaatgagatatactgcgaattggcaatattgttcagcatccaggttgccgcttccttttcttccggattcagttcgttcagtgtagctgccagacccacatatacggcactcggtgcatcggtcgggataaccgttaccgtataaacggcagatgcggtgttatatgaaacggtgaattctacaggattgctgaagtcaatagcctggccggatgccggcattacggtggctcctgccgaagttgtaatgatcggaaccatgtttttgatattgactgaactcggtacacgtacggtgatggtacgtttagtctggtcgataactccggcataagcgtcattcagtttgaaggagagtatccgcgcttcatcatgcttgatgttgacggtgtagtccaggaatacgtttccgttagtcacttttatcacttgggggaatgagaagttcagcacatcgcctgccttaacagaggcctcggcaccttcggatacttcgataccggtaactttcattgcgtcagtgtcgtatacttcgggcactgccacagttacggtcttattggtccggtctatcacccccgtataggtatcattcagttcaagggcggtgagccatgtgtctccgtccagtttcaggtcggaagtattatcatcgctacatcccgggaatgttaacaacaggacagttcccagtacaagcagatttagtttattcagtattgatttcataatgttcttcttttttataaggttaccagttaccacaattctgcgtatagtttccgttgctggcactcatctgtgcaaacgggataggcagatattcatttttattcttagtgaacgaggcattcgtgtagatggtgcagtcggcagcttcctcggcatagaacttattcagtacttcggcagcttcgccccatcttaccaggtcaaagaagcgctctgattccagagccagctctacacgacgttcaaacttcaacaatttcaaggcatctgcctgtgagtagcttcccgtataaggctgaatgttgaaacgtacgccatattccatttcgtagtcggcaatcatggctgtgctttgtttagcacggttacgtacttcgttaatcaggctgatagcttcagctatacgtccgtcgttcagttggatcagtgcttcggcacgcatcaacaatacatccgagtagcgcagtacgatgcggttcatcggagaaccccaccaagcaccctttatcaggtaatcgccatccggatccacattctgcttcaaggtcacgtaatatccgtaaagtccgttgctgcggctccaggtagtcgactggtccatcatgtagttcttattgaattcataagggaatcccggcatacctaccgtcaggaagaggcgtgggtcagcataatcggattgcgaattgtaatcggtgttgttaaaggaatccagcagcgggtgtccgttggcatctgttttgaatgcgtttaccagattctggctcggtttgtagaagtcgcaaccaccatcggtaactcccggaatgttgggaacgatcagaccataagaccagttgcagttaccgttgttggtaccgtcgttcatggagtattgcatggcccacaaagattccacgccattttcatattgaggttccggacggaagttattgtgaaaatctgattccagcccgtagccgcctgccgacataatggcattgtctgtgtattgtactactttcaccaggtcttccgtgctgaggcttgtcacttcatggctgtctgcattatcctgatgataagctttgtacagataagtctttgccagataggcggctgctgcggctttggcggggcgacctttgtctgcctgcttcacgggaaggttatcataagcaaactggaagtcatctgcaatctgttgccagccttcgtcattgttgtaagtggtgttggagagatagttatattcttccggtgacaagttggcatcgttggcaaacgggatcttcttgtacaggcgtttcagcaagaagtgaccatgtgcacggaggaatctcatttcggcaatgcgctgctgctttagtgaataagtactttcatccacttgttccaatagttgcaaagctgtattgacgcgtgagatacagttgtagaggcgctgccacatatcgctgatgttccatgccgtagtcatgataccttgtgagatgtccagtgagtggaatacatcaccgtcttccgtaccgtttccgcctttgtaagcgtcatctgaacgtacgtcatagttccacatggagaaggaagaattgatatcttcggcagtaatccatactgcataagcagagattaccagattatcgatgtatgccgggttcttcagctgttcatcgctgatggttccttgggggagctgatcttccagaaagtcggtgcaactgccgcacatcagtgaaagacctaagactgctgtatatattaactttttcataagtaactgattttattgttaaaagcctacattaataccgaaagttatattcatcgggatggggtaaccatagttggcattctcaggatctactccggtgaactccttactcttgatggtgaatacgttctgtgcgctcaggtagaagcgcaggcgctccatcttcatcttctgggcaaagtttttcggaacgttgtatcccaactgtatattgcgtaacttcaggaacgaaccattctcaacaaagtaagtggaaacacgtttctcattgttcgtatcgctgcgtgacaatgcaggaatggtagagttcggattggtgggtgaccatgcatcgagtactcgcttacctttgttcaggaaaccgatattgagtccactccaaaggtcggtttccttcttcaggtcgctgataacatctactccctgaacaccttgccagaacatggtgaggtcaaaattcttgtattcaaggtagatgttcagaccatagctgaagtccggagtcggattgtaaatccattgctggtctttctcattgatgataccgttaccgtccaagtcacgccagcggatacggcctatcccggcgccttcctgagtggcatggttatcaatctcttcctgtgatttgaagataccgtcagctacataacccacctgcgaaccattggcgtgaccgattacgctttgtacaccgttaccaccgaaagtgccgttggctgctactgtagttggcagcttcgtgatttcattccggtaggtggatatgttggcattcaggtcatatttcagtccgaatctcgtttgattgcgataaccgagattcaattcaacacccacattcttcatttctcccgcattgatccattgactgcttccttcgcccatagcggcgatacctgccatctgtaccagaatatccgttgtctttttgtagaaccagtcgaatgaaccgtaaagagattgtttaaacagtgagaaatcgaggccgaggttcgtttgtgtggttgtttcccatttgatgttatcattaccgatctgattacgtttgaatccggattgaaggatgctgccgccattggttccggcaatgtcgtaggaagtaccatagctctgaccgcctgattccgttacaccgtagttgggaacataaattgtatagcgggcaatgttcgagatttcctggttaccggtctgtccccatgaaccgcggactttcagatcgtcaatccaactgaggttttgcatgaacttttcacggttcaagcgccatcccagtgagaaggaagggaatgtggcatagcggttatttttaccgaaacgtgaagaaccgtcacggcgtactgtcatcgagagtaggtatttatcatcatatgtataattcagttttccgaagaaagaaaccagtgaatagccttcgcccgaaccgtaagcctgagccgtaccggaacccgcattcggccacatatagtcgggtgtcagaatagaataatcttctttataacccgaaaaattgatatcatcttcacggttcagctccatacccaccatggcgtctccacgatgtttgccgatttccagattgtaggtagcgatggcattccacatccatttcgtccagtgttcctgcttggcttctacggcattcttatcatttgccacattgccttcggtgatggggtaggtgaagatgcgttgtgatttctgtgcataatccaatccgaaggtggagcggacattgaatcctttgaaggggttgaggttgatgtaagcatcaccaaacatacgccagtaagtatagcgattatcagagttacggtccagtctcgctaccgggttctcacggtcgggatatccgcctaccggacctgcatattctccattgatgtcgtaaacgggcaatgagggattgaattgcaatacattttgcaagaatccacccggtgcctgcacctccgaagtgcggttcagtgtgaagtgctctcctatggtcaggaatttgccaatcagattataatcagaatttatgcgggcagagaaacgttcgaagtcactgtccttgatgatacctatattcttataatagcccagggagaagaaagatgaccccttttcagaaccattgcttactgatacattgtactgctggataatacctgtacgggttgtttcatcgaaccagtcggtgtcggcagccggaacggtattggcggaatccagatacttggacatgctgatgttgttcagttgaggataaccgtttgcgtcatatccccagctatacttgtagcccagtgcgttggtgttgggatcctggccttcgtttacgtaagcttgccacatggcacggccatattcttccgcattcagtacttccatcttattggtatacatggaagcggcgatagaagcatcgaagttaatctttatctgtccttctttacctttcttcgtagtgatgatgatgacaccgtttgcagcgcgcgaaccatagatagaggcagaagccgcatccttcaatacctggatagattcgatatcattgccgttcagttcgtgcatgcccgatttggtaggcacaccgtcaataatataaagaggatcgttattgttcaaagtcccgacaccgcgaatacgtacagtggcgtttccactgggattaccgtcggctgtgatgttcataccggggacgcgtccctgtaatgctttgatcgggttgttttcgttttgcttggcaatctcgtctatgctgactacggaaatggctccggtcaggtcggccttgcgttgagtagtataacctgtgactacgacttcctgtagcaactccgattcttcttccagaacgatattcagtgtagcttgagctttcacattcacagtcttgaatccgatatacgaaatggagagttctgcgccttgtggtacagacaatgtaaagttgccgtcgatgtctgttatggtgccgttacttgtctggttggtttctatgacagttgcaccgataatggattctccgtcagtcttggaaaccacttttccttgtaccgtcaggcgttgggcctgaactagtgtacacattataagaaagagtgcaaatagaagtgatctttttatgccttccatgtttttagattttaattaatatgcttttcattttgtaatcgctgtggattacctctcaaaacatgctttcccgagtgatgttttgatgttgcaaagaaagggaattaagtgaaaatatgctgtaatttatgtttcataagctggtatatttgtaacaaaataaagggcaggtatcatatttgccagcttatgaaacataaatggcaggctatttctgttttattcgcttcctttgcaaagtgctttcccgagcaactcattattaattaaatgtaatacccaaaaacatcatgaatttaaaaaacaatttgttgactgtgcgatggacccttacctttataataggtacaatctggtctgtcttttcgtgtcaggctattaatcctccttttgtgattaaacatttaggtgacggacagagcattgtccagattgagaaccagaagaaatttctgttgcttcccgtggaagaggctgctccggaagcaaagctatatatgatagccgataatgacgtagtgcgcaatatgaatgttcgtctggctataaataaggtggactattttgttccggtagatctctccggatttgataataaatcactttctttcaacttccagttgatacccgatacggctatttgctgggatgaaatgaaactttccaatgagtttgacacatccaatcgcgagagtttccgtccgctttatcacttcactcctcaatatggctggatgaatgatccgaacggtatggtatataaagatggtgtttatcatttgttttatcaatacaatccttacggttctatgtggggaaatatgcattggggacatgccaccagtacagacctggtgaattgggaacatcagccgatagccattgcgcccgatgcgttgggaactatcttcagtggttcctgtgtggttgataaggataatacggcaggctttggtgccggtgcgatcatagctttctatacttcggccagcgatcgccaggtacagagtatggcttacagtctggacaacggaaagacattcaagaagtatgcgcgtaatcctatactgacttccacccaacgtgatttccgtgatccgaaagttttctggcatgacgctaccgataaatggatcatgattcttgccgtaggtcaggaaatgcaaatctactcttcagctaatctgaaggactgggcttatgaaagtagttttggtgaaggtcagggggctcatggtggtgtatgggaatgtcccgacctgatagaactgcctattgaaggtacggaactgaagaaatgggttctaatctgtaatattaatcccggcggacctttcggtggaagtgccactcaatattttgtaggtaccttcgatggaaagaagtttgtgaatgaatcaccgaaaaacaccaagtggatggactggggaaaagatcactatgctaccgtgacttggagtaatgcgcccgaaggacgccatatagcgctggcatggatgagcaactggcaatatgccaacaatgtacctactactcagtatcgcagtggtaactctgttccccgtgacctgagtctctatacttcggcgggtgaaacttatctgaaatcttccccttcgcgagaactgctgaaactgcgtgggaaagaagaaaagaagcattccttcaaggtggaccgtacttataatatggacaaactactttcggataatacaggtacgtatgaaattgaaatgacgattaagaacagaaatgcagaagtcattggcttccaacttttcaattcaaaaggagaagaagtggatatttactataacctggtagagaagaagtttgcgatggatcgtagtaagagcggagtcgtatcattcagttcggactttccggtgctgactcttgctccgatagaaggcaattcggaaatgacgctgcgtcttttcgttgataaatcaagtattgaagcgtttggcgatgacggacgtttcgcaatgacaaaccttgtgtttccttcggaaccttacaaccgtatcagtttctatgccaaaggcggtagctatgcggtaagttcattcaaggtttataagttgaaataagattggtctatatttcctccttttctgtacccgaattttatcaaagccgtacccgctccgtagcaggtccgtacctaagcgtttggaccagatacggaccaggtacggcttctcctttattcttctatttcaattgtatatttccctttgaatacctcttcgggttgcagatgctgtacccaatccttatctttatactctcctgtataatgtgctttgtcacaacgaccgtaccatggttcaatacagacaaacggggcattcttggtaggtggcgaccacagtccgacaacaggtgcatcgaaatgaaggctaagataaggagctttctccttattatatagagtaacccgccgcacctggcttccctccaatataagtgcatctttgtcaaatgtatgtgtgtccaatggcaacaagtcgtttgtcagtttcagaggatattgggtgtccgggtcggcacatcctttttcagaaataagtatgtatttcagtccgcttttcttattgaaaccgaagaacccccgttcttgcgtttcggcatcgaaatccggatagtagaatgccggatgtgcaccaatctggaagtgcatttccttctccccggtattctctacttcccacatgacatcgaccttcttctcgcggatgcgatagccgatggtgagacggaatgggaaaggatatttcttgagtgtttcttcgttgctgacaagctggtagcggacttcatcgttttcctcggatatcagtgtgaactccatgtcgcgggcaaatccatgctgagtgaggacataggtggtgtcttcgtttcgatattcattctcccatacgcttcctacaatcgggaagagtaccggcgaatggcgtttccagaatgcaggatctgcctgccatagatattcttttccattagaaaaaatactgcataactctgctccatgtgcagaaacttcaatgctgagtcgtccattaaagagtgtttccatattgttgtttaaaaagtttctttggataattttccacaaatgtagctaaaaagagaaataatgcccttgaaatgcgcttaaaaaacattcttgtatcataattgccactctttgtaacaagattgttatcctgttgttctgatattcgcttcctttgcaacgtgcttttccgagcaagaaatacttaaattaataccatacaacaatgaaatctaattcttcgttatccaagctgatccctgtgatgctctgctttttcgctatgggatttgtggatctggtaggcatcgcctccaactatgtaaaagcagatttgggtttgactgactctcaagctaacatcttcccttcgctggttttcttctggttcctgatcttctctgtgccgacaggtatgttgatgagccgtatcggacaaaaaaagacggtactccttagtttggttgtgacctttgcttcgttgttattgcctgtttttggtgatagctatacgttgatgctgctttctttctctttattaggtatcggcaatgcattgatgcagacttcactgaatccgctgctttccaacatcgtgagaggtgaccggctggcaagtagccttaccttcggacaatttgtaaaggcgattgcttcgtttcttgcaccttacattgctatgtggggagctacacaggccattccgtcgttcggtttgggttggcgtgtgctgtttcctatttatatggtgatagctgtgatagccgttttattgttgggacagacacagattgccgaggagaaagaggaaggaaaaccttctacgttcggtgagtgtttggctttattgggtaaaccatttgttttgctttctttcatcggtatcatgtgccatgtaggaatcgatgtaggtacgaatactactgctcctaagattctaatggagcgtttggggatgggattggatgacgctgcgtttgctaccagtctctacttcattttccgtacggcaggctgcttcacaggttcttttattttgaggaggatgaatgctaaatcgttctttgctatcagtagttttatgatgttactagcaatgattggactttttgctttccattcaaaaacatctatttatatttgcattgcgttgataggttacggaaactcgaatatcttttcgattgtcttctcacaggcgttgctgtatatgcccggcaagaagaatgaagtttccggtctgatgataatgggactttttggtggaactatttttccgttggcaatgggattggcaagtgatgccataggacaaagcggtgcagtagccgtgatgactgtcggagtactttatttgctgtactatactttgaagataaagaaataacctaatgtctaattgtaatttataatttgtaattaaatttagtgtcatgaataaaatcatcgtaggaatgggtgaagcactctgggatgtgctgcccgaaggaaagaagataggtggtgcgcctgccaatttcgcttatcatgtatcacagtttggttttgatagccgtgtagtgagtgcagtgggacgtgatgctgacggacaggaaatattggatgtttttgctcaaaagaaactgacttgtgagatcgagcaagtggattatcctaccggtacggtacaggttactcttgatgctgtgggggttccctgttatgagattaaagagggggtggcttgggataacattccttttacggatgatttgaaacgtctggccctttccacccgtgctgtttgtttcggttcgctggctcagcgcagtcccgtgagtcgtgctactattcaacgttttctggacaccatgcctgatggagaagatcagatcaagattttcgatatcaatcttcgtcagggattctatacgaaagaaatactctgcgaatctatgcgccgctgcaacatacttaaaataaatgatgaggaactggttactatcagccgtatcttcggttatccgggtattgatttacaggataaatgctggatacttttggctaaatataatctgaagatgctgattctgacttgtggaaccaatggcagttatgtatttactccgggtgtagtatcttatcaggatacaccgaaagttcctgttgccgatactgtgggggcaggtgattcttttactgctgcttttacatcggctatacttagtgggaaacctgttcccgaagcgcataaactggcagtggaagtctccgcctatgtttgtacacagagtggggccatgccggaattgccgtctgcttttaagagtcggttgggagcagctgatatctccggtgtatgagttgaacctatcctgataattgcttcaacttggcaggcaatcctatattataggggcattgtgtaacatacaatgcctttttgcttccaactcccttttgtgccatattcctgcttgtcttctgtagtataacaataatcgttcttattttcggcttcgtatagcgggatggctccttctacgggcgaagcgtatacatatcctaattctttttccagttgccattcggtatcggctggcaatagctctacagatagacgttgcttttttccgttactatataaatacaacggtacggtactcgtgatttgttgtttgtagatggaacagatggctccttcatattttttgttggagtgcattgcaatatctaagtaagatgtgtcgtatgtgtgatttttgccattccaggcctgaagtaacggagtggtagaaactaacgataacttttggttggatatatatttttctatcgcatctttcacttgctctttttgggtggcatccgctattagttcataaataggaaggactttattttgagtgattttcgtcaaagtataattctcttcattgaacgagttccaccaggcattaaagccatcggttatcggttgtgaagtcaataaacttgtatttcctccatagaattccagtataagctgacctcctatgctttgtgccacttcttcttcccatccgccggcaccgcttccggtaaagagaccttgctggcctattttttccaaagcgctgagtaaggtgatttttgtggtgctggtagctgatgtcgctgtaggtactgctgtccggtaaagtcctctgaatcgtgctcctataccgacatccactaaaaggtgtgtgccatatttgtttatgatatcttctgctgccagactggttacatcattttcaaattcctgcgtaaggtatctgtatttatatttctctaaggtatagaaaaacgaaaagtaccaacgctccgctgtaaatagttgttcgctggaggcaaaagaatattgtgaagaatggttgtaatcagactcgaactctttatgcttgagaatggtaccgaccgatagagcatttctggaatttatgtctcccaatatcaggctattggtaatatcagtcaggaatgttgttgcattttctccggcgtagtctctgggttcggaagaagtggctttcatacgatagatataatcttcatcgctgttttccaatttttccaaatctattatgggagcttttatggcttcgggacttaaatggtcggcagtaacatcgtagcctgcgccaagaatttgtttcatatttgccggataggctttgaaaatgactttcttgtcaggaatagctttaagttcataaaaatcagaagaagtgggattttcatcttccgggttgaaatcagaatccgaggaacatgcatataacgtgcatatcgaaatgataaaatagaatagatttttcataatataatagtttttctagtagttatcttgtagctgtcgacaaaagtaacagaagtatttgaaagggcaatggatacacattcttttcttaagaaaaagtgtcttattttataatgtaagtgaatctacatcactgcacaaagttcctccacctgcttttcaaagctatccctcatctttgccttattcttcactacactccgatgattataaattgtttgtggtgagtagaacaagagggtagctatcctggaactatcttgaatccccatacgtatcaatgcaaatatccgaagttctgtattcagtatttctcctcttttaggtatgatttcttcaccctcccgcaatagtgcattaaattcttctataaatttagggtataaattcagaaatgccgtatcgaagtttacgaagaactctttcgcatctgtatctgacagtttggtggcattgactaacttcaatagatcatctgtctgtttcgctttcacttttctctttaccaaatcctgatatttattcagcttgtctatataggcagcacacaggtccatgaacaggcttacatattcttcacgcgtatgatttgtatttactaatgccttattcagatgttgcagttcctgattcatgtccgccagtatcttcctgcgtttatggagttgatgcatttgccgataaatatagatcagggagacgaccagtccgatggacaatatactgatgcatatcagcgaccattgcagtcgtctgctcttgataagattctgttcctgataagacagtacaatagaagggaattttttcgctatttcgagcatgcggagccggttgttataaaactgagcgtcttccatggagtagttcagatagcggttggcacgggatacttctccacttcggtttttaaagatatgtagggccagttcctgtaaggccagattttctttaagcgggcatacctgatccgatatggcagccttgatcagataatgctcatattcgttccagtcaccaagttttgaatagaccaatgctaaaccatacgtaaccatagcatacaatcgaacattcactggaacgccttccagtgccttttgataatacttttccgcttcggcgtaccgctggtgacgatatagattttctcctttccagtaattgtgtagtgacgagccagtgggaagtacactgatcaatgaatcctgataaagcatttccttttcataataacggggagcataaaccttatcgttggaatattccgcccacatactgtaagcccattcataggcggtgtaatattctatccgtgtcgcatcattcaatgtacgtgaatctatttgttccagattctggatggattcgctgaaataacccgatgtggaaagaagcaccgagcggtgaatgatgctcaggttgcgataagcggggtgagatagtgtcatagccacttgttcttccttgtctacatagagcatggctgaatcgaaacggtaagtatagtactcttcgtaaatagcattgtataatcggaaacgttcattgtcgtccatggatggatatagcaaacgctttaaactgtcaattcgggcttcttttcggagtgagtattggttgcgcagttttaaagctgattccaactcattggataagtcagtcttattcgccgcacgaaaagggacaaacacgaacaacaggaataataccgataacaagtattttttcatagggtatattcattaaaagtagacaaatacaaagatattaaaactttccggtaaacgggtatgtctacttgcttttataaaacggaatgatgtaaatagcttgttatcagtgctgtattgtagatgatactctcacgccaatctacctgacggctacttgcggaaaccgggcattattatacctgttaactttgccctcgttgaaagataaggggaatatttcttatctgatgccttgaaccgaaagtttaattttaaatccattaatagtatgaaagcaagtctcttttcttatgtcatatcggcagccttatcattcgctactattgcaacagcgagcaaaccggtagagaatgacactatcagtagtaaaaaagcggagatcagcgaacgcaatgtgatgctgaatgcttcggatgcaaacaagccccgtgaaattcagatcggacttcccagtgaagatgtaaatgtgtatgaaaacggattacccgctgtctattcttcggctgtgcataagctggctactcactggcgcagcgatgccagcctgggcgaagtagggctgatgacaccgtctgaatctgctattgctaccggaaacatcgcttattccgtaaattctttctccaaattggggcaaaaggagttcaaaggagtcttgaattatcgcaccaaccattttgggtggcaaaatatagacatgaatgtgtccggtggcatcggaaaccgctggctctatacagccagcatctatcagaacttcgatccgggtagtttctctcctaagtttgaaaacttcagtgaccgtacccaactttatcatgcagggctgacgcgccttttcaacaataatcgcggaaggttctcagttatctataagttctcaaaaagcagtgcattgggttcgatgattaacgctgctccgtttatctatgtgggagatggcagtgtgaaagaaattcctggcttcaagttaggaacttcttcgtatgctcccgaaggtggacgttttcagtacatggatgtgatggacggaaagatgaagagcggtcggtttggtgactttacaggcaataaggcgcatgaagtggctatgctgtttgattataccttccgtaacaatctgaactggacgctgaatgccaagtttatgaatgctcccgaagctaactatgtggactttggtggtagcaatatcaacaaagccacggtggcggacggcctttttctggatggttcggaggatgcctataccggattggtcgaaggcaggcgtacctggttgcatcttggcaaagtgaagaatgcattgcttacttccgaactgaaaaagaagataggcgaccatgacgtacgcctggggctgaatgaatggttttatcatttggattatcactcttcttcttttcaatgggtaggcacggttactgaatatccgcagatactgaatcgtgtggtagctgacgggactactgctaaattcagtggtttcaatgagctgagtccggaatataccaaagggaccgaaaacaaactggctgcctactttacggataactggcaggtgagtccgaaattcactgtctattatggtgcccgtctggaatattaccgtatgtctgccgatcagattccttatggtcgctattccggcttccacatcggtgatactcacgaatatacggacaatcaagggaatatactttctactgaaaagatacagccgcagaaagtagtaaaagataagctgaactatgctgcaacggcacaattcacttataagttgaccaagaacttcgggctgactgccgacggaaccgtcgccacccgcttcccacgtatcaatgaatatgccggaacaggacctaccgaagagcaatataagcgtgtgactatccctttgctgcgtggcggattattttatcagaatgactggataaacctgacttccatgattacttatatttccaagtcgaataatatagaccagcagaatgtaaccaaaccgggaacaacgcagtccaagacgaccttgctgatttatgatatcaagacattgggttggaccacttccgctgaaatcaatcctttcaaaggtttccatctgcatgccctgtttacttatcagaaaccgacttataacaattactttatcaaatctccgtttgaaggagtgcctgacttgaatgctaatggcaacatagtgaaagaaattccgcagatactggctgaaatagatcccagttataacataactcccgatctgcgcttgtggctcagtttccgttatttcgggaagacgtatgccaatctgactaatgccctctatttcaacggtcgttgggaaaccttcggtggtgtgaactggaaagtgaataagcacctctcactgggggcaacggtagtgaacttcctgaaccaaaagggtgcaagcggaactatcagcggcgccgaactactgggcaaggaagaagcaggtaaattcaaagatcattatatgagtggtaattacttgcgtccatttacactggaattcagtgcaagcctttcattctaaattaatttaatatatttttgtaactaaattcattgtacaccatgaaaaatttacttgtaactctctttgcatgtgctacattgtcgtatgccaatgcagcggaaaacaaaacgatccgtatttctacggataacaccgacctggtgcttcaggtaggcgacaacggccgtctgtatcaaacttacttaggtgaaaaactgctgcatgagcaggatttgaataactttcagtggaatatccatgccggtgccgatggtagtgtaagtaaacgcggttgggaagtgtatggtggttcgggtaatgaagattactttgaaccggctatcgctatcactcacaatgatggcaatccgtccactatgttgtattatgtttcttcctcctccaaggcggttgagggtggtacggaaactgtggttaatctccgtgacgatcagtatccggtagacgttactctgcactatgtggcttatccgaaagaaaatgttatcaagacttggagtgaaatcaagcatcaggaaaagaaacctgtcctgctttctacatacgcctctgccatgctttatttcaataattccgcttattacctgactgagttcagtagtgactgggcaaaggaagcgcaaatgagcagccagcaattgcaatttggcaagaaagtaattgatacgaagttgggaagtcgtgctgccatgcatacgcatcctttctttgaagtagggttggatcagccggtcagcgaacatcagggaaatgtattgatgggtacgttgggatggaccggtaatttccgctttacgtttgaaatggacaatgttgggaatcttcgtgtgattcccggtatcaatccttacgcttcgaattatgaactgaaaccgaatgaagtgtttatcactcccgaattcatatttactttaagtaatgacggtgccgggaaaggaagccgtaaccttcatgagtgggcacgcaactacagcttgaaagatggtaaagggagtcgtttgactctcctgaataactgggaaaatacaggctttaactttaatcaggagatactggccgagttaatgaaggaagccaagcatctgggtgtagatatgttcttgttggacgatggttggtttgcgaacaaatatccccgtaagaatgatcatgcgggtttgggagactgggatgtgaatcacgataaattgcccggtggtattccggcgctggtgaaagctgccaaggatgcagatgtgaagttcggtatctggattgaaccagaaatggtgaatcccaagagcgaactcttcgagaaacatccggactgggcgatcacactgcctaatcgtgaaacgtattattaccgtaaccaattggtacttgaccttagcaatccgaaggtgcaggattatgtatatggtgttgtagagaatataatgaaggagaatcccgaagttgctttcttcaaatgggattgcaacagtcctatcaccaatatctattctccgtatctgaagaacaaacagggacagttgtatattgatcatgtccgtggcatctataatgttctgaagcgtgtgaaagcgaattatcctgatgtcccgatgatgctttgttccggtggtggtgcccgttgcgactacgaagcgcttaaatatttcacagagttctggtgcagcgacaatacggatcctgtagaacgtatttatatccagtggggcttttcccagttcttccctgcgaaagctatggatgcccatgtgaccagttggaataaagcgacttctgtaaaattccgtacggatgtagcttctatgtgtaagcttggttttgatataggtttgaaagaactcacggctgatgaattgacttactgccagacggctgttgccaactggaagcgtctgcaaagtgccattatggatggtgatcaatatcgtttggtgtctccgtatgagggcaatcacatggcactgaattatgtaagcaaggatgcaaacaaagctgtattgtttgcttatgatatccatccgcgtttccaggagaaactgatgacagtcaaacttcagggattaaacccgaacaagcaatataaagtggaagaaatcaatttgatgccctctactgaatctaaattagaatctagcgggaaagtttattccggtgattatctgatgaaagttggtttgaatgtatttggttttgcagcgactcagagccatgttattgagcttacagctcaataatagccttatctggtttgtctgtccttctttccggcaatagtagtctccctattctgtccgagttaaaaatcggtggaatagggagtttttttaagaaacagataacgatacctatgataatatttttatatttgcgttactaataacggaaaagatgagaagatatactatccaattattacttgtttcactttcctggttttggttgaccacttcgtgtacccatcgcgaagcacgtttccgtattggagtttcccagtgcagcgatgatgaatggcgacatcagatgaacaatgaaatgttgcgcgaggcacttttctatgacggagtagaaattgatattcgtacggtaaaagatgataatgcagaacagataaaagatatccgtaatttcatcaaagaaggagtggacttgcttgtagttgcacccaatgaagctgcacctatcactccggtagtggaggaagccttcgacaggggaattcccgtcattgttttcgaccgcaagatactttctgataaatataccgcttatataggtgctgacaactatgagttaggaaaagcaataggtaactatgttgctaatatgcttcatggacaaggcaacgttgtggagatagccggtttgacaggttctacaccggccatggaccgtcatcagggatttgttgccgccatatctccttatcccggcattcagcttctggcacgtgaagatgccggctggctgcgctctgaggcaggagagaagatggatactcttttggcgcgttttcctgaaatagatgtagtgtatgcacagaacgaccgaatggcggcaggagcttatgatgttgctgagcggcagggtagggcagaagaaatgcgctttatcggtacggatgctttgcccggtgaagggtatggcgtagaacaagtgctgaatggtcaactggatgccacgtttatttatcctaccggtggtgaccgtgtgatacagatggcgatggatatcctgaataagcgggactttcctcgtgaaaccatattgagtacttctgttgtagatgctaccaatgcgcagattatgcagatgcagacttcgcatattgctacccttgatgaaaaaatagaaacgatgaatggaaagatgagtcagttccttgatcgttacgctacgcagcaagtcatattatatggcagcttattggtgcttttattggtaatcggtttactggttgccgtttatctttctttgcgtaccaaaaaccgcctgaatcgtgaactgtcccggcagaaggagaagttagaggaacagaagcaacaattaacacagcagaaggagctgctcattcagcagaaagaacagttggaacagctttcccgcgaactggaagaggccacccatgccaaactggtattctttacgaatgtttctcacgacttccgtactccgttgacattgatagcagatcctatcaaccagcttcttgccgataagtctcttggagagcatccgcatcaactactggaactgatgaagaagaacgctaacatccttcttcgtcttgttaatcaaattcttgatttccgtaaggtagagaacgggcggatggaacttcatttggaaccattcgatcttttaagtagtttccgcggctggaatgattctttccgtatggcgttgctgaaaaagcatatttccttctcttttgaagctacacctgacacagatttccgtatgatggcagatagtgagaagatggaacgtatctatttcaatttgctatccaatgctgtgaaatatacacctgagaatggtaaaatagtggttaagctggaggcggaaacgactaattaccgtttctctgtatttaactcaggtagccatatttccccaaaagaggtggatgctatctttgaacgcttctaccagatagacggacatcaggccggtacaggtatcggattagcgcttgtccgtgccttcgtagagatgcatggcggacagatcactgcccatagcaatgaaaaaggagcgacttttaccgttctttttccggcgcagagtgtttctctgtatcatcctacggttgttactcttcctactgaggaagcggaagtctctgctacattgatagaaacagatttgcccttgaatgaggaagacacgaaaactgcagatcgcccgacagtgctggttattgacgataatgccgatattcgcaattacgtaaaaacactacttgctgaagaatatcatgtgctggatgcaccggaagctgctacagggattcgtctcgcaatgaaatatgttcccgatgtgattgtttccgacgtcatgatgcctggtatggacgggatagagtgttgccggaggttgaaaaccgaattgcagacttgccacattcccgtgattcttcttacagcatgttcacttgatgaacaacgcattcaggggtataatggtggtgctgactcttatatatccaagcctttcaattctcagttgttactgtcccgtatccggaatctgatagattcccgtcggcagcttcgccagttcttcggtgataatcagacattggcgaaagagaatatctgtgatattgataaagattttgtctctcgttttaaatctctggtagaggagaaaatgagagatccggaactgaatgtggaagacttaggcaaagatatgggactgagccgcgtgcaactctaccgtaaactgaaatcacttactaattatgctcccaatgaattgctgcgccaggcacgccttaaaaaagcaatttccctgttggcttcttcagaaatgacggttgcggaaattgcttatgaagtcggtttctcgtctccgtcttatttcacgaagtgttataaggaacaattcggtgaaagtccgacggatttcttaaaacggaagaatttatagcgttgcagggggaagaaacgataattattggctatttttgcagtctgaaaaatggaactgaatattttatgaaatacgatctttgttgtatcggatatattactttggataaagtagttactccgcagaaaactgtgcacatgcccggaggaacctctttctattttgcgcatgccatcaaacacctgagtacggaaggattccaacttgtcaccgccttggctgatagcgagatgccggtggtggatgatttgaggacagacggtattgaagtgaaagtactccccagcatccattccatctgctttgagaatatttatggcgaggataccaatgaaagaaagcagcgggttactgctaaggctgatccttttacgattgaaggtttgcaggatgtaaatgcccggatttttcatttgggtagtttactggcggatgatttttcactggatgttatcaaatatcttgccgggaaaggattactttctcttgatgtacagggttatttgcgtgaagtgcagaacgaagaagtattggcggtggactgggctgaaaaagaagaagccttgaaatatatccatatcttgaaagctaatgaacacgaaatggaggtacttacgcaatgttcagatccttatgatgctgctgttaaattggcggactggggagtgaaggaagtcttgctgactttgggagacaaaggctcacttatttatgttgatgaacgattctatgaaattccggcatatccggtagagaatgttgccgatgctaccggttgtggggatacgtatatggcgggctatctgtatatgcgtaaaagaggagcatcttatcaggaagccggttgttttgccgctgccatgtgttccgtcaaactacagagctacggtccgttcggtggaacggaggaagacgtacatagcttaataaaaaaagaaaatgccgtaatttaagtacggcattttctttttttatacagatagatctgtttatttcaacattgaaggtaaattgtctcttccccagaaataataaaagatcagtccgatccaactggtgagcaatacaagaatagcgaccaatagtttcttgacgccatctaccttccattgcataatttccaatacggctttgatagcaagtatcaggcctataatccaaataataaatccaatcataatgttcgttacttttgtttgaaaacaaataaaggctgcatccggttcacggtgcagccttcatttttcagagtttattatttactattttaataatcgaaattattcggcatcagcaccccagtttcctttagacagacgcttgtagctgttataacgccacttggcattgtcttcggcagcttggaacagttcagcagcttctgaaggatattgtttcattacagaagagtaacgaacctcgctcttcaggaagtcctggaatccagaccaatccggttctttgctatccaactggaacggattcttgccttcagcttccaaagccgggttgtaacgccacaagtgccagtaaccgcacttaacagccttttcttcctcagcttggctcttgcccatacccagcttcagaccgtggttgatacacggagcataagcgatgatgagtgacggtccgggataagcttcagcttcacggattgctttcagagtctgagcctggtcagcacccatagcgatctgagctacgtaaacgtaaccgtaagtagtagccatcaaaccaaggtctttcttacgtacacgcttaccggcagcggcaaacttagcgatagcacccaccggagtagccttagaagactgaccacctgtgttagagtaaacctcagtatccaaaaccaggatgttaacgtccttaccgctggcgattacatggtcgagaccaccgtaaccgatatcgtaagaagcaccgtcaccaccgatgatccactggctgcgttttactaaatattgagtcaagcctttcagttccttgctaaccgggcagccggcagcgatgccttgctcgatgatagcctcgatctgaggtgcaagttctttagtcttgtctgcgtcgtacatgttttcaatccatgctttcaatacttccttagcctcagcaggagcattgtcaccttccagaatctggttgaacagtttcacgatacggtcacgcatcttttcattagcgagttccatacccaaaccgaattcgcagaagtcttcgaacaaagagtttgcccaagcaggaccttgacccttttcgttcttagtataaggagtagaaggtactgaaccggagtagatagaagaacatcctgttgcattggctaccatttcgcggtcaccgaacaactgagtgatcaacttcacgtacggagtttcaccacaaccggagcaagcgcctgagaattcaaacaaaggagtagcgaactgagagttctttacgttagctttaacatcaaccagatgttgcttgcttgctaccttttcagcacagtaatcccagttaggaacttggttcaactggctttccagatgtttcatagtcaaagccttgccacccttcttcggattacccggacagatatcggcacagttaccgcaacccagacagtcgagaacatcaacctgaatacggaatgtcataccgtcgaatactttacctacagctttcagcatctcgaagtttgcacccttctgctcttcagcatccagaacgaacggacggatagaagcgtgaggacaaacataagcacacttgttacactggatacaattttcagcattccattcgggaacgaaagcagctacaccacgtttttcgtatttagctgtaccttgataccaagtaccatcttcgatgcccttaaatgcagataccggcagcaagtcaccatcttgtgcattgatcggacgaactacttcgttaatgaatgcaggatcgttgttttcagtcttagcgtcgtcagccaggttaacccaagcaggatcaacggtcaattgcttgtattcaccaccacggtcaacggcagcatagttcttgtttacgatatcttcacccttcttgccgtaagacttctggataaatttcttcatctgttctacagccaggtcaacagggattacacctgtgatacggaagaatgcagattgcaggattgtattggtacggttacccaaaccgatttcctgtgcaatctgagttgcgttgatatagtatacagagatattgttcttagcgaaatacttcttcacacgggtaggcaggttcttggccagttcttcgccttcccagattgtattcagcaggaatgtaccgttcttgcgcaaaccgcgggttacatcatacatgtgcaggtaagcctgaacgtggcaagccacaaagttcggagtgtttaccaagtatgtagaacggatcggagtatcaccgaaacgtaagtgagaacaagtgaaaccacctgacttctttgagtcgtaagagaagtaagcctggcagtgtttgtcggtattgtcaccgatgattttcacagagttcttgttagcacctactgtaccgtcagcacccagtccgtagaatttagcttcgaacatacctgcaccgcccaatgcgatttcttcttcctgaggaagtgaagtgaaggttacgtcgtctacgataccgatagtgaagtggtttttcggcatcggcatagccagattcttgaatacggcaatgatctgagcaggagtagtgtccttagaacccaaaccgtaacgaccgcctacgattaccggagcatcagctgcaccataatagcagtctttaacatcgaggtacaacggttcgccgttcgcacccggttccttcgtacggtcaagaactgcaatagtcttagcagtcttaggcacagcagccaggaagtgcttagcagagaatggacgatacaggtgtacggcaaccatacctaccttttcgccattagccatcaggtggtcgatagcttcacgggcagcttcggttacagaacccatagcgatgattacgcgttctgcgtcttcagcaccatagtaatcgaacaatccatatttacgtcctgtgattttagaaatttcattcatgtattcttctacaatagcaggaactgcttcgtagtagttgttgcaagattcacggtgctggaagaagtggtcggggttttcagccataccacgggcaaccggattcatcggattcaatgcgcgagcacggaattcagccagagctttttggtcaatcagcggagcgagatcgtcgttttccaacatctcgatcttctggatttcgtgagaagtacggaagccgtcgaagaaattaacgaacggtacacgagctttgatagttgacaagtgagcaacaccagagaggtccataacttcctgtacagaaccttctgccaacatggcgaaacctgtcatacgggttgacataacatcctggtggtcaccgaagatacacagcgcgtgagaagccagtgtgcgggctgatacgtggaatacgcaaggcaggaattcaccggcaatcttgtacatattcgggatcatcagcaacagaccttgagatgcagtgtacgttgaagtcaacgcaccggcttgcaatgaaccgtgaacggctccggcagcaccggcttccgattgcatttcctgtaccaatactgtttcgccgaagatgtttttgcgtcctgcggcagcccattcgtctacgtactcagccatcgtagaagagggagtgatgggatagatagcagctacttcagagaacatatacgagatatgcgcagcagcctggttaccatcacaagtaatgaatttcttctgtttagtcataactaaattgaattattattaagtgaataaatctcaatataaaaagccgaacatccagagtggaatctgattcccccttcctatttccgctttgtgcagggcataggtgacgccgggattattttttattttcataccttccggacaaatcttgaaaggcatcacatcgtccaccaggaatgacatattcttgtcgcctttgttcaccttgtgatctttccacagggaatttgcgaagaaagtgtccagcacatctagttcttccactttcacgggatagatggagtacatcaggttggagttgtgcatcataatcttcgatggtttcttggggaattcttctcccttcggatataccatattgataaggcgtgcatctgccaaatatttgatgtagttcatcaccgtggcacgggatgtttgtatgtcgtttgccaactggcttacgttcggggctttcggaccgtctactgccagcatataaagcaatttcttgatttttgaaagatatttcagttcaatctgtttgataagcaggatgtccacttctaccatcatattcatggtcttcaacagattctccgagaaattgcgtttctccagaaagaacggatagaaaccatggtgcagatagtcctgcaagtaatccagtgggcgtaccttcgaaaggatacctttggcaatctgttcgtggttgctcaaaatctcttccagtgtataagcacggaacttcatgcctgtttgcaggttcagatactcacggaaggagaagccacgcaggttataactcttcactatatcgcgcagttccaggttttcctctttcagtcgcatcacggacgaaccggtaaacacgattttgaggtttggaaaccggtcgtagcacattctcagttccctgctccaatccggatgtttgaatacctggtctatcagtaatacttttccgccgcggcgttggaattcataagcgaaatcaacgatgctgaaataagaaaagtagaaattgttcatattgataaagaggcaggaacggtcagtgccgaatttctctttagcatattgtaacagaaacgtggttttacctacaccacgcgttcctttaataccgataagacggtcgttccagttgatctcatccatgaggtcacggcgaacgggggcattggtatgctcaacaagataggcgtgtgtgcggtagaatgcttccatgctgttaaattcagtttatcgggcgacaaatatacgtcttttttatagaattgcaaagtagagatggcaaaatatcttttttgttagtgaagtttatatatttgctttaccttgtttttctctgtaattttgcggccttaaataattaagaactgtaatagtatgaaactctatgtatttaacccagacacggacatggcacttgctaataatgaagaaaattatatggctcccgcttctgcctgtcgcatggcccaagatcttgctttattacccgtttggtatgcccaacccggcagtgcagtacttgctccttcggcctataacgctgattacctgcaaaaaatgaaacaattgttccccctttccgtgcaattggtcactgaaccggaattacccgattatgcggaatcccaaattgtaccttggggatggaatcgcgctttccgcaagcgtatgcagaaggccggtattgcccaacataaacttcctacggaagcagagttgcgcgagtgtcgtatgctttcttcccgtgcgtatgggatggctcttgctatgacgtttgaactgaataaaaccctcaaatgtgtttgtggacgtcattttctgatatcaggggagggcaaggaattctgcgttccggatatagtcgatgattttaaggacggttacctgttcaagtccgtgtggtcgggcagcggaaaggggttacgttggtgtcgccgtgggctgacgaaatctacggctgattggtgtcgtcgggaactggtgaaccacggggctcttatactggaacctatatataaaaaggagggggattttgccatggaattctactccaacggtagggggaaggtactgtttagcggctactcgcattttattacggatgagaaaggtgtttatcgtggtaatatgctggtttctaatgaggaagtggaacagtggattctacggtatatccctttagaagcctttgtgtgcattcgtgggtatttgcagaaagttatagaaggaatttatggtaggtattattccggtcctatggggatagatatgatgatctgtccggatcagagaggatatccgtacgccatttatccacatgttgaaattaatgtgcgcatgactatggggatggttgcccgtcagctttatgataatttcgtcgctcccggtagcaaaggaatttttaatgtcgacaatttcccttctgccgaggctttgcggacgcaacatgaacaggacatgagggattatccattggtagtggaggaaggaagaatcgtctccggctatctggccttggtgccggttactcctcaaagcaggtaccgggcttacgtgcgggtggaggtgtgttaacctcacggaacctcatttaacctcacggaacctcacgtaacctccgactgtctcacatgctattcttatctttatggctttaaactaaaacataaagaaagatgaaaaggaatttctatttgcagcatccgctgatggctatgcacgatcccagaatgcaatatctgttgaaaatggaaaagctcaagggaacaggggcttattggttcgttatcgagaaattggctatgttgcccggctcatgtgtcgatatggagtttttgcgtccttactgcaagatgcataagatatcttttgcttatgtcaagaagatcattctcggttacgagcttttcgattttgaagaggacggatcttttgcgcctgccgaactgaacccactgcataaaccggttcaaaagcgggaggaaacagttgcggataaaacgggaaaaccggaagattcggttcgaaaaacggttccgaaaacgaccggaaatgtatcggaatcgtcggtttcctggtcaaaaaatgacgaaaaacgacaaaaaacgtcgagggaaaaggcggcaaaacgcaccgaaaaatcagataaaacgctgaatgatagaattattagtgaaagtgttgatacggataataaagagaatataaaagatatactaacaacagcagcagaagaaaaagaaagaaacgctgctgctgatgatttttccaatgtcgagtctcgtcgtacggatgccgcggcttgctgtacggttgccacagttcagcgttcgcaatgtcacacttcaccgcttccggtgccacacttcagcgtccccaatgccgcacttcacacttgttcaagtgtggcgtttcacccattcaagtgtggcattggggacgctgaagtgtggcattcgggagggtcatctgcccgcttcgctttcattgccacaacggtccacggcagtgatagcaaaatacttctttgccgtccagaagcggacgggagcatacgtgtattccgttccttgtactcgctgggcaataatattttccggattggaggtatccaccgggtaagtgtccgagccgtagatgacgtaggtcggtacattacgtttgtcgttgtccgtggcgggcatccaactgaggtggatgtatccgtccggcagtcgagtgacagtaaggtgggtaggggctgtcggtggcacgttgtctatccagggcatggcaggttgcagggcaggagcggtataaaagtcctcttccaatacatcatacaacccttgtgtgttgtccatcagatatttcacacgataatgggcctgacctgccagtttgtgggtacggatgaagtgcatctgacgctccacttcatccagtgtccagtttccttcactgggatcgaggaaatagatacccagtccgggaatgatctggcgaccattactttgttcctgccagtcgagagcaaaaggatagaaatggttaccccggaagtaaagcatgggatatatctgatcctgtatgccttcacccaaccaaccttgtgcatcttggtaaacagtatgaaaagcattccatccgcgggaaggataacgggaggtatcacggtattttcctacagggcaggtacttacctttacccagggcttcagagctttcacacctttgtagaggtgtcggacgatttccgtaatgttatccctgcgccattgggcgaggtcgcgtcctttgccatattttcggaaatcataggtgtctgggaatcggggagcattctctggataacgcagataatcgaagtggacgccatccacgtcatatttttccacaacctcgcgtacaaggctcatcagatattctttggttgccggatttccgggattgaggaagtattcacgcttataaggcacacaaatagcggatttctgtttggttacggaggcattgcccagattggcaacatgcttgcgattgcctaacggaatggctaccatccaggcatggcactccataccgcgcttatgacactcttctatggcaaaagccagtggatcgtaccccggatcagcagctgttttcccagtcaagatggagttgaacggttctatcttcgagcggtagagcacgtcaccgcgcgttcgcgtctggaagagcacagtgttgaagttggcatctttcagtcggtcaagtatctcgactagttctgccttttgttttcggatgccttcgggactggtggcacgggtacggggccagtccaaaccatagacggcggtgacccaggcagcgcgcacttcgtattttggaggacgggtaaccatctcaccggcggattgcgcggtaaggggcagaacgaatgtgataaataatatagtgagaagtaactgtttcatgttgatagagattttattgtaatacctaatacttattctaaacaaattctcttttccttctttatttctgtcatttttagcggcgaagataagtaaaacacttgagaatgttgtgcagtttccttagaaactattacatttgcgtccattaaaaataatgaataacgcaccatgattacatttacgctttgcctgttggcattaatagcaggttattttctttacgggcgtttcatcgaacatattttcggccctgacgatcgtaagacgcctgctttgactaagaccgatggggtggattatatccctttgcccacctggaagattttcatgatacaatttcttaatattgccggtttgggtcctatcttcggtgctattatgggggctaaatttggtgtatcatcttatttgtggattgtgctcggcagtatctttgccggagccgtacatgattacctggcaggtatgctctctctgcgtaatggcggtgaaagcttgccggagatcatcggtcgctatctgggagtaactaccaagcaggtgatgcgcggttttacagttcttttgatgatattggtaggagctgtctttgtggccggccctgccggattgctggcaaaactgacaccggaatctttggatgttacgttctggataatagtagtatttatctattatatttttgccactttgttgccggttgataaaatcataggtaagatatatccgctttttgctgttgcattgctttttatggcggtgggtatactggtgatgctttatgtgaagcatcctgtcttaccggaattctgggacggattacagaatacgaaccctaatgctgttgaactacccattttcccgattatgtttgtcagcatagcctgtggtgctatcagtggtttccatgctacgcaaagtccgttaatggctcgttgtatgacgagtgaacgtcacggtcgccctgtgttctatggtgctatgattaccgaaggtattgttgccctgatttgggcggcagctgccacctatttctttcatgaaaacggaatgggggagacgaatgctgccgtagtagtggatgctatcaccaaagattggctcggtactgtgggaggattccttgctatattaggtgtgattgccgcgcctatcacgagtggtgacaccgctttccgctctgcccgccttattgtggcagacttcctcggaatggaacaaaaatccatgcgtcgtcgtttgtatatatgtattcctatgtttctcgctgctatcggtttgttgctctacagtttgagcgacaaagagggttttgacatgatttggcgttactttgcatggaccaatcagacgctttccgtctttacgctttgggcgattaccgtctatctggtacgtgaaaagaaagggcattacttttatgtaacttatgttccggctgtatttatgacaactgtttgtataacatacatctgtatagcccccgaaggctttggcttaggacctcagactgctctcggtgttgccattctggctgctgtggtagctgcgctctggtttagtatctggtattttaaaacgactaaaaaactttggtaatgaagagatttaaaaaatctacaagcatcacgattgctctgcttatctatgtgagtgctacggcagcttatttcctgccgcgcaacactgttatcagtgatacggaaaaatacgtcactgttgcagcatcctatatcattgtgtttatcctctggttggtgttgcgtaagaaagaagacttgcagcgaaaacgtagagaggaagatgaaaagtacaataacaccaaaaactaataagtaacaatgaaaaaattagcattactcgtttgtctgcttgtggccacagtggctgcccaggcacaatttgaaaaaggaaagtggatcttgaatccgtcgatttccggcttaggtttgtcgcataatacagagacagacaagacttcatttggcattgaagccaaaggtggtgcgtttctgctggataatgtggcgttattgatacatgcaggagccaaatggaatgaaaaaggaggtgatacggatgtttatacactcggtgtgggcggtcgttattatttcagtaagattggtctatatctgggtgctgatgtcaacgtagaccgttgggattgggggacaagcgatgataccaagttttctttcggtgcggaagcagggtacgctttctttctgtcgaggacggtgacacttgagccggctgtgtattggaacgtaaacggtgaccgttcggtatttggtctgaaggttggtttcggtttctacttctaacttacataactcctgctatgaataaagcaagctaagatttttccgctttgcagattattataaattgtcccatgagataaaacagtttgtcttgtgggacgatttttttatctcatgggacggatatttttatctcacgagacagaataatccgtctcatgagatgagtttcactcaattatttcatgtgcagtttttcttgcaggaattgtcctgtataacttgccgcacattttgccacttcttccggtgtacctgccgctaccagatttccacctttgtcaccaccttccggtccgaggtctatcacatagtcggcacacttgataacgtccatgttatgctcgatgattacgatggagtgtccacgtaatatcagggcatcgaaagcttccagtaatttgcgaatatcatggaaatgtagtcctgtggtcggttcgtcgaagatgaacagggtagggtctgccttttcctgactgaggtaataagccagcttcacgcgttggttttcaccacctgaaagggtagaggaggactgtcccaatttgatgtagcctaatcctacatcttgtagtggagcgagtttctttactatcttcttctgtccgtgtttggtgaagaactctatagcttggttcacggtcatttccagtacatcgtagatgttagcatcgtggaatttaacctccagtgtatcagctttgaagcgttttccgtggcaggtttcacattccaacaccaagtcggccatgaattgcatttctactgtgatggttccgtcacctttacattcttcgcaacgtccgccctcactgttgaatgaaaagtagccggcagtgtatcccatttgtttggcaagtggttgatctgcccatagtttgcggatttcgtcgtaagccttgatgtaagttacaggatttgaacgactggatttgccaatagggttctgatctacaaattctacatttcgcaggttttgcaggtcaccgccgatagaagcgaattcgcccggacgttcgctgcactcatccagttcgcgtttcagggcacggaagaagatatcgcgtaccagggtactctttcccgatccgctgacgccggtcactacagtcattacattcagaggaaagcgcacgtttaccccttttaggttattttcgcgtgccccggtcagttctatgtagttattccatgggcggcgatgttccgggacaggaatttcttcttctcccagcagataacgaacggtgtagctgtcgctgttcggctgcaaatctttcatatctccctgatagaccacttgtccgcccaggcggccggctttcggcccgatatctatgatgtaatccgctgcacggatgatttcttcgtcatgttccacgatgacaaccgtattacccagttgttgcaattgacgcaatacgtgtatcaacttgtcggtatcgcgactgtgtagtccgatactgggctcgtcaaggatatagagtgaacctaccaggctgctgcccagtgaagtggctagattaatacgttggctctcaccacccgaaagcgagttgctgagacgattcagtgtcagatatcccaatccgacatcgagaaggaagcggatacgactgttgatttccatgagaatacgggtagcaacatctttgtcgtgcttatccagttgcaggttatcgaagaagtttttcaactccgtaatcggcagatctacgagttgggaaatatttcgtcctcctactcgtacatagctggcttcgggttttaagcgggtgccatggcacttcggacacagtgttttgccacgatagcgtgccaacatcacgcgatattgtatcttgtactgattttcctgcaccattttaaagaaggcattgataccctggaagtaaggagtgccttcccatagcatccggcgttgtgcatccgtcagctcatagtaaggtgtaaagatggggaatccggctctttcggcacctcgtatcaccatatctttccattcacccatcacttcgccacgccaacagacaacagcaccgtcgtaaacggacagcgaacggttgggaactaccagatgttcatcaataccgattactttaccgaaaccttcgcactcaggacaggcaccgatgggggagttgaaggaaaacatctggtcgctcggctcttcaaaagcaataccgtctgcttcgaatttggtgctgaagcgatacaggctggtggttccgtcaggctgatagaaccggagcagacaggcaccgtcgccttcgtacatcgccgtttcggcagagtccgtcagtcggctgaccgcatctttttctttggatgctaccatacggtctatcaataaaaaaacggtatctcctttcttgggttcatattcatcaatgcgtatcatctctccgtttacttccagacggttgaagccctgcttcatatcaatgtccagttgttgtttcattgtgcggtcttcacgcagtagtatcggagcgagcactgtgtatcttgtcccttccggatagcctaacatacagtttacgatatcttcagtggaatgtttttttacttcctctccgctaatggggctgaatgtccgtccgatgcgggcatacaataatcgcaggtattcgtatatttcggtagaggtgccgacagtggagcgtggattgcggctgctcaccttctgttctatggcgatggcaggcggaatccctttgataaagtcacattcaggcttgctcatacgtcccaggaactggcgggcataactgctcaggctttctacataacgacgttgtccctcagcataaagtgtgtcgaatgccagggaggatttacccgaaccggacaacccggtgatgacaacaagtttgtttcggggtatttctacgtctatatttttcaggttgttgacgcgtgcgcctttgatgagtatggagttgtttttggtcataatctgagtcactaaagtgaatttaagttgcaaagataatcactgcaattcaaatatgtataatgattggcaggttaagatttgttatacttttaaatagttgctgacatacaagcgggaaaagcactatttttatgcgcattttaaaaaccaatcatccttatgcaataccctcggatatgcctgtgtgccatgttggtatgcttgttttcttgtttcgggacagttatgggacaagatacaattgatctgaaatcgcttgccgacagtgtacggaaagcgaatggtaaaccgaattttctacccttgggtatgcacttccttgaattggcaaaagaacggaaggatacggctaatatcagtgacgcttatgctattcttgccaatcattattatgaattaggagatacggacagtttgcgcctggtgacttatgaatatatggactgggcagatcgttgccaccgtaataccgatcgctatcaggcatggaggcagtacatccagcgaatgaccgagaaggggttgcaggaagaggtgatgaaggagacggatttactctgcaaagacgccgagaaacggaaagataaatacggcatggcatccggtgaaatgtgtataggttataatcatcgtgtgttcggtcagaatataaagctatgccttgaatattatgacagtgcattgaagcactttgaagaaggcaaatattaccgtgatgcttatgtcgtttccctcaatatcattcaaacttatctggcacgtcagtcatatagtgacgctgtgccttatctggaccggttgggacagttggggaagacagtagaggggaaggatgttgtaataggagaagccttgtatatgcgctattatcagttccgggttattgctattttggggataaaaggagagaaagcggcagcaccttatattcgtgaagcaaatgcttattatcttaaaaataaagagtctatttcacaggagggctggttcggctataaaattatgtgcagtcagatcttgggtaacataggcaatgccgtggcttatatggattctctgattgattaccagcgttcgataggcaattattatccgggaaactaccggcaaaaagccattatgctggaacagaccggacattacaaagaggcatgtcgtgtttttgcagagtattctcaattgaatgattctgtgcgtacggcagagatggatgaacagctgaacaaatataccgctcagtttgaggttgaccgtctgaagatggagaagctggaactgagtgagaaaatgagccgtgagcgtctggcttttgtgtttggggcgggttgtgtgatattactgctattgatattggttacttacctttatattcgtactctttccatgaaccggaaactggatgttgctcgtaaggaattgcagaaaatggggcgcattaagagttcgttcattcagcacgtcacgcatgagttgcgtacaccgcttaattctgtagtaggtttttctgcattgcttgccgaagaaggcttggatgtggaagatgcccgtgaatattccagtcaggtagagaagaacagtgcttatttgttagaactgattgataatattatagatattgccgatatggactcacagactgcggatatgcccaaagaagcggtggatgtgaatgcctgctgtcttgaatgtatagatgagttgggtgggaagcagaaagaaggtgtggaactgcaatgggttccctctccagatgccccggtgatacagacggtacgggcctggatgaaacgtgtgcttacccttttgttggataatgccgggaaatttaccgaaaagggtgtgatccgtctgcaatgcgaggaagataaggagaataatatcatacgtttcataatagaagatactggtatcggcattgagccgcaatatcaggaaactgttttcgagcgtttctttaaagtagatagctttactcccggtacaggtctgggactttccattgcccgtcaggtgatggatattgtagatggaaagatttacctggatacttcgtacaatagtggcgtccgtgtagttgttgaatggccaatgaattgataaaccctaatcagattttataaagaatgaaagtaagaacccttttgtgcgtatgtgccctgctcttttctctgacagtggcagcgcaattccaacccgaaagataccccaaacgtgaatttcgtgcagcctggatacaagctgttaacggacaattccgcggaattcccactgagaagttgaaacagaccctgatcagtcagttgaactccctgcaagaggcaggcattaatgccattatctttcaggtacgtcccgaagccgatgctctctatgcttcgcaactggaaccgtggagccgctttctgaccggtgtacagggacaagcacccaatccttattgggatcccatggaatttatgattgaagagtgccacaagcgtggtatggagtttcatgcctggattaatccttatcgtgtgaagacttcactgaagaatgaattggcgccgggccatgtttataatatccatcccgaatggtttgttacttacggtgaccaagtctatttcgaccctgcattgccggaaagccgtcgccacatctgtatggtgattacggatattgtttcccgctacgatgttgatgctattcatatggatgattatttctacccttatcctaaacagggagtagacttcccggatgatgccagctttgcccgttatggcggtggattttctaataaagcggattggcgtcgcagtaatgtcaatgtgttgataaagaaaattcatgagacagtgcgcgaattgaagccgtgggttaagttcggtgtttctccgtttggtatttaccgtaatcagaagagtgatccgctgggtagtaagaccaatggtttgcaaaactatgatgatctttatgctgatgtgcttctttgggcccgtgaaggttggatagactataacattccgcagatatactggcagataggtcatccggtagctgattatgagacattggtgaagtggtgggcaaagaatacggaaaatcgtcctttgttcatcggtcagtcggtaatgaatacggtgcagaatgctgatccgcagactccttccatgaaccagcttccacgtaagatggcgttgcaacgtgcttatcagacgattggcggaagttgtcagtggcctgcaagtgcagtggtggagaatgccggaaagtatcgtgatgctttgatggctgaataccacaaatatcccgccttgcctcctgtttttgatttcatggataatgaagcgccggataaagtgcgcaagatgaaaccggtgtggacagaagatgggtatcttttgttctggacagcaccgaagtataaggatgaaatggatcgtgccgtacagtatgtgatttaccgtttcgatgctaaagagaaagtggacatcagtgatccttctcatattgtagccatcacgcgggataacttctataagttaccctatgaaaatggaaagactaaatatcgctatgtggtaacagcactcgaccgactgcataatgagtcgaagatagtggcaaaaaaggtgaagctataagcttcaccttttttgttaatacaatatgaaacctgctattccgcagcctataatcatcactatcggattgactttatatttccgggtacccacaaaagccaccaggaagatgatgcaactgacgataaacgagtatatatcttctttaggtgaactaaaattctctgtattcattaataccagggccgctgatgccagtagccctaccactgccgggcgcaatccactgaatactgcttcaacagccggatgtttctggtatttcaggaaaaacttactgataactaacatcaggatgaatgaaggaagtactacggcaaaagtagcgatgacagaaccccatatacttccggtagccgtgaagcctacatacgttgccgagttgattccgataggtccgggagtcatttgactgatagctacaatatctgtaaactcttgtggtgtcaaccacccgtagcgtgtgactacttcaccttgtatcatcgaaagcatggcatatccgccgccaaagccgaaaaggcctattttgaagaatgtatagaataactgaaaataaagcatgggagatttatgatttataatttatgatttatgatacgcagccaactttctcaactttcaactttgggatggtgtaaccgtccgtataagtatcctcctacaccggcgatgataattacccagataggtgagaatcccagtagccagatgattagtgcagatacaatgggtatccagacattgtaacggttgactttggctgacttagccatactgaatgtaggagcggcaatcagtgcaactactgccgggcggatacccttgaatatccgttctactatcggattatccttaaaattgtggaagaacatagctatggcaagaataatgaggaatgagggtagaattgtccctaaagtagtgactatacttccacgaattccccgcaacttatatccgataaaaatggaaatgttaaccgcaagaatgccgggagtcgattgggaaatggcaagtaagtctataaaatcgtctttggcgatccactttcgtttctctacaatttcttcctctatgagtggcaccatggcatagccacctccgatagtgaaaactcctattttagaaaaaaggccgaatgcctctaaataaatattcatagttttaatgttataatgtgataatatgatatcactctaccactttattccccttcttccccttcttctttctgtttcgcatattggctcgggctgacactgaaatgcttcttgaatacttcccggaagtatttcgcatcgctgaaaccagtcatttctgcaacttcagttatgctgtatttctgctctttcagtaattgtgcggcacgtttcagacgtatcaatcggatatagtctgccggagcctggtcggtcagggcttttattttattatagaagctggtacgactcatattcagtaatgaacagagcatttccacattgagtgcaccgttatccatattttcttccacatgcttcttgacggaagaaatgaatttccagtcaaggtcggtggaacaattggtacaagttgtggcatcttcatcatcattcagttccagattagcatatttatgtcgcagcaaagagcgattcgtcaggatgttggatatcgtagcacggagaatacctatattgaaaggcttcacaatatactcatctgctccggtcttcaatccttcaatgatgttgcggtcattgttcagtgctgtgagcaaaatgatggggatgtgagaggtttcaatatcattctttaagacatgacacaattcgtctccacgcatttccggcatcatgatatccgaaataatcatgttaggcatatattccttgactatttcgagtgcttgtttgccatcgctgcatacttgtatgttatagtcgtccgacagtgtattgcggagatattccctcaactcatcattatcctccacaatcaggattttcggaagatcactgttttgctgttgtttctgtttagttgcatcataagcaatgtttggcgtaacattcttaggcactcccgattcagcataagcaactttctcacttcccggtttcggactgtgaatagcttttcgataaggtttttcaccttttgggaatgtgactttaatacaggagccttttccttccgtgcttgtaaagttgattttgcctttatgcaggtgaacaagtttccataccagtaacagtccgataccactacccgttactttcgagttgatggcgttactaccccggaaatgtattttaaagagctttttctgttctgaggacggaataccgatacccgtatcctttacttccacactccaatagtcttctgtttctgctgtatagatatgtacgcttccaccttccggtgtatacttcaaggcgttggatatcagatttttcagaatcgaatccatcttatccttgtcaagccaggtattcatgtagcggaaattactttcataagtcaggctgatacgttttacgtcggcataagcccggaaagcattgatcatttcctccatgtaggtgcttaactcatattcggatacatatagggcactggaataagtgtctgcacgttcgaagttaataagattggtcgtcagtcgcaacagggcgttcacatttcgtatggcagtattcatattgcttcgtccgctcggtgtcagattttccttttcactgagttcttccagtggcgctttgatcagtgtcaacggggtacgaatatcatgcgctgtattgatgaagaaacgtattttctcatccgaagccttacgctgtttgcgcaggataatgacacgcaatgtgataatgacaattgcggctatcacggcggcataaagtattaatgcccatatgctaagccataagggctgttctatcatgatttccatgtcacgctcttcaagaacgattcgtcggtcttcactggagatggcacgtacccgtaatgtatattttccgggattcaaatttgtgaatcggatcatgcaatctttctcaggacggctccatccgtcatagaagccttccagtttccaggaatacagaatcaatgacggataatcgtagttgatagaagatatccgtagagagaatatgttctgattgtatttcagctttaacacttgagtttcatctatgtccacttccagcggtgaaccctcatcgccggggtaaacggtttgatagaatacgcgcaaatcgctgaatatcattttgaactcataattgcgtggaatcatcatatctttgtggaactctattgctccgtccgtacttccaagaatgaagtttccgttttttcgcagtacgcctgatgttgaattaaaatgatcactcttcagtccctgttctttagtccagttatgaaatatctttccagccgggtaatagcttgtcagactgttttccgtactcagcaggacacttttgtttccgtccggaagaatggtatatatgttattggaaatcagcgggcagttgtctttgtggaaatgctcaaacgattttcgctgatggttataaatgagtaatccggagttgctggtcccgatgtacagcaaactgtctggtgtctgataaagcgcgttaatgtagaaagactctatcggcatcgatatacactgatacttgccggtttctttgtccagcagatacagtcctgtggcagtacctatccacatgtgttgcgcatccttctccttaatatccgtaattccgctaagtcccggataagcacgtatatttttacggttgaagtctatttgctttaaattgtaatagccaccggaccagatactgccatcggaagtttttatgatagagcgtatgtacttatccggacggatatcacaatcgccaaatgtagaaggagtaaagaactccactttcatctgttttttattgatttggtagatgcccgaagtgtatccacctgcccagatgatgccgggtgatacctcgcacaaagaaatgaaaacatggtttttggttacgttaccattgtcaaacacgctgaggaatgagtgccattgttttgttttggtagagtagagactgataccgttattggtagcaaaccaaagatcaccttcgtgatcttcgatgatggcatttacctgatcgttgacgagcgattgcttgttgccaatagaatgtttgatccattcataactggcatattgattgttgcgtactgtgatgccgatagggtaattggctatccagatgcgttcatcatctacatagaagtcgtaaatactgttgccgttcatggcattatagctattgtaatccgccacgatgtagggggcgcactcataggtatccacattcattttatatataccggcaccatctgtagctatcaatatttctttgtcattgaaggctttgatacgtgtaatgctgacatcctgcaaaccgacattcagctctacagtttgatgaatattcatatcgtacagataaatgcctttctggaatgtaccgatgaatagtttgcggtttgctttatggaaatataactcgttgacttgcatcttcagtttatcaagccagttgcatggagaaaggttgagaacgttgtcttttaattcggcatgatgtataccgacgtctgtaccgatgaaataatggtcagggtcgatttgctcgatatccgtaatactttctccgatatggtttttgataacggtggttttttcagtattcgtatcgtagagatacaatgcttcttcgttacagagccatacaatattgttgctgtcaataaatccatagcttacgggagtcggatttccttttaccacttcatcaggtagcttatatacaagttgaaagcgatcatgtttggcatcatagcggaatactcttccttttttgcctatctcccacagtgttccatccacaccaacatatagccaactcagattgagcatggagttaacttctatttcgctgtctataagtcggtattgcttgaaattttttccgtcatagcggtcaatgccattgtgcgtaagaaaccacatatatcctttcggccctttctgaatagcatatatcctacgattgctcaagccatcttccacgccgagatatttataagtttgggcgatgcagaaggaggaaatgtatgtgaataaaaagaaaatgataaattttctcataacagttacggtcgttcgttattgggggtatttgtgaaattaacgcaaaaatatgcattttgtttgataaaagcaacacgaaagcaagaagaatagtgttcgattcctcgcattgtttagacgacaacaggcgcaagttgtatattataacctgcgcctgtgcttcacttatagattgtagtcagaactacttaaccttttcttctacccatttacgtgcattgacgaaggcttccatccatggagtgatctggtcgctgtgcaggcggtcggcaggataacaaccgttctgccacgggaagatagagcgctccaggtgaggcatgatagccagatggcgcccgtcagcacttgctatggctgctatggagtagtcggagccattcggattggcaggatactcgtcataactatatttggctaccacattatatttatcttcgtcataaggcaaagagaattttccttctccgtgagctacccatataccgagtttgctgccactcagagagccgaacattacgctgcggttggtaggaatggtaagtcccaggaatctcgattcgaatttatgagattcattatgcagcattttaccgtttttcttatgttcgggattgatgaggttcaattccatcatcaactggcaaccattacaaacacccaatgaaagcgtatcttcgcgtgcataatacttgtcgagtgtttctttagctttcggattgaagaggaaagctcctgcccaacctttggcagaacccagtacgtctgagttggagaaaccaccacaataaacaatcaggttcacgtcttccagtgtctcacgtccgctgatgaggtcggtcatggtgacgtctttcacatcaaagcctgccagatacagggagtaagccatttcgcgctcaccgtttgttcctttttcgcggatgattgctgcgcggatgcctgtcggtgtacggcggttcgggtcgataccatattgagagaatttacctttgaagccgggcatgaaagcgaattccagtggctgcatcttgtagttctcgaaacgcttcttggcgcaaccgttcatagattgcttgcggtcgagcaggtaagaagtagaataccaaacatcacgcatatagtcgataccgaactgataagtagcatcatctttagatacgaggatgtggcgttcgtcggtcggcttaccaatcttcacaaaacctactccggcatcttccaatatttgttttacttcttccttatgcttgtcgcttacctggataacaatacccgggttctcggcaaacaggagtttcacgaggtcgtgttccttcatcttgtcgagattgatttccataccaccttctacattggcgaagcacatttcgagtaaggtagtaatcagaccaccggcagaaatatcgtgcccggcaagaatcagtcctttgttcaccagttcctgaacggcaaggaaagcatcgcggaaatattcggcatcttgcacagtgggtacttcgtcgccaatcttgcccaatgattgcgcaaaggcagagccacccagtttcaatgtatcaaaactgaagtcgatatgataaatcgttgtcttttcgttgttaacaagtacgggagaaaccactttcttcacatcagaaacttcaccgcctgcggaaacgattacggttcccggagagattactttgctaccgtcaggatacttctgagtcatggacagagagtcttttccggtaggcacattgatttgcagtgcacagcagaagtcgctcaatgcttttacagcggtgtagagacgtgcatcttcaccttcctgtgagcggcaaggccacatccagttggcagagagggagatgctgtccattccttcagccatcggagcccataccaggttggttagtgcttcgctgacggaaagtactgaaccagctgccggatctgccagtgcagcttgcggagcatgtcccagtgaagtggcgatacctttctcaccacgatagtcgagagcaaccacgccacagtcactcagcggtaattgcaattcaccctgacattgttggcgggcaatcttgccggttaccgagcggtctaccttattggtcaaccagtctttgcaggcaacagcttccaactgcaatacattcgtcagatattcgtgcaacttggattgttcgtatttaggcatttcgtagtggcgttccactgttttgtctaccatgtaagttttgggagacgagccgaacatctgttctacggcaagatcgaacggacgtacaccgtcagcttgttggaaagcgaagcgatggtcaccggtagtttcacctaccacatacattggggcacgctcacgttcagccactttacgtacatgctcgatagcttcttcttcaatcagcaatcccatacgttcctggctttcgttggcgataatttctttggcagacaaggttttgtcacctacgggcaatttactcatgtctatcacgccaccacattcttccaccaattcggagagacagtttacgtgtccggctgaaccatggtcgtggatggataccaccggattgttgtcttcttcgcagagggcacgtaccacgttgtaggcacgtttctgcatttctgcattggcgcgctgtacggcgttcaactcaataccgctgctgtagcgtccggtatctactgaagatacggaaccgccacccaagccgatacggtaattatcaccaccaatcacgactactttgttaccggcttcgggagcacctttcaggcagtcacgtttcgtaccgtaaccgacaccgccggcaagcatgattactttgtcgtaaccgtaaacttcgtcgttttccttatgttcgaaagtcagtacagaaccacagatcagcggttggccgaacttgttgccgaagtcgctggcaccattggatgctttgatcagaatctgttcgggagtctgatacagccattggcgtaccggaaggatttcttcccagggacgatcttcgtctgtacggggatatgaagtcatgtaaacggcagttccggcaattggccaggaacctttaccaccgcccatacggtcacgaatctctccacctgtaccggtagatgcaccgttgaacggttctacggtagtcgggaagttgtgtgtttcagccttcagtgagataacactcttgatatctttcacctggaagtagtcgggttttgagtggtctgccggagcaaactgttctattaccggaccttcggcaaaggctacattatctttataagctgaaatgattttattcggattttcctgtgtagtcttcttaatcatttggaagagggaagactcttgttctacaccgtcgatgatgaatgtcccgccgaagattttgtggcggcagtgttcggaattgatctgggcgaaaccgaatacttcggagtcggtcagtttacgtccaaggtcttgttctactttcttgaggtagtccatctcttctttagagagtgccagaccttctttttcgttgtaagcttccaggtcttcgatatggacgatcggttccggcttacggttggtggtgaatacttcctgatccagtcccttgtacatgcgttgcagcatcgggtcgcggtcagcgttttcgtcctttacggggaaatactcttcgatgcgtgagataccgctcaagcccatattctgggtgatttccacagcatttgtactccaaggagtaatcatttcgcggcgcggaccaacgaaatgtcctttcaggttttcttcactttcgggggtggcttctccaaaaagccagcagagtttgtcgctttctgcctgggtgagtgcgtggtcacattctacggccatcacgctcttggatggggttctgaaaaaaagaatcatactgatatttttgatttttcgttctttggcgcaaagatacataaaatcgttggtgcagagaaagaaaaggaataaaaaatagaagggtgtcaaaagtaaagtattgagtgttttatgataatcggtcgaaaaaacgttaacacaattggttcgtctcataaaaaagtacgatatttgcagccatgattgagataaggaccatattcgatatattatggaagggttttattattggggtagttgtgtctgcgccattaggacccgtgggtgtgttgtgcatccagcgtacgttgaataaggggcgttggtatggtttcataacaggtctgggagcctcgttgagtgacattgcttacgccttgctgacagggtacggaatgagcttcgtattcgattacgtaaataaaaatatcttttatttgcagttgttcggaagcatcatgctgttagcgtttggcatttatacgtttcgcagtaatcccgtccagtccatccgtcccgtctcaaccaacaaaggctcttattttcataacttcattaccgcctttgccgtcacattatccaatccacttattatattcctctttatcggcctctttgcacgctttgccttcgtcagtgagggggtattggtgtttgaagcggtcaccggatacctggctattgcgctgggggcgttggcgtggtggtttggcattacttactttgtaaataaagtccgtacgcaattcaacctgcgtggcatctggatattgaatcgtatcatcggaggcattgtcattgtcgtgtctgtgtttgggttggtgtttacgttgatgggcgagtcactttactgagcagaaacatagaatcatgaagatagcgcaacaactgaaagcgaaaaatatcgcggaataccttatatatatgtggcaagtggaagatttgatacgtgccaatgagtgcgatatcgataagatccgcgaaaacattatctcccgttatccggaagaagaacatccggcactcgaagaatggtatggtaatctggtagacatgatgcgtacagaaggagtgaaggaaaagggacatctgcaaatcaatcgtaatgtaatagtgaatttgacggaattgcacgtagaactgctggcatcaccgaaatatccttattatagtgcggcttatttcaaagcattgcctttcatcgtagaacttcgtcagaagagtgggaagcaggaggagccggaactggaaacctgttttgaggctttgtatggtgttttattgctgcgtttgcagaagaaagaaatcacggagggaaccgcaaaggcgatagagactatcagcagtttcatttctttgcttgccaattattacgaaaaggacaagaaaggggagttgaaactggatgaataaccggaataactttcgaagatagtaaattgtaaataatagataaagcatgagagtattagtaaccggagccaacggacaacttggcaacgagatgcaagttcttgcaaaagagaatccgcaacacacttatttttttactgatgtacaggaattggatatctgtgacgaacaagctgtacaggcttgcattgcagagaatcagattgatgttgtagtgaattgtgctgcttacacagcagttgacaaagcggaagataatgaagaattatgccgcaaactgaatcaggaagctccgggaatactggcacgtgctgcgcaggcccatggtgctgctatgatacaggtttctacggattatgtttttgatggaacagcgcatataccttataaagaagattgcgaaccctgtcctaattctgtttacggctttaccaagctgggtggagaaaaggaggttatgcagaattgtgagaaagcgatggtaattcgtacagcatggttatactctatttatggaaataactttgtgaaaacgatgattcgtctgggacgtgagcgtgagtctttaggtgtggtttttgatcagattggtacgccgacgtatgcaaatgatctggcacaagctatctatgctgccattaatcagggtattgtaccaggtatttatcatttcagtgatgaaggcgtatgttcatggtatgattttacggtggctatacatcgcattgcggatatcacgacatgcaaggtgagtcccttacatacggatgagtatccggcaaaggcaccacgtccgcattattccgtattggataagacgaagattaaaaagactttcggcattgaagtacctcattgggaagagagtctgaaagtatgtattgaaaaactgaatgcccaataataatattataccaaattttatatatggccaataataacgaaattgagaggagaagaacctttgcgattatcgcgcatccggatgccggtaaaacatctttgactgaaaagctattgctttttggtggacagatccaagtggcaggtgctgtaaagagcaataagataaagaaaaccgctacatcggactggatggatatagagaagcaacgtggtatctctgtaaccacctctgtgatggagttcgactataaagagtataagattaatatcctcgatactcccggtcaccaggatttcgctgaagacacatatcgtacgttgactgctgtagatagcgttatcatcgttgtagatggtgccaaaggtgtggaaacacagacacgtaagttgatggaagtgtgccgtatgcgtaatacgccggtcattatattcatcaataagatggaccgtgaggccaaagatcctttcgatttgttggatgagctggaagaagagcttgccattcatgtacgtccgttgacttggcctatcgaaagtggtgtgcgctttaagggagtttataacatctacgaaaacaatctgaatcttttccagccttccaagcaagtggtgacggaaaaggtggaagtagatatcaataccgaagaactggataagcaaatcggtgcgcaattggctgataagttgcgtggtgagttggaattgatagatggagtttatcctgaatttgataaagaagaatatctgaagggcgaactggcacctgtattctttggttcagctctgaataactttggtgtgcaagagttgctggattgctttgtagagatagctccaagccctcgtcctgtacaggcggaagaacgtgaagtggaaccggaagagcctaaattcaccggatttgtctttaagattacggcgaatatcgacccgaatcatcgttcttgtatcgcattctgtaagatttgctcaggtaaatttacacgtaatgctccatacctgcatgtgcgtcatggaaagacaatgcgtttttcttcgcccacacagttcatggcacagcgtaagacgactgttgacgaggcttgggcgggtgatatcatcggtttgccagacaatggttcttttaagatcggtgatacgctgacagaaggagaaatgcttcatttccgtggtctgccgagtttctcaccggagatgttcaagtatatcgagaatgctgacccgatgaaacagaaacagcttgccaaaggtatcgatcagttgatggacgaaggtgtggcacagttgtttatcaaccagttcaacggccggaagattatcggtacggtagggcagttgcagtttgaggttatccagtatcgcctggagaatgaatatagtgcgaagtgtcgttgggagccgttgagcctttataaggcttgctggatagagagcgataatcttgaagaactggaagcattcaagaagcgtaagtatcagtatatggcgaaagaccgtgaggggagggatgtcttcttggcggatagcggatatgttctgcaaatggctcagatggacttcaagaatataaaattccactttacaagcgagttctgattcgtattctgaattgggattgagagatacagggatgcaaagggtagaaactttgtatccctgtattcttttgtatatactgtaagtcttccctcccttttatagacatccttgcatactttttaatgaatgaccgactggagtggttcgtttattaataagtacctttgccgtaataaagtaaggagattccacgcatcaggaaataagattttatataaggtatgaacttcttgcaaatgttgagagctatccggaagagggggagccgtattgtggcatgcggagatgagatgggaagttgtttcagccgtaatacggaattagagaaagtctgaaagaactgaagcctgaaagttctttattatactttgattcgttatccgaatacttgtttcaatgaactggatcaagatatattggtaatcagttctatggtaggcgttaatatctttatggtttccatgcaatccctccgcttgaagggagaacatggaaactttcgttttagcatcttttagtgttatttttctattttatttcattgataatccgtaatttcggacgattttttgtaaaacagaccgaataactaataatttataatatggaaaatctcaacacagcgcttctgctgatggtggtaggtatgacgacagtgttcgctatcctgctgattgtaatctacttaggtaaaggacttattcttctggtaaacaagtacgcccctgaagaggtggtgccggataagaagggtgcgcaaggtcctgccgcaattcccggaaacattttggctgctatcagtgccgctgtaacagtggtgacacaaggcaagggtaaagtagccaaggtcgagaaaataaaatgataatctttaataaaaaacacacacctatttatttagtatgaaaaaggaaattaagttcagcctggttttcagggacatgtggcagagtgccggaaaatatgtgccccgcgtagaccagctggtaaaggttgctccagctattattgaaatgggctgttttgcccgcgtagaaaccaatggcggaggttttgaacaggtaaatctattgtttggtgaaaatcctaataaagctgtacgtgcatggacgaagccgtttcacgaggctggtatacaaactcacatgttggaccgtgcactgaacggtcttcgcatgagccccgtacctgccgatgtgcgtaagctgttttataaagtgaagaaagtgcagggaacggatattacacgtacgttctgcggactgaacgatacccgtaacattattccttccatcgcttacgctaaagaagccggaatgatttcccagtgttcgctctgtatcacccattcgcctatccatacagtagaatattacaccaatatggcgttagagctgatcaaggcaggtgctgatgaaatctgtgtcaaggatatggcaggtatcggacgcccggtatcattgggcaagatcgtagcaaatatcaaggctgcacatcctgaaattcctattcaatatcatagtcatgcaggtcccggtttcaatatggcaagcattctcgaagtttgcgaggctggttgcgattatattgacgtgggcatggaaccgttgtcatggggtacgggacacgctgacttgctgagtgtgcaggctatgctgaaagatgcaggtttccaggttcctgaggtgaatatggaagcatacatgaaggtacgtgctttgattcaggaatttatggatgacttcctcggtttgtatatcagtccgaagaaccgcttgatgaactccctgttgataggtccgggacttccggggggtatgatgggtagcttgatggctgacttggagtccaatctggaatctatcaataaatataaggcgaaacgtaacttgccgtttatgacgcaggatcagttgcttatcaagctgttcaatgaagtggcttatgtatggccgcgcgtaggttatcctccgttggtaactccgttcagccagtatgttaagaatctggcgatgatgaacgtgattgctatggaaaaaggtaaggaacgttggggtatgattgctgatgatatctgggatatgctgttgggtaaagctggtaaattgccgggtacgctagctcccgaaatcattgagaaagccgaacgtgaaggccgtaagttctttaccggaaacccacaggataattatccggatgcgctcgataagtatcgcaagatgatgaaagagaacaaatgggatttgggcgaagatgatgaagaacttttcgaatatgccatgcatccggcacaatacgaagcatacaagagtggcaaggcgaaagaagacttcctggcagacgtggaaaaacggaaggcggaacttaataagtctccgttggacgacgccaaaccgaaaacacttaccgttcaggtagatggacaggcttatcgcgtaacggtcgcttacggtgatattgatttgccggcagatgctacagcgaaagtggaagctcccgtaggcgaaggacaagatgtacctgctccgttggaaggcaagttcttcctgacgaagaatgcccaggaaaccccgataaaggtaggtgataaagtgaagaaaggcgatttgctttgctacattgaagctatgaagacatacaatgccattcgtgccgattttgacggtactgtgacggctatttgtgctacttcgggtgactctgttgcagaagatgatgtattaatgaagataggataaacagcgatggaagaaatatttgcaagactctacgatatgacggctttcagcaacatcattgctgatccgtcgtttctggtgatgtatgccattgctttcattctgctgtatttgggtatcaaaaagcattacgaacctttgctgctggtacctatcgctttcggtgtgctcattgctaactttcccggtggagagatgggcgtcatccaggcagatcagaatggaatggttttggtaaatggagtaatgaagaacatttgggaaatgccgttgcatgaaattgcacacgacttgggactgatgaacttcatctattatatgttgattaagacaggcttcttgccgcctatcatcttcatgggtgtgggtgctttgaccgacttcggaccgatgcttcgtaacctgcgcctctctatctttggggcggcagcgcaattgggtatctttactgtattgctggtggctgtgttgattggtttcacaccgcaagaagcggctgcattgggtattatcggtggtgctgatggtcctacagctatctttaccactatcaagctggctccgcatttgctggggccgattgctatcgcagcatattcttacatggcattggtgccggtaattattccgttagtggtgaaattactctgttcgaagaaggaattgatgatcaatatgaaggaacaagagaaactctatccttcgaaaaccgaaatcaagaacctgcgtgtactgaagattattttcccgattgcagtaactacgatcgttgctctctttgtgccgacggcagtgcctttgattggtatgttgatgttcggtaacttgataaaagaaatcggtacggataccagtcgtttattcgatgcggcagcgaacagtattatgaatgcggcaactattttcttaggactgagtgtaggtgccacaatgacgagtgaagcgttcctgaattggacgactatcggcattgtagtgggtggtttccttgcattcgcactttctatttcaggtggtatcttctttgtgaagctgttcaacctgttcagcaagaagaagatcaacccgctcattggtgcaactggactgagtgctgtgcctatggcaagccgtgtgtgcaatgagattgctacaaagtatgatccgaagaaccatgtgctgaattactgtatgtccagtaacatctccggtgttatcggttcggcggtggctgcgggtgtgctgatctcgttcttgggataaggagaatagatacgcggacgacgcggattgaggcggacgaacgcggactttttaggcgcggattacgcggattacacggattctttcattacaataaagaaataaatccgtgtaatccgcgcctgactttttattcactaatcactttcttgtattctgccactgccattttctctgccagatgcgcattgatcaggttcgtatgtgcctgtgtccacgacaattgtgcggacaatacatctgccatactggacttcccttcattataagagaaagtgacaaggtccaggttctcttcggcaagagccatattttcctttgctgtctttacttgttgctccgtttccgtcagttttgtagtggcggcggagagctcttcaagaatattatcagtgatataactttgttgcagcttctggataccaatgaatgctttctgttgccgatttgtcttgaaacgcgccccccaacggaagatggggatactgacgtttactccggctacaggcgtatgagggatttcctgtcccatgtacgtgataccggtatcccaacctgtggcaaggaacatgcttacctgaggattgtacttgctgagggcggcatggcgttgtgcctcactccgggcaatgtttaccgttgtgctggcataatcggcgcggcgtggaagtacatcgtcaagtccaagaatgtcgacgggttcactggctatactgatttcacttaggctatctacgggagtattgggtgctactcccatcaaaatgttcagttgttgtaaggcaagggtatagttctgacgggccttgatatactgcaattcagcttctttctggcgggtggaaatcatcagcaggtctgtacgactgatagcgccatcattgaagcgatcctgaataatatcgtgctgcttctttatgatatcctgaaatgtagcagcagcctcaagactggcataggcggctgaggcattccaataaacagcatcgctttgataatgaatttggtcgagagttagttcagtggtgagttggcttaactcttcgtcagcctgtgccatacgcttctgagctattagagaaccacccgtatagaggggttgtgccaaagttgcgagtgcctgataggtgtaggggcggtattcacctttcggactgttccacttatccaggtggttgaggttggcggtaccttcggctgtgatgtctatttgtggcaggaagccggtatttgctatttttcgcgcttcggtgtttgccatggttttcagacgctgctgtttcagcacctggctgtaggcttctactttgtcacgatatgcttcgcggcttaagaactgctgggctccggctttcagaccgaagctgcaaagtaatgtaagtatggttattatctttttcataattatctctttatttcttatttaagcgaatagttaagagtatccggagtttatcctttgatcttatgtatcgcgcaatatgccaccggaagcacgaacagcgtcaatgctgaggctaccagcagaccacccatgatggttgccgccataccaccgaacatagcgtcgaatagcaacggcaacatacccagaatcgtagttccggacgccatggctacaggtatgatacggctggttgtagcactgattaccgcattcagcggcgctttcccggaagcagcttctatgtcgatttgatctaccaatacaattgcatttttgatattcataccaatcaatcccagtagaccgagaacagagaaaaagtcgaatgatttaccaagcaagattaatcccagtacgattccgataaagataagtggcaacatcaataggatgacaattggcttgcggtaggttctgaacaggaacaacagggtaataaacattaagaaaaacgttagtggcatattagctgccaatgctgcattactttctgcctgactttcctgttcaccaaaatacttcatggtatatccttccggtacctgaatttcttcttgtacttctttccatatcttattgaatgctgctatggcatttactccccggcgtggatcggcttgcgccatcattaccatctgacggttatagtctttcacattcgagaacttatattggaaatcaaattcactgactacttgttccagggtagtggtttcctgtgttgtaccgaatacgggtagtgtacgcaggtcgttgatgcggaaagaatcgactgtgttatcctttagaaggataggcaatacctggtcgccttcacgatattcgcctaatgtcataccgcttgtaccaatctgaatgctctgtgccatactttgtcgggagacacctaacggttgggcacgttcaggactgtaaacaggtttccatacaggaatcttattcccccatgaatttcgtacgttgatgagatcatcatcccgatgcatgatttccaggactttgttggtcagcatcaccagtgaatcgacattgttgccgataaagccgatttcaatggcggcatctaccgcaggcgatagcttaaacaaagtggtacgggtgatggcattcggatagtttgccttcatatactggtcgaagttctcttcgtattcctttgtatatttactgtcagtcagttcgataagtatattggcaaagttgggcttaggaccgacggaagtagatgccagatagtaacgtaacggcgtacttccgaatgtggtggatattcgtttcacttccggttgttgcaggaggtgcgcttccacctgtttcatttccttttctacgtcacggatgctgtaaccgtccggatagaatatatcggcacggaaatagggcttatccagtgaggggaagaagttttgaggcatcattcccatgatgaccagtgagatgataaacaggactaccatactacccagtgtaagagtcttcttcttgataagtactccgaggatagaggcgaacttgtgatagaaaggtttatcatacgggtctttattggtatcgccggatttggctttcagaataaagttaccgaaagtggtggtttgtgtgagtgccagtatccagcttaatcccaaagaaatggcaagtacgacaaacaggggtttcacgatttccgctacggcagaaggggcgaggtacaacggcaggaatgaacaaatggcgatgaacgtagcgccaagtaatccccattgcggtccggtagctccatctatcagtgcttttcgccggtctatacctcgggcaatggctatttgtgcattgtctgtcactacgatagcattatccaccagcatacccatggcaatgatgaaacctgccagtgaagtacggttcaatcctactcccatgaaagacatgatgagcagtgtaccgccaatggtgaatatcaacgaactgccgataagtatacctgcacgcagccccatcaccagcatgataataacgattacaatgaggagggattctatcaggttaatgatgaaaccattatttgcttcctgagctatgacattttctggatacagactttccaattccaaccctaccggaataaggggaagaagttcagccagtttctgatctaccagttctccagtctttactacatcttttgtcgggtcggtggaaacaccgatacctatggcacgcttcccgttgacgtgcatgatgttgccgggaggatccatatatcctttttcaatgacggcaatatcacccagtttcacctgtccgcccggagtggtaatcacttggttccggatgtcattgacggtagtataggttccgttggcaacaatgcgcagttgttgttcaccggcattgatttcacctgtattgataatctggttttgcgattgtaacagacttgctacttgcttcggatctatacccataccggccagtttattgacggatatatagatatttaccacctcggtttgtgtaccgaacaaggctactttcataactccgtcagcagtgataacctgggttttgatacgctctgcccagttgcgcatttcttcgtaagagaaaccttcatcgcctaccaaaccatagtatatgccgaatacatcgccgaaatcgtccgataccgtgggaacggaagcgccggcgggtagttgcggttgtatgttgagcaccttacggcgcaattcatcccacttctgcggaatcgactctgcggaaagggaaggttgaagctcgaatgttatcttggatagtccgtacatggactccgacttaattttatatacaccactcatcgactgtatctcgcgggagatcggttcggtgatcagtcgttctacttctgctggttctgcccccgggtagcgggtcataatgaccgctgacttgatgacaaagggtgcatcctctttctttcccaaccggtcgaatgatagtataccgccgattagcaacacagccaggaagaaataaacaatcttggtgttgtctaatgcatatttagctaaattcatatgatttatatttgggcgacctcaaggtcgcagtggttggtagtctaattgataactttcaccgtttgtccgtccaccagttggtgcactccggcaatcacaatagtttctcccggctgtacaccggtagagataagggcattggcttctccggtaggagagtatacggttacttcccgcttgcttaccttattgtcttttactacccacacataggtcctctggttctcgctttcaccgaatatggcactgagcggaatattcacaagcttttcttccaagaagggagctacgtccgaagccagcttgattttgcacgtaaatcccggtttcacatcgtatagggaacggttgaaagcaggatcttcaatcgtaatagttaccgggatacctgttccggctgtagaaatatccagatattcttctagttttgcattgaatactgtgtctggataggtatcgaataccactttgaatgttacgtcctttgcccgaagtagatagagataatcatccggtacggtgaatttgatgcggagcttctgtgtattcaccaattgtacaatgccttccccagagttcacgcgctgatagttttctaccagacgtttttcaatagaaccgtcgaagggagcggtaagtttggtatcccgcatattattgctggataattcataagctgactttgccttttgataattggcaacgctgatctcatattcctgcacggagatagcttggcgtcccaacaggcgtttgttacgttctacctgtgctgcggcagtctcgtaagcggctttgtcggcggcgtattgcagggaaatgtcacgcggatcaatggcggcgatcagctgtcctttctttacccgctgaccttctaccacaggcagatttatgacctgtccactgacacggaaggccagtttcacgtattctacggcttctacaataccggagaagtctttccggatgaccgattgggagctggcagtagctgtcttgacaggtcggatcagcgtggcatcgccctctttcttgtgcccgcatgatgtggcaagcagcatcacgctgatggcgaacaaatagattttcttcatactaatgtatagttgttcgtttaggtataaaaaacataaaaccggaaaaacagataattgttctcccggtttattttgttacgcgttgttaatgatacaggcttctactcctctatcctgagcaacaaatcggtgcccaatttgagcttataaacgtttttatatacttgtatgttcagttcttctccggcaataagtgaaatatttatttctttgcctacatgcatatgaagtgtacgtccctgataatttatctggaaggagtaactgttccacttctcgggaatgactgggaagaaagagagtatgccctccagaatctgcatcccggcaaagcctcgtacaatggcaagccagctgcccggcatactggtgatatgcagtccttggtgagtttcgttgttgtaatcatccaggtcgagacgggtggcatgcagaaagagttggtaagccttttccacttctccgatgcgggcggcaagaatggagtggatgtgtggggaaagtgaagattcatgcaccgtcattgtttcatagaagtcgaagttgcggcggactgtttccttatcgaaattgaaataatacagatataggcccaacaatacatcgctttgtttgatgtagcatgaacgaagaatacgatcccacgaccagtgctgattgatggggcgttcttcgggtggaatggcatcggtgctgttcagttctttatccaggaaaccgtcattttgtacaaagatccccagttctttatcttccggcagatacatacggttgataatgtcgcgccagcgttcagcctcttcttgttggcggaggttggtgacacggcgtacacgcgcatattcgtcggggtattctccggcaatgatttcaagatagttaagtgtcatccgcaggcactgcacacacgagtaattggtgtacctgttattatctacgttgttctcgtactcatccggtccggtgacacccagtatcacatatttctgttttggtttggagaaagatacccgctgactccagaaacgggagacggcaatcattacttccagtccgtatttggctatataatctttgctgcctgtgattgcagcatgctgtgcaatggcatagacgatgatattattgcgatgtatttcttcaaaggtaatttcccattcactgtggcactcttcaccgctgtaagtaacttgcgggaagagggcggcaccctctttgaaacccagtttgcgggcattctctatcgctttcggtagttggttataacggtatatcaacagatttttcacaatctccctcggagtagagagtaggaagaacggtacacaacaaagttccgtattccagtatgtgtttccaccgtatttttcaccagtgaatcctttcggaccgatattcaggcggggatcatcaccgcggtacgtctggcatagttgaaagatgttgtaccgaacaccctgttgtgcttccggatcgccttcgataaccacatccatttctttccatatattggcccaggcttgctgatgatcgttttccagcttatcccagccgtctattttagtttgacgggctttggtgacggaatgttctatcagttcctggcgttcatcatagagcgatgaacttatgacagtatatttgatgagcattacattgtctcccggtttcacatctgccccgatgctgaacccggtttgtttctccttttcaatgcgtatcgggttcgaggtggtttctttgccgttcttgaagaactgataggtcatggcatagcacacttgcgcatcttcacgtcgggtttgcgtccatagataagcacaatcctttgtgacgccggaacggaggatattccatatcttctcgtttggatcatcatccttattgactatgactgcatccagggagggaatcagtgatattcttcccgtataattgatggaggtgacgctgtattttatcagacataaatcgggatgagccatattgttgatatgctccacatgtacccgtatttggtgtcctttgggagatgtgatttcgaagtcccggtaggagatacccgctttcatatcgagcctgcggctgaagctgttcacgtcccattgtgccaggtccagttcttcgtcgataaggcgcagactgacacgactccagtctgctgcattgggaatacgggtatagaaatgagggaaaccgtttttccaccagcctacacgcgttttatcaagaaaggtgataccggcaacgaatgaaccacggtatgagtcgcttgaataaggttcctcgaaattgccccgttggccgaagcgaccgttcccaagactgaatatactttctgacattcgcaggttgtcggcgtgaaagttatcttcaataatattccattcatcggttttaaggtatcttttcatggtgtgtatctcaatggtgattatggccgtaaagataaacaaataaacggataaacggcaatgatgaggaaaaaaagaagacaaagaatatctaaagaataagatgtgtttggttcctttataagaatcgccccgatctttttaaaggaacggggcgattatcgtagagaaaagagttgtttgtcgtagagggatagatatctccttttaagtatgttctcgcgcggattatgcttttgcttgttctcctttggtctctttgattaaatatacacaaacggcaccgataatcaacatcacgcctgccatgacaagcatatttatttcaggcggtaacatgcctttcggggtgaacagagccagaatactaccacccagcgtagcagctacaatctgcggaatacagatcgttccgttgaatagtcccagataggtccccatgtgtccgccgcttagagcattggtcaggatggtgaaaggcaatgccagcatagctgcccatgcgcaaccgataagcaaaaaggagatgaataatacatattgattgtgaacgaaatacgtggagatgaaacctattccacccaaaacaagactgagtgagtagatcagtttgcggttcttgaacatcgggatacatacagcccagagtacagaaccaatggcctgtacggcaaacaatacgcctacccagtcggcagcattctgatattggatactcttagtgtccagcactactttgtttgcgccgttcaccacagtttcaacagtaggagcatcgaatacattggcagctacactaccattggtataggtccacatgaacatgaaggcaaaccaacagaagaactggaccaaacctactgtccagaaagctttcggtgctttcaccagtagtttcaccatattgatcttttcctttttttcctcttcggtgatgccatggtattccgcatattcggcaggtggcatttctttcacctttactgtggtgtagatgacgcaaagtatcagaatggctgctccgatatagaaggaatatataactgagtcgggaactacaccttggggagctatgttgctgatacctatccatgtaaagatgaacgggaacaggaaacctaccaagctaccggcattgcacaggaaactctggatagagtaggcaaggcctttttgcttttcgtttaccatgtcgcccaccatcattttgaatggctgcatcgccatattgatggaggtatccagaaacatcaacgatactaatccgaatatcattgccgtgctgactgccataccgaagctaccggcattcggcagcaggcacattaccagtacggctaccagtgaaccgacaaagaggtaaggaatacgtcgtccgaagcgtgtccacgttttgtcgcttgcagcacctacgatgggctgtacgatgatacctgccaatggtggcaatatccaaaaataactcaaattgtgcgggtctgcacccaatgtcgcaaaaatacggctgatgttcgcactctgcaaagcatacgcaatctgtacgccaaagaagccgaagctgatattccacagcttccaaaagctcaaatcaggttttactttcattcttaattttatgtattagatatttattcagttatttcgttgttcccctcactacaagattcgtcctcacaatcttgttgctactcttatcatcgcccccttccagcttacctgtcagaatgctgaaagcgctttttccgacttcttctccatgctgttctacggtggtcagtttgggatctgtgctttgagcgatggcaccgtcggtaaatccgcagatcgatacttcgtcgggcactttctttccaaccagtttgcaggcatacagaatgcctgaagctgtttcgtcattgatggcgaagaaaccgtcgggatgctcggaaccttccagtatgtcaggggtgatggatatggcacgttcccgggtatcacacaacataatcatgctgtcgtctacgggaatcttgtatttcttcatggcatccagatagccattccggcggttcttggtgatttccaaatgcggggctgctccataaaacaggatacgcttgcagcctgtctgtatcatatactctacagcagcaaaagaaccggcatagtcgtccactaccacccgctctgttttcaatccggtgcagatgcggtcgtagaacacaatggggatattgttattcagcaagtcctgataatggtcgtattgggaagtatcttttgctaatgaggcaatcacaccacagacgcgggcggcaaggaatgaatgtacgattttcacttcctgttcataagattcgttgctctgcgctaccagaatattgtatcctgcttcggcggcagccttttcaatgccactcagcacgcacgagaaaaagtgatgtaccagttgcggcacaattacaccgattgtattcgaacggctggctcgaagatttactgcaagtacgttaggcttataattatgctcgcgggcgtaagcatgtataaggttgcgggtttcctggctgatatccgggttgtccttcaacgctcttgacacggtagagggcgagacgttcaacgcccgtgctatgtccttgatggtaatctgcggtttattcatggtattctctaagtattcctttatccaaaggtagtgcaaaccaaaaacaatacaaaataagcttgcttgtttttttattgctgaggtgcagcttatcttattgaactgacttatccggttgcaaaaatagctgaatacatgaaatatcgcttcttcattgacagttatcgggttagtgatttgcgcaaacgtttgcaaacgttacagaaagtcccattgtctttatgccggtattgaacaggagggaaagattgaaggacgtgcagaaggacgagatgaagaacgtttttccatagcccgcaacatgaagcaactgggtattcctgttgacgtgatagtaaagtctacagggctgacatcgggagagattgaaactttgtataatttttataaagtatgcgataccgccctgtagccaatgaattttcttcgtaggctatggggctttcgccttgcttccccaccattatgaattttgtatgccagtggttttaggtaattttttagaaaggtgcagggcgtttgttacagattaattttatctttgtccccgacctttaacaaaccgaagtgtatgcgcagacctgtttttcttcttctacttatacttttgcagataacgcttcccgttaagctgtccggacagaaaccggattatcgcttgttcgataatatcagcctggggacggaagcctctgtaatcaattgcttcctgcaagatacacagggactgatatggatcggttccaataaagggttgttcagttatgacggttattccacgcagccacatttcactttcgccaagcgtaacaatacgcagatttattgcggtacagtggtagacagtacctatctttatctgggtgccgacaatggtctgctgatttataactatcgcacagatacctacgaagaaccggaaacgcaacttccgaccgatatccgtgcattgcttgtacacgacggtatgctgtggttgggaacattgaacggcctctatacctattcgctgaacgaccaccaactctctgccgttaccgaaggtattccacaccagaccatctattccctgatccgctcttcggacgggcttctttatatcggcacctataacggcttctgtcgctatatccccgctacccggcattttgaagaaatagacctgcctctcagtggcaaccggagcaatcagtttgtcaattccctactggaagatacggcgcgtggctgcatctggatcggtacggaagggtgtcttttcagatatacgcctgccgacggccgtactcagcggattgatgctttccacgataattccgtcaagtcattggcactggatggcagtgggcagttgctggtgggtacggacaacggtttgtatgtatatcaggaaggagaacctttgctgcacgtggtccacgactcccgaaatctgcaatcactctccaataatatcatctggactatctttgccgaccgggaacataacatctggctgggtacggattacggaatttccatgtcacggaataacaatgctttgcgttatatccccatttcacaaatcaccggaacgggagaggggaaccagttctattccatgcttcgcgatacacacggaacttactggtttggcggaactaacggactgattcgtttcacccagcccctgggtgaagaacaagatgtggcctggtataaaatgggtgatcggaaatatcccttgtcacacaaccgggtacgccatctttatgaagaccgggagcggcaactctgggtggctaccgatggcagcatcagccgttatgatccaaagaaccgccagttcgtccattatagcattgtggatagcacccgtcgctacaatgccaactgggcgtatcatttatttgaagaccgggaagggaaactctggatagccacttgtctcggtggaatttttgtggtagacaaacagaacctaatgcgttcttccggtggtccctatatggcagagaagacgtattccatacacaacggtctttcgggtatgttcatcaaccagctaatccccgaccgtgaggggaatgtatgggcattgctgtacaacagtgccaatagcatcgagaagataaatccccgcacaggcgagataacccatattgccccggacgagctgacaggcgaaagaacccccaacttcatcctctctgcccaagacggtcatatctggataggctttcccggtggtgtgatgcgtgtacagcctgataacgatagtatccgtatgcttcctttcgatgagtacaatcactatgcaatactttccatggctgaggctgacggaaaaatatggatatctactaccgacggtttctgggtggcagaccagcaaacgctggaaatccgtcggctgaatatcactgataaacgtttcaccagtatgttcttcgaccggacaagcggagaattttacttgggtacggcagatggctttgccatatcttcatcggaagctctgctggcggaacacaccgaaaagccgcttatcctgactgccatttatatcaacaaccaactgtatcagcccaatatctcacaaactgatctttcacattccggtaccggacgctccggcacttcctcattgcccgaacaaagtatccgctactcgcaacgaatagaactggcttatgaccagaataaccttgcctttgaactttccgacctgccttattctcttgaagaaaaaagcaaacttgtatatcgtctggaaggtgtggatcgtgagtggaacttgctgaaagcgaatacgaaccgtatcacttacaataacctgagttatggagactatcgtctgttggtgagtaagttggacgcttatggaaaaccatcggaccgggcttatacactggaggttcatatcattcccccctggtactatactccgtgggccaaggcgctctatgtcttgctctgtctgatactggtggtctggaccatcaacttcttccgcgttaagaatcgcttgaagctggagcgtatggagaaggagaaaattttggaacaatcgcaggcgaaaatggagttcttcaccaacctttcccacgacctgaaaactccgttgagcatgattatcgcccctatcagcaagttgctgcccggtatcaaggatcagcaggagaagaaacaactggagcaggtgcatcgaaatgccatgaagctgaattcactcattcatcagggattagacttcaaccgggtggatagtggcaacaatacgttgttgatactttctcaaatcgaactggtatcttttgcgcgtggcttatttgctttgtatgcagaggagaaggcgaaagagaagaaactaactttccattttcataccgaccgtgaaaagatatacatacagatggatgccataaaactggaatctatcttggataacctcttgtccaatgccgtgaagtacactccggaagagggtgaggtaacgcttcgtttgcaggcttctgataaagaggtgcatatctctgtatccgatacaggtataggtgttccccggcaggatcagccgtatgttttccagcgtttcttccagtctcccaagacggcaggcaaaaaggagggaacgggtatcggactatatttggtaaagacttatacggaactgcatggtggtaatgttcaactttcttcagaagagaataaaggtactaccattacgctgacccttccggtgattgctatggaacactctgccttagaggtttctccggaaactgtttcttctgatatcgaacctgtcgctgccggagtcgaagttgtggttccagatacaggtatgcctgcttcggatgcaccattgcttctgattgtggatgatactccggaggtttcagagtttatctatcagatactgcataccaaatatcgttgccgtttagcggataatggtaagataggtatggaactcactatggaattaatgcctgatctgattatagctgatgtcatgatgcccgtaatggatggacttgaaatggtgcgtcatatcaagaagaatattcccacatctactattcccattatcttgctgacggcaaaaagtgataaggaaacagagcttgaaagtatccagttacatatagatgctttcattcctaaaccctttgaaccggatattttactttcgcgcgtggagcagttattacatagctgggagacgcatgaggcgaaagcccgtatggaagttctttccactccgaaggagatagaggcggtttcttatgatgagaagtttctggcaaacgtgattcatctgattgaagaacatatctcggactccgaactgaatgtgaatgccctttgtgaatggaccgatattaataacaagcagatgtatcgcaagataaagcaactgacgggtatgacacctgtggaatacattaagtccatccgcatgaaaaaggcggctatgctgctgaagcagcagaagtttactgtggctgaagtgatgtatatggtcggtttctccaatcattcctatttctctaaatgcttccaggcagagtttggggtgacgccgaagcagtatgtctgaaggggggcttttataagaagacttccgcgccaagcaggttattgaaataggttgcattgcgttcatcctccagtccaccgtcgagggtgaacagtagttggtacttggtctgtgtattcgccattcccacaattacagaaaccaccgcttcccgtttgggaaactgaactaaggtgactccctgcaccattccatcggaatattcgcttgcagcaaaagcattgtacacggcattgggcacttcatccattgtttcccagtcaatctgtctcatttcccattgcgcttcagagttgaaccagacctttgtgtcgaaaccattctgtataaagtccgctacatagtaagtctcatcccgtgaccaggcaacatccttggcggcaggatacatctttttcagtgctgtctgcacattgacaggcgcataatcggccagggccggaactgatgtcaggagcatcagaagcaagaaaggatacgtcaactttttcattgttccttcattagattgttatcgtttcgaaaagaacaacgagtggtgagttttgtttagcagaactttatttatcaggcacactgtcgagcggaagtataaacaggaaacgtgctcctccggtataattcttatccagtttcacttcccctttcaggcgtccggcaatgatggaacagatgttcaatccgagtcctgtgccctgtttgaattcatccagcttgctgaaccggtcgaaaacgcaatctgcctggtctgccggaatccccggaccggtatctgcaacggagaaggttatctttcccggattctccgtaagagagcaatgaaggtgaatctcaccccgttccgtgtgtttctccgcattggtcaggaaattgataagtacctgttgcaagcgttctttgtctgttacaaacaggaagtcattcggcacatcggaagtgaaataagacttcacttttttcggattacgatgcacaacggaaaccattgctacctggcataattcattgcaacggtggggtgccaaatgcattctgtatttaccactttccagactggcaaggtcgaggacatcattgatcagtgtagtcagcaactcggaattctgctggatgagcatgctgaactcttccttttcttcgtcgtcaacttccatatccggagtagataatacctgtgagaatccgactatggcattgagtggtgtgcgaatttcgtgactcatgttctgtataaagaagcttttcatccggtccgattcctcagcatgatcgcgtgcaacggtgagctcttcgtttttctcctgtaggatagccattgttttacggcgtctgtacaggtagaatatcaggaagcaggtgaaaagaaacaagaatgagagcacaagactgagggttacgatgtaatgttgggaggcgctttgttgctcttttaaaatggctttttgcttttccgcttctacattgaggcgtgccagatccagattccggttttccagtactaacttactattctcgatattcatcatttccagttcagactgcgactttgtccggtccagttccagctgggtattcttcaggttgagtgctgtattctgatattccagggctttggcgtccaattttatgcgttcagtacctatacgtgcatttagttcggcgatgtctgatgactgtacctgacggttgacagaatcctgataattgtggagccagttattatagatataagctttttcatagtttcctgatttcagatatatttcatgatgcatctggttggctgacaataaattgcgtagggaatccgcttcagtatgtgcctgatcgtaatttttatttagaatgagtttatagatatgcaggcgttgtacggctgtcttgcgaatgacaccatattgttctattacctgcgtgcattcatcataacaagcattaaaatcattaatacgcttcatggaatacaatacttcgcatttatttagcagggaggctacacgactttcattggttttagcggctttagcagctttctctgcatattccaaagccacttcaccttcgcctttatcccgataatattcagaaaggtttatatacatatatgtcgggtcctgatcgggtaggttctttagcatatattccaacgcatttttgtagtactctgtggctacttccctgttttgacgcatgtagtaaatgttccctaaagtgaagatacacgaaaatatcccatactcgtgctgatctttgaaagcctgtattttcatttcttcagctttttgcagggctcgcaatgaatgtccgttattcaacaggcagtttatttcgttggtacaggcagaataataatattggagataattattttttcttgcttcttctttagctcgggttgctgcttgttccagtttctcataattattggtactcagataaaagctgacagggattgttaacgccaggcattgtgctttcttgtctttcttttgcgtggcttccgcataaagcgtatcagcaataagtagtccttggggctgagtacgccatttgatggcacgttggaagatgggatataatgagtcgtctatcttatagggattattttgcgcccctgcagaaatgcagagtcctgtgaggagcagcaaaattagtatgttggtgtgtcttctcatttaatctcttgtataaagaatgtgccaaagatacttctttatgcctaataattacaagaatctggagaaaaaataccagttcgtccgattaattgtttctggttgttattatattctaattcggaatttgtctatggatatcactgataatcaatgcatgtcctttttgtgttgttttatgtccgatatctgctttgacaaataatagacctccattacttttgccgtcaagaaaaaccaacttgaatttgatgacatgcagagacacattcttaccttgattatttgtttgctggcagtagttgctccggcacagaacaaagtacaaaaaagcgttcctactatttatgtagatgccggcggcgtcatgcgttggtcggatacgaagaaagaagcttctttctttggtgtgaactataccttaccctttgcacatgcctatcgggcgatgggctatctgggagtggaccgtaaaactgctatcgaccgtgatgtctatcacatggcacgcttgggactgaatgcttaccgtattcacatctgggacgtagaaatttccgatgcagaaggtaacttgctggaaaatgaacacctggaattattggactaccttatccataaattacaggaacgtggtatccgtaccgttatcacggcacagactgattttggcaacggttatccggaacgcaaccaacccaccggtggcttttcatcccattatgataaatgtgccgttcacagcgatgctgaagctattgctgcacaggaaaagtatattgctgctcttgtacgccacgtgaatccttatacaggttatgcttacaaagacgatccttatatcgtaggctttgaaataaacaatgagccttgccatcccggcactgtagtcgaaacgcgtaattacataaataagatgctgtccgtcctgaaacgtgcaggcaaccgtaaaccggtgttctacaatgtcagccataaccagcatgtggtagaggcttattattctacagctatacaaggtactacctatcaatggtatcccattgggcttgtatccggacatacccgcaaggggaacttcttgcctttcgttgaccgttatgatattcctttctctaatctgaaaggtttcgataagaaggcccgtatggtttatgaatttgatcccgctgatattctttattcctatatgtatccggccactgtacgcactttccgtacagccggtttccagtggattactcagtttgcttatgatcctatcgacatggcggcctacaatactgaataccagactcattacctgaatgtagcatacaccccgaataaggctatcggattgatgattgccgcagaagcggcgcagaaagtgggcagaggagagagttttggcaattatccggcagatacattattcaatgattttcgtgtcagctatgtgcaggatttaagcgaactgaatgacggagagaaattctactattccaatacaactcaaacccgtccgaaagatatttctcagcttcgcgcaattgcaggttgtggcaaatctccggtggtgaattatgaaggtacgggagtttattggctggatcgtttggaagagggtgtttggcgtttggaagtaatgcccgatgccgtacaggttagtgatccgtttacaaagccttctttggataaagaagtaatgcgcattgtttccggtgcatgggatatgactctgaatttacctgatttaggtaagcaattccgggtgaacggcttgaataatggaaatacattcagtacacaagctgcgaatggtaagatttctaccctccgtccgggcgtttatttgttacagcgtgaaggtatatctgcttccggtaaatggactgctgatgctcattggcagaatattactcttggtgaatatgtatgtccatccatttcagataataaaggttttactgttactcattctcctgccaagacagtagatgccggtaaagatttacagatagaggccattgtggcgggtaatgaaatgcccgattccgttattatctacacagataagatatctttctggaatgaaaagaatccttatctgaaaatgaatcatacaggcggttacacttatcgtgctaccgtacctgctacagagataaaagagggttgttttaggtataacatcgtcgtttgtcaaggcgataagcgacaaacgtttccttcgggagtagccaggagtccactggattgggactatacttcggctaccctgtggaaaaccaacatagtcgctcctgaaaaatcactgtctctgctggaaatagtggatgctgacagtaaattggaaacatatactatgcccgaatggagccgtacgaaccggcaattaatacaaaatgcaccgacagagaagcctaccctgcgcatcaccttcgagtctaaagataaggcacccgtctttgttcttcgttgctatattaaggacgatataaacggacgccctgagcgactcgcttcctgccatactttgtgtatccatgcaaagaagattcccgaaggactaaaagccggcttcattacttctgacggatatacctatcttgcttcgtgtgccgctgtgactgatggtatcattcgtgtacccttgcaggatttaaaacaaacgaataccgctttgcttccccacgcctatccggtcttccttgatcattatttccgtccgcagactgaaatacctttcaggggagaggggattgaaactcttgaactctcctttgacggagttgctgaaaagactgcggaaatagagatagggagtatctggcttgaataaaataactacaatttttcatccgcagatgacacatctctttagatttgattatgtaacactttaaaacaaataccacgtatgagaaacaaaatcttaagttttcgcgtcacagcgttcttttgcctgctgtgtatcgcattgttaggaactgtcagcccggccttcgcacaagagggaaagaaaataaccgggcatgttgtagacgacacgaacgaaccactaatcggtgccagtatcctggtagtaggtaccagtacgggtgtaatcaccgaccttgatggaaatttcaacatcattgttccttcgggagctaccgccttacaaatatcttatgtaggctatgaaactgtaactgtacctgtgccaagcggtaacactgtaaatgtgaaaatgaaaagcgatgcacagatgttgagtgacgtcgttgtcattggttacggtacgcaacgcaagagcgaccttaccggttctgtttccaatgtcagtagtaaggattttaattccggactgatttcctcgcctgaacaacttattaacggtaaagtatccggtgtacagattatgagtaatagtggctcacccacagccggaagtaccatccgtatccgtggcggtgcttcgctgaacgcctcgaacgatccgcttatcgtccttgacggtgtacccctcgaagcaggaggtatcagtggcaataccggaaactttcttagtttgattaatccgagtgacattgaaagtatgaccatcttaaaagatgcttcttctactgccatttacggttcacgtgcttcgaacggtgttatcattatcactaccaagaaaggcagcaatgaccgtatgaaagtaagtctcagtactaccaactccatacaaactcgtacgaaacttgccgatatgctttcgcatgacgagttcgtagatgtgatcaacagtcgtggtacagatgcacagcgtgctttgctgggtacttccaataccgactggaacgatcagatttaccagaatgctttcggaacggataataacgtcagcattgccggacgtttggcaaagaattttccgatacgagtttccatcggctactataaccagagaggtttattgaaaaccgacaaggcggaacgtctcacgggtagtgtttctctgtctcccagcttctttgacgaccacttgaaagtaaatgttaatgtaaaaggctctgtcaataacaaccgttttgccgaaaccggtgctatttgggctgctgctacctataatcccactttacctgtttattccggtagccatgcttttggcggatatctggaagcactcgacaatgtgggtgagccggtaaatgctgctgttctcaatcctttgggctatatcaagcaaaataaatcaactagtaaagttacccgctttgtgggcaatgcggatgtggattatcgggtacatttcctgcctgatctgaaatttcatgctacattgggttacgattatgcagaaggtaagggaaaggtttacgttcctgctgaggctatgcagtactacactaccggtggtcgtgattacagttatggaccgcaaaagaacaccaaccgcttgctgactacttatcttaactataataagtaccttgactcgtggaaaagcaatatcgatgccactgtcggttatgattatcagttctggaaaagtacttccccgttgtatagtgaactaaacactctgggagctgtacaaagtacttccgcagctaccgaccagcggcatgcacttatttcttattatgcccgtttgaactacaccttcgattcccgttatatgcttacagctactgttcgccgtgacggaacctcacgtttcaacaaagataaccgctggggtactttcccttccgttgctctggcgtggagagtgagcgaagaagcttttctgaaagataacactgtgctgagtaatttgaaacttcgtgccagctatggtgtcaccggacaacaggatggcatcggcaactataattatctgcctgtctatacttacagtcaaactggtgcggaagtacagtttggtaatcagtttatcaatacttatcgtcccgaagcctatgtttccgatctgaagtgggaaaccactacttcctggaatgccggttttgattttggtttcctgaaagaccgtatcagtggtagttttgatttctacacgcgtaagaccgaagacctgcttgctaccgtagctgcccctgccggaagtactttcgataagactatattgaccaatgtgggaaatgtggatagtaaaggtattgaagttaccttgaatgccactccaatacaaactaaggattggaactgggatgtcagcttcaatatgacctggcagaagatgaaagtaaagaacctctcacttgtagaaagcagtgctgttaccaacacagcggtaggtccgtggattgacggttatcagttccaggtcttgaatgaaggttatgaaccctatatgttctatgtatatcatcaactttatgatgagaaaaccggtaaacccattgaaggtgcctatgccgacctgaatgatgacggtgtgatagatagtaacgatctctatcgctacaagtctccggctcccgattttatctatggtttcagtacctcgcttcgttataagaagtggacactgagcaccagtcttcgtgccaatgtaggaaactatgtgtataatggtatggctatgaatactggggcatggagtactgtcagctataatacatatcagttgaataatcttaatagcagttacctgaagactggttttcagaatcgccagtatctgtcagattactacattgagaatgcttctttcctgaaaatggataatctgtcactggcttacaacttcggtcgtatttgcaagtggttcagtatgaatgccagtgtaatggtacaaaacgtattctgcattaccaagtacacaggtgtcgacccggaagtgcctaacggtatggatgtatctttctatccgcgtccgcgcacttattcactgagtctgggatttgaattctaagtcatcattaaagctgaaaaaacaatgaaaaagatattttattccgtactgttcataagtaccttcattttttcttcctgtgtgggcgatcttgatcagtttccgcacaaagaaaccacttctgccgatgtatatgcagaagccgccaactacaaagccgtattaggcaaactctatgtttcttttgttactgccggacaggaaaaaggcggtggcaatgctgatctcagtagcaataacggtcaggattatatgcgttgctatttcaatttgcaggagtgtggcaccgatgaactggcatctacctggcttgaaggtgataaggtaggtgatcttacttatctgacctgggatgctaatgatacctgggtatcggatatgtattaccgtatctattatactatcgctttgtgtaacgaattcctgcgcaatgcgggtgatgatcagattgccaagttcactgaaagcgaacaggcagacatccggcattaccgtgctgaggctcgctttatccgtgctttggcctattatcatgcactcgatcttttccgcaatatcccgttcgtaacagaaaacgatccggtgggtagcttccttccgcctcgttacaccggaacacaagtgtttgaatacatcgagtccgaactgaaagatatcgatactgatttgctggaccgcaatgcttgcgagtatggccgcgcctgtaaacaagctgcctacactttgcttgctaaactttatctgaatgcgaaaatatatacgggtaatgaacattggacggattgcatcacctattgtaaagaggtaattaaggcgggttatactcttgaagatgattatgcaaagcttttcaatgctgataatgacaaacgtaccaatgaaatcattttctcattgccggtagatgctgcacgtacagtttcctggggaagtactacctatattatctgcggtgccgtaagcaatgcttccgattatcagaaaccggagaaatacggtgtgaccagtgcatggggaatgttccgcattcgtggcgaagttcctgcgttgtttcaggagggtgatggccgtgccatgttctttactgaagggcagactcagacagtagatgtgatagacaaccagagtaatggttattttgtggagaagtggacgaacctgactgatgccggagaagctgcttcgaatacagtagacggtggagtgaatacagattttccgttgttccgtttggccgatgtatatcttatgctggctgaggccgtggtacgtggtggttccggtagtgacgttactactgcactgggctacgtgaacgaattgcgtgagcgtgcattcggtagcgatgcaggtgctgtcaccagcggcgaactgactccggactttatccttgatgaacgcgcccgtgaactttattgggaatgtacacgtcgtacggacctgattcgctatgataaatttactacttccagttatctgtggcagtggaaaggtggagtgaaagacggtcgtgcagttaatagtaagtataatatctatcctattccgactacagaccttacggcaaatcctaatttatacaatgaaaactattaataccttatgaagattatgaagacaataactaatttcctctttttgctggtagcggctgtgtgctttgtcgcttgcgagaaggatggagacaaaatatatctgaatagtatagaagccggtgatctgatggcttcggaaagtgaagtcgttctgtcacaggataacagtaaggatattgttctgtcactggcatggacgcgggacaatctggctgtcagcgatccgaatgtatcaactcccgatttgataacgatgactttacaggcatctactgccagtgatttttcgtctgcggtggtggagtctgtagaaacttccctttctaaagtttatacgggtgctgacttaaatacggtagccaagaatctgggggctactccggatgtagccaatacattttatttccgtctgatgtcgaagaccggaagcaatatggagccggtttacagtaatacggttactgtatccgttaccccttacaccattgatatgagtgtgggttacgttctcgataccaaacaggctgataccggactgacactttattcggctgcttccaatggtgattatgtaggttttatgggagtctccggttggtacaattactatctgaaagaaggtgacggtactatttggggaaatgacggtgtaaccggaacagctttcctgatgtcttctgaaaatgattctgacaagcgctggaacttctggttcccgggacggagcggctgctactatgtagatgtaaataccagtaagaaagtctggtcggcactttatattccttccttgaccgttgcaggtgacgttgcaggtgaaatgactttcgaccgtgcgaatgtgaagtggacacttactttcaatgttgcgcaagccggaaatgtaaatctgaaagtttcaggtatcggcagactatatgactattctaccgggacggaaaagtctgatacggatgagaatcccggaatagaaactcctgtaggctttgtacaaagcggagaaaatcttacctttggcgggcaggcaggtgatattacggtaaatgttgctactgcgggagagtgcacattggttatcgacctgagtaatccgaaacagtggaaggcggaagtgaccagtggcagttccgaacccgaaccggtaagagaaaccctttatatgctgggtatcagtgagggtgaagatagctggacgttcgataatcatctacgtctttacgatgaagataatttgggatatgcaggagtggcggatgtcaattccccctggggatatcagattgccattgaagatggaaattggggagatgtttataaattgggtgaaggagatgctaatgccggaacattggcttttggtactgagaataatatcccggctcccgatggcggtctttatttctttgatgtatcgctgaaagcattaacttataagttaacggctttaggtagtgaaatttacgttgccggtcttaataaactggaagatgaaacgtggactttcgaaccactgccggccgcaactaccgccggtgtgttcagtggcagtatcactattacacagccgtcagcctggggctttaagatttacctgttcgataataactgggattacgtatatggcggaaatggtggaaagctttattacaaaggcaacggcattacagatgatgccacactggctccgggtacatatactttgaccgtagatttaattcatgcaacctataccattgaataaaagagagaaattatgaaacttatgaatatattagtagccggcttgctcctattgggagccgccgcttgcagtgacgacgataaaccgacattccccgaagaaccgatttatgatatgaccggctttgccaaaggtgccgatgtcagttggttgacacagatggaagcatcaggaaagaagttttatacagcctccggtcgtgaaacggagtgcatgactttactgcgcgatctgggaatgaactctattcgtctgcgtgtatgggtgaatccttcggatggttggtgtaataagaatgacgtactggcgaaagcctggcgtgctcaccaactggggatgcggttgatgattgatttccactatagtgacgtttgggcagatccgggaagtcagcacaaacctgccgcatgggaaggattgtctttggatgaattgaaagcggcaatgactgctcatactaaggatgtgctgagtgccctgaaggataaaggcatcactcccgaatgggtgcaggtggggaatgaaacaggccctggtatgctgtgggatacggatgctgctgtaagtggtggcatgggtggtaatggcgtggaatatgttgagaataaaaagaatttctcagactttattactaccggttgtgtggctgtgaaagaagtgttccctaatgccaaagtgattgttcatttgcaaggaggagacgataacaatctgtatcgctggattttcgatgtactgaaagagaacaatgctcaatatgacgtgatcggcatgtccctttatccgggtacggatacttggaagacgatgacttcttcttgtatcgccaatatgaaagatatggtaagtcgctacaacaaggaagtgatgatttgtgaagtcggcatgtcatgggatgaggccgcaacgtcgaaagagttcctgaccgaactgatagctcaatcgaaggctatagatgagtgtttgggtgtcttctactgggagcctcaatcctatggtggttggaatggctatacattaggtgcttttgatgaaagtggcaaaccgaccgttgcaatggacgcatttaatcaataatataccataatgaaaaaactatcgactttattcttaatgaccttactcgctgcctccctgcatgctcagcgcagcgagtatctacttgaaaagaactggaagttcatgaagggggaagctccggaagccatgaagccggaatttgacgaccggaagtgggaaactgtaaccgtgcctcacgactgggccatcttcggtcccttcgatcgcagcaacgatttgcaggaagtggcggtaacgcagaacttcgagaagaaagcttccgtcaagaccggacgtaccggtggacttccttatgttggcatcggatggtatcgtactaggttcgatgcccccgtcaatcaacagacgacacttgtctttgatggtgcaatgagtgaagcccgtgtatatgtcaatggacaagaagcatgcttctggccatttggttataattctttccattgtgatgtcaccggacttttgaataaagacggtaaaaacaatacgcttgccgtgcgtttggaaaataaaccacaatcttcccgttggtatcctggcgcaggactttatcgcaatgtgcgtgtagtgagtaccgataaagtacatgttcctgtatggggtactcagctgactactcctcatgtttctgatgagtatgcttcagtacgtctgttgaccactattgccaatgatgaagaaagagatatccgtatcgtgacagagataatctctcccgatgggaaagtcgttgcaacgaaagataatacccgtaagattaatcatggtcagccttttgaacaaaacttcctggtgaatgctccttgtttgtggtcgccggagacaccttatttatataaagctgtttctaaaatctatgccgatggcaagcaaacggatgaatacactactcgtttcggcatccgcagcatagaaatcattgccgacaaaggatttttcctgaacggtaagcatcgcaagttccagggggtgtgcaatcaccacgatcttggtccgttaggcgctgccatcaatgttgctgcattgcgccgtcaacttacgatgctgaaagatatgggttgtgatgccatccgcaccgctcacaatatgccggcaccggagttagtgcaactttgtgatgaaatgggttttatgatgatgctggaacctttcgacgaatgggacattgccaaatgtgagaatggctatcaccgttatttcaacgagtgggcagaacgtgatatgataaatatgttgcatcagttccgcaacaatccttgtgtcgtaatgtggagtatcggtaatgaagttcctacccaatgtagtcccgtaggctataaagtcgcttcttttttgcaggatatctgtcatcgtgaagatccgacacgtcctgttacttgcggcatggatcaggtgacttgtgttcttgctaatggttttgccgccatgattgatgtgcccggttttaattatcgcgcacaccgttatctggaagcttatgaactgttgccgcagaatatagtacttggttctgaaacatcctctaccgttagttctcgtggcgtatataaattccctgtagagaaacgcggggatgcgaagtacgatgatcaccagtcttccggatatgacttggagcattgtgcctggtctaatgttccagatgaagattttgctttagcggatgattatgactggactatcggtcaattcgtttggacaggattcgattatctgggtgagccttctccttatgatacggatgcatggccaagtcatagctctttgtttggtatcattgaccttgccagtttgccaaaagaccgctactatctgtatcgtagtctttggaatgagaatgtgaatacactccatatacttcctcactggacatggtcgggtagggaaggagagaatactcctgtctttgtttacacaaactatcctgctgccgaacttttcgttaatggaaaaagctatggtaaacagcataaactgacagccgaagagagtaaagctattcaggacaaagatacacttgccctccagcgtcgttaccgcctgatgtggatggacgttccttatgagccgggtgaagtgaaagtggtggcttacgatgcttccggcaaacctgctgaagaaaaagtagttcgtactgccggcaaacctcatcatctggaagtcattgctgaccgtgaccaactcactgccgatggtaaagatttggcatacatcactgttcgtgtggttgataaagacggaaacctttgtcctgctgataatcgtcttgtaaactttacggtgaaaggcgcggggcgttatcgtgctgccgctaatggagatgcaacttcacttgatttattccacttgccgaagatgcccgctttcagtggtcagctgacagccattgttcaaatgaccgaacagcccggtgaaattattttcgaggctaaggctaaaggggtgaaatctggtaagcttgtgctgaggtctgttagagagtaaagaaaagagggcgtcactttcaaatgaggtgatgccctctttttattctaccacccatttttcaatgttccgggttttctcactgaagtttattcctattttaaatagttttcgttcatccatctcgaaaggaagtgcataacgcttgtcattaatttgctgcaaagcttcttcggcagtacctttcaacttgaattccatgatataaatgaatttgtctgtctttaatacgaggtcgatgcgcccgttgctagtcttatattccacttgggtatagaaacctattaatttgaaaacaatgaagagtacattttcgtagtgcagttcctgttcgcggattacttcgtaagtggtatctgcaaagaaactttgcaggcggcggaagaaggaatcataatctcccgattccacttcatgaacaaatttctgaatagcaaacggagcttctactttgttgacatttgcatagaaaggcaataggaaacggatgaaaccttcctctacttcacggttgggaaaacctaagcgatacataccaaagcgttcatcgtatcctttgatggtaagatatccgctttgataaatcatcggaatgggattggttgattcagaatcgatgctgttcagcacttgggcatcggtctcttcatgtgccatccgctccaggtcgtaatggtgcttctttagtaacttcactaagtaggtaggcgttcctgtctcaaaccaataactgctgaattccttatatttgaaggcattaagaaggctgaatggattgtatataccgatagagttatgagtgaaatgataaccgtcatagttttctctgagttcggcacagagtttgtcatacgtcactccccgtgcagctgcaaattcatggatttcattttccaaattagaatgaatctcctgttcgctaaccccacagatttcaatgtactgattccgcattgatatgtcgtccaagttgtttagatcactgaatacgctgacctttccaaactttgtcactcccgtcagcagggcaaacttgatgcagccatccatcgttttgagtacgccataaaatgcctttaaagtattccggaattgtttttgtagctcttcgttaccgatagcctgtaacataggcttgtcgtattcatctaccaaaattactacgcgttgcccggtttgttcgcaggcacgttctataatacctgcaaagcgcagggagaaggagcgttcagatggttcggcgccgtagagtttttcccacgctaccaacgacttctcaagtatattatccaaactcttcggtgcgtcatatttctcaatattgaggtcgagatgcagtatcggatactttatccagtctttttccaacttttctattgccagtcccataaacagttcctttttcccccggaagtatgcttccagtgttgagatgagcaaactcttaccgaaacgacgtggacggctcaggaagtaataacggccggtttttaccatttgataaattaatgccgtcttatcaatatagaaataatcatcctgacggagactttcgaaattttgtattcctatggggtaaatcttattgctcatatttgcctgtttttatacatcaatacacaaaagtacttatttatgttctattttcagtattaaaaagggaaatttaatcagggcaaccgcatcaaaatttgttcgtttctgtagggttatgaatataattttaggcgcggattacgcggattacacggattaatggctgcgctatcacactatattacaggaaaaga

SEQ ID NO: 6517 - DNA, 424 bp, Unknown
  gut microbiota DNA sequence
caatgcctgttctctgatctcattcagcacagcttcattctcctgctcagcagcaagatccggagccatcagaacctttcctttgaactccagtttctccaaatccttcagatatttctcagatgtaacgatcacatcactgtccagaattccaaggatctgctgaagtctgctcgccggctgttttgtatccatcagtacataaaaacatcctgcataaacagcacccatgaaaactccgatggtttctacgctcttctccataaatacaggcaccggatttctcggtgtgaaatgtttcgcaagtgcagtccctgttctgcgtgcagtctgctccagttctttaaatgtgcagaatgtatgttcatctgcaaaagctgtcttatccggatatttccgtgcggattcttcaagatattccaga

SEQ ID NO: 6518 - DNA, 430 bp, Unknown
  gut microbiota DNA sequence
agggacatcccctccacgcgcattacgcaacgtcgcaatcttgtttatgtttacacttaatctagtcataattcggatcatagtttgccgcaaatgtacaaataatagcgatacattggcagcgttctgagaaaaaaacgccatatttgcatttcattaagaaagtacagacgatgaaatttgccatatttggaaatacttaccaagcaaaaaaatcaacacatgcggaaactttattccgtttgttggagcggcgtaatgcccagctttgcatttgcagggagttctataacttcctgacttccgacctgcacatgactatcgcttccgccgaactcttcgacggagacgattttacagcagatatggtcatcagtatcgggggcgacggtacgttcctgaaagcagccagccgggtaggcaaaaagaa

SEQ ID NO: 6519 - DNA, 501 bp, Unknown
  gut microbiota DNA sequence
ccactacaaggtggaagaacgtagcgtgttgcaattacattgtgatgacaaaaaattgatggaatcgccttatgcactcaatgaaattgctgtattgaaacgcgatagttcttcaatgatcagcattcatactgctatcaacggtgcccatctcaccacttatcaggctgacgggttggtggtatccacccctaccggttccacggcttattcgctgagtgtcggtggtccggttatcgtgccccatagcaaaacgattgctatcactccggtggctccgcatagtctgaatgtccgacctatcgttatttgtgatgattgggaaatcactcttgatgtagaaagccgcagccacagtttcctagttgccatcgacggtcgtagtgaatcctgcaaagaaacaacccgtctgcgaatctcacgggccgattacagcattaaggtaatcaagcgcttcaatcatgttttctttgatacgcttcgcaataaattgatgtgggg

SEQ ID NO: 6520 - DNA, 955 bp, Unknown
  gut microbiota DNA sequence
tctcggaaagcgggtgcaaaggtaagaactttcaagcatatcttccaaatatttccggaagtttttttcttttttcttttagaacgctgtattcttggttagaataaagcctaaaaggaaagaaaaaagttggagttcctacgccgtttctgtcagaatgtcaatttcaaggctgaccgtctcttggttagcgggtgcaaaagtagccgatatatctattcactccaaacatatctgtctttttttcgaaacttttttgaaacaatttcgtaaatgcctgattgataaggatgttgtagaacataagtttgaaagggaggatgaaaggagctggaagggggtacattattatatatgcgtgcgcgcaatgtgcgcgtagacagaggcggggaaaagtactgggagaaccttaaagctgaggattggaagtgtaaagctaaggtttgagaacctaaagctgaggtttagcgttgcagagctgaggtttagcgaggtaaggttgagattcatttttgcggagttgaggtatggttttgtaatggtggggttggtacacttggtacagaggttcaccgttccctttgcctcacacacacgtgcgcgtataataaggtgtgaatccccaccactctgtccccaccactgatcattcctcaccgcttatccgactttgtataagttccatttacggctacgctttccaacagaccgtatttctgaaagtgcttcagccaagtggaagcggaggtaatggcgagatcccataggccttgaattccttcttctgttcgtcggtgaggcgaaacgtaaaagctccgcccatgacagcggattactgtcatttgccacattttcctcttgagtgtacaccttatatattacgcgcgtgtgtgtgaagcaaagggaacggtgaacctctgtaccaagtgtaccaacgtccgatggaatttcggct

SEQ ID NO: 6521 - DNA, 247 bp, Unknown
  gut microbiota DNA sequence
ttgcgaagcacctgctcttgtactacttgtattgtttatgtaaattcttcaaagatcgcttctttttaaaactgcttttcttttcagaaagcggatgcaaaggtaagaacttttaagtatatcttccaaataatttcgaaagttttttttcttttttctttttctcgtcgtctctctttgcgaaagggagataaaagaagaagaagttcttagcgccgcctctatcaaggaagccgactcagcgtca

SEQ ID NO: 6522 - DNA, 142 bp, Unknown
  gut microbiota DNA sequence
gcgaaagggagataaaagaagaagaagttcttagcgccgcctctatcaaggaagccgactcagcgtcagcctcttctcggaaagcgggtgcaaaggtaagaactttcaagcatatcttccaaatatttccggaagttttttt

SEQ ID NO: 6523 - DNA, 815 bp, Unknown
  gut microbiota DNA sequence
tcctccaaggaatggaccaattaccgccatcaggcagatgtgctcgctatctatcagcagctcagacaggccggatataccgacgaccgtatcattctcattgtcgaggatgacatagccgataatgtctcaaatcccaacaaaggagttatacaggtgactattgggggaaacaatgtgtatgagaatgtagagattgattatcgtatgtcatcgttgaaggcaaaagatatacttgccattctgaatggcgaaaaaagcgaaagtttgcccacagtgatcgaatctactgaaaacgacaacctattcgttttctggagcggacacggtgtaccgggagccatgtgctgggatgaggagccttatgccatgacaggcgatgacctgtccactgtttttaaggatatgaacctcaaaaggcgttaccgtaaacttctcatgatggtggaggcatgtttttcgggtggtgtgatggagcagtgcgagggcatccccggaatgctgttcatcactgcggccaacggtgacgaaacatccaaggctgatgtcttcaacggagagatgaaagtgtggatgagcaaccgtttcacctccacttttatcgaacaaataaccgataacaaggatgtagctatgcgcgacctctattatcggctgttcatcaatactgtcggaagccatgtaatggtttataatgccgaaaactatggcaatctttattcagccaatatgtcagaatttataaatttcaaaaatgataaatcaaaatgaaaagattaattaaaaaaacatcaacactgctgtcagtggtggtt

SEQ ID NO: 6524 - DNA, 12928 bp, Unknown
  gut microbiota DNA sequence
atggagctgtcattatcctcacttttcgcatttgtggtcatagggtatatctgtttgatttttgaactacagttgagagccatacaaaccggagagaaggaaaggattactttaaaaaaatattttggcagcctgcttaacccggaaacttttcaaatattgttggcattaaaacctcagatcgggaaaatggtaagtcgggatattgcattgcataatcaaaaagaaggtagtaatgaattgatgatagtgactaatcccaattgcaagaattgtgcaagtgttcatcgtcatatggtagaaattgcttcaagtgttcccgtgtcattagtattggtaacatttccaaatgataggttgggtgaggaaattgcccagattattattgcggcttattacgttgtcggttgggatagggcaatagagcttttgggggagtggtatgaaaacaggcacatggaagacgcgggtatatatagtataacggctgaggtacgtgatgtgtggacaaaacaacagatatattgtcgggaacaaaagataagtaaaaccccttctgtcatagtgaataagcattatgtgccggaggtatacccattatcagatttaagatatgtattgacataaagatttattgtagatttagtaattaatagccagaaccttaactttgtttatttgctactgaagctcaacagaagttgggcttcagtaatagtagtattcaatataacggtaataggtgctttatagctgttttgtaatcggataactaaaaaagcacgagcctcccgacccgtgcttttcaactaattgttaactttaatttctatatttattactttgcaattgctaatagattggtcgtgaagtccatctgcttgtggttaaccagagtccaatctgatttattcttattgtcttgcttgtaggctttgtaagccgtcggcatatttgcgtcattcagttcgtatacacttttctgaacggcttcatcataagctttgtgagattcgttccagcgggcgtaattcatggttatttcattatcgctgtactggtaagtcatcttgaaatagggtacccacgcatcttttgcaccatcccatttggatgcttctttgctaatcagacggttttggtcgtcataagtaaaagtgtattgcatgtggcgttgcagataagagccttcttgtttgaagatagttttggatgcgactaattcgccgttcatcacttgatttgttatgaaaccgtcctgagctttcacttcggagttgagaacacttgctaccataatagctaccaatgcgactgctttaaataaacttgtagttttcataatctttattttttaattgttactatttctatttggctttcgctcttatctgttagacggaactacttgctgaaaagtggcagataatctttattttttttgctgaccgctttcgcttaataatagtcaattcctgtgccaaagtaataagtggttgaaaatcagtaaataatagaaatagtaagctgttcattatcggacagttgtccgcttattatcgaacagtgaccggaataaaacaaaatatttattccttttgagacatgagttcaaacatttggtacattatcaatatccttttatcgataacgcaactatttttgtctccaaaataatatgctatgaagaatttctgtttgattaccttatttatttgtttcagtggtttgcccgtatggggtggcggaacgtcggaaaaggcagtgtatgacctgatagagcgggttactcccggttatgcttcgcagtatcggttagagatgatacaggcggaaaatggaagtgatgtttatgaagtggatggtgacgggcagagaattatcctgcggggaaacaatgcggtctccttggcaactgctttcaactggtatttgaagtatacgtgccatgcccatgtatcttggtttggtaatcaattgaaattgcctgcgaaattgccacagcctgcgaataaagaacggaggattattaatggtaaatatcgcgtttacatgaactattgcacggtaagctatactgcggcgtggtggaattgggaacgttggcaacaagaactggactacatggcgatgaatgctatcaatatgcctttgttttctgtagggctggatggtgtatggtataatacgctgttacgctttaatttcacggaagaagaagcccgggcttttctcactggaccgggacattcggcatggcagtggatgcagaatattcagagttatggtggtcctttgcctaaatcggtgatagataagcatgtcatattgggtaaaaagatattggcgcgtcagttggaattagggatgcaacctattcagcagggtttttcgggatatgttccacgggaattgcaagctaaatatccgcaagccaaaatcagtatgaaacggaagtggtgtggttttgacggtactgctcaactagacccgactgaccctttgtttcatgaaatgggcttggcttttctggaagagcaggataaattgtttggtagctatggggtatacgcagccgatccttttcacgagagcgctcctccgatagatacacctgaatatctgacaggggtgggacagaccatacataagcttttccagacatttgatgcgggagctttgtgggtgatgcaagcatggagtatgcgggaagatatagtgaaagctgttcctaaggaatctttactgatattggacttaaacggatcgaaaactgctgctaacggtggttggggatatcctgtgatagctggtaatcttcacaattttggcggacgtatcaatatgcatggcgatttagctttgttggcttctaaccagtatcagaaagcgaaggcgcgttatccgaatgtgtgcgggtccggactttttatggaggccattgagcagaatcctgtttactatgaactggcttttgaaatgcccaatcatgctgatagtattcctttgcaggcatggcttgctgcttatgccgaacgtcggtatggagcgaaatctgctgctgccggaaaagcgtggatgtacctgttggaaggtccttatcgtcggggtacgaatggaacggaaaggagctctattgtagctgctcgtccggcattgaatgtaaagaagtctggcccgaatgcgggtttgggtattccttatgaaccgatgttggtgattcgggctcagtcgcagcttttgaaggatgctgataaactggcattttccaaaccttatcgttttgatattgtagatgtgcaacgccagatgatgactaatctggggcaattagtgcacaaaaaggcggcagaagcatttgcttccaaggataaggcggcctttgccttgcactcaggacgtttccttgaattattgagagatatggatgaactgctttatacacgtagcgagtatagttttgacagatggttgacggaagcccgcagttggggagagactaaagaggaaaaggatctgatggaacgtgatgcaacttcattggtcactatttggggggctgatggtgatccgcgtatatttgactattcatggagggaatgggcaggtttgattaacgggtattatttgcctcgctggcagaaattctatacaatgttacagggacatttggatgcaggtactgattatcaggaggaagggctatccctggcttacggtagagaagatttccgtgcaaacgacttttacaaccggcttgctgaatgggaacttgcctatgtggatcagacgggtaaagcacgaacacctgtcactcatggggatgagctggtcgttacccgtcgtttgtttgataaatacctgaaactgtctcgtgaatattatgcggacttttcgggtgtgggagaaatcaaggaagaacgtacttatgaaaatgtcggtgaggagtaatagtagttactccccacttttcttcaatattatttttgccccgtattgagtagcgatacttttgcggaaatccaggaaatcggtatagtcttctttggggtaattgccttggtaatagagcaggcgatgaacgataaaaacattgcctgcgtcgcccaaggtaatggaagaccggaatttgccgaatttactttcctgatcaacgggtttaggcaatgattctatttcatatccttccggcaggcggatgctgatgctatctatatcgagatagccataattggtttgaatgctttgagtgcgttctccctggttgttcggactgtaaaagcttctgtggaaaatattgatcgggataaacaggcgttttccggttttgtttccatattgttcgctttcgatggtgtacgagatatccagttgaggctctttctgcttgatttcgttggcacggatggcatcgactttagcctgtaccaggttgatgtcggagcgtagccagtctttctgccgggcaggttccatgtcgataatggatgccatgtcttcatattgaaacaggcgggaagtttgtttaacttctacttttgcactcccatccggttgtagggttacgagggtgttgttgacttgtgtattcagagagtccgcatacgttggcaattgacaaagagttccgccgttgggaccaacgagtagagcatcgtgccctgcaatggaatgatgcacgtagcctaagggtaaagtaggattggtacattccagccaaagcgtatcattgggtaacggtacttgtaagatgacatggttgttttgattggcactggcaaagtcggctaataaacgcctgttagtagtgctgattacggtgtaaacggatggaatacccagttctgtaagcatggcacgcatatagttggatagtcctttgcagtctccgaagccggtgcggtttacatcggcggcggctatgggttgcaaccctccgattcctagctgtatgctgacatagcgggtagtggatgcgagatactgatagattgcggctattttttcatacggggtattgcagtttgccgtccgtttttgtaattcctcctttagtgtcgggggcagttggtctcttccactcaataactgatattgccattcgccatacgattgccagctttccatactccctttagttctttcgaaagagaaattcaggggagtgaaatagatacggggcagcaattcggatagggaagggctgtaaggttcttttttgatagcgggtagagactggactttgacttctgtcagccagtttccgtcagctgtctgttgctgtctgacttctgcctgcatattgatggcccggtaacggcaaggattgtcagccggagtcagaatacggtaacttgcctgagcaacggattggttataactcttttgcggaacgaagctggggtagccgatcagtccatcgctgttctttatctcccattcgtaagtgatggtaacaggatatcgtgacggggtatattcgaagaaatagtaatagtcgtcgctgacaaggccgtctgaatattcggtaatcttcagttcgctctttttaattttccggatcacattgccggaggcgtcccgaacttctccggagaattttttcagagaggaaaaacggtcgcacagacagacaaaggaggcatcttcttttcctttttcattcaatacctgtatcacacgtttctctttctggatggcatcggtggatgaactgcatacgatatccgttacggcatcttgtatgatagagtatgcgtcggtacgcaaatctgtttgagcgtacaggttgccggagtaaaaggcggcttgtagcaggagaccgaaaaataatttgttcattttcataatttccgcgttacagtttctttaaaaccatcatttcattattcttcttggcaatcaattcccataattgttgcagttcaggatagtcagtatgcaggaacagcagcttctgcaaccggaaagaatacctgagtgtgacctgattattctgttgcgtgattatatatcggcaaagcacttgtccgtcacttgtctgcaatctctgattctccggcttttcatcgactgtgtatccttccggaatggtcagatttatggtcagggacacctgatctgtgtagggaaattctacgggaagtttccgttccgactgtttgaagggagattcggagacatgcaggaatacaagcggattgacgtaaatgaactgatcgttaacagtgtactgcttttcaaattctaccagttcatacacttgcggtgagaagtgggttctcccttccatctggagttttttcacctgtatgttttcttcggaagccagtttgctggcaaactcggtactgtccttggctgtgcggtatttattacgcaaacgggaggcatactgacctatataaacagtttcacgtgtgcctgtaacaactccttcagaagaaattccggccttcacgcttgatctcagcaggtttgcccctacattttccagactgacccactgactgtgattgtccggagcgataatacgcgcacggttggtcatcagtacaggagggaggacattaaggtagccattttctacggaactgtccagataaaccagagtactgtctgtagggctgatggctacgacaaatgtatttagtttctggatgctgggatggctataaggaagtatgcccatatcccggcggctcattactgccggataggcgggtattccggcatctttcagcatgctgataaggataaagttgatgtcggcattgctgcctgtgccttctttcagcacttgcttgggtgatttgctatataaggcatatttctcattccatctcactttgtttttcagaaacgtgtagatggcacatatcttttcgtccgctcccttcatttgttccagatgcagggcagtcatttcttctttgagcggattgttcattttcagtctgctaccgaagtccgagtccttcagtaatgtttcgtcaatctgttcccagctttgggtgaacgatttgtagagggaaccggggaaatcaattccctgcaattccaggtttacttgtgtacagtagtcatccgcgcaccacacatgactgtcgtctttcaaagcggggagttggttgccctggaagttcagatgcgtcccggagcatcggagcaattgcgatccgatggataagttgagggaagcgttttcgtttacggtttccagcttttccgcaccgtgcatctctatgttgaatttgaaatactcgggtatggtgacattatattcggtatataagataggaatatcactttgtgctttccaactgtcgatactgaagaagaaatcggactctacccggtattcatactctatcagcgttccggctttcacctgcggaatggagaatttcaggttcatccggctttcgcccacacgctccttgaaaactacatctttcttcattttggtacgtacaatttttccgttttccaggttgtaggcgctggcatccagtccgattatattttctttcatggcgttattaggcagttcgtagtagggaatgatgacatcggcataggaggttccttccggtttgagtacctttatttttactttatactcagaaaccagccggaagctttctattccccatttataactgatgtcagtcagcttacacaggataacggcggtggcactggagtcgggttcataaacagccatgttcagttcttccatggtaggtttgccgaatttccggttcggtagaatagtttgtccgtcagcgaatagctgaaaacagcagaagcaaaaaagtaaggagagtaaagcgtttttcatgatagtatgtgattgaagtgttcttgtaccgacaaatatatgttttttttatttaaaacaagtgtttaaacttctcttttattaaatctccttaaagaaagcccgatgcgtcactttttatttgttattttgcaccaaattcgggtatagtgcggtctgttcagttcaggctgcacttcattattgcagaacgttcaatgaataaactcaccataaaagtctgtccggtatgtggtagtgcgcatatagagcgtgctatgacttgcatagaccattatgcttccagcgaggcattttatctgtgccgctgtcaggattgcgactttctctttacgcaagattttcctgtggaggctgagataggcaaatattatgagactcccgattatatttcccattctgatacgaaaaagggtcttatgaataaggcgtaccattgggtgcgtggttatatgctggggcgcaaggcacgtctggtggctcatgaagcacaccggaaagaaggacgtttgctggatatcggtacgggaacaggatattttgccgatactatgaagcggcggggctggcaggtggaagcagtggagaagaatgcgcaggcgcgtgcttttgccaaagaacatttcggtctggatgtgaaacccgataccgcattacaggattttgctcccggaagttttgatgtcatcactttgtggcatgtcatggaacatctggaacatttgaatgaaacgtgggatacactgaatagcctgttgacggagaaaggcgtgttgattattgccgtgcccaattgctcctcgtatgatgcgaagaaatatggtgcgcactgggctgcctacgatgttccccgtcatttatggcattttacgcccggcactattcagagattgggagcaaagcatgaatttatattggctgcacgccatccgatgccgtttgatgcattctatgtgtcgatgctaagcgaaaagtatatgggacattcgatgtctttcttccgggggatactcagtggtacgttggcgtggttcagcacgttggcgagcaaggagcgaagcagctcgatgatttatgtattcaggaagaagcagaaataagatatgaggtggtaagatgataaaatggtaagatgataaggcatgaagacgaaaagcaagaataattccgtatcctattttgatatgcagttcattacttccagcatcagtacgacgctggtgttattgctgctgggattggtggtgtttttcgtactgactgctcacaatctttctgtgtatgtaaaggagaatatcaatttctctattatcatcagcgatgatatgaaggaaacggatattctgaagttacaaaaaagactggataaggaagtattcgtacggtctacggagtatatttcgaagaagcaggcgcttcgtgaacagattgaggcgatggggacagatccgcaggattttctgggatacaatcctcttcatgcttctatcgaagtgaagctgcactccgattatgcgaataccgacagtattgccaaaatagaaaaagagataaagaagaataccaatgtacaggaagtgcgttatcaggaagacctgataaatatggttaatgagaatatccgtaatatcagtttgatgttgttgggattggctgtattactggctttcatttcctttgcattgattaataataccatccggttgactatttactctaaacgcttcctgattcatacgatgaagctggtaggtgcaagttggagttttatcaggcgtccgttcctgtggcgtaacttctggatcggtgtgttggcggctgtcattgccgatggtgttctgtgggctgcggcatattggttggtggtgtatgagcctgacctgatcagtgttatcacacccaatgttatgttgctggtttccgtatcggtgcttgtatttggagtgtgtatcacgtggttctgtgcatatctgtccatcaataagttcctgcggatgaaggcgagtacgctttattatatatagtattgaacattacagcttatacgttaatagaggaataagagatgttttgagtgaagttaaattgtaaacaattaaatcataaataaagagatgagtaaagagaaatttgctttcgataaaactaactttatcctgcttgccgttgcaatggcggtggtgattatcggttttatcctgatgaccggtccggtgtctaccccgacgcactttgaaccggatatttttagtgcgagacgtattaaagtagctcccgtggtatgtcttgtgggttttttgctcatgatatacgccgtattgcgcaaaccgcgtgataaacaaatgaataatgaaggaataaaagaataaaaagctatgtgcagaggggcatgtgtcccctatcataattcataaattataatttataaatcaactacatggaatggtttgaggcgctcatcctgggcttgatccagggattgacagagtatttgccggtaagtagtagcggacatttggctatcggttcggcattgtttggtattcagggagaggaaaatttggcatttacggtggtagtgcacgtagctacggtgttcagtacaatggtggtcttgtggaaagaaatcgaatggattttcaagggactgtttaagtttcagatgaatgatgaaacacgttatgtaatcaatatcctgatatctatggtgcctatcggcattgtgggtgtgttctttaaagatgaggtggaggcagtttttggttcaggcctgctgattgtaggttgcatgttgctggtaacggctgctttgctgtcattctcttattactataaaccgaagcagaaggagaacatctccatgaaagatgcgttcattataggtttggctcaggcttgtgcggtgcttcccggactttcacgttccggtaccacgattgcaaccggattgttgctgggtgacaataaagcaaagctggctcaattttctttcctgatggtaatgcctccgatattgggtgaagggctgctggatggtatcaagttgatgaaaggagaagacattgccggaagcatttcaacgttatcattgctgataggatttattgcagcttttgtggcgggttgtctggcttgtaagtggatgattaatattgtgaagaaaggaaaactggtatacttcgctgtttattgtgcaatagccggtatcgtaaccatcgtactgtcacaaatgcaaggataacggatgaagtttaaagaaggagaagtattatatttcaataaaccgctgggatggacatcgttcaaggttgtgggacatgcgcgttatcacatctgccggcggatgaaagtaaagaagttgaaagtaggccatgccggtacgctcgatcctttggcaacaggggtgatgattgtctgtacgggcaaggctacgaagagaatagaagagttccagtatcatacgaaggagtatgtcgctaccattcaattgggtgccactaccccctcttacgatttggaacacgagatagatgccacttaccctactgagcatatcacgcaggagttggtggaagaaacgttgaagacatttatcggcgagatacaacaggttccccccgccttttcggcctgtatggtaaatggcaaacgcgcctatgacctggcacgtaagggtgaagaagtagagttgaaaccgaaattgctggtgattgacgagatagagttgctggaatgtaatctgccggaaattaagatccgtgtggtatgcagtaaaggtacttatatccgtgccttggcccgtgatattggtgaagcgctgaacagtggcgcccatcttacggctttggaacgtacccgtgtaggtgatgtccggttggaagattgcctcgatccgatggattttaaagagtggatagacgctcaagagatagaaacagaagaataacttaaagaaagaatagatatgaaactgtcgcaatttaaatttaagcttccggaagagaagattgctttgcaccctacaaagtacagagacgagtcgcgccttatggtgctgcatagaaagacaggtgagattgagcacaaagaattcaaagacgttttgaactactttgatgataaggatgtgttcattttcaatgatacgaaagtatttcctgcccgtttgtatggcaacaaggagaagactggtgcccgtattgaagtgttccttttgcgtgagttgaatgaagaactccgtctgtgggatgtgttggtagaccctgcccgtaagatccgtatcggcaataagctgtatttcggtgatgacgactctatggtagctgaagttatcgacaatacaacgtctcgtggccgtacgctccgtttcctctatgacggtccgcacgatgagtttaagaaggctttgtatgcgttgggcgaaactccgctgcctcacagcattatcaaccgtcctgtagaggcggaagattcggagcgtttccagtctatctttgctcgtaatgagggtgcggtgacggctcctactgcgagtctgcacttcagccgtgagttgatgaagcgtcttgaaattaaaggtatcgactttgcgtatatcacgctacatgccggtttgggtaacttccgtgatattgatgtggaagaccttacgaagcacaagacagattctgaacagatgattgtgaacgaagaagctgtcggcattgtgaatcgtgccaaagacctgaacagacaggtttgcgctgtaggtaccactgtgatgcgtgccattgagagtaccgtaagtacagacggtcacctgaaggcatacgaaggatggactaacaagtttatcttccctccctatgactttacagtagccaatgcgatgatttccaacttccatatgccgctttccacgttgctgatgattgttgccgctttcggtggctacgatcaggtaatggaggcgtacaatgtggctttgaaggaaggttaccgtttcggtacgtatggggatgcgatgttgattacggataagtaaaaagtacagttgtgaaaatatgtcctaagtgccatgaagaagtagaagatagctttgagatc

SEQ ID NO: 6525 - DNA, 172 bp, Unknown
  gut microbiota DNA sequence
ttggtagacgcgcacgtttcaggtgcgtgtgtcgagaggcatgcaggttcgagtcctgttctgggcactttctctttgtgaaaagagagtcatctaatgcggaaatagctcagttggtagagcataaccttgccaaggttagggtcgcgagttcgagtctcgttttccgctc

SEQ ID NO: 6526 - DNA, 2657 bp, Unknown
  gut microbiota DNA sequence
gtggaaattaaaggataaacaagttccagtaaaagcgttttctccaaaatcctaaaggcatcccccatctcggacgacttgtaggaagaacctgcgaatttggcaaactgaaagcgttgtcccgccaatccccaaccgtaatttaagatgtaacggagtatatcttgttctttgttcttttttgcatacttttcaatatcatctttataaccagctatcaacgaattaaaaatatcattcagccttacccaatccttgtacttcgcatagttcgccaccgcttcgggtaatccgcccacaatcatatatttcctgaataagtccatcacatagctatgcaccgactgtggaaccgtcaatcgttctatttgttccactaaaacgttttcgcccaatgcacccagaaattcggtaaaggtacatggatgcaaagccatatattccacacgccccacagggaaagaaatatggttccccaccagactctccaacaatgccccggcggctatcacatgaagatcaggacgtttctcataaaaatagcgtaaagacctgactgcttccggttcattttgaatctcatcaataaagataagagttcgtttattttccatcctgacacctgccttggcatagatacctgccagcaaatcatcaaacgatacttcccaggcaaacaggcgcgcattttccttctcttccagatttaattcaataaagacatcaaactctcgggcaaagagcttcactaacgtagtttttcccacttgcctcgcacctctcaaaaccaaaggtttccgtccttccttttcgccccaccgatgaagggctgtaagagctaatcgttgaaacatagacaaacatttaatattcaatacaaaagtactgaattaagtctaaagccaaaggaaaaacagagttattttagatcaaaaccaaaggaaaaatgaggttattgtaacatcgacaaatcgaccttgtaataagttggcgccacattattcttttcaaggaacatcaccatgtaaacgggagcatacactaatttgccctccactcgcagattatcattacagaacactacagcctcggaaagatcatactctttacaatccatgatattagacagagcacgatgcacctcataatcctttcccgacttcacctcgatgggtaatactttaccatcaagttcgatgacaaagtccagttcgcctcgcttcttattgttataataatagggatctataccatgcgccaccaattcctgagcaaccgcattctcgtatacggaaccaaaattaatattcttctcacccctgataattcgcaactgaataccttcggcgtattgagcggcgagcaaacctatatcgttctgaaaaagtttgaacagattgcgtgagtgagcgagcaataagggtatcttaggttcttccacattataaacggataatgcaacacccgcatttttcaaccaaagaaaactgttctgataacattcaaacttggcattctcgttgagctttttcaagataaaccgtttattcttggcattgagttcaggcggaatgagattaaaaatctcttctatataaagtttgttatcaggatcatattgagcaatgtcacgcttatacaaacgaatgatatcctgctgcacagccattactgcttgcaaattattactctcgatatatttgctcacggcagcaggcataccgcccacaaccagatacaagcggaacaattccatgattttagagtggacaaactcatccactgccacgcgactttcccaagcattacgcagagagtcgattattttatcattaatgcccacacacgaaataaactcctcaaaatcgaggggatacatatctttgattcccatatatcccacaggttccgaacgcaaatccttcagctctacaccaagcaatgatccactcaaaatataacgatacgaaccctcatctactaagaatttgatggctgtaaccatctcaggacacttctgtacctcatcgaaaaatatgagtgtttcacctttaatcagtggaattgtagtcatagccgacagacgaaatagtatatccgcactaccctttgcacctttgaaaacgtctacagcttcaggattatctatgaaatttatctcaacaaaactcttgaataactttccaaattgccggatagaataagttttaccgatttgacgcgcgccggtaatcagcaaagcattacgagtggtctcataataacgcttaatgtaatggtcaatctttcttttcagcatggcttctacagtttatcctaaacgacaaaagcacccgcttgccgtttttccaagacgaaattagtacaattacgccacttatccaaggaaaatagacgcttttatgccgtttttccaagaaaacaaaaaaaacatcgagtatttcctttcattcaggaaagatgttatcaagtcactttttgccatcaagcagagcgaaattcctttcgatgtcattgagcgcgatacaaagttaccgataaatcgcaaaaaaactcaaaagacaaagtaatgcttaaaaaataagttggtacataaatgataattttaggcgcggattacacggattacgcggattaaaggctgcgctattacatcg

SEQ ID NO: 6527 - DNA, 9566 bp, Unknown
  gut microbiota DNA sequence
atactaaataaatttgaagacaaagatactaatttttaaatttccccctcaggtttttacgttgatccattttattctgtactcggtttgcactatctttgcgcctcaatttaaaaatagagtatgatttcaatagacggactggccgtagaattcggcggcaccaccttattcagtgacgtttccttcgttattaatgaaaaagaccgcatcgccctgatgggaaagaacggagcgggaaaaagtaccttactgaaaattctggcaggagtacgccaacctacccggggcaaaatctcggcacctaaagacagtgttatcgcttacctgccgcaacatctgatgacggaagacggacgaaccgtattccaggaaaccgcacaggctttctcacacctgcatgagatggaagcagaaatagaacgcctcaacaaagaactggaaacacgtaccgattatgaaagcgacagttatatggaactgattgaaacggtttccgccctgagtgaaaaattctactctatcgatgctaccaactatgaggaagatgtagagaaagctctgttagggctcggcttcagccgcgaagatttcaaccgccagaccagtgacttcagcggcggatggcgtatgcgcatcgagcttgccaaactactgttgcaaaagccggatgtactgttactggatgagcctaccaaccacctcgacatcgaaagtattcagtggttggaagatttccttatcaataatggtaaagctgttattgtcatcagccacgaccgcaagtttgtagataatatcactacccgtaccattgaagtgacgatgggacgtatctatgattataaagtaaattattccaaatatctggaactccgcaaagaacgtcgtgaacaacaacaaaaggcttacgacgaacaacagaagttcattgccgaaaccaaagaattcattgaacgcttcaaaggtacttactccaaaaccctgcaagtacaaagccgcgtaaaaatgttggaaaagttggaaattttggaagtggatgaggaagatacttcggcactacggttgaaatttccgccatccccacgttccggcaattatcctgtaatcatggaaaacgtaggtaaaacctatggcgatcatgtagtattcaaaaacgctacactgaccgtggaacggggagacaaattagcatttgtcggcaaaaacggcgaaggtaaatccaccttggtaaaatgtatcatgaaagagattgaacacgatggcacgctgacactcggacataatgtgcagatcggttatttcgcacaaaaccaagcttccctgctggacgaaaacctaacggtattccaaacgattgatgatgtggcaaagggagaaatacgtaataagatacgtgacctgctgggtgctttcatgttcggtggaccagagcaatccatgaagaaagtgaaagtgctttccggtggagagcgcacacgactcgccatgattaaactgttgttggaaccggtaaacctactgattctggatgaaccgacgaaccacctcgacctgaagaccaaggacattctgaagcaagcgctgttggatttcgatggtacactgattgtagtaagccatgaccgtgacttcctggacggactggttaccaaggtctacgaattcggtaataaacaagtaaaggaacacttaagcggcatctacgaattcctggaaaagaagaagatggagtcactccgcgaactggaaaggtaaacgttccttaacagggcttccgcaacttttcttgcgtcatattgtttcatttttataaaactctaattacgagaacaatgaaacgatatgacgctataataataggcttcggcaaaggtggcaagctactggcggtcgaattagccaaccgcaactggaaagtggcggtcatcgaacgttccccagacatgtacggtggaacctgtataaatgtaggatgtattcctactaaaaccatgataaacgaatcggaattcgccgaacgtatctatcaagacgattataagaaacaatccaagttatattccctcgccctaaggcgcaaggataagttggtcacctttcttcgagaaaagaacgtcgaaaatctgacgaataaccctaatataacattgtatgacggaactgcatcttttctctgtccggacacggtaaaggtagttccttcaccggaaagtgaagattactttgaactggaaggaaaagaaatctttatcaataccggttctacacctatcctacccgatattgatggattaaaaaacagccgatacatatatacaagtgagacattgctgcatagcgagatccttccccaacacttgctgataataggaagcggagccatcggactggaatttgccaccatgtatgccggattcggcagcaaggtcactattttggaagccggtaaacgcttattgccgaaagctgatcgggagattgccgaatatatgcaggaaagtctgaaaagaaaaaatatagagatacgtctgaatgcacgcgtacaatccttacatgatacagcggacggcattaccgccgcctatacggatgcctcggacggcacaccttactttcttgaaggcgatgccctactcattgcaacaggacgtaaacctatgatagatgatctgaatctggaaaaagcaaaaatacaggttaatgcacaaggagggatcattgtcaatgagcaattacgtactactgcaccacacgtctgggccttgggagacgtcaaaggtggggaaatgtatgattacctttcaattgacgattcccgtatcatcttaaatcatcttttcggtaataaggaacgttctgttgatgaccgcaatcccgtaccttacgccatcttcacagatccacctatggcacatatcggtctgacggaagaagaagctatgaaacgtggatatcccatcaagatttcacgtctgcccgcctccgccatccctcgtgcacgtactttgcagaatatggatgggatgctaaaagctattgtaaatacggatacagagaaaatactgggctgctcactcttctgcgtggatgcaccggaacttatcaatctagtagcatttgtcatgaaaaccggacagaaatcttcggctttacgtaacttcatattcacccatcccagtatgagtgaaggtttaaatgaattattcaaggctttttaataactaacatttggtaattaagccgttaacttctatctttgtccgcaataaaaaaataaggatgcagagaaaacggtacataacattcttttttatattcatcagcatggtcatgctggtggtaccggttattcctcaccaccatcacaataatgggttgatatgtatgaagaatgacataactcccaattgttgcggacaacaacacaccccggatagcgaacattgctgttgcgatacgggatgtgttactactcactttttccagcaaactcccagctcggacaacggatggacacatccggattttccactggttatcacattattctccgaaccccttctcagactattggtcctccccgaagaaagcgggcaaagacaggactgcatataccaggagtcacttcatggcacgtatctcacacgtgccacaggacttcgcgcacctccgtgtgttcttactttatcgtaaagtctgcaactttattgcaggcttttatctctaattttgcacacagataaaagtaagaacattaaaatatcatcatgaaaaaaattctttttatgggagtcatgggattattcctgttaggctcttgcaatagtaaatccggcgacggacacgaaggtcataatcatgaaacagaaaaacatgagcacgaaggttgtgatcatgatcatgaaggcgaagaccacaatcacgaaggtgacgaacataaccacgatggacataaccacgatggacatagccacgatgaacatagccacgatgaacatagccacgatgaacaaacagcggccggacatagtgacgaaatcattctgcctactgccaaagcacaggctgccggagtaaaatccaatgttgtagaaccggggattttccatcaggttataaaaaccagcggtcaggtaatggcagcacaaggagatgagagcgtggctgtagcaaccgtagctggtgtagtatcttttcgtggaaaggtaatcgaaggtatgagtgtcagtaaaggtacaccactggtgacattatcttccaagaacatggcggatggtgaccccgtagaacgggcacgtatcgcttatgaagtttccaagaaagaatatgagcgcatgaaagccctcgtaggaaataaaattgtttctgaaaaagatttcgctcaagcggaacaagcatacgaaaatgcacgtatcagctatgaagccgtagctaaaaatagttcagcaagcggacaagcggtaatttctcctatcagcggatatgtaaaaagcctgttagtgaaagaaggtgattatgtagccgtagggcaaccgttagtcagcattacgcaaaaccgcaaattgttcctgcgtgctgatgtatctgagaaatattaccaatatctgcgtactattggttctgctaacttctgcactccttataataataaggtatatacattgaaagacttagacgggcgtcttctctcttatggcaaagcttccggtggtgatggtggatattacgtacctgtaacctttgagttcgacaacaaaggtgatattatccccggttcgtttgtagaaatcttcttattgtcttcccctatagaaaacgtaatatccctgccccattcagcattgaccgaagaacaaggcagtttctttgtctacctgcaactggatgaagaaggatataagaaacaacttgtgactctcggagccgataacggtgaaagcgtacagattctctcaggtgtaaaagccggagaccgcgtggtaaccgaaggtgcttatcaagtgaaactggcaagcgctacgaatgcgataccggcacacagtcacgaacactaaacttatttactatttgacaagttactatttactatttggctgcgcaatgcgtgaagctgatgataagaatagtaaatgtcaaatggtaaaagacaaggtgtatcaaatagtaaatagtaaatagtaaaatagtaaatatatcatcgtgttaaataagatcatacatttctcacttcataaccgcatcctggtacttgtagcctcggtgttgttactgataggcggaacctacaccgccatgaacacggaagtggacgtattccctgacctcaatgcacctacggttgttatcatgaccgaagcaaacggtatggcagcagaagaagtggaacaactcgttacatttcctgtagaaacagcagtgaacggtgcaacaggtgtgcgccgcgtacgttcttcatctaccaacggcttctctgtagtatgggtagaattcgattgggatacggatatttatctggcccggcagattgtcagcgaaaagttggccgtcgtaagtgaaagcctgcctaccggtgtaggtaaaccgacgctgggcccacaatcatccattctgggtgaaatgctgattatcggattgacggccgactctacctccatgctcgacctgcgtacaatagccgactggaccatccgaccgcgtttgctctctacgggcggtgtggcacaggtagcagtacttggcggtgatataaaggaatatcagatacaattagacccggaacggatgcggcattacggcgttacgctgaatgaaatcatgactgtaacccgcgaaatgaatctgaacgcaaacggtggcgtgttatatgaatatggtaacgaatacattgtgcgtggagtactttctaccgaccgtgtagaccaactggcacgtgccgtagtacgtggtggaaccgcttcggggaatgctcctatcttactggaagacattgcagatgtacatatcggagcaaagttacccaaactgggtacagcatccgaacggggtaaatccgccgtactgttaacagtaaccaagcaaccagccaccagcacactggaattaacggataaattagaagcatctttaaaagacttgcagaagaacctgccaccggatgtaaaagtcagcacagacatcttccgtcagagccgctttatcgaaagctctatcggaaacgtacagaagtccttgtttgaaggaggtatcttcgttgtaattgtcctattcctattccttgcgaatgtacgtacaacggtgatctcattggttacactaccgctttcattgattacttcactggtaacgctgcattatatgggcttcacaattaatacaatgagcctcggtggtcttgccatcgctatcggttcgttggtggatgatgccattgtggacgtggagaatgtatataaacgactccacgagaataagttgaagcctgtggaagaacgcctttccatactggaagtagtattcaacgcatcgaaagaagtacgtatgcctattctgaattctacgctgattatcgtagtcagtttcgtaccactgttcttcctcaccggtatggaaggccgcatgctggttccactgggtattgcattcattgtagcactggccgcttctacggtagtggcattgacagttacaccagtactttgctcctatcttttaggaagagacaaaaagaaggaacagaaagagagcagcgactcgttcgtagcacgcaagatgaaacagtggtatggtgctgcattggcatttgtattgggacataagaagatcgtactgggcagtacaatcggtttgttcgtagttgctctggtatgtttcttcacattgggacgttcgttcctgccacctttcaacgaaggttcgtttacaattaacatatcttctttaccaggcatctcattagaagaaagtgacaagatgggacaccgtgcagaggaattgctactcagcattcccgaaatacaaaccgttgcccgcaagaccggacgtgccgaactggacgagcatgcacttggtgtgaatgtttcggaaatagaagctccgttcgaattgaaagaacgttcacgtagtgagttggttgccgaagtacgcgagaagttaggtactatcgtaggagcaaatgtggaaatcggccagcctatcagccaccgtatcgatgctatgctcagtggtacgaaagccaacattgcaattaaactgtttggtgacgatctgaaccgtatgtttaccttgggtaatgaaatcaaaggtgccatccaggatattccgggtattgccgacctgaatgtggaacaacaaatagaacgtcctcagcttatcatttcgcccaagcgggaaatgttggctaagttcggtatctcattaccggaattctctgagttcgtgaatgtatgtcttgctggtgaaaccgtatcacaggtatacgagaaaggtaaaagcttcgaccttaccgtacgtgtacgtgatgatcttcgcgacgaaatggagaagatacgcaacttgatgatagataccagtgacggaaagaaaatacctttgaactacatcgcagaagtgcgttctgccatgggaccgaatacaatcagccgcgagaacgtgaagcgaaaaatcgtaatctctgccaatgttgccgaccgcgacctgcgcagtgtggtgaatgatattcaggcccgtgtggacaaggatattaaattgcccgaagggtatcatctggaatacggtggccaatttgagagtgaacaggcagcaagccgcaccttgttactcacatcattaatgagtattgcggtgatcttcttactgctttatcatgaattccgtagtgtaaaagagagtgcaatcatacttatcaacctgccgcttgcattgatcggtggtgtgtttgctttgttgatgacaacgggagaggtgagtattccggctattatcggttttatttcactattcggtatcgccacccgaaacggtatgttactgatcagccactacaaccatttacaacaggaagagggaataaacgtgtacgatagcgtaatccgtggctcaatggaccgtttgaatccgattttgatgacagcattgtcttcggctctcgctcttattccattggcactgggaggagatttgccgggtaatgaaattcaaagtccgatggcgaaagttatccttggtggtcttttaacttccacgttcctgaacggtttcatcattccgattgtttatctgatgatgcaccctaaaaaacaaccattaacaatatcaaacaatgaaacgaattctcatatttagttttatcacttttttcctatatgcgggaatgcgtgcccaatcggtcggcatagacgaagtgctgcaccgtattgaagcaaacaataaggagttgcaggccaatgcgcaactcatcacttcacagaaattggagaacaagtcggagaacaatttgcctgatcccactctctcgtatgcccatctgtggggatcggaagataagagtgagacgataggtgaacttgttgtttctcagagctttgatttcccgaccttgtatgctacacgcggaaaagtaaaccggctcaaaaccggtgcacttgatgcgcagtctgccgccttccgtcaacaactgttgttgcaagctaaagagctttgtttcgacatcatcatgttgcagcaccagcaagtgattctgaatgaacgtatgaaacaggctgaggaactctctgcatactataagaaacgtctggagacaggtgatgccaatgtattggaaacaaataagatcaatctggagttactgaatgtacgcacagaattccgtaccaatcagactgcgcttgataacgcctggaaatctctccttgcactcaacggagaccagtctttgcaagataatgagctgagcagtttccgctccatcaacgactatccattgccccttcttcctaccgactatgaacagttacgttcggaagtgttggcagccgatcagactttgctgtcattaagcagtgaaagtgctgccgcccgcaaacagatttctgcaagcaaacaaggttggttacctaaattggaacttggatatcgccgtaatacagagtccggtactccatttaatggagtcgtagtaggcttttccttcccgctgtttgagaatcgtaataaggttaaaatagccaaagcgcaatctctgaacctcgattatcagaaagagaatgctgctttccaagccgaagcaaccttagcaaaactatacagcgaagcacaatcattgcagacttccatccaggaatacagggaggcattcagttcacaacaagatcttgcattactgaagcaagctctcaccggtggacaaatcagtgtgatagaatattttgtagaagtttctgtgatttatcaaagtaagcagaatctacttcaattggagaatcagtatcagaaggtaatggcacagatatacaagagtaagctataaaaatattattcttgtatcataaaagtaaagcgaagaatcg

SEQ ID NO: 6528 - DNA, 195 bp, Unknown
  gut microbiota DNA sequence
ctcagactttcccgccgtcgtcgctatcaagtacgtgagataaccttggatatggctcccaatatggagcagattgcctgtagctgttttcctgccgccaaacgggttaccgaccgtttccacgtatagaaactggcttatgaagctgttcaggagatgcgtgtgaaagcacgctgggaggctttggatgaagaa

SEQ ID NO: 6529 - DNA, 6479 bp, Unknown
  gut microbiota DNA sequence
aaataaaacacgtatgggaaagaaattttctttttcaataaggccaattgactaactcttggaacattaaaacaaataattaaataaataactaatttatgaatgtaattctgattgcagtgatttcattgggagccatagcgctggtttcggccgctatattatacatagcttccaagaaattcgccgtgtatgaagatccgcgaattgcacaggtaggagaggtgttgcctcaagcaaattgcggtggatgtggttatccgggttgtagcggttttgccgatgcctgtgtaaaggcaggttcgctggagggcaagttctgtccggtaggcggacaacctgttatgacgcaaatagcgggaatccttggtttggatgccgttgttgccgaaccgatggtggcagttgtgagatgtaatggaacctgcgccaaccgtccccgtacgaatatgtacgacggtgcgaagagttgtgctattgcggcctctctttatggtggcgaaaccggttgtagtttcggatgtctggggtgtggtgactgtgtggaagcttgtcagtttgatgctatccacatgaatccagagacgggacttccggaagtggatgaagcaaaatgtacggcttgtggagcttgtgtcaaggcttgtccgaagaacattatcgagattcgtccgcaaggtaagaagtcacgtcgtatttatgtgcagtgtgtaaacaaggacaaaggcggcatagcgcgtaaagcttgtacagttgcttgtattggttgtggcaagtgcgtgaaggtttgtccgttcgaagcgattacacttgaaaataatctggcttacatcgacccgaacaaatgtaaatcatgtcgtaagtgcgaagaggcttgtcctcagaacacgattatcgcactcaatttcccgccgcgtaaaccgaaggcggaaggtgttgctcaggttgaaactccaaaggcagaagcttaataataaagaagtaataaacgactaaaatacagaattgtatgttgaagacattttcaatcggtggtgttcatccacacgaaaataaactttcagcacatcagccgattataaaggcggaagttcctgccaaagctgtgattttgctgggccagcacattggtgcgcctgcaaagccgattgtagctaaaggagatgtggtgaaagtcggcacaaagattgccgaacccggtggtttcgtatccgcggccatccactcgtctgtcagcggcaaggttgctaaaatcgatacggttatcgatgccagtggttatccgaaacctgccatctttattgatgtggacggtgatgaatgggaagaaagtattgatcgcaccgaaacgttggtgagggaatgtaaccttacatccgaggaaatagtaaaaaagatagccaatgccggtattgtaggtttgggtggtgcatgtttccctactcaggtgaaactctgtccgccgcctgcattcaaagcagagtgtgtgattatcaacgctgtggagtgtgaaccctatctgacagctgatcatcagctaatgctggaacatgccgaggaaattatggtaggtgtatctattctgatgaaagctgtgaaggtgaacaaggcatttatcggtattgagaataataagcccgatgctattcagttgatggcgaaggtggcatccagctatgcaggtatcgaggtagtagccttgaaggtgcaatatccgcaaggaggtgaaaagcagttgatagatgctattaccagtcgtcaggtagcgagtggtgctttaccaatttctacaggagccgtggtacagaatgtaggtactgcatttgcggtatatcaggccgtacagaaaaacaagccgttgtttgagcgcgtgattaccgttactggtaagtcagtagcaaagccgtctaacttcttggcacgtattggcacgccgatgaagcaattgattgatgcttgtggtggtctgcccgaagatacaggtaagattatcggtggtggcccgatgatgggtaaggcattggtcaacacggaggttcctaccgctaaaggtagttccggtattctgataatgaatcaaaaggaagccaaacgtggtgaggttcaaccttgcatccgttgtgcaaagtgcgtgggtgcttgtccgatgggattggaaccttatttgctgtcggcacttgccgaacatacagaattcgagagaatggaaaaagaaagaattatggattgtatcgagtgcggttcttgtcagtttacctgtcctgccaaccgtccgttgctggactattgccgcttgggtaagggcaaggtaggagcgattatccgtgcacgtcaagctaaataataacgaagtatggaaaataaattagtaatatcactttcaccccacgtccatggtggtgacagcgtgaaaaagaatatgtatggtgtgcttattgcattgattcctgcatttcttgtatcgctctatttcttcggactgggtgcgctgattgtcacggctacatcggtagctgcctgtttgttcttcgaatgggctattggtaaattcctgatgaagaaagaaaccacaacaatctgtgacggttctgctgtaatcacaggtgtgttgttggcattcaatttaccttccaatctgcctatctggattattattctgggtgcattgtttgctataggtgtaggtaagatgtcttttggcgggttaggtaataatccgttcaaccctgcattggcaggccgtgtgttcctgttgctttctttccctgtgcaaatgacgagttggccggtggtgggacagttgactgcttacaccgatgctacgacggctgctactccgcttaatctgatgaagcagattgccggtggaaatatagaggctctgaaagatctgccttcctctttcgatttgctgattggtaacaatggcggttgtctgggtgaagtcagtgcattggcgttattgctgggattagcttatatgctttggaagaaaattattacctggcatattcctatttctatattggctacagtatttgtattctcgggtattatgcatctggtagatccggaactgtatgtatctcccgtgcttcagttgcttacaggtggtttgatgctgggtgctatttttatggctactgactacgtcacttctccgatgagcaagaagggaatgctgatttatggtgtatgtatcggattactgacagtgattatccgtctgttcggtgcttatcccgaaggtatgtcattcgctattttgattatgaacgccttcactccgctgattaatacatattgtaaacctaaacgctttggggaggtagcgaagaagaaatgaaaaagttagaatcatccttgaagaatatgttgctggtactcacgggcgttactgccatctctgtggctttgctggcatatgtgaatgaattgacgaaagaacctatagcacaagccaatgcaaagacattgagcgacgctgtcagtgcagtggttcccggtttcgataatgatccgattgcagaaaagaagatgcaggctgtgaatggtgtagattatgctgtgtatcctgctacgaaaggtggagagtttattggtgctgccgtagaagcgagttcaatggcattcggtggtgagctgaaagtcttggtcggctttgatgcggaaggaaacattatagattattccctgttgtcgcatgtggaaactccgggattggggtccaaggctgccgattggtttaaagaaggaaataaaggaagtatcaaaggtatgaatccgggtaaggctccgttgtctgtaagcaaagatggaggccaggtagatgccattacagcttctaccattacttcacgagctttcctgaatgctgtgaatgctgcttatgcagcttatgccggtcagaatgaatcggatgccactacgggcgctacgcaaaaagttgttgaacctgctgaaaatgccgccactgaagctgcggactctatcagcgctaaataaagaaaggagtagaagatatgaataattttaaagttatgatgaacgggattatcaaagagaatcctacgtttgtactcctgcttggtatgtgtcctacgctgggtaccacctcttccgctatcaatggtatgggtatgggactggcaacgatgttcgtgctgatttgttctaatgtcgtaatctcggcaatcaagaatgtaattcctgatatggtacgtattccgtcgttcattgtggtcattgcttcctttgttactttactgcaaatggtcatgcaagcttatgttcctgctctatatgctacgctgggcttgtttattccgctgattgtggtaaactgtattgtattgggacgcgcagaagcttttgctgccaaaaacactccggtagcgtctttctttgatggtttaggaatgggccttggttttactttggctcttactttgctgggtgccgtacgtgaatttctgggaaccggtaagatattcgatctgactatccttcctgaagaatacggtatgttgatatttgtacttgcaccgggagctttcattgcactggggtatctgatcgcattgataaacggcttgaaaaagaattaataatggaaaattagaaattaaggatgagagtagtaactgcttttagtttttaatttttaattcttaattttggaaagtatggaatatatattgatatttatttcggcaatctttgtcaataacatcgtattgtcgcagtttttgggtatctgtccgtttttaggtgtatccaagaaggtggaaactgcattgggtatgtcggctgccgtggcatttgtgcttacgattgcaaccatagtgacattccttattcagaaatttgtgctcgatgcttttgacctgggttatttacagactattacttttattctggtgattgctgcactggttcagatggtagagattattttgaaaaaagtatcgccttctttgtatcaggcactgggtgtgtttttgcctctgatcacaactaactgttgtattcttggtgttgccatccttgtaattcagaaagattatgatctgttgaccggtgtggtttatgcattttccacagctatcggttttggcctggcgctgactctttttgcgggcttgcgcgaacagatgagtttggtaaatatcccgaaaggaatgaagggaactccgattgctctgattactgccggtcttttggctatggcatttatgggtttctccggtgttgtgaaaatctgaaaaatagaacattaactaataggttaggggtagaagaaattctacccctttcttttttagactaaaaaaaacactctttttttattttatctaaattaaatttcgtaattttgcgggcacaacgatgataacctaatagaataaatcactgatgaaggaaagaattttggttacaggtggaactggctatattggttcacacactgtagtagaacttcagaacgcaggtttcgaagtagtgataatagataatttgtcaaactctagcgccgatgtagttgataacatcgaaaaagtatcgggtattcgtccggcattcgagaagttggattgtttggatttcgccggtcttgacgctgtgtttactaaatataaaggcattaaagccatcatccactttgcagccagtaaggctgtaggcgaatcggttcagaagccgttgctttattaccgcaacaatctggtttcattgataaacctgcttgaactgatgccgaagcatggagtggaaggtatcgtattctcgtcttcttgtactgtatatggccaaccggatgaattaccggtgacggagaaagcgccgatcaagaaagctgaatctccttatggtaatacaaagcagatcaatgaagagattgttcgtgatactgtggcttcaggtgctcctatcaatgcaatattgctgcgctatttcaatccgattggtgcgcatcctacagcattgcttggtgaattgcctaatggtgtgcctcaaaatttgataccttatctgacccagaccgctatcggtatccgtgagaaactgagtgtgttcggtgatgattatgatacgcccgacggctcttgcatacgcgacttcattaatgtagtcgatttagcaaaagcacatgtgattgctatccgccgcatcttggaaaataaacaaaaagagaaagtggaagtgttcaacattggaacaggacgcggtctttcagtattggaattaattaatgctttcgaaaaggcaaccggcgtgaagctgaattatcagattgttggtcgtcgtgcgggagatattgaaaaggtatgggccgatcctaaattcgcaaatgaagagttgggttggacagctgttgaaaccatcgaagatacgctgctctctgcttggaactggcagttgaagcttcgcgaaagaggtattcaataagcattaaaagcgatttttgtttttattaa

SEQ ID NO: 6530 - DNA, 11891 bp, Unknown
  gut microbiota DNA sequence
gtctttgcagcacggatgatacggattacttcatcgatattatctgatgctatgattaatccttccaatatatgagcgcgttctttagccttacgcaagtcatattgagtacgacggataaccacctcatggcgatgttctacgaagtacttaatcatgtctttcagattcagtaaacgaggacgcccgtgtaccaatgctacgttgttcacactgaaagaagtctgtaacaacgtcatcttatagagtttattcaagactacgctggcgttggcatcacgtttgatatcaatcacaatacgcataccttcacggtcagactcatcattggcattggagataccttctatcttcttatcattggctaaatcagcgatattcttgatcagttccgccttattgacaccatatgggatttccgtgatgacaattttgtcatgtgtagaactggtttctatttctgctcttgcacgcatgataacgcgaccgcgaccggtaagatatgcctcgcgtacgccactcataccatatatatatcctcctgttgggaaatcgggagctttcacatagttcatcaactcctctatctcgatatcgttgttctcgatgtatgcgatgcaagcatcaataacctctgaaaggttgtgtgtcggcatattggttgccatacctacagcaataccagatgcaccgtttaccaaaaggtttggaatacgggtaggcataacggtaggctcctgcaaagaatcgtcgaagttgctctgcatatcaacggtttctttgtcgaggtcttgcatcatatcttcaccaatcttgcgcaagcgacactcggtgtaacgcatagctgctgcgctatcgccgtctaccgaaccatagttaccctggccatctaccaccatgtaacgcattgcccaaggctgtgccatacgaactaatgcaccgtaaacggaagagtcaccatgcgggtgatacttacccaatacttcacctacaactctggctgattttttataaggtttatcagacgtatttcccagtcccatcattccgaagagaattctacggtggacaggcttaaaaccatctctaacatccggaagggcacgcgaaacgatgaccgacatggagtagtcaatgtacgatgacttcatttcctcctcgatgttaatctttataattctgtcttgttcaagcatttaaaaagattattaattatacatactttggttcatgaaaaaccacgctaaagtactgcttttttacgatatacaaaagttttcgcccataaactttatttcagaaccattctctcacctactttgttcttataatatataaataaggtattaataaggagctttttcccaagaatgaaagcactttagtatgatactggtgaacggatattaaactgtggcacgggttttgtatataaataataaataaaacgatgaaatacgtactggaaattataaatgcgtatctttgtattaagtaacaccttagaataaggaaggagaatattaagtatgaataatcagttttcacaaagagtttctgacattatcacttacagcaaggaggaagctaaccggctgaaaaatagatatatcggtccggagcatcttctactcggcatgttgcgagacggcggagggaaagctatagaaatattgcagaaactggatatagacctaaacagggttaagaaacgtctggaaggttttttaaaagagattgaagatgataacttgttgcccgatgcagacattccattgtctccgatggcagctaagatattgaaaatgtgtatactcgaggctcgtctgctgaagagtgccactgctgatactgaacatgtattgctggctatcttgaaagacggtaataatttggccgctacagtattggaagaaaataatatagattataagtcagtgttcgaacagctttccatgaaagccagccctaacgcaggtatgggatttacggaagatgatgacgaggaagaagatgaaatgaatatgtcttcacgctcttctcaaagtggtagttcacagtcttctacgcaaactgcgtctaagaaaccatccaatgatactccggtattggataactttggtatggatatgacccgggctgcggaagaaggtagactggatcctgtggtaggccgtgaacgtgaaatcgagcggttggctcagatattgagccgtcgtaagaagaataacccggtattgataggtgaacctggtgtaggtaaatcagctattgtagagggattagcattacgtattgttcagaagaaagtatcccgtattctgtttgataaacgtgtggtaatgcttgatatggcttctgtagtagccggaactaagtatcgcggacagtttgaggagcgtattcgttctatcattaatgagttacagaaaaatccgaatgtaattctgtttattgacgagattcacacgattgtgggtgccggagcagctgccggttctatggatgctgccaatatgctgaaacctgcattggcacgtggtgaaatacaatgtataggtgccactacccttgatgaataccggaagaatatagaaaaagacggtgctttggaacgccgtttccagaaagtgattgttgaaccgaccactgctgaggaaacgctccagatattgaagaatattaaagagaagtacgaagaccatcataatgtgacttatacggatgaagcgctggaagcatgtgtcaagttgacagaccgctacattactgaccgtaatttcccggataaggctattgatgctctggacgaagccggttcgcgcgtccatctgacaaacattactgttccgaaagagattgaagaacaggagaaactgattgaagaagcccgtcaacaaaaggcggatgcagtgaaatcgcagaatttcgaacttgctgccagtttccgtgatcatgagaaagagttttctgctcgtctggaagagatgaaggctgaatgggaagctcgcttaaaagatgatcgccagatagttggtgaggaggaaattgcgaatgtggtttctatgatgtccggtgtgcctgtacagcgtatggcgcaggctgaaggtatcaagttggcgggtatgaaagaagagttgcaagctaaagttatagctcaggacccggctattgaaaaggtgacgaaagcaattctgcgtagtcgtgtaggattgaaagatcctaaccgtcctatcggaacattcttgttcctggggcctacgggtgtgggtaaaactcacttggcgaaacagttggctaaatatatgtttggctctgccgatgcgctgatacgtgtggatatgagtgaatatatggagaagtttaccgtttctcgtcttgttggtgcacctccgggatacgtaggatacgaagaaggcggacagttgacagagaaagtgcgccgtaaaccttactctatcgtattgttggacgagattgagaaagctcacccggatgtattcaacatcttgttacaactgatggatgaaggtcgtctgactgacagttatggcagaactgtagacttcaagaatacagtggttatcatgacttcaaacattggtacacgtcaattgaaagacttcggtcgtggtgtaggttttgccgcccagaatcgtacggatgataaagaatattcacgtggcgtgatacaaaaggctttgaataagtcgtttgcccctgagtttctgaaccgtgtcgacgagattattactttcgaccagctttcgctggatgctatcgaaaagattatcgatatcgagttgaaaggcttgtatgagcgcgtagaatctcttggatataagcttgttattgatgctaaagccaagacattcatggcatctaaaggatacgatgtgcagtttggtgcccgcccgttgaagcgtgccatccagacttatttggaagatggactttcggaattgattatttcttccgaattgcagacgagtgatacgatttctgtctctttgaacgaagaaaaaggagaactggacatcaagaaagcataaaaatgaagtcttcttagaagatgataaacagtcaaaatgtcagtccttatgggctggcattttttttgcattatacttgccaaacgattaaatatataaacttaaaaatataaatcataagtagtatgcaaaaaggaaatattggggtaactaccgaaaacattttccccgttatcaaaaagttcttgtacagcgatcatgaaatttttctccgcgagttagtttctaatgccgtagatgctacgcagaagttgaaaaccttagcctctattggcgagtttaaaggtgaggttggcgatttgaccgtacatgtgtctttaggaaaagatacaattactgtttcagaccgtggtattggtttgactgccgaagaaatcgacaaatatatcaaccaaattgccttttcaggtgccaacgatttcctggagaagtataagaatgatgctaatgcaattatcggtcacttcggtttgggcttttattcagctttcatggtggctaagaaagtggaaataatcacgaaatcccataaagaaggtgctcaagcagtgaaatggagttgcgatggcagtccggagttcaccattgagaacatagataaagctgaccgtggtacagatatagtactttacattgacgatgaaagtaaagaattcctggaagaggcccgcatttcttctctgttgaagaaatattgtagtttccttcccatacctattgcttttggtaagaagaaagactggaaagatggaaaacaggttgaaacagacgaagataatataatcaatgacagcaatccgttgtggacattgaagcccagcgaactgaaggatgaagattataagaaattctatcgtgacctgtatccgatgtctgatgaacctctgttctggatacatctgaatgtagattatccgttccatctgacaggtatcctctacttcccgaaagtaaagagcaatatcgaattgaataagaataagatacagctttatagcaaccaggtatacgttacggattcagtagaaggtatcgtacctgacttcctgacactgttgcatggtgtgctcgattctccggatattccgttgaatgtatcccgttcttatctacagagcgactctaatgtgaagaagatttcgacatatatcacgaagaaagtatctgatcgtctgcaatctatcttcaaaaatgatcgcaaacagttcgaggaaaagtggaatgacctgaagattttcatcaattacggaatgcttactcaggaagacttctatgacagagcaaaagattttgcccttttcaccgatacggatggtaaatgctatacatttgaagagtatcagaagctgatcaaagataatcagactgataaagatggcaatttgatctatttgtatgctaatcataaagatgagcaattcagctatatcgaggctgctaagaataagggatacaatgtgttgctgatggatggtcaactggacattgctgtagtaagcatgttggagcaaaagtttgagaaatctcgctttacccgtgtagatagtgatgttatcgataatctgattatcaaagaagataagaaaggtgaaactctggaagcaggcaaacaagaagctctttctgctgtgttcaagagccagttgcctaagctggaaaaggttgagtttaatatcactgcgcaggctttgggtgaaaactcttctcctgtgatgattactcaaagtgaatatatgcgccgtatgaaagaaatggctaatattcaggcaggtatgagtttctatggagaaatgcctgatatgttcaaccttgtgctgaattcagatcataaactggtgaaagaagttcttgcagacgaagaaaaagaatgcgactctgttgtagttcctattcagcaagaaatgaatgacgtagacaaacgtcgtaatgaactgaaagataaacaaaaaggtaagaaagacgaagaaatttctactgctgaaaaggacgaagtgaacggattggatcagaagtgggaagaactgaaaacaaagaaagacgaagtatttgccggatatgctgctaaaaataaagttgtccgccaattgattgacctggcattgctgcaaaatggcatgctgaaaggtgaagctttgaataactttgtgaagagaagcatcgagttaatctaaatacgccctttattcacaatctatatgccgggagcattgcaacttttataagagttgtaatgctccttttttcgtatattttgtgtgggaacgcttgttttttagcgttggatacgtccaatttcgaaacaattgcatatatttgagctttgataataatatattttcagctcggaactttgaagtatgaaaagaattcttttgcttttatcgttttgtttcttgttgctgcccatgttgcatgcccaaaaagttggacttgtattgagtggtggtggtgcgaaaggtatgacgcatatcggcatcattcgggctttggaagaaaacaatatccctatcgattatattaccggtacatccatgggagccattatcggttcgttgtatgccatgggatactctcccgatgatatggaggctttgctgcgttcagaagactttaaacgttggtattcgggaaaagtagaacctaaatatgcctattatttcaagaaaagtattcccacaccggagttttttaatatccgctttgattttaaggactccttgaatgtcaaaccgcaattgccgaccagtatggttaaccccattcagatgaatctggtgtttgtggagctgtttgcccgtgctacggctgcttgtgacggtgattttgataggctgtttgttcctttccgctgtattgcttctgatgtatacaataaacggcaaatagtgttagggaaaggtgacctgggagatgctgtccgtgcttccatgagtttcccgtttgtttttaagcctattgagatagatagtgtgctggcttatgatggtggtatttacaataactttccaacggatgtaatgcgggatgattttcatccggatattatcattggtagtgtggtggccgccaatccatccaagcctaaagaaaatgaccttatgagtcagattgagaacatggtgatgcagaagacggactattctattccggattctgtcggcatcctcatgacattcaagtatgatgatgtgaacttacttgatttcgaccgtcttcaggaactccatgatataggttacaatcgcactcttagtctgatggattctataaaggggcgtattcatcgtagggtgaatgcagataatgtgcgtttacgccgtctggtttatcgcagtaatctgccgcaactctatttccagaaaatttatattgatggagctaacccccagcaacaagcttatattcagaaggaatttcatgatgaagaagatgaaccattcacctacgaagatctgaagcgtggatatttccgtttacttgcggataacatgatatcggaaatcattccgaaggcggtattcaatgaggaaaccgatatgtacgatttgcatctgaaagtaaagatggaggataatttctctgtccgcttggggggtagtgtgtctacgacgagttccaatcagatatatctgggcctgggctatcagaacttaaattattatgccaaagagtttacgtttgatggccaattgggtaaagtttataataatgcccaactgatggcacgtatagatttgcctactcatattcctacttcatatcggcttattgcgtctatcagtacttttgattattacaagaaagagaaactgttctctaaaaacgataaaccttcctttaattcaaaggatgaacgatttctaaagttgattatcgctttaccattcttagcgaataaacgggctgaatttggctttggtattggaaaattacaagataactattttcaatccagtgtgataaactttgaagaagaccgttcggacaggagtttatacaggcttataggcggctctattagtttttatggaagtacactgaattcccgtcaatacgctacaaaagggtataacgagaaattaatagctcagatttttacgggaaaagagagatataagcctggaaatccggcagaacagcctgttacacaggaacggcaatcatggttacagatttcttatatgaaagaagcatatcatagtatggcgcctaaatttgttttggggtggatggcggaagcgctgtattcatcgagaaacttctcggagaattttacggcgacaatgatgcaggctgcagagttttcgccgactccgcatagtaagctgatgtataatgaggctttccgcgctaatcagtttttggctgccggtattaagcctatgtttattttcaatgatatgttccatctgagaggagaattttatggatttatgcctattttccctatcgagaaaaatacgcaaaacaaagcattttatggaaaagctttctcaaaggtagaatatatgggagaagtttctgttatttgccaattaccttttggagcgatctctgcttatgtaaatcattatagctcaccgagaagggagtggaatgtggggctgagtatcggctggcaactgtttaattaccgtttcatcgaataattttcttcaaaaaaagtttgtagaatacttgcagtttcgaaaaaagtccgtatctttgcacccgttaaacaaaaaggccgcgtagctcaactgaatagagtagctgactacggatcagccggttacaggtttgaatcctgtcgcggtcacatctttttgataacaaggtcgcgtagctcaactgaatagagtagctgactacggatcagccggttacaggtttgaatcctgtcgcgatcacgaaaaacctctgcaaattactttgcagaggttttttgttatacaccgtagggtaacagttatatctgtgtagactcatgcaaatatgtgtgtgagttgatccaaaatcagcttgtgagacgaaagaaatcgtcccctgagatgaattttttcatctcaggggacgatttacaaagaaatatctattctttttcttagcacttaatatttaactcatccaaaatcttccgcatggcttcaaaagtcgtaattctggtaggcacaagcgggaggcgaagtttattctcaatcattcccataacgttcaacattgcttttacgcctgccggattgccatccacaaaaagaagcttgaataactcggcaaatttatggtggatagtcaatgcatttgcataatctcctcgcaatgccagtcttaccatgcggctaaattcgcgtggaaatgcatttccgatgaccgatatgataccaacagctcccaaggtaatcaaagggaaggtaataccatcatctcccgaaataacgtcaaaattggtcggtttatttttgatgatatcatccatttgggtgatgtcaccggaagcttccttgatagcaataacatttttgaagtcacgggcaatgcgcagcgtggtttctgctttcatatttacaccggtacgaccgggaacattatagagtacaattgggagctctgtagcctctgcaattgctttataatgttgataaataccttcctgagaaggtttattataatagggaacaacagacagaatggcatctactccggtaaaatcgtcgttttgaagcgtatccacaatggcacgcgtattatttccaccaacaccgagcaggataggtatccgaccatttacgcgttcgatgaccattttcttgattttctttttttcttcttccgtcagtgtcggagtttctgctgtggtgcccagcacacacaaaaaatcagtattgttttgaagttgatagtccaccaaacgtatcaatgcatcgtaatcaacgctttcatcctctttaaaaggagtaatcagcgctacccccattcctttcaatttagtctgtatcatgagtgaaatttaagtaatctctaattaaatgactcgcaaaagtacgaatattttcgatttctacagcaaatataagctataaaaaagatttcactggaaaaatgttacgaaatgagcgctaaaaactcatcttcgctcattatctgtacacccagcttttgcgctttttccaatttggcaggtcccatattttctcctgccaggataaaactggtcttggcagaaatactacctacattttttcccccattcttctctatcaaatctttatattcgtctctggagtgatgggtgaacacgccgctgattacaatagactgtccggcaagcttatctgtatagccgctcagatcttcttccttccggctaaattgtaatccggcaattttcagtcgctctattaattctctattcagaggattagcgaagtaggaaatgatactttgtgctattttctcaccgatttcatcgatatttatcaatctttcaagatctgcattttccagttcttctatgtcagtgaaggacttagctattttctttgctacagtttcaccgacaaagcggatacccagggcgaacaacgctcgctcaaaaggcacttccttgctttgggcaatacccttgacgatattttccgccgatttatctcccatacggtccagattcttgatatcgtctacagtcagcttgtacagatctgccgtatccttaatgagtcctaaccgatagaacatatccacagtttccgggcctaatccgtcaatgttcatagccttccggctgatgaaatgctcgatctttcctttaatctggggtggacaagccgtttcgttggggcaataatgcgcagcttctccctcgtaacggattaatttgctgccacattctgggcaatgggtgatgaacttcactttctcacctaccatcatactccgggcatctttatctactccggtaattttgggtatgatttcaccgcctttttctacataaaccatatcgccgacatgcaagtcgagcccttcaatgatatctgcattatgcagtgaggcgcgttttacgattgtacccgataattgtaccggatccaggttggcaacaggggttactgctccggttcttcccacctggtaagtcaccttgtttaagcgggtcaatgcacgctctgcctggaacttgtatgcgatggcccaacgaggagattttgcggtgaaaccgaggtttttctgctgtttcaggctattaactttcaaaacaatgccatccgtggctacaggtaaattcttccgttctgtatcccaataatggatgtaatcgaacacttcctgcaggctgtggcacttcttcatatggtcggagattttgaatccccattgtgcagcttcctgcaggttttcataatgtccgtcgcaaggaagttcttcgcctaataaataataaaggtaggcatccagtttgcgggaagcaactatagcagagttttgtaatttcaaagtgcctgatgcagcattacgcggattagcgaaaagaggttcttcgcgtgcctctttttcgcggtttagttcctcaaagacttcccacggcattagtatttcccctctgatctcaaataattggggataatcaccatgcaaaacaagggggatagtacggattgtcttcacattatccgttacatcatcgcctttttcaccgtcgccacgggttacggcacgtattaatttaccgttttcgtatgtcagtgagatggatgtaccgtcatatttaagttcggcacaaatttcaaaatcttcgttcagggctttttgagtgcgatcataaaagtcagatacctcaccttcagaataggtattacccaa

SEQ ID NO: 6531 - DNA, 592 bp, Unknown
  gut microbiota DNA sequence
gatacggaaaaagcgttgtcgagggtaaaaggcaggataacaggtagaaagaaaacgatgtggtgggaatgggcacaacgtgcggccgcagttctgttcattccacttctcgttgttcagttggtgcactattggggaggagacgaacaggaactggcacaaatgttggaagtaaagaccaatccgggaatgaccacttcattaactttatcggatggaacggtagtcttccttaattcagaatcacgcctgacttatccttcacatttcaacggagatacacgaaacgtaaccttgcagggagaagcctattttgaagttgccaagaatcccgaaaagagatttatcgtttccacttctcatcagtcgcagatagaagtgctgggtacacattttaatatagaagcctatgagaaagatgataaagtgctggcaacactggtggaaggaaagataggattcatctttacacaggataatgtgtcgaaaaaggtattaatggatccgggacaaaaacttgtttatgattcgagagattgtaaagtgcagctttatgccacttccggtgaatcggaaacagcatggaaagaag

SEQ ID NO: 6532 - DNA, 5259 bp, Unknown
  gut microbiota DNA sequence
cgctttcttataagaaatatgcctgggcatggcggttatgaagatgaccgtctggatagtgtgaaagcaatgatgaagaccgcggtggaactgaatataggaggttatctgcctgatagcgaatggaagcggtgagagtggaactagcgttggttactgttatctacaaggttatggaggaacaagtagtggttacaaagttttttgtgatcgacaatctaacgatggtcaaatctatccatgcccttcggagacatcaggtttatattctgaatctgcaagagatcggtgtactaaatagctaattcctatattgcaattttcccaaaagcgggcattgctttttattaagggaataagtgatgcttactttggggatctaaaatgaagaaaaaatggtttatgtatcatatggttacttataaaatttgaagaactaaaaatggaaagaattaaatatatattttgctttatattcttatctattgtttgtattagctgtcatgaggggtgcgatgatagtacatatttcaatggaaagattcggataattgaggataatagtaaagcggtaaagaaggtctctttaaagaatgttattttaaatggggcgaattttggttatatagcagtctatgattcactcatgttttttttaaattctaaacttcctgatcgctcttataatatattcaacataaatacaggagaagaaataggaactttttgtaataaagggggaggacctgaggaggctgccgcttttggtcctatttttcaattttttaaaaaaggaaatgacttaaaaactttactattcgctcctcatgaagggaaattgtttatttggaatataactcaatccattactcagggaagtactattattgataaagttattccatatacttggaggaacgaaaatgggggagcatgttataatgaaatgtatcttcagaataataatatattacttgctagagtagatccatttccaataaatgatgcggatgcaactttgttgttttatcaaaagcggacacttgacacaaataaagcactaaagaattatgcgatttataagcaaacaataaaaaacagagaggcgcctatcattccagaagattttttcgcatcagctgatgcttttaagcctgatggaactaaaatagtgcaagtaatggggcatcttccacaattgaatattctggactttgaaaccggacaagtagtgggatatcgtatggaagggggagatgatttttctgtttttcaaggaaagaagaatattaaaaactattatgtagaagtacaggctgacgataattatatatatgcattatattggggaagagacagatggggaatgtatgaaattccgtgtgtcaatactattcatgtttttgattggtatggtaggttggtgcaaaagttagaaactgattatgatattgataaaatgtttttggatacagttagaaatagattatatgtaacaaggccaaagtctgatgatgtgtattatttggatttggatgaggtctttgattagttttttataatagataatgaaaaaaaataatatttctgtttttcttttgctgtcttaccctgtattgggttgactactattagtatcaaccacttacaaggtaagacatggagaatgtaaagataatcaaaatgttatgtgaaaattgtaatgtttgcagttgtggctattgctattactgcattgaatgtgagaactgtattgaattctgatcgctcttacgatatgaatacatcgacgattgaggctatcagtggggaagatgatcctattgatggtggagaaatcggagatgtggagattacgtgtagcaaaagcggtggaagtggaaaatgttatgcgaagagaacagaggtaaaaggcaatggttattgtcgctttttctgtcaatggacaggggggactttagactattgtagctcattttggatgggtgtgttagagctttgtgtaaataaataataattaaatttagatggggtggctgagagttgatatataattagctaccccgtcattaaataaatatataatgagaacatttattataattgtctgtgcgttgtttatgatatcctgtaatcaacacaccgctaatcacgataatactacatgtagaattgacttgaagaaagttgattctccttctttctacgactatttttcaaagattgagattactcctttggaatcatcaaaggaatccttaattaaagatgtcactgaatatacttatcatgcagggaaactttatatatttgatagggatcagaaaaaaatatttatatttgataatgaaggtaaattatttaatataataaacaaacgtggtaatggacctggagaatattcggacttgtctgattttagatttaatccttttacaggggatttggagcttttgtctcctatgggcggtatctttcgatatgatagtttaggacaagactttaaaaggaacatatctctcccgttgaaggtatctgctgcacaccgatttatagcactaaacaaaaacacttatctgtttttttgtgaggcaagaaaaggaaataagatggtagtctatgatattgaccaaaagaaaattatttcggaaatgtatgatcttcctaggttcttgttttttaaaactttttatcatcatacatattctccattttatatatatgaaaacaaagtgcattttgtacaatcttacaatggagatgtatttacttttgagcataattcgttggtgctgaaatatcattgggactttggaaaacagaattttgatatttcaggtttgaaagatgaatcctatgaatattataataagtatgctcgtactgtcggtgctaaatatgctaatacttttatttcatatgttgagaattcacgatattatattgctagatttgcttatgataataaattctggacattgatatatgataaacaaagtaaaaaacatatggtctttaatacatttatagaaggccatcgttgtatcccatcgttgattgatgaaagtggaatctattatattgtagatatgcctcagcaacttgatttagtcctaaatgttgaggatttagatgataccaacaaggcaatatgtgataatattaaagatgatgataatccgattattataaaatatgtttttaaataactagtatgaagaaaataattatttcattacagttctttttgctttgctgtattttggtgatttcatcaattactttttattgtttttattcagagtcaaaacagactgatttagatagagagaatgaacattttattgaggaaatgtatgtataagataatcttacagcttcagtactctgtgacaattctcctgttgatatcgatgaacttaaatcggttcaaccacgaattgtgtgctattattcttctcagtcgtgtgctgcatgccttaactacgcaaaggaacgcataagagagattttttccaaacatgaagaaacttcagcgctactgtatctggcatctgattattccaaagatgagaaatttaaagagaaaaacacaataaatattggtagaaagaagctcggtatatctttagataataccagccttgtttgcttttttgtaattgttgacaataaaatagagcatttgttcatacccgataggaattatgggaaatatacagatacctatttgaaacaaatcaaagaaaggtattttacgccagaattttgaattctgaagtttcgatatatgattttatttcataaacatgttttgatatgagtaaaaatattatgttaactttatgcataacagcattgctatatagttgtaccgctactaaatcatcttctgattttagtaacgaaatatttgttgatgtagagcagagtgtagaactgcctttacagcgaggcagaataatcccgcttgagacattggactcttctttgttgtatgacatcgtgtcgatagatcaggttaaggacaaatactttatacggtccagaaataaaatattgacgtttgatacggagggtaattacttatataacatatccggaataggacaaggtaataaggagtatgtgaatttatcttctttctttattaagaatgaagaattatgtatttatgattttaatcagggtcgagtattggtttttgctccttccggtcgttatttgcgtacggaaaaggctgtaaaaaattcggatgtagaatgtgttcctcagcttatccgtccttatgggaaaaataaatatatagcaaagaatagctttaatggaactccagggtatgtgacgccggtcctttcattgttggatgaaaaatatacgataactcagacactggagggccattcgcttcacaccggatttctactatttgattttatgaattgtgatgataatggtggtttcatcacttattgggaagctttgagtgatacaatctatacggtagtaaatgatagtatggttcagcctaaatatttcgtaaacttcggggaatatgctattccggcagtggagcgcctcaataaagatgtttatgacttaattgattatgtaaataagcctgaaaacaaaaagttggcaacgcttatcaggtatgtttatgaagaagagaactatctttattttgttttctcttgtgaggactcggtaaggttggctctgtataataaggaaactcataatacaactacttatattctaccggcagaagtgaatggaggaaaatatcgtttagcttcttttctcaaagtagataaggataaagttataatggcgttggaagattgtgaaaatatagagaataatcaatcactgttcataatcaataagaaggaattgtatgaaaagtcgcgttttaaataagcctttttacttctttaacgataaaccttagtttttaaaactaaaaaaataatagtttgcggagatgttataaatgttgaatcagaaaacatacaaagaattatgagaaaaggatggttgtatgccacgggcttatcttgtctgatggggatgaagaaagaaggaggattctttatcactttgcatgtaaaacttcagttaaattagtttgaattctgtatttacatggaattaaccgttttttaatcctcaattaagtctgtatgccgctattaattaacctcagctctctacatttgcatctgtctaatggtagcattaggtctccaagtaaaa

SEQ ID NO: 6533 - DNA, 3274 bp, Unknown
  gut microbiota DNA sequence
aaaggcatgataatgttgcccattaaacgaacgattaaaaaacgcttttttgaatttaatatcttcgtttataacgcattaagtcgaaatatctatttgctacggtttgaaagagaatatgtctcgttcaaaccgcgaagcgcatccgaaactatagtaaaatcctcgattctctttttgtaagtgattgaaaatcagaaatattggtttgctgcccgcactcgtgataagcaagagtttgctgtccgaaaatccttagataagcttaagtccgaagagaagctggatcttgactattatcttcccacgcgaattgtgatatcacagctgaagtatcgccgtaaacgtagtgaggttcctgttattcgaaatttaatcttcatctgtgctactaaacaaacagcttgtgacatatccaatgtttataatgtccagcttttctacatgaaggatctatttactcattccatgttggttgttcctgataagcagatggaagacttcatgtttgtgatggatttgaatcctgatggggttaactttgataacgaaccttttgctattggagataaagtgaaagttgtcaagggggatttcagtggaattgaaggtgaggttgctacggaagctaataaaacttatgtggttatccgtatcaagggcgttttggtcgcaagcgtcaaagtgcccaaatcctatctaaagtttataaaataatatcatctcaattataaaatgaattctttactttctcgtgctgttgagcttcagcatgccgcccatactttaatgtatctcggcatggatggtgagcctctttattctgatgacttttgccgtcagaataaagatgttctcttaaaatccgattctctttttgctgcaaaaagttccgatatcgaagaagaggccaatttgtgtctggctcttttgatgggttacaatgccactatatacaattatggtgataaggagcagaaaaagcaagagattcttgtacgtgcttgtgatgttttggaacggcttccggactccttgctcaaagtcaggctgttgacctattgttatggtgagacttatgaagaagctttgttgcagtctgcccgtaagattgtggatggatgggggcaggcttctcttacatccgaacagattgaggctgttgaagaacttcgtaatatagaagagaatccctatccatgggaatatgtcgatgagtaaaaaataaccggggattttgtttggagcgtctggactctacgcataaatataaatcaataaatcacctcaggcgttcccgtccccggtttctattgcaatataggcttgctgtcagaacttttgtcagcggatgatatataataatgatgaacaagtgtatgcgaatgagtaagaagaatggcatgagaattctgtttcttttttggcttttgatgatgttcgggctgatttatatgcttttccttttacttttctgacttgttgtcaagtatactttgatatttaatttaacacaatctgttttattttggttatagcagtagattttgatggtaccatagtcgagcatcgttatccctctatcggtcgtgagattcctttcgccatcgataccctaaaaaaactgagttccgaacgccataagcttatcctctggagtgtccgtgagggtaagcttttggacgaggcagttgctttttgtcgtgagcgtggtcttgagttttatgccgtcaaccgtgactatccggaagaggagaagaacttgaataaccatttttcccgcaaactgaaagcggatgtatttattgacgatcgtaatcttggcggtcttcccgactggggaatgatctacgagatgattaaccgtaaacttacctatgaagatctcatgcgcaaatatgagtatggttctgaaccggaaaaaccgaaaagtttctttgcacgcttattcgggaaatagagacttatttttataacatcaattactcttgctaaaaaacaagtaacaaatatgaaaatcagaaaatttctcttagtattggctattcctttggcactggcaggctgtacttcttataagagtgttccttacatgcagaaccctgaagttgtgaatagtggcagtaattctcttcctctttatgatgctgaaatcatgccgaaagatttgctgagtatcaccgtgaatactactgaccctcaggctgctgctccattcaatttgacagtacagacaccgttgaatgctgccttgaccaatatcaatactactacgcagcccactttgcagcaatatcttgtgaataataagggtgaaatagattttcctgtcattgggcgtcttcaagttggtggtttgactaagaatcaggctgaagaccttattcgggagaagttgcaaccttatttgaaagagagtccgattgtaaccgtacgtatggctaattacaagatatcggttttgggtgaagttgctcgtccgggaacgtttactgttggtaatgaaaaggtaaatattctggaagcccttgctatggccggtgatatgactgtttatggtattcgtgataatgtgaagctgattcgcgaggatgccacaggaaaacgtgagataatcactttgaatctgaataatgccgatttggtgctttcaccctattattacttgcgtcagaacgatatcctgtatgtcactcctaataagacgaaagccaagaattctgatattggtagtagtactaccctttggttcagtgctacttccatattggtatccattgccagtctgatagttaatatcgtccggtaatcaaccttattgttatttcaatcgtaaattgttaaattgtaaatattcccatgttgcgagacgaccaaaatttagatagtgatcaatcaaagagtgacgaatctatcaatctgtatgccatcttctttaaatactttgtctattggccctggtttgtagccagtgtgctgatctgtttagtaggctgctatatttatcttcgttatcaagctcctgtttataatgttagttctgctgtattgattaaggagaatgataagcgtagtggtagttctgctaataatcctctgggtgctcttcaggatttgggtatgttttctatgacgaataactttgataatgaagttgaaatcttgaagtctcgtactttgataaagaaagtagtaaacgatttgggactatatattagtatttctgaggaacgaactttcggttataatactcctttgtacaagagttctcctg

SEQ ID NO: 6534 - DNA, 1675 bp, Unknown
  gut microbiota DNA sequence
ttattaattctttaatatttaatttaatatgcaatattatagtaccaacaaacaagctcccgatgttaccctcgaagaggcggtagtgaaagggcttgccgcagacaaaggacttttcatgccctttaccattaaaccgttgccgcaggaattctacgacagcattgatacgcttggctttcaggagatagcctatcgggtggcggatgctttctttggggaagatgttcccgcagatacattgaagcagattgtgtacgatacattgagcttcgatgtccctttggtgaaagtgacggaaaatatctattccctcgaattgttccatggccctacacttgcctttaaggatgtaggcggccgttttatggcgcgcctgttgggctattttatcagaaaagagggcaagaagcaggttaatgtattggttgctacctcgggtgatacgggcagtgccgttgccaatggtttcctcggtgtagaaggtattcatgtttatgtgctctacccgaagggcaaggtcagtgaaattcaggaaaagcaattcactacgttgggacagaatatcacggctcttgaagtagatggcacgttcgacgattgtcaggcattggtgaaagcggctttcatggacaaggagcttaacagccgtttgcaacttaccagcgccaactccattaatgtggcgcgttttctgccgcaggctttctactatttttatgcttatgcgcagttgaagcgggcgggtaaggctgccaatgccgtaatctgtgtgccaagcggcaatttcggtaatataacggccggtttgttcggtaaacgcatgggactgccgataaagcgtttcatagcatccaacaaccgtaacgacatattctatcaatatttgcagacgggtgtttatacgccgcgacccagtgtcgctacgatagccaatgccatggatgtgggcgatccgagtaactttgcccgtgtgcttgacctctatggcggtagccatgcagctatctctgccgagataagcggtgctgcttatacggacgaacagatagccgaaaccgtgaagaacgtttggacagatgagcattacctgctcgaccctcatggtgcatgcggtttccgtgcattgcaagagggcttgcagccgggtgagacgggcgtcttcctggaaacggctcatcctgccaagttcaaagatacggtagagaatattatcggtgaggcgatacagataccggagaagttgcaagcctttatgcgtggcgaaaagaagagtctgcctatgtcgaaagattttgcagacttcaagcgctatttaatgaatgtctgattaccggttgtttctgataggatgaggtgtcaaaactaaaaaaatatcaaaggagttttgacgcctcttcttgttttcctgtgggaatgctttttatctttccggctttatggctattatcccaaagcacgagtatttctatttttagaaggctgtggcggtagaatagcgtatagtcgggacaaggagtgatatatcgtatgttatccacttccgtggcttgtccgatgaaaggatttagagtaatgcgatgaagtgcattctggaagagtgagtatataatctttccctgttctttgtttccaaacttctgcactgaggataacagcaggctcctcagttccc

SEQ ID NO: 6535 - DNA, 4963 bp, Unknown
  gut microbiota DNA sequence
aacaaggcaaatgccacatctcgttaagtgaaatgcccttctaactatttttcgcaaacgattgtttatgcatatttcattagttttttcgattaataggctatttttcaaagaataatgtgtatttttgcagccggtattaagtaatagagattaaaagtaatatgactaaagagctgttaacccccgactacatcttcgagtcaagctgggaagtatgtaataaggttggaggtatctatacggttttgtccacgcgagcaaataccttgcaggcaaaatttcatgatagattgttttttatagggcctgatttttggcagggtaaagagaatcctttgtttatcgagtccgataacctttgtgcagcatggagaaagcatgcagctgagcaagataacctttccgtccgtgtaggacgctggaacattccgggcaatccgatcgttatattggttgatttccaaccgtttttcgcactgaagaatgatatctatacagaaatgtggaaccgctatcaggtggattcactgcatgcatacggtgattatgatgaagcatccatgttttcgtatgctgccggaaaggtagtagagagtttttatcgctacaacctgacggagacagataaagtgatttatcaggcacatgagtggatgaccggtatgggagccctctacttgcagactgctgttcctgaaatcgctacgatatttaccacgcatgccacgtccatcggacgttccattgcaggtaacaataagcctctttacgattatctcttcgcttataatggcgatcagatggcggaagagctcaatatgcaatccaaacactccattgaaaaacagactgcgcactatgtagactgttttacgactgtgagtgaaatcacaaataacgagtgcaaggaattgcttgataagcctgccgatgtagtgcttatgaatggttttgaagatgattttgtaccgaaaggaacgacgtttaccggaaaacgcaaacgtgcgagatctaccatgttgcgcgttgccaattgcctgatgggtacggatatgggtgatgatacgttaattatcggtaccagcggtcgttatgagtttaagaacaaaggcatcgatgtctttcttgaatcactgaatcggctgaaccgtgataagaacctggagaagaatgtattggcattcatcaatgtgccaggatgggtaggtgatgcccgtgaagacctgcaacagcgtctcaagagcaaggagaaattcactactccgctggaagtacctttgattactcactggctgcacaacatgacgcatgatcaagtgctggacatgctgaagtatatgggcatgagcaaccgtcctgaggataaggtgaagattatttttgttccctgctatctcgacggaaaagatggcattataaacaagcaatattacgatttgatattaggagaagatcttagtgtctatccttcatattacgaaccttggggctataccccgttggaaagtgttgctttccatgttcctaccgtcacgaccgatctggcaggtttcggactttgggtgaacagcctgaagaaccagcatggcatcgatgatggggtagaggtacttcaccgttcggattacaactattctgaagtggctgacggtatcaaagacaccatttcggcattctctgcaaagacggatgcagaagtgaaaaacattcgcaagcgtgccgggcaagtagctgaacaggctttgtggaagcattttattgaatattattatgaagcctatgactttgcccttcgtcatgcgatggaacgtcagttaggttaaaataaatatgaattattaatcaatcaagtaatcatacaatgaagattaaagttagtaatgtaaacactccgaactggaaagatgtgaatgtgaaatctcatgttcctgccgagttggagaaattgtctgaattggcacataacatttggtggtcttggaactatgaagctactgaactgtttaaagaccttgaccctgctttgtggaaagaagttggtcataaccccgtccttctgttggaaagaatgagttatgctaaactcgaggcgcttgcaaatgacaaagtaattctgaagagaatgaatgacgtctatgctatgttcagaacgtatatggacgtgaaacctgatcagaagcgcccttccgttgcttatttcagcatggaatatggtttgaaccaggtacttaagatatattctggtggtttaggtgttcttgccggcgactacctgaaagaggcttccgatagcaatgttgacctttgcgcagtaggattcctatatcgttacggttatttcacgcagaccctctcaatggatggccagcagattgccaactacgaagctcagaacttcggtcagttgcccatcgagcgagtgatggacgagaatggtaatcaggtgattgtagatgttccttatctggattattttgttcatgcttttgtatggcgtgtaaacgttggacgtatttctctctatctgttggatacggataatgaaatgaacagcgaattcgaccgtcctattactcaccaactctatggtggtgactgggaaaaccgtttgaaacaagaaatattgcttggtatcggtggtatcttgacactgaagaaactgggtatcaagaaagatgtttatcactgtaacgaaggacacgcagcgttgatcaacgttcagcgtatctgtgattatgtagctgaaggcttgtcttacgaccaggctatcgaactggtgcgtgcttcttcactgtacactgtacatactccggttcctgccggacacgactacttcgacgagggtctcttcggtaagtatatgggtggttaccctgccagaatgggtatcagctgggaggatctgatggatcttggtcgtaataatccgggcgacaaaggcgaacgtttctgtatgtccgtctttgcttgcaacacttcacaggaagtgaatggtgtaagctggttgcacggaaaagtttctcaggaaatgttctctactatctggaagggctatttccccgaagaaatgcatgtgggttatgttacgaacggtgtacacttcccgacttggagcgctaccgaatggaaacatctctatgctgctaacttcgatgaaaacttcttgtatgatcagtctaacccgaagatttgggaagctatttataatgtgcccgatgaaaaaatctgggaaacacgtatggctttgaagaataagttgatcgactatgttcgtaagcaataccgtgaaacttggctgaagaaccagggtgatccttcacgtatcgtttctctgatggataagatcaatcccaatgcgttgctgatcggtttcggtcgtcgtttcgctacttacaaacgtgctcacttgctgttcactgacctcgaccgtctggctaagattgtgaacaaccctgactatccggtacagttcctgttcacaggtaaggctcatccgcatgatggagcaggccaaggtttgattaagagaattatcgaaatttcccgtcgtccggaattcctaggtaagattatcttcctggaaaactatgatatgcagctggctcgccgtctggtatccggtgtagatatctggttgaatacgccgactcgtccgctcgaagcatccggtacttccggtgagaaagcgttgatgaacggtgttgtaaacttctctgtactcgacggttggtggttggaaggctatcgtgaaggtgcaggttgggcgctgactgaaaagcgtacttaccagaaccaggaacatcaggatcagctcgatgcagctactatctatagcattcttgaaacagaaatcctgccgttgtactatgcacgcaataagaagggatactctgaaggttgggtgaagactatcaagaattctattgcacagattgcaccgcactataccatgaaacgtcagttggacgactattatagcaagttctacactaagctggctaagcgtttcagcgcattgtcggctaatgacaacgccaaagcaaaagaaattgctgcttggaaagaagaagtggtgtctaagtgggacagtattgaggtagtgtcttatgacaagtgtgaagaattgcttcaagctactatcgaaagcggtaaggaatataccattacttatgtaatcgatgagaaaggcttgaatgatgctatcggtctggaactggtaactacttatactgccggagacggtaaacagcacgtttattctgttgaaccgttcagtgtagtgaagaaagagggtaatctttataccttccaggtgaaacataaattagagaacgcaggtagctttaaagtatcctaccgtatgttcccgaaaaactctgacctgcctcaccgtcaggacttctgctacgttcgttggttcgtgtaagagtttaatctaacaatatagagaagctgctcacgggaggtttactaaacttctcggggcagcttttcgcttttttattcaccttataatatatgtactatgagacatttacttctttcattgagttgtttgtttggtatagtttctggcggatattcacaaacggaactatcgccttttctctttgatacttatcaggatgctattgtctatatgagaaatggtatggaaattcgtggcaagatgaattatcatcttccgagcgaaaaattctattttattgatgagcaggatggaaatcaggcaaaaatattgtcgaatgctgatgaggtgaatattataaagtttggtgcacgggtattttacccggaacaggatggtggagttgaaattctttcttcggagccttcattttatgtacaatacaaagttactgttcgtgataaaccaaagtctgtgggatatggcggcacctcttcgttgggtaatgtgaagacgtattcttccaacagtacgggattctcgcctgatgct

SEQ ID NO: 6536 - DNA, 2803 bp, Unknown
  gut microbiota DNA sequence
agttatgataccatatagttcccgacaattgtaagcgttagcctattcttttttgtgcaacctctatcgcatcgtgttttaattcgtcttcatcctctaccgcatctaatactttgtctgctaaccatagagtgagaagttcatttttatctatattgaaatattctgccaattgtattacttgtgtccgtttagctcgtctgtctccgcgctctattttgctgaacatcggagtatctatttcaagtagtgcagccaattgtctttgcagtactccgtgctctgctcttaattcttttattctttctcctaataacatacttcttcaatttacgaatttgacatgagttaatcggattttattatccgctataatatgacggaatccgttataatttccgctataattggaataaaccgtcaaaatcttctgttatgactattcttttaagaaccatatccgtccttttgcgtaaataagtttatccacacttaatgcgctaagtatatctcctaaaagtctcaattgctgttcatgcgtcttaacttgcggcattacatctttgatatattcataaatactatcacgtttcgctccatctgtaccggcattcttaagatactgcaaaatcatctgtttcattttctccttatcaagtcctttctgcttagtataaccctgcagttgattagtggcctttgcaatccctaaagatattgtataattgggagcttcgccctcaataagtcctctgtttagtaaattctgcgcaacatcctcatgaatagttctgcccttttggactgcatctaatgatatgcagtcccataaggtcagtgaatcgttggttttgagtaaattagtatattgtttatttatttcattgccataaatgcgtaccgacacttttctgtttttagcgtcaatttcataatcaggcattggaaaatggcgacgccattgttcattaaacattttcttgatacctctacttactgtgtctatcatgttgaaatcaaccattgccctacaaagacactcattgcggaaatatgcttgaggctcttcatttgttaaagcattttccaaagtaccaggaatgaaactccctgcattggagtaataaaggtaagtcggattttctacaaaattgattcgctgctgcatcgtgtaatcttgatgggcaatgcagttatgaagagcttcacggatagtatagtcgtcatattgcttcatcgtgtctgggaagagcgtgcctcccggcatttcacgcatggttagattttcaatctttgataagatctcatctacggttaatataaatggcacggtgaagtgttcgtaatccacaacatcttgcttttcatcccgtctcgtccaagtcacctgaacaacagctggacgtagcttgaaagcggattcatatttaccaagaagaataattgcagcacgagtgattcctccgttcttcattatgccgcacttgctcaagaatgtttccactgtccatgcatttacttcggcttcagggattctgctgtgtactttcttgaacatcatacgagctttagctatggcaacttcatcaaggtcgtcaatcgttgcatcagatacaatttgtgccgaccaatccgtttcactgaaaattggttcatcaagaattgtactcatgcgttcagtagtcatttctacgagagaatcctctattcgttgccatgccttattatgagcaaacacgggccgtttgggtagatgtttgggaatatgtataacccatactttacgattagtatcatctgtgataaactcatctatatataagtcttctgttgaaagatttacgcatctttctgttagacgcaatattgccttttgcttatcatagttataagtgtccgttccaacaatctccaatgtcttgtcatgaacgcctatcactaaatctcctccatccatgttggcgatagccgacacgtaggaaataacatcattcttttcgtccccacagaacgagttcttaagattcttaaattccttccattcacagcgagcattctcctgtgggtactcgcggagaaggtattgttgtagttcgagttcggtcatagaaatataaattaaatagagtcttttaccctcttgctcaggaggtcccattaaaaaaagattattagtagtagaccaattgtgaccaccagattagatctgcaaaatgcttacccatctgcttctaaaactcttccttaaacggggatggcttttttgaaccagcccctttgtcttgggactgttcaatctatatgacaccgatgttaataaaataatttttattaaacatagttttatacattctgaattgttcttgcatcacacgttatcatccctgtttgcttccgggctggcatttacctactctcccgcttttgcagtaccatcggcataaacgttttttacttctctgttcggaatggcaagaggtggggcaacgctattataaacaccaaatttgttctctttagagttgttcaagtcaaatgacctttccaattccaactctggacgagttagaagaattggcatttccttctgttcctcttcccttacaataattgaagcattctttgctctcgttgctgcccaatttctaagcgcagcaatttgctctttcatcgtggtagacaacggcactgtttttaaaatcgcattcattagatgcgttgtcttaagttgaggattctctggattttcaacataagcatcaaacatcgcttctttaatacactcttcaatttctgcaccatt

SEQ ID NO: 6537 - DNA, 2465 bp, Unknown
  gut microbiota DNA sequence
aatatttcacttcatagagagaattcccgaaaaaatgtctatttttgcagaataatttattagactggtgtaaaagtggcaagaaatagaaaagagcttcctctactggagaaagtaacaataacggatgtggctgccgaaggaaaagccatcgcaaaggttaatgatttggttattttcgtaccttatgtcgttcccggagatgtagtagacctgcaaattaagagaaaaaagcatcattatgctgaagctgtagcagtgaagttccacgaatattctcgtgaaagagctgtcccattttgccaacattatggcgtatgtggcggttgcaaatggcaagttcttccctattctgagcaaatcaagtacaagcaaaaacaagtaacggacaaccttacccgcatcggaaaaatcgaacttccggaaatttctccgatcctcggttccgagaaaacacaattctacagaaataaactggagtacactttttctaacaaacgttggttgacggaagaagaaataaaacagaatgtggtatacgaacagatgaatgccgtaggtttccatatccccaacgctttcgataaagtactggctatagagaagtgctggttgcaagatgacatatccaaccgtatccgcaatgccgtacgtgattatgcttacgaacacaattattctttcatcaacctccgcacacaggaaggcatgttgcgcaacatgatcatccgcacatctaccaccggagaattaatggttatcctaatagctaaaatagaagaagaggtagaagaattgagattattcaagcaactcctgcaatatgtagcagatacattccctgaaatcacctctctcctatacattattaataataagcgtaatgataccattaccgacctggatgtgtacactttcaaggggaaagatcacatcttcgaagagatggaaggattacgcttcaaaataggtcctaaatcattctatcagacaaactccgaacaagcatacaatctttataagatagcacgcaacttcgccggactgaccggtaaggagttggtttacgacctttatacaggcacaggaaccattgccaactttgtttccaaacaagcccgccaggttattggtattgaatatgtacccgaagctatcgaagatgcaaaggtaaatgcagaaatcaacggaattaagaatacattattctttgccggtgatatgaaagacatgctgactcaggatttcatcaatcaatatgggcgcccggatgttatcattaccgatcctccgcgtgcaggaatgcatcaggatgtggtagatgttatcctgtttgccgaaccgaaacgtatcgtatatgtaagctgcaatcctgccacacaggcacgcgacctgcaactgctcgacgtaaaatataaagtaaaagccatacaaccggtagatatgttcccccacacccaccacgtagaaaacgtagtgcttctggaattaagaaatgaagactgagaattttatcactaatcactaaccattaatcactatcaacgtggcaaaaggaaaaatagtagcgcgagcccgcacccaatatacggactacacagtaaacgaaccgatggaacttatggagtttctggcagccaagatgccggatgccagccgtaccaaactaaaatcattgctcagcaagcgagtggtattcgtagacagtgtgatcaccactcaatataatttcccgttaaaaccgggtatgaaagtacaaatcagtcgtgataaaggcaagaaagaattccataacaacctgctaaagattgtatatgaggatgcatatatcatagtggtggaaaagatgcaaggcctgttgtcagtcagcagtgaacgtcagaaggaacgtacagcataccatattctaaatgaatatgttcagcgctctaatggacgcggtagcaacgtgtacatcgttcatcgcctcgatcgtgacacttccggactgatgatgtttgcaaaggatgaaaaaacgcagcgcacattgcgtgacaactggcatgagattgtaaccgaccgtcgctatgtagccgtagtcacaggagaaatggaaaagaatgcaggttgtgtcatatcctggcttacagatcgtacgctttatgtttattccagtccaacagatgacggagggcagaaagcaatcacacactatcgcacaattaagcgtgccaatggttattcccttgtagagttggatcttgagaccggtcgtaagaaccaaattcgtgtgcacatgcaggacttagggcatcctattattggtgatggccgctacggaatagaagacgtaaaccccattggacgcttggcgcttcatgcgttcaagctttgtttctaccatccggttacgggagagttgatgaagtttgaaacgccttatccgaatgaattcaagaagttatttttgaagaaataaaaggata

SEQ ID NO: 6538 - DNA, 1520 bp, Unknown
  gut microbiota DNA sequence
cttccattctcgtcaacgacttctacaaggtacctatcactgtcgcttttcttgtttcttcctgctacgcgattgctatcacgcgcggcttgaaactggaccagcggatttaccaattctccgtaggagctgccaataagaatatcctcctgatgatatggatattcattctcgccggtgcctttgcgcaaagtgccaaacaaatgggtgctattgatgccaccgtcaacctgactctgcatattcttcccgacaatctgctgttagcaggaatatttatagccgcctgcttcatctccctatccataggaaccagtgtaggaacaatcgttgccctcactcctgttgccgtaggactagccgaaaagacagagattgctctcccattcatggtggcagttgttgtcggagggtcttttttcggagataatttatcgtttatctccgacactacaatcgcctcaacaaaaactcaggaatgtgtgatgcgtgataagttcagggtaaattccctgattgtcgtcccggcagctattatcgtgctgggtatttatattttccagggattgtccatcactgctcccacccaagtacagactatcgaatggataaaagttataccttatatagtagtattgggaacagccgttgccggaatgaacgttatgctcgtattaatcataggtatcctgacaagtggtattatcggtattactaccggaagtattgatgtgttcgactggttcggagctatgggaacaggcattacgggcatgggcgaactgataatcattactttactggccggaggaatgcttgaaacaatccgctacaatggtggtattgactttattatccggaaactaaccctccacgtcaacggaaagcggggagcggaactaagtattgccgctttagtaagtatcgccaacttatgtaccgccaacaacacaatagccatcattacaacaggaccgatagccaaagacattgcgcagaaattccaccttgaccggcgaaagactgcaagtatcctcgacactttctcctgtctgatacagggaattatcccatacggggcacaaatgctgattgctgccggattagccaatatctctcctatcagtatcatcggcaatctttattatccgtttacaatgggagcttgcgccctgctcgctatcttattccgttatccgaaacggtattcataaagaaaaagaacagaaatatttgtcaatcaaaagaaaagccgtatctttgcgcccgctattacgagttagtagcataattcaaatcattaattaaaaacaattattaaaaatggcaactagaatcagattgcagagacacggacgtaaaagttacgcgttctattcaattgtaattgcagacagcagagcaccacgtgatggtaaatttattgagaagattggtacttacaaccctaacaccaatcctgctacagtagatttgaatttcgacgctgcattggcttgggtactgaaaggtgcacaacc

SEQ ID NO: 6539 - DNA, 245 bp, Unknown
  gut microbiota DNA sequence
cagacggatatgagtctgaaacatttatgaatgtcatcggtaacttactgcttgagatggaaatactagcttcatgtttttgtcctggagcaatacctcctccatgattaaccttatatacagaaccatcagcgcaagaataggcatgatttattgattgtattgataccgaactattgttttgtatggtgaactttattgtaattttagtgtcaattacagtgaatttggcgttagatttattg

SEQ ID NO: 6540 - DNA, 794 bp, Unknown
  gut microbiota DNA sequence
gtgtacacagtgccataaattgcatggtttcatatccattgctcaacggaatacgtccgccaacataccaccgcaaacagtagccaaagagttgaaaaaggaatgctgcataaagtgcaactgtaaaaacgctccatgccttacctgccgaacgatgcatgctgcaataaagtaaatagaaaaatgccagcatccctacagtcagattgaacatgaacaacagtttgctgaatggaatacgattgtacaatatttcagcctgcacttttacgtcagatagtggttttatactcccatcttccggtaaaggatggataagtgttccactccgtagcatcagtatcaatcctaccttttcgtccgtttccatgatagccttttccaacgaagtcattttcatatgtggcttttgtccacccttccaaaattcctgcaatcgatagttttgtccatcaaacaaatcagtaagacgggcataagaagacgataaccggagtaaatgacgaagttccgcactctttatataaatcatcggttcattctgccaaacctccggacgaagtagccaacctccgacaacctgttcgggtgtcataccaccataagaaggttttccggtcagtttcaatacaaagtctcgtgcaagagtattaaaaggtactacgcgatcatgataaatcacttgtttgaatgccagactatccgcctgcctgagtgcaagtgccggaaggcttctgttttctgcttgcaccaccgttaccacagccatgagcaaccacacaaacattccccct

SEQ ID NO: 6541 - DNA, 1409 bp, Unknown
  gut microbiota DNA sequence
catcagtatcaatcctaccttttcatccgtttccatgatagccttttccaacgaagtcattttcatgtgtggcttttgtcctcctttccaaaattcctgcaagcgatagttttgtccatcaaacaaatcagtaagacaagcataggaagaaggcaatcggagtaaatgacgaagttccgcactctttatataaatcatcggttcattctgccaaacctccggacgaagtaaccaacctccgacaacctgttcgggtgtcatgccaccataagaagatttcccggtcagtttcaatacaaagtctcgtgcaagggtattaaaaggtactacgcgatcatgataaatcacttgtttggatgccagactatccgcctgtctgagtgcaagtgccggaagacttctgttttcagcttgcatcgccgctcccgtaaccatgagcaaccacacaaacattcccccttttcgaagcaacggatgtctgagcaatctacggaattccccactgcgaccgataagcatccacaacatggagatacccagcaaaatatatcctgcatacgtaatccctattccccacggatcataattcaccgacaaccaactcccctctttatcatcatcaaaagaagactggtaaaagcgatacccctgacgagagaggatacgattcatggaaacaggttccgcatcccgaatatagctaacgtaatctgccggagcatccgtccccggataatactccacccgaaaactgtctaaacatagggtgaacggtagttcgattacccgcttactgtcttggtctatgaaagttcccacctcagtacctactgtgagatgcatatatccttttttgctgcatgaaaatgtaatcatggctcccaccaagataacgaggaaggagccatgcaacaacaatgtcgggagacgccgccacaactgccgcttaaccaacacggcaactgccaatgcggcaagtactccccacaaacaacaaaaccaaactgtatgataaacatacttttctacaaactctgttccatgtacatgctccacaaaggtcaccgcagcgagcaaagccaccagacagatatataagaagacgagacttttcttcaaattaaaaaggtgcatattccttattcttcaaagccttaactcccatacattccatttcgatcaaccatccgggacggcatacaggcgcatgtacaaatacttttggagtatccgggaaacgcttgtcatacatactcttcacaactgcatagtctgcaatgtcacgcaggtaaacaatcatatgtcccaagtcatcaaatgtacactcagcctctttcagcaaggcttctacattttcccacatccgctccgtctgcctgcggatgtcgccggggtataccacttctcct

SEQ ID NO: 6542 - DNA, 4713 bp, Unknown
  gut microbiota DNA sequence
aaaaaggtactttttcagagcagtctgtattcaattccaaaacaaactctttccaacgtaacagttgcaatttacaactcatgcaaccaacagaatccacataagtcacaattttatagttcgcatcatttccgagatgctctactgtatcctcttgcacagtaaatacaagatccacagggaaaagaatttctctaccttcccattccttcaccaacgaaacaaatccatccttatcgctattccggcaagaagaaccaaataaaacaagaacaactatatatacgcagaaagaaaacctcatcatttttaacatttcaaactacattatataaactccagacaacctaaataaaaactttctcaaaaatcgatttcatatccaagcagtaaagccttttcatcttcttcgctatatgtcacaccatatatcatcctatttttcgaatcaacacaaaatgcagacaaatcttcatctatcatcaatatctttactaaatccccaccccaattatacacttctatttgattagaaaagtttttccgtgaatctcttacggtctttccgctgtacaaaagaaacacatactcatctgacacacaagcataaatatatccagttatattatctactgtaaaatttgattctatttcactgttgtcttctacaggagtatactgaggaaaaataaaatttttacacacagaactccatatcttgttttcagttctatctaacttatagaattctactattttgccatataacgaagcatatacaaattcatcctttaacggatgcttcaataagttgccctgataagccaaagctttttgcctcattggcgccacaattccatcatccggatacccaagttcacttggatacaaagccccatcatttacaaccattaatctggcggtatctaaataagtcagtccaacaaacaaactatcatcaacccttaatacgttatttaatcctacaaaacatttatctgtaatactactaatattcattgtatccaacggtggaaatgaaatttccgacaatctaatcaaagacctatcaaaaacagctattttacctggcataaacctcatagactctggaaaaataaactcccccggtccttgccctacttccccaaaagtgttaattaactctaaagccgtcattttttgcttaaatacagaatatatcatgtcatttccacgatctcctatcataaaaaaggaatcacaataagcaatatcccgtgggatgaacatatcatctaacatatatgacacattcgcttttatatgtattccattttcactctcattttttttattaccacaagacgtaataagaaatagaaacataaaagccactatataattaatcattttcatcatatccaatacctattataaacctatgtataagcaattatttatattcagcgagagatttctctctcgctgaatacatccgaattaattgtacttctcaccaggaataggcgtattgttaattaatacacacgttcctcccattgcttgattacatttaatctgatcaacttcatttctagccaaagcttctacattagccaaagctaaatcggacataacatctgttttcagatttgtgtaaacaccataacctgcaattgctgcaaaagctgcaacaaaagctattctcataaactttttcatccttatattatttaaaatgaaaatatattcaattaccaatatcaagtacacatatattgtacagtcgagtatcaagatacagagtatcttattagaacatatttcacactgcactatcgtaacagcagaaatctgttttcgttttgcttaaaaatttgtatctttgccaggcttctaaattttaggggttatggggcattcggtattctattgcagcaacaagtcgtttaccgtctgctccttttaattagttatcactctatatagtttttatactatattctaatataggctcatcctcattcacatccgtagcataaataactccacgctgctcatctaccgatatgccacaaatgtaatggtctaatacatatctcattaacggttttcccgccaaactgaacacatagataaattgcccgccatccggatgattaataccattccgggcatctcgcgctatatccttgaacgaacgcccatgaaagactgcataaatggcccgatccgtcacctgcacatcgctaaatcccatgatacccgtaggaataccatatcccccggacacctgaaattccggctcaccatgcggccccatgcacacaacatgcgtactgtctttcagattataaatttcgagcacttcacccaactgagtagcaacagcaagtatcccatttcgggaattgtaatctataaaactacgccacgcttgcgccaaagccggacgggcattctgcaaagcgtcttcattgacagtaggaataacaccaaacttatgcatcaattttccatctctgcatactttacaaaaacgactatcacccgaataatcgggaatgataaaggtagagtcctcacacatcacaaaatcgagtgccctgagaatatccttatccagattcaccgcttcctgacgaagcagtgaatcgccggataaagcaaacccaaaccttgttaattctgacttattagaatctaatgtccacaaaaaagccccattccatcggaaattttcggcagaaagcatatcttgcggtgcatctccacgcctcccgaaagaagacaggtaacggaaatcagggtagctgaacgtatgaaaaaaatagtctgttccatgcaaatcaagcaccacagctttcccgtccctgatatgcagacgagaaggatagcggaataaagcagtatccagccgtatcgtccttgctttcaattcttgttcctgtgggaaatcagtatatacctttttgccggaaacaaccaaattcggagtacaggaaatgaatagcaggatagatataacgctaataatataagctatacggagcatcatacatatacactttgtcgtgattaagcggacaatcaaccaaacctttaccaaagcagtgaacaccatcagtttctgaatccgctaacgcttctatattctccaacattaaagaagacatcttgacagatgactgtttactgtaaacatgtcctcctataacaatagctacaactcccataaataccagaatctttttcatcttgtttttcatttgattattatgtttttcatcaatgattattatgccggcaaatgtaaataataaatagattcaaaatgcatttacgggagtaaaaaaggggagtaaaattttcattactccccctttatattctaataataaggcacttatcatttttcaataagcatataaaagccctgctctttttgctcgttttgaccggattctattatcacatgagacttctcagtgtcaagtaacttcctgagcaggcttactgttactcttctgttttgattaatattgatattttctaagctccaaccacaaacttcaacaatccggttattcgataagaaatgactttttgcatggacaaatgcagaaagtagtttataaggttgcatagaacatctcaccacactttgatctccaaaagtaagcgtacacgcctcttcatcaaacaggactccgcctatttgatatttattttcggagatgcgtattacgaaatcatccggatcggccgcttcatcgtcgttattcttttttcgattattccaaaagagaaggacaaatatgcataaacagaagacaactacaatagaacaagaaacaataccagtcttcccccaatcggcacacaaccatggggaaggaagcgaaagataagccgtcaactcaagaaaatacatatcatccagatagtaggttcccaacttaaacttatcggccatcagcgttgagtctccggccataaacttttttccttttctgtcacccggtaattccgattgcaacataagagcactggaacaataggtgtggctatcatccaaatcttcttgccataattcattcaaaacactgaaaaccgctttgtccaccaaaaacagaaagcgaatcttcgcacttaggctatgtgaagcaatcaaccgctttccttcttttatcgaatcgaccgctaccactgtctctccttccgctagcactatacgacgctgcttgctttccttattcggttcgcctcctccaacagaataaggaattccaagtttatcaaattcccgatttgcccaaagttccgtagcggatttcagtgaaaattccgccttttgcttacatattcggcgtccttccattccactctcatatacctgaaaagcaagcattcccaccacaaggaacaagattccccctaatacatatgaaattttcctataacgcttcataatacaaactaagtatttatccaattaataagtacacaaatatttttaaagacaaagtacaacaagcatcacctctacagacagaagatattgattaactctttttttacagaatacaaaaatagctcataaaaatttaaaaaacgtctttcaacatgatttaaaagaagattaaggcgattgttttattcattttcggttatgaattaattcaccacagattacacagattgacacagattctattttactgattatta

SEQ ID NO: 6543 - DNA, 14552 bp, Unknown
  gut microbiota DNA sequence
atctgtgtaatctgtggtgagtcttattcattcctatgccgttatggactataaatgaagtatcactccgtatccgctatttttgagaaaaaactctttccgttctttcagacctcacggaatcccctgtccatcggcgttacggctgaaacttccagttttatagtagtttcaggtatctttcagctgaaatgccgatgaacagggagtttaggaaaagctgaaagactgaaagaagaaacaacacttaattatattgaataacatctgaaaacaagcagtcttatgatccggaataagcaatgttatgaatgattacattgcttgttctcatccacaacaagctatgtaatttcaggcaagtccgattccgtgacagaatacgtaagaggtatgtaaggaaaccaagtaatatatgtatataaacgcctttttgtataagtgatttttatcattgattatcaagatgctacaaagtatcaatttcttgtcgacaagaaattaagagtttgtcgacaggaagttaacttcttgctggcaagctcttgacttcctgtaaaaaggagaaatagtaaatcctccggtttccttacactgcatgaacagcatgattgataggacgaatcgtattagaaggctaaacgcccttcttcatcctgttcctttagcgtctatatatcggtggtgttggatatatagatacgacacatccgacatatagatgcaacacgtccgacatatagatacaacacatccgacatatacttccaacagactacaagtatataaaaagagaaaagactttttagtttcaaaaaatagttgttcttttgcagcctcaaaagaaaaaagagtatgaataagaatgtacaagggcacatattcgccctgactgccaatattttatggggactgatggcgcccatcggcaaatccgcacttatggagttttcagccttatcggtaactacgttccgcatggtaggtgcagccgcctgtttctggctactgtctgcattctgtaagcacgaacacgtggatcaccgcgatatgctgaagattttctttgcttcactttttgcactggtgttcaatcaaggagtgtatatcttcgggctttcaatgacttcacccatcgatgcctccatcgtgacaaccacacttcctatcgtaaccatgattatcgctgccatttatctgaaggaacctatcacgaacctgaaagtactgggtatttttgtaggggccatgggagcgctgacacttatattaagcagtcaggccacaagcaacggtaacagcagtattatcggggacttgctttgtctggtagcgcaaatcagcttttctatttatctgactgtgttcaagggcttatcgcagaaatattctcccatcacattgaataaatggatgtttatctatgcctccatgtgctatattccattctcttatcatgatgtggcaggtattcagtggacggaaatttctaccgcggcatacgtacaagtgggctacgtagtaataggtggtagcttccttgcctatatcttcattatgaccgcccaaaggttgctgcggcccacagtggtgagtatgtacaactatatgcaacccatcgtagcttctattgccgccattatcatgggactgggtgtattcggttgggaaaaaggtgtagctatcgccctggtattccttggcgtatatatcgtaacgaagagtaaatcgaaggcggactttgagaaggaagggaaaaaagcgtgaattagttacgagctacagagctacaagctacaagtgccttgcggcatgatagcgcagctacttgtagctctgtaacccgtaactaattcttcttcaattctccgaaataggtatctagcaagctctttgctgcaacaaaggaagtgagtttgccttgcagtacttgctgttctttatcacttaacatggcttctatggccggattgtggtagaaactatcgcgcagacgttcattgatgctttcgtacatccagtatttgctttgctcgttacgtcgatattcaaaataaccgttatctttcacaaaagcaatatagtcgtaaatcatcttccaaatctctttcacacccaggttatagaagccggaataagtcatcacctgtggcgtccatcctgactcgggagcaggaaacagatgcagagcattgcggaattgcgatgcggccagtttagcacgctccaggttatcaccatctgccttattgataacaataccgtccgccatttccatgataccacgcttgatgccttgcagttcgtcgcctgttccagccaactggataagcaggaagaagtcgaccatagagtgtacagccgtctcactttgtcccacacctaccgtctctacaaagatcttatcgaaaccggcagcttcacaaagaataatcgtttcacgcgtcttacgggctaccccacccaaagaacctgccgacggactggggcggatgaaggattttggatgaacggagagttgctccatacgcgtcttatcacccaagatactgcccttactgcgctcgctactggggtcgatggcaagcactgccagcttaccttcgtatttttccaacacatgcaagccgaagacatcaatcgaggtactttttccggctccaggcacgccactgatccccacacggatagagttccctgagtaaggcaggcatctctcaataacttcctgtgctaatgcctggtgttcgggcttcacactttccactaaagtaaccgcctgactcagcacagtgacgtctccttttacaataccttctacaaactccgctacggaacgctgacgctttttaggtttcgggcggcgatagggattgacagacgaaggttgctcaatgcctgcattgacaaccaatcctttataggattcatcgttttcaggatgttccatgataagatttatgatttctaatttatgatttatgataagatttatgatttatgaaatcataaatctttaactcgctttgatattcatctcaaccttaggctgcatcggatcattcgtaatcatcagaatgcgcaggtggcgtttcttcttggcgatattcctcttatctatcgtcacacgcaagcgggtggtttcgcccggctgcaacacgctcttcttcagacttactcctaaagcaggattgaacacctgcaatttactgatttgcaacggagagcgtccggtattggtgatctgtatatcatgtttcaccttattcttcttagccagttgtgcgctcaggtctatatctgtctccgaaagacggattaccggagcattcgccttgtccgtatcggtcataccggagaaatcaggcaggagaatagcagaaagaggtatctcgttttcatcactcaccttgtcacctgtgaagcgtgacaagtaaactgatgcctgtgtcagtcccaagtctgtcagtttctctgtgttgagagttaatgtgataagccctttctcacctttctgaagcacgttcggttccactttcatatccagataggaaggcaggtgcatcaataccggttcatacgaacgatccgacagattcactacgccaatccgtatgacaggtttttcgccacggtgcgtatcagggaaatcaatctcatttttgtcaatgcgtatctgtccgataagataaggatatgttttcgtaaagtcttttatctcgcgcaccacctcacctgtaaagtgcagataagccagattgggctgcgcattggaataaacagctatggacttatcaaaatgccccaatgccttagcatcaaaatcgacgacgatcttccccttttcaccgggagcaatgggagtttgtgtccactgggctacggaacaggcacaggaagggtctacatcagtaagcaccagaggttgatcgcccgtattggtaatgacatactgcacgctaacgggatgtttccattcgatctgtccgaagttgtgagtttctttattggatgaaaaacgcggttgcgccgtagcagtcagtgctacggcggcaagcgcatatatacatatcaaggttcgtttcattcgttttcattttaggatgcacaaaagtaggtgttttaaatgagagttcctaaaagcaagttttaaaatttctactccacctcgaccttcactgatgctgaatgagctgcatactcgggagcataggcacattgaattgttgccagcccggcttcatactgcccgctacgggcaacgcggtaactgtattccaacacatatacacccttgctcagactatcgaaaaagaaattagtggaagcatcttctatctccacataataacctattccaccgttccagcgataaccggaaagtgaattcatcggttcgaagcaggcaccacgctgatctttcagttgaacgaaatccatggcacggtccagacgtatcgtcagacgggaaaccactttatcacctaccgccagttgcgtggaagcagtgatgggttgcaattctttctttccacctgtcaaagtacgctctacatagagtttcttttctacagccagttcaccaccttgctgttttacatcggaaacaggcgacagatattgtgcatagactgccccccaggcaatgcctgcatccctcttttccacagtaatggacttggcacgcaattcaggactaccttctgcaaagctttccttgatatatcccaatccgggaactgtggtcttggcaggtgagaatgtttccagcactttacggccaagaacaatgcgtacatcaccacgtgatgacaacaagtcactcccttggcaaagcaatgcataaatagcgtctgccgttgcaacaggtgaattccaacttgtagtttgtttctgcttcagtaaccaaagtttcatttcttccaccaatgcatcattgcctcctgccatcctcagggcttccattacctccacatgaacggaaataggttgtgttccccaaaggaaaggtctttcatagaaagcaaagtatgcaccccgttcatcggtttgcaccagatgctctttaatagaagcgataaattcgttagcctcagccgtgcgacctgccttttgcagaatgatagctgattgcgccttgactcccattgcattcgaactcaggttcttgccgaccatagagaggaaatagcgataagcggcttcattggcagaaggcactctttcaccggagatagctatcagatagagatacgtcattgccggatatgaaagattatcgatcttcgtcccgtttttctctgctttacggatattctgatattcctgcaatgcctggctatgcaaatagttgaaagctctttgctgcatggaaagggcatcagcggagttctgttgtccggtaagcaacggcaagcggacaaggagttcggtgatgtatcccgtcatactgcgactacccggcatacctttgtaccaactccaggcgccatcggcattttgtaattcctgtagtttaataagggtggtcatattattgttcgacagattattgagatcgaacaaagtagcaatacgcgcttgctgttcggcttcagtagtagcttccagcaaccacgggctttcttcgagaaggatattcttcacctcttggttcttctgtaactggctgaggaagttttctttcttaccgccttgcatgcgccaactgtcgaatacagctttaatgcgcggctgactgttggcaatgtaagaagcaagggaattagcataataagcggctgcccatgctgtagcattatctgtacggggctgactcaatacgggtaatgcctgtacggcataccaggcaggattacctgtaaattctactgtcagtcggcggtcggtggccgtgcggctgttgtaattgaacaggctgtccaaagagaacgtacgggtttcttcaccacgtaccggcatggcaagggtttcagtaatgtattccttattgctcaatacaggcaacaagtgctgttcgccatcactgaatgtgccaccgtcagcaatcatacgtacacccaacatatcctgtttatccgtcactgtgaaacggaagcttacaggaaccgtcttcccggcttctaccgtgaaagcttggcgttgagtggaaatcactttatccgtcatcggatcaaaaagaataaatttcgtagttcccttcaaagatttacctgtcagattggtaatggttgcagcaatgctggtcttatcccctacccgtacaaaacgcggcatattgggagacagcatgaagtccttcgccgtaacagcagaagcatccaactgaccggtcaacattccctttgtatgggaatatccgcggaaattccaacgcgtcagactttgtggcatcgtaaaggagaaggaaatctcaccttgttcattggtgcgcagttgcggatagaagaacgccgtttcagcgaagtttgtacgtagttcgggggtattgcccgactctacatcatcagccgtctgtccaatttcctgcgacatttcttcttcaaacattagacctgccgcttttccggccaacatatttgtcagatcagcagaagcattatccgccatagccatcatttttgtctgcggagatgctatgcccctcacctgtacgcttcctgttacatccgttctcttcacagaacgatatccgattatcattgcttcatttatgccttcttccgaataaaaagtatcgtagataaatgctggaattttccactccttcatcgagaaatgacaagaatagaaggctccacctgtatatccataagaccaatatatctgaggattgaaacggggatagttcacattaaaattctgacgattgggatacagcttatccaaagaagcatcgtacatagtagcaagcatctcagcatcagccggtgtaccttgcggtgtctttatcgtcagacgccactcctcttcttgtccgggacgcaacttatcacggaatacatcccatttcattgtcagtgctttatccggcatacgcttttgcaagttgaccttttcagaatagaattcaccacccttgacaaaagcaaacaggtactctatcccgtctccatactcctctttataaggaatatcaaaacgaacaatagagtcggataattgaagcaccgtactgcttaaacgctttttaccgctgaatacatccagcatgacataagcatccttataagaagtccccaaacagaatttggcagggtgtccggcatcaaactctgcattgcgtgcatagaaccagactggtgaatctaccggagggcgattgtcgtcataggagaagagtacgatatgttgcttgtaatcaacatccctaccctgatcgtccttggctgctaattgtagttcgtaagcacctgaaggcaaattcttccattccggcaacaatacttccacattcgaggtaaactgtccgctgaaacggacttcctgttttccatctacagtttgtaccaggcgataatcacccttcacggcaacgggttgcatattcaggttccgcgccacgaatgtcaggcggatactgtcatccttacaaatgcgctcttccgtttcgacagacaaaacaagcgaacggttgcctgctgacagcgtggtcacactactttgtgtttcaccggcctggttggttacagaggcttctatctgataggtataaaaaccggcattctcccctttcacaccttgcaggcggacaggaatagagaacattccgtcatctcctatcgtcactgtgccggaagccagtgaagtggaactctgcccataagatctccaccacgaaaacagactacgggttacggtatagttcagttccaacccttgcaaaggcacaccattaaaggaactcaccgtacctttcacctgtacactgtctcctacttgataggaatccttctgaggatcaaaaactatatcgaatgtaggacgcttatattcttccacttgtataaatgcccggccatcagtttcctcaacttcaatcgtgtaagacccattcaggcaggcagcaggcagtataaactctgtggtaaacgaaccaaattcattggtacggacttttttctctccaatatcattaccattcacatccgagagctccaccgtataagtttcatttggaagaaccttggcggtatctccctcttgggcataagctataccttttatatagatagtctgtcccggacgatatatggaacggtccgttaaaatcttcacttcatcaaactcttcatctgtgccattccagactccattagagctattataaatacgctgcaatggcattgccgtatcagtgcctttcgtagcactcaatgcacggaattgcttaacccacggcattaccactttgcccgaagcatctgtagttttctgctccagcacctcattgttctttgttccgtaactggaatagaaagtaatctgagcatctgcaataggctttccagtctcagcatccaaagctacaacctcaaaattcttattcgataaaggtaaggtcaacaccttgaagcgagtaagatagagatagttttcagcagtttttcctttcttgtcatcaggtacaatctgcataacataaacacctggttcgccgggcatcagcatactgtatgtactatctgccgactggtaattatccgggcgcaacaaagagaagtgttctgccttcactttacgggcatatttcttataaaaagaggtattgatccgtggcatatcagtttcctctttcaataaagtagtatgaaacaggttcactgtaaatccatccagattacgatgggtcactctcaatttcaaagagtcaccggggtaagtagccttgcttgcagtcaggttaagttgaggttgcaatatgctttctttcagttcacgcaatgcggatatgcgtttgtagtcagggtaaagactaatagcctcatcacaggtttgcaatgcttccggatatttacgcatattacggtaataacgggccttagccagatacgcctctgcacatacatcacgtttagcatagtctttaatgatacggtctaatgcacgtagatattggttcggtgcttcgctctcaccttcttttacagcacggggacgaagcaagacatctccttcacggttacgccaagccatataatccagcatagtcagtacggcagcatcttcccgatcaggcatcttccgataggtatttatcatctgcccataaatgcccataatgtctttcttcaccaaagaatccgtatcaaaccacgagactttctgtaaagcatcgatagcacgtgatgccagcaaatgatacatttcatgatggtagtattcacttgcatctcctaaaatcacaaaaggaatataagtacgtgaagatgtcttcagtaactcagtagagtctttcaaggcttcaccggtatattttattacctgattcacaaacaaattggcactccattcgcggatatccgctggtagagccgtctctcccagattaagcgaagtacgattccgcaattcccagcggttattatctgcataattggcatagatactcgctaccagtgaattcaacactgcacggctgaccggattttgctcatgcaacgcccattgttccaatcctttcagattgacatagaaactatcgggcgtcagtatattctgatacgtattccggcacatataggctttaagcatctgcggggtattcttttcgcgttcccccttccgaaatatctcatccgtcagtttaattacagtttgcggcaaactcttttcctgtgcttgctccacttgcttccacaacttatcaaacgactgcgcatgcagcacaggcacacagccccaaaacgctgccagcaacaccaaactacaaattctttgaattttttccatggatactattctgttagtctttgtactaacaacaaagaaagggaataaagtttaaacaaaagctgttttttatataaaaaagctttcaaagggatataaaaagaagcgagaaatacgttttcaagacgtactcctcgcttcataaagtttagttcaaatgcttttttacttcttcagggtataacccatcatcaacatctcattccgacctacttcggcgagaatgtttctccatgttttaaaaatcttttttttcataaccttaaaaattaaactaatacctaaaaatcaaatacacactcataaaaaggggttaataaattgtagagtaaccccaaacgtgcttatcagcttcgctgatgtgcttaaaaattttctttaacattttcattttgttatcctccttaaaaatcttgttatcctattgaaatcatgttttataacacaaaaataatacctttgttcgaaacttcgagcgatatattacataaaaatatgttttataacatatttcttgatctacatcaaaaataagaagattagacaagaagaaaataagcaagaatggcaggaaatgaaacgaatgacaaggcaggagacaagatggcagaaaaagagtgaggccgcttcccactggaaacagcctcacacaacaacattttacttttcacgatggtgaaaaaaaggactagtcttcacagagtagttttctcttttataatggcatcattaattttatgaatttgagtccatcaaacagagacgccatccgcctaaataatttacaggcttaaagtaccacttattggcagcttccggcactgttccgtcagcttccctcattactatagtacatttcacctcattcatcaaggctgttttaaactttatattgtttatacgataactcaacactggaatctgcttcaacatacagactacgttgctcatttcttcattgctaagttggagaggctcattccatgcatcttcaggatcaagcttgtaaagcatggaaacagcttgctcgtattgtttgttttgcacacaagtcataaacttatccactaaattttctacagctagagtatcttcccgaaccaatccactaacgaaatcattaaattgttcttcagataaatccactacagcctgttttttatccactgattgacaggataaaagattaaaaagagtggcaagtacaaaaacaaaaatcaggtgtttcatcttttattattgaaaagtacaaagaagtaagggcactacttacccttactcttatttatgattcgaatgactccgaattagttagctactgttgcagcgattttacagattacatatacgcggattgtaccccaatcatacttaacatcaaacggaaccttaatctggaaatcacctacggttgtattattattctcatataccagttcaccgaagtaatgagcaacagctcccttaccattctgaatatcattttctgtcggttctataaaattgaacttaatcttcttacttgcagcacttagcaaatctttaaaatcaccagaagtagagttcatatcagttctgatttgatcttccaaacaagagatagacttgataccataatattcatagtagttttctcccttagtaaccgcagtattatcaaagttatgatcacgccaatcggtgaaagtcaatttcaacatagctttagagccgcctgtttcaccatccaagaaattagtttcatgaggatcagctacactaacaggacgcaagaacttcgcaaagaatgtattgttagacaaagcaaatggaacatagtcacaattagctgcatttatctgaatttttgcagtaaaggtttgcttatccgccaattcattgtgatctgcatagttcaagatatccttggcccattcattagtagcgttatccgcattatattctaatgtagaagcattgatagttacaacaggatatttaataagaggagcacctaccttatttgcatacaaagtctttccattattacctactgtaatatcatatttctgaccggaattacctgtaaccggagtcaaagcagttccttgcggatttacgaaagtgaatgttttagtcaacttagcatccgtaaatgcagtataaacagcatcaataccagtaactgtcacatcgttacccataaatgtgttcaagatatcagatttgaattcatcgtctgcaccttcctgtcccacggtttcaacattagcatgaatatcactatagccagttccagctttcggatcatttttggcataccaataagctctgttcttatcagcgtcagccaatgtaccggccggtgttacattacgttttgatggagtccaattcaacgtcacatatacatattgattgatacctttagcagcatcgattactttagtataacgaacgatggctttcatactttccttatttttaaacacttggtaagcttggttattcttaaccatccatttcaatatctgagtttcgttaccgccatcatcttgaatagattgagatacgataccatacttagttgtcgcaactttagaagcaggcaaaattccatcgtattgagtagcatcatttacaccaccatccaatgtaaagttatcatggaaatcctctttagaaatgccttgcttttcgagttgggcaataatttgttcttcaaattgatgccaagtaagtttcagttctttttgagtttctgtacaatttacagtatagatatcagcaaagtcaaaattcggagttaatacaacatcactttctgtaatagtgtcaacaatcttaaatttcatataccctactgctgcaatcttattactcttaatatcagttaaagtaatacgtaccaacggttcacgacctttttcagccttattctgttctgctccaaattcttgctgcaaaccatccttcggcatttgtggtctaagaatagcaccattcaaagcagcatgagcactttccgaagttttattatcacctacatgatagccaaccagttcataagaatatttgaatccgtaactttcagatgtcttatcaaaagcatacttatccagtttcttatgaatatctttagtcaaatcttccggatcaactatttcatcaaaatgagtattgataagcttagataaatcttcaccctcatgattccaaataatctcacgagtagctgtagcatttatagcctcagcagcagtcttatacaaatgtaccgtttcattttgctcgaatggctgacttagagccaatgtcaaattatgagcattcaccgcttttattgcagcataatcagaagtaatgattgtgtcttgcttaccattattataatgagcttccaaagctagtactgtaactttactatcctgttctatatccttaacagtaccattcactaaatgagaatttacagtcagcagacctttgtctcctttaaagttgtcaacaatagcttctactacaccattagctcttgttttatattctttatcagcagaaatataagtcaatttagtgatctttttccaatctgcaatagaaggattcatatgatattcagcaactaagcctggagtcatagaagtagcaactccgaccttaggggcatcggttttaaaatctccgtttgcattaatcttattaacagtcaagacgttataattataggaataagctcccatagcttcgataccttgataatagaaagccggtttaaagattaggctgttcaaacgagcagagagcacacctaacaaagtattcaactgatcgcttacttccttttgcatctcctcattagctttcttcagaagattttcaatttcttctttagaacctaaattggctaactctttcttcatagcgtccaactgcccctgaagggaatcaaacttcttgccagtagcttcttcaaacttcttcaaagcatcaatctgaacctgcaatgcctgatcggcttttgcccgtgcttctacttctgcattcaaatcaacgcctaaatctttcaagtcctctttcattgtattcaggtcactctgaataccatctatcttacctgaaagtacagaaagttcctcatctgttgctacatttttcattaactcatcaatgtaagctttagcctctttgatagcctcagcttttgcgtcgcttgcagctttttcagcaagtgctttaacagctgaagcttcagcaacagctttgtctgcttctgttttagcagcatcagcggcagcctttgcagcatctgcagcaacctgagcagcgtcagcatcagcttgtacaccagctaaagctttttccaagctcgtcttttgtgcgctaagttcagtgttcagatccgtgtacttttgctcaagaccgtcgatatcatcgtcatagtccttgcaagacgtaaatacacccgtagaaaccatcatcaaggctccaaacagggctacactcaaatacttcttgttcataataaaaaactttaaatttataaatttaaaaaaataaagaataataatagtctgatcaataatcttcgtcccattatataccgttactttataggtaac

SEQ ID NO: 6544 - DNA, 6504 bp, Unknown
  gut microbiota DNA sequence
tacttcttatccgggttagccttcagaatcttagcagccaactggatgttaaccatgccgtaatcatcaatgcgggcgctaccaatcttgaagaagatggcacgaggaccggcaacttcgatctccttcactacttccttagttacaggtttagagttagccatggcatttttagcacttgccaggtcagcctgagcctgagccagttcgcttctgtatttattgatttcattgttgatggcattctgatcaacttttgcaccacaagatataaagttcttaccgccaaaagtataagtaacacctgcagtcagagatactgcaccatccgtgtaggcgctgctcttattcccaaacatagaaggagatacttcacctcttgcctcaatattgatatctaaatacttgttcacattgaactgtcccatcaaacctacagaaccgttaatcaaagcatttaatttatcttgctcaccataagcctttgcaaaagtcaatccgggacctgcgaacacagataaagtaaataagcgctccggattatatccgcaaacagagttagacaggttatacatagcatctgcacgcagagtgaaatacttcttgttcttaacctcggcataagtgccttttatttgtccgcgctctgtatacagtgtcgaccataatccggcaacttgtccgcgaactccccagataggattgaacagtttacccactgatacgtggatcaatggcgtgatggcatgtccaaagccataatcaaagttatcaggattaacacatgcctgagctcctacaccagcgcttataaagatattatctttaaatttttcgctgtagtatttctctttagtctgtgcagtagctgtaagagctaatcccgccaacatgatagatactataccaaatttacatttcattgttttttctattttaaaatgattaactctatgctttttctgccagtttctttatttcaaccggaactggaaacacaatccacccgtgaaatatttcatcttttgcagttccacctgtatatgcagatgttttaaaagcaagtaagtggctcccagtgcaaaatcttttgaatcatactctgcaatcattcttaattcaggcgcaaaagttggattataactaatacctgccgctattccattcagcttgtactcttttcttttattatataaataagaaaagtgtacccctatttcttcttttcctatagagatatgcttggtggccgctgcatagaaacgactataatatccgtttccttctgtagaaccaatcgagcctcctccggatgaagtaaatggatctgatgttccgaaaacaacagctggcatatacctccagaattgtccttctttcaaagcccgtaaccggatagaaaaatatctatcctgattcgtgaatcctgaatagccataaggctttaatcctaaagcttctgccttaaacagggtgcaagtataagcaacttccatccacggcaaaatggtaacattcaaaaaataattgtacgtatggtaataccacgtaggaggagttatctccttattcataaagttccctcccagcatcactgttttatccttttgcatctctgccgaaggagcatgcagcaaaccggtagttccataagtcaattgagccgaaagcatggatgatacactgataagcagtgtcgcaataaacattcgctttattctcattatgtataatctcatgctttaggttcaattgcattattaaaaaacaggcctattcaaaatcgataataccaccacctgcgttcaaatcttcaccattgccatgtccatgagtgtgaccaatagcataatttgcagtcagagttgtagagataatctttttaactaccactgttacgtctgtagtttttttgtttttatcaattacatgaacagtatatgatcttcttacttgttttctgaccatactgaagttatcaatttgcttgtatgcaggaactgatatatctacagacagagcagtttttgagtagctgttcttcggtgcaatattagcattgtcttttagaatcatatttttcagtaacattgttacgtaagatttcgtttctgcattcataccagacaaggcagtttcaacagccaaagcaggagtatttccatcataagcggttccacccatgtagtttccttttacagtaactacagcggctgcagagcctgtatagcaaggtttattgatgatttcggcatccaacttaacactgtctactggaacgatggctgactcaaaaccgaaacggaatttggagaagtgattgattttaccaacgaaagtacctgaagtcatatcgtattcagcataattattagcatcagctgaccatacaccggttttttcattttgataaagaacacctaatacatagtcaggttctacagtaacagtaaccggagcctggaacttaacttccagcggttgagagaatacagtaccgctgggttgtccttcgtaagtacgtacagcagcagttgccttttcagtttgtatatcacgagttagtttgattgcttgagcttggccacctacataataaacttgtgtgttagcaggcaatgtgatctggtcggcaacagttttagtctcttgagttgtttcacctgttgtttcatcaataacagcttctgtagatacaagttctactacgagagcctcttctacttttaccactggaatatcaattttagtaatatcctcaatacctaattcttcggcaactttctcgatgtctgctttaacttcaggttctttaatatcttcaactttcgttggctctgctttatctacaggcacttcgatagtttgttcaccacccttactcggatcttcatcagggatatcactgctttcagctttcaatacaacttcaatggaagtcacagaagtagcaccggtctcaaccagtttcacaactgtggcttttgcttgtgcaacataaccagcttttgaaactgtaataatagccaatgttgtaggagtgatatgttcagctgccacttctatattgaaataaccacgattgtcagtagtaagatcagctttgaattcaccaacttcaacttttacagtagcgtcgggcacagcagcatctttttcattggtaacgaagccgcacacatagtatttagacacctttgcagtttcttccttttgcatcaatacggcaactgtagaggttacaatttggtcgccttcaccttcttcagcagcaacaggagctacagcgatggtagcgtaagcgtttttgtaaccttcagctttaagaacagcatagtaagtgcccggctgtaccccttctactgtgaatgtgttattaacaactgcaattgtacatccaggtataactactgacgacaattttacagcagcgctactttcatctgttgcagtaccttttatggtatattttacagttttgtatgtcggagtatcatatcccggatacatagctgcatttactgtgtagacagcagttttgccattttcaatcttttctacatacacagaagttgtgacagtcttgtaatcatctttagtaacagtcagaacattcagcccttctgttgcatctaaagcataagttccatcggtagcagttgtagcaccattaaccttggcaccagacaacggttctccggtagaagcattagaaacgacacctgtaattttgtataccggtttcactgtactcggtgcctctgtcgttaattcttctttttcgtagcagctggcgaacatgccgcagattgctactaacattaacgctaacttcacgttaataccaaacaaacttttctttttcatctcaataaaattaaaattaataaactaataattctgatttaataaaatatgggttaaaactatttgattgcattatattgtcaccgggtgatgagcgatagttcttgtaataatattgctcgtttcctgcattatacgccagccccatgtttctggagggggtaaaccgaggaatatatcctcttcttctatatttataaggtggcaaggcaatctgaaaacgaaagccaccattggacttcgctccttgtgctttcattgcataaaaacctattgaagcataacggaaatgccggataatatctatccgcacccctttttcacccaataaatactgttcaagtttcatagttgtttctacattatattgtggccaatagaaataacctccaactgaccatgtcatttttttctgtgttccaaagtggcaagtaaatccatcccagtatgccgctcctgtatatccaacacgtccttcgattccaaatctattatcacggatgaaacgatggctaattttcatatctaccccataacgttcgctactgaaatgccctactgtaagtgttccccagatattatagggtagtcttaccgtttgtgacacgccaataaaaccaggatgtattttattatacatatctagatatccgtcattataaataggtacttccagttgtgctgtcagtctcattcctttccagaaagaaacttctattgccggtgccagattgaacagaacttgatatatctgcgtaattactaagttctttaatgacaattccggatatattaccacgtccactttaaacaaagaactattctttttttttactttaccagcctttttccagttactgcccaaactatagcctacatcccaatcccgtcgagctacccctggtacactgtcgcctataattggtttataaaataatgaaatttgaggtatgttattatccagaacaacaatccgacatggctttttatccggaaatcaggataaagaaatcttagataaattaaacatacaattagctagtatttagcgaattgcataatactaaacaatatcattactttcctttattgtttcttttttagacattaatattatatatttgttgctggtttgttactatttatacatcattggagcaaatggaccttccttttatttttctagtactcaataaattaaattcaaatagaagtagcagaacagaataaaactcaaatgcgaaatcatttggaaccgatttttgttaccatgttgttaccgtataaacaaatgtgtatattattttttaataaacaggagattctaaacagagatatgaaagaagaactaagaataaaagagccaataaagctaagagtcaagcatctggctaatggcaataagtcgatatatcttgatatgtatatgaatgggaaacgaaaatacgagtttctgaaattatatattatacctgaatataataagtcagacagggtgcgtaatagtgaaacgctaaaattggcaaatgccattaaggctcaaagaattattgaattacaaaatcagagtcacggttttaagatcaataagacatctcacattaaactaaccgattatatacaaagtgtagctgaaaagaagtcggagaatgaagttcgcaaaacggtactacacgctgtagtctatcatcttagacgttacaaccctaatgatatccaattaagcaggatagataaagattatattttgggatttctggattacctaaagacagcaaagcaaactcataccaagaaagagaaattgctgcatgtcaatacccaggtctattattacaaaatgctgaggtattgcctgaattatgcagtatcagaagaactgatatcagctaatcctatgaataaaataaaaaatgaagaaaagccacataaacaccgtacggaaagagaatatctcactattgacgaattgcgaaagctggctcaaacccctttttataatggtttactaaagaaagcttttctcttcagttgtttttgcgggttgaggcattccgatatcatagcgcttacgtggggagacatagaaatggatgatgatggcaattcccgattgtatatcatacaaaagaaaaccaaggaagctatttctttgcctttaagtcaggaagctataaaacagttaccgaagcgagaagatgctaaggaggacgatataatattcaaaaagttaataacattgggaagaactaatgaaattttacctaaatgggctgaacaggccgggattaagaagcatatcacatttcatactgccagacatacccacgcaactatgttgttaactttaggcgtcgatctgtatactgtctccaaactgcttggacataccaacatacaaactacgcagatttatgccaaacttgttgatgagagtaagaaaaaggcaattgacctcatacccaatataacataattgtgaactcagggattcaataataagttggctcaagttactctcactaccctcactttaagtacgaatcgttgatagctaatatattaagtgtgggtgagagtaaaatccgggagtgagagtaagtgggctactctcactctgtctcgtcctttctcacg

SEQ ID NO: 6545 - DNA, 4367 bp, Unknown
  gut microbiota DNA sequence
atgcccgtcgcagccgatttatcacgctgcataccctttacaagtactttttgtcaccgtatggcgctttacaaacaagtcgcgttattcaacactgtccgggctgacaagttcccggtatcggctatccctacccggaaattgcgatgatacgataaagcgagaaatttcatttctttctgaaaatatagtctctattgttgttcttcttttacatcttattttgtttactatccgccgtttgcatcggataactttagcatcactgttcttgatacatacagattgcctgtttgatgctctggtttctccatttggaattgtgagtttcatgccgtgaaactcccggtttcaataggtgaaactaacggtttcatgccttgaaactatcggtttcacggtatgaaacaaaatggtatcaccccatggtgagtgattttattcatgactttaccttgctctcactgcgttccctgcttaggatttataatccaattgagcaagaaacaagaaataactgatattatcctaatttccctccttctgggaggctgcgacatacacttaatagcctgcatttcgctactctttagttctttcttttcatcatcacaactgtcgggtcaaaacaacggattctcagctaactaaaagtacagaatgtcaaaatgattaccaacttgttttttgaagctctgcatattgaaagctagacctcccgaagctaaaaaaacatatcgtatgtttatagaagaggttataaattatcattatacacacgtagaacaagcttgcggaactcttaaataaataataattcgttttttacgaaaggtatatataatcaaaattacgtttgagggtatatttttcatataaatgtcgtatttattagtcatttattaacctctttatcacgcattataagctcatagacaaagaatattagctttatgagaacaattatgcagaaaaagctacattattttattttttcatgtaaaattctttggtattattaaaaatgtgtctatttttgcaccatattttatgtcgtaaagatatgaaaattgaataaataaaatgaggtatagaaactctaacatgagaaagtgtctagctactaaaacaatagcacgatgtgcggcgctctttttattctgtttgcttcctttaaaaggaatttgccaaacaggagaaagtacggtgaacactttagtagaaatgggatttgaaaatgtagggtggacagaagatggcaaagaacgtgtatacgtcttgcaaaattctgcgtatcgtctgaatggagtcggcattggcaaagcggtagacattattcaaaaaatgggtttaccggataaaaagccatgcagaataattgttctagataataatatacctcaaatttctctttactataaaccgataatcggtgacagcgtccctgaagcaagtcgtgcggattgggacgttagttacaatttaggtgactcatggaaactggttcggaaagaaaagagaaaaaatagttctttgtttaaggtggatgtagttgtgtatccggaagtttcattaaagaatctggtgattacgcaggtataccaagtgctttttaacttgtcaccggcagttgaggtttcattctggaagggaatgaagttgaccgcacaggttatttttccggtttataatgacgggtatggtgatttagctgataaagtacgtcctggatttctgacattgcaacaaactgttcgtttaccttataatacatggcttacaggaactgtcggaacatttaatgcaagccggtatggaggtgatttgaaattgcttcatgtgttaaaagccgatgaacgtttttcgtttgaaggacgcataggattaaccgctgcgtatgaatgggatggatttgaattttactatggaacaaagacacgcttgacgtggagtttaggagctaatttttattggcccgaatacaatgttcaggcaagtttgaaaggtgaacaatatctattgggtgaaaaaggcgtaagattcgatttgattcgccacttccgctattgctcgattggcttttatgcaatgaaagcgcaaggggcaaagtcaaatggcggttttagatttcaaatagcgctcccaccttataaatataagagaaaaggatatataccgcgggtgacgccctcaaagaacatggggatagcttataatgcaggcaatgaacgctattattataagggattccgggctaacgcaagcgagaacataatgagtaataatagttttaatccatattttattaaatcagaattactaaatttttaattttattgagatgaaaaagaaaagtttctttaacggctacaatgctaaattagcattagccgtagtggccttaacagggtcattactcactggatgttacaaagatgaaggattggatatcatcgatcccgatcagagtgtaacattgccagctgcccagtacacaattacaggtacaatttacagtgctgaaggtactatcctgactaatgcaacagtcgcatcagataaaggtactgttactcaaaacagcggttctttcactatttcaggcttgtcacacggtgctgtaaaagttacagctacttgcacaggtttcgacaaacaagaaactactgtgaacattgctgaattgaaaccgggacaagctgccgtttatcctgttaatttcgtgttaggcaaaacagctacaaccaaagaagttgaattgagatatgacctcaaagtgacagttttggatgaagacatgaatgtaatcaacgatgctgacgtaactgtatatggtgcaggtgctacagaagtagattatgaaactactcctctgactgccggtgcatataagattaaagcaagcaaagacggatttgtatctactatccaatacatctctttaccgaatgctaagaaagaagtagctattgacttcgcagatccgttcgctactgaagaatatgcaactgaaatcgttttggttaaaactgctacaggaacagtcgttcttgcaggtgacctgaagttcggtaacagatggatgttagcaaaagttgtacgtttgtacaatgacaagggtactcaattctacggtgaaggtaactccaacacttatgcgtataagtttaatgttcctgaaactgaattcgtagaagagactacaaccagagctatttcttctaaattctttagtgctactttcaagatcgttgatgagaatggtattgaaatgactttagttcagaagattgctaaacctacagctagcaccgaaccgggtggagaagaaccgaatgttgaagtgaagattgacttctcattcaatgttgaagttacgagaactaatgctgctcctactcttctaccgacagtagatactttcgatcctatgattgtaaatggaactgatagagttaagcaatatacttatgacattccagtattagtaggtatgaaggctattgatatacaagcaggtaaccttggcaaagaaactgcattaggtgtagcagtagctcaagctatgaaggcagctactgatacaatcgttgctgacggatacaataaagaatttatagaaaagggatacaaattcgaattagcaccttacactgctgttaagagtatcacttctaaacaagaattcgttgatttcactataggagtaacaaaggtaacttctactactattattacttcaggagatgaagaaccggttgaaacgactacagatgtagacatggatctgtctggagtatatgctaaataccaagctgcaggtacagctaccgttaactatgacgatatggaaatcattaaggtttctcacgatcatggtcatgaccacggtcatggtacaggtaacgctggtggtggtatcatcgaagctgaataattctgattgttaagaacaatagatcataattgacccgaaagtataaagtgtatagagaaaggcagatgcagatgaagcgaataatagttacgtacttgtttttatgctgtgcgtttgtactttcggctcaattaacttacggtactacaggtttgttgcatgccccttcggcagaaatgcagaaagataaaacaataatgctgggtgccaactttatgaacaaggagataactcctcctacgtggtactatcatacgtacaactattacctgaatgtgacctttttcccctggttggaagtggcatacacatgcacactttttaaagcggaagcactgggcttgaagccttacggttactcgggttttacgaatcaggacagatatttctctgtccgactgcgagctttgaaagaagggcaattctggaa

SEQ ID NO: 6546 - DNA, 1584 bp, Unknown
  gut microbiota DNA sequence
tacacttttcaaagcggaagcactgggcttgaagccttacggttactcaggttttacgaatcaggacagatatttctctgtccgactgcgagctttgaaagaagggcaattctggaagtatatgccggctgtggttctgggaacatcagacccgtttacttcttccggaggtggtgttgttggttcatcaagcggaaacggatatttcagccgtttctatatagctgcaaccaaacatttgccgataggaacagaagaaatcggagtacacctctcttatttatataatcagagaaaggactacaaactgaacggaatagcggcgggtatcacttacaatcccagtttcgcaccggatttgagggtgatagcggaatatgattcgaaagattttgcgttaggtgccacctatttgttgttcaaccatttgcatttacaggtggaattacaacgaatgcaatatttcactggtggattgatgttcaggttcaacctgaaataagagaaatggtgaagaatgaataagtaataaagagttaaatctattaaaaactaaaaaacaatgaaaagtaaattagtaatattatctttactgttgtcaggggcaaccattgccaatgcacagactaaagaaaagtactacagtgaaagctggaaggacaatttctttatcagtgtaggcgtgggtggacaagttgtgaccaaccccagcaactttgattatggattcggtgaatccataacacctctggtgaatatatcactgggaaaattcttcagcccggtatggggtatccgtggtcaggttgccggatggtctggtaaacttcatactcaatacccttttgaaaacgtaggcaaagacgagaattggtataactataagaagaagttcgttgcattgaatgctgatgcaatgttgaacctgactaacctcttctgtggttacaaagaaggccgtaagtttgagtttatgttctttgtaggtcctacattgaatatctcaaattcttatagtacttggaatcttgcaacaaagaccactgaggttactaacgctgatggttctttgacttataagcaagaactggatccttctaagagttatcctaaagatgataaggtacgtctgttggttggcgcaagcttaggtttgggtgctaaatacaacattgaccagaaatgggctatcgacctcgaagctcgtggtacagtatctccttctgttttcggttctgtaagcgatgctaaaactgaaggtattgtaggcttaactgtaggtgcaacctatactttcggtggcaagaagttcgtagcttgtgacgcgaaagttgatcagaatgctatcaacaacgaaatcaataagtacagaagcgaattggcacaagctcaggctgacctggctaacgctaagaacgctttggctaacgctaagcctgtaactaaggaagtagtgaaggaaattgaagttgccggtcctcgtgccatcttcttcaagattggtagcgctcgcatcgatgattacggtatggttaacatccagttggctgctaagattctgaaggctaacccggataagaagta

SEQ ID NO: 6547 - DNA, 3601 bp, Unknown
  gut microbiota DNA sequence
cgcatggcgggtgtttctgccggaactgtggaccgcgtgttgcacaatcggggagatgtttctgctgccagcagggagaaggttcaaaaagtgcttgatgagatagactatcatcctaatatgtttgccattggtctggcagccaagaagcgctaccgtgttctgtgtattataccttattatgtggaacatgactattggtattccgttgcagaaggtatcaaccgtgccgcacaagagttgcgtccttttaatgtaagcgtggactttttgtgctaccatcatgccgaccggctttcttatgaaaaagcctgcgcaaagctccgcaaagaaatagtggatgccgtattgatcgcccccaatttccgtgaagagacaatgtcgctgacatcttatctggaagggaaaaagataccctacgcatttgtcgactttaatatagaagacacccatgcactctgctacatcggccaggactcccaaacaagcgggtatatggctgctaaaatcctgatgcgcaagtataaggaaggacaggaactgatactatttcttaataataaaaagaatagtccggcagaaatacagatgcaacgacgcatggacggtttcatgaattttattgcacagaaacatgagaatctggtggttcatgatgtagtactgaataaagaagatgatgaagccaaccgccggacattggaagatttctttgccgcacatcccaaggcagtattaggagccgtttttaactcacgtgtctaccaggtggcaggatatctacaggagacaggacaccatttggaaggactagttggatacgaccttctgcccaagaacgtggagtacctgaaatccggcgaagtaaattatctcatcggacaacgaccgggactgcaaggatactgtggggtaaaagctctgtgcgaccatgtcgtattcaaacgtccggtgactggtgtaaagtatatgcctatcgacatcctgatgaaagaaaacatcaatttctattttgaatttgaataaacatcataatatcaatcactttaaaaacgatttttaagcatgaaagcattaaacaaacagaccgctcccaaggctcagcgcccggaacgtatcattcaattcggtgaaggaaacttcttacgtgcatttatcgactggattatttataacatgaacgaaaaaactgacttcaatagcagtgttgtagtagttcaacccatcgacaaaggtatggtagacatgctgaatgcacaggatgatctttatcacgtaaacctgcaaggattggataaaggagaaactgtcaatagcctgacaatgatcgacgttatcagccgtgcactgaatccttacactcagaacaatgaattcatgaagttggctgagcaaccggaaatgcgtttcgtaatctccaacactacggaagccggtatcgctttcgatccctcctgcaaactgactgacgctccggcttcttcttatccgggcaaactgactcaactactgtatcatcgcttcaagacattcaacggtgataagagcaaaggtctgattattttcccatgcgaacttatcttcctgaacggtcacaaactgaaagaaaccatctaccaatatatcgaattatggcaattgggggatgaattcaagacttggtttgaagaagcatgtggtgtgtacgctacgcttgttgaccgtattgttccgggattcccgcgcaaggatattgcagcaatcaaggaaaaattgcagtatgatgataatttggtggtacaggctgaaatcttccacctctgggtcatcgaagccccgcaggagattgccaaagaattccctgctgacaaggctggtttgaatgtattgttcgttccttctgaagcaccgtatcatgaaagaaaagtaacgttgctgaatggccctcacactgttctttctccggtagcttacttgtcgggcgtaaacattgtgcgtgatgcttgtcaacatccggttattggtcagtacatcaacaaggtaatgttcgatgagttgatggaaacattgaacttgccgaaagatgagttgaagaagtttgcggaagatgtattggagcgtttcaacaacccgtttgttgaccatgctgttaccagcattatgctgaactctttcccgaaatatgaaactcgtgacctgcctggcttgaagacttatctgcaacgcaaaggtgaattgcctaagggactggttctcggtttggccgctattattacttattataaaggcggtgttcgtgaagacggtgctgagatcaccccgaacgatgctccggaaatcatgcaattactgaaagacctgtgggcaacaggcgatacccagaaagtaaccgaaggtgtacttgctgcaacttctatctggggcgaagatttgaataatatcccgggacttaccgctgctgtgaaagctgatctggattctatccaagaaaaaggtatgctggaaacagtaaagggaattctttaattaatctacaagtatcacaaaggagatagggcggagcagaggcttcgccctatttttttatgttaagaagcataactatgcattttttattccattaatttcttcttattattttctttcactaacttgtgaacattaactaaaaacaaactgctatgagaaaggggcgatgtattattctcattggatctttatttccattatgtattcatgggcaaatcttaaacactccttacaatcttcctcgctcaggagaccgattaatgaagtgtcaaatagctaccattcctcccagtaaaagtggaatccaacaaatttggaattttgcgaatattaagtatcaagaggcaaattatgaattaaaatatgaaattcaaggtagtgatactattattggcatcgaacatcgtacgatatactattatcgaaattctggtgattctcttttttgtatgggatttgaaaatccaacgacctttataagctatcaacagccagaattattgtttgtctatccaatgtttcaaggacgaactatcagtaaatattttgaaggtaaaggcaattattgcaatcactttaatatacacttatgtggaaaagttatagtgaaagccgatgcttctggtatattaatattgcctgggggagatacaatacaaaatgtattacgtacttacactcataaatatgtccatcagaagatgacttctcaaaaagagaaaaataaggatttatctttagaggcttttcctttttctcttagtaaagatagtattgattatttactagcaaatgactctattcatttagaaatagaaacatggcattggtatgccgtcggaaaccgatatcctctatttgaaacagtaaaaagtactgtatgtaaattagggacttcccatgaacattttagtacttcctttgcctatttacctcatgaacaaaattatgacttaccgtatgattcggagaatgaagaatgtaagaacaggaatgaggagcaaaataggaaaatgcaaaattcattaaatagacacgatactcgcagtgaaataataaattataatttatatattaataaagaaggaaatat

SEQ ID NO: 6548 - DNA, 475 bp, Unknown
  gut microbiota DNA sequence
agagtcgcgcaccaagcgggcactaacagcggggcagatgcgacagttagaaactacagaattctgtgcgttgtcgctaccgcaacagcgtgtacttgcttgcttcatgctgatgttcatgcttcgcggtatgcctttcatcgacctggcacatctgcggaaacagaacttgcaaggcaggcgtatcgtctaccgacgtcacaagacaggtaaattgatggtagtggacgtgccgccagacgcattccggttgctacaaaagtacagaaacagggctgaatcggagtatttgttcccgatactgaatgaggcatctccgggtaaagaacggtatcatctttatcaggatacactgcgccgcttcaaccgggaactggcacggttgatgaagaaactcctgcccggcatttccgtgagttcgtataccgcccgccatacgtgggcgacgctggcttatcatagtggaacacctctt

SEQ ID NO: 6549 - DNA, 1646 bp, Unknown
  gut microbiota DNA sequence
gttccaagagaacttggtaaatatgtattagaaggatagctttgctctaaatttatttttcgatgcctaccaggagcaactacgactcaggtacgtctcgggtatagccagaatgataaagggatagtctattccgattcataaaaattgagtccttataggaatgaactttcaggaatagaatacttcctccccttcaggaagtagctgtgagggcaatttcagatggctacaccctttacttcggatggctacacccttttgacatgatagctacaccctttatagcaaaaggtgtagccctgcaaaagggctacttaacccacaagaaaacgggttacaattcttccatataaatttaaggagatatgcagtagttcaccgtgtttttacactttaaccatgtattcctcagatattctttttagtaagtaatgcaaagcacgaaaaccaaacgattaagtgaagttttggaagtttttgtcttggtatattaaaaaaaactatatatttgtatccaattctaaatctaactgcgtatgaaactgattgcagagagtggttcgacaagaactgaatgggctttggttgaagacaatcacctgatacaacgtgtttttacagagggacttaatcctttcttccaaacccgaagagagatcagtcggagtgtgcgtttaggtttacccgaaacttttttcaaaagaaaactggagcaagtatattattatggagccggttgtacttcttatgagaaaaagaatgtattgggtgcctcattagtagcacagttcaaaactccgatccaagtagagagtgacttacttgccgccgcccgtggtctgtttaaatgtgaagcaggaattgcctgcattttaggcaccggatctaattcttgcttttacaacggaaagattattgtaaaaaatgtcagagcaggcggatatatattgggagatgaaggtagtggtgctgtattaggcaagcattttctttcggatgtactaaagggcttggctcccaaagaggtaatggctgatttctttgagaaattccgtattagccccaatgaagtaatggagtctgtttataatcgcccgtttcctaatcgttttctatccactatttcttatttcctggcggattatacgagtgatgattatgtttacgaactaataatcaccaatttgcgcaacttcttcacaaggaatgtatgccaatatgattataagaactatccaatccgctttgtaggttcattagcctatagctatgccccgattctaagagaagtcgccggtgactttggcattgagttggacgtgattgaagaaactcccatgaatggactgattgacttccactcattaaatattgaagaaccttaatatttgtatataaagcatatcgtagaagttgcaaaccttctcgaagagcaaatatataaatataaagttaaataaatgcaaaggaatgttcttgatattaaattataatatatctttgctaagaagaaacgaagaaatggcgtttcatcacctttgttaataacgagtttatctcttaaaacaaccaactaaatagtaacagtatttagtgtattttaatttttaaccaacaatgtatttaccaagttctcttggaac

SEQ ID NO: 6550 - DNA, 1348 bp, Unknown
  gut microbiota DNA sequence
ttcgttgaatggattcaattctgttacatagcgataatcggtttcggcttcttcctgctgtcccgctgcttctttcactttaccgcggagcagtaatgcagcttcttcatcgggatcttgggagagtatagcgtcgatatcttcggtagcttccttgtattgctgcatcttgattaaggcttcggcacgcagcaggcgggcttcggtgaaatcgtctttcagtacaatggctttggtgagatgggcgatgctcatgataccgtcgtccataccttgcttggctctgcccagaagatagtgtgccatggcatttccttcttctatttcaatagctttttgtgcggcgtctgccattgcctgatagtcttcttgcaggtagcatacgttggcaagggtgaggaaagtggaggtgtggtccggttcctgttttgccatgcgttccagcagttcatgcgcttcgctgagggcattggtttgaatgtaaacctggctcagatagctcatggtttcaaagtcttcctgaagggcgagggcttccgtgaagcatttgattgcataatcgggacgccccatgcgttgtgcacgcatgccgtcatacttgaatatctcgaagttcttttgatcgtttttctgtttttcagtttccggtttctcttgtttgccggagaagaaagatttaaagaatcccataatctgtatttcttaggtgttttgtttttattctttttgcaaacttacataaaaatcttgtttccataccaagaactccgtctaaaaagaaaaaacatccgtgttattattgatggtatcatttaaaatttgttcttttgcgatacatttaccaattatattaattaatcatcgtttctaaattaaaaacacaagaatgaaaaagattttcatgaagtgggccttctttatgttatgtatggccgtgacaatgcctgcaatggctcagtttaatgtaaaagcactgaaaggtgcggctaaagctgttaaagctgttactctgactgatgctcagatggcagaatatgtaaaagagtatatcgactggatggatacacataatcaggtatgtgccgacgataatgagtatacaattcgtctgaaaaagctgactgaaggcttgacggatgtagagggaattcctttgaacttcaaagtttattatgtgatagatgtcaatgcatttgcttgtgctgacggtagtgtgcgcattttctcgtctttgatggatatcatgacggatgatgaattgctgggcgtaatcggtcatgaagtaggtcacgtggcacacaaggactctaagaatgggttccgtacggcattgctgacttcagctttg

SEQ ID NO: 6551 - DNA, 981 bp, Unknown
  gut microbiota DNA sequence
aaagaaaagataacaggactataaattatagaaaaaggttgtgccaacgttttgacacaacccctttctatattctgaattatctggattacttctttaccagtaccatcaccagtgtattatccgcatcataaagtccgatgccaccaccggccagtttaccgaaagacttcacttcattcagtgctttcatcacacgaccttctacttccatatccggacaagccatcatagtgctgataagttgcgagaaagaaattgcagaactgttctcgttgtctgcaacaaatccgccattaataagattacaaccggcattgccgtgtattctcttttcagaaagattgaactcaataaacggctgtttctccataccttcgggaatagactgaccaccggcttcggaaataatccacttaccactcaaatctgatagtttcactgtaggagctttcttttgtaatacaataataggacgattggatgaaccgcacaaagcgatgttctccttacctaactttttatacttcttcacttgtcccaaagcagacaacacgttttgttccagcgtcatatccggacaagccatacgcgtacttgctatagctccaagatcaattgtaccgggtttagcgttcacatcgaacgaacccatcatacgattacaaccgctgttaccgaatacttttccggtattcgtatcaaaaccgataaaagggaattcctgattgggagcaggcactacggcagcgccgtttatttcaataatattccattcaccattgatggaagataatgtcgcagcatctttggaagagcgacaagatgacagagctatcaaagctcctgccatacaaagagaaactattactttcttcattgttattcgttgtttaagttaattttcgcggggcaaatatatacaaaataacccaaatacaagcagtttgtttagaaatagaagctttttataaaaagtat

SEQ ID NO: 6552 - DNA, 1041 bp, Unknown
  gut microbiota DNA sequence
tgcctctccgttacgcacatcttccaggctgattgtggctaccggatatttctgtgcaaaccctcgcgtgccgcagatggtgtgcgaacggctgtaagggcgtggatgaacggtgcagtattgcagttggatggtctttcccttgacggtatggatgagggtggtgtttatgtctcccaacaggtaagcctgttgtgcttcgggagattctttgccgaaagtgcggcgggcatattccgtcattcccacctggtgggtggacatggatacaaggtaattcaaacggtcgccccggtggatattcaggatctggcatacaggacctaagccgtgagtgggataggggtttccggtgtgttccatacagtaagccttgttccagtggttatggaagccgccttggttttcatcgctgaagtacatggagcgcaggtcgtgtatataagcaccttccacgtgcatgatttcaccgaacaggccttgtcttgccatgttcagcgtggtcagggcaaaggcatcatagcaacagttttccagcatgatgcagtggcggcgggtgcgttcggcggtgtctaccagttgccagcactcggctacggtcatggcggcgggcacttcgatggcaacatgcttaccttgctccatggcgtaggtggccataggggcatgcgtcagccagtccgtacatatgatgatgaggtcgatatcagggttgcaacacatctgttgccagccgttttctccggcataaccggttgcggcgggatgtccgccttttgtcagtagggcttgtccttttgccaggtttccggggcgtatctcacacaaagctttgatctctacgtgttttatgagcatataacgctccaatgtgagtaatccgcgattgcctaagcctatgagtccgatgcgtacaacgggaataggaggatgagccaggcccaggacatgagtaggaggttcgtttttcattgaaatagtgtataggttaaattgaaattgctacaaaggatgagtccacttattgagtgactctaaagt

SEQ ID NO: 6553 - DNA, 401 bp, Unknown
  gut microbiota DNA sequence
caaacattccgtcaagtttgttgtaaatttcagacggccagctgtataactgcgatgaaccatatcctccaaacccggttcataaatgggaataatgcctttcttcaaattttctatcttgctttcctgcacatccacacaagtcacgtcaatgcccatctccgagaaacaagtacccgtcaccaaaccgacataaccggtgccaactattgctatcttcatattatcttagtttacttttaattacaattgataaaaagaacgataccagtctatcgtttcccgaactccctctttaatcggcttgtcaggcttgaatcctaattcactctgcaaagccgaagtatccgcattcgtttggtaaacatcccccggctgcatcggaaggtatattttctctg

SEQ ID NO: 6554 - DNA, 321 bp, Unknown
  gut microbiota DNA sequence
aaaatcaacaaggagatagacaactgctatgagaacatagactttgaggaagaagaacttgaacactaccaattcctgtataataaattttctttcttggagggtattattggcgatgaatcgaattcaaagaattatgaactgatttacacaaaatattaataaacaaaagattatgaagatacaatatatgagcgacctgcatttggaattcagcgataacagcaggtggatgaaacataatgaattacctgtaactggcgatgttctggttcttgccggagatatattctatttgaaaaacaaggttgcacctttgag

SEQ ID NO: 6555 - DNA, 33139 bp, Unknown
  gut microbiota DNA sequence
tgagtcgtgaagaatataagtcaatcgagccggattacgacgattatcccacaatactaacactgttataacatcatctgcaaaataataaaatacagaataattgggaattaccaccacataacgaacgtgaggatattctgtcatatgccccaacaaaggattaattgcaattcgatttattgaaactattatctgtcgaaaaagagattcactgtatttggatgtaccattacgttcatcataaaactcaaagatttctctcatttccagaagtaccgcttctgtccattctactttccgctccatcgacttagcctatattccatttcttcagtagacacaacctctttacactgcatctgttccaaagcattatcaatcttatcacgcagttcagaagaaaagtatagaacattatccggacaacgattatttaataatgcctcaatgtcttctaatagccgttcatcgtttaccgccattaggcgttgaaacaaaagttgtttacgttctcctgtcgtcataaagtaccgtattaattacatactgcaaatatagagttttttatttatgattcatttatttgatgcttttttatatacacttctgttgttctttctttaaagtttcacatcttattatcttataaagacacaaatacattacattccagtatgtatctcttttaatattataaaaacattttcagatacgtccattgttcggactaactttttttataactttgccgcagttttggtttcacttcccctacgctacggggtaagtgatgaaaagggaatcaggtgaaactcctgaacagacccgctgctgtaagttccttccaagtcttggaacactctgtgccactgtccgtaagttggatgggaaggcgttctaagatggaataagtcagaagacctgccagaaacaacatagttttaatgctttcgggaaataaagcaacaaaacatcgagtctggcattctttattctgtccataaagaaatcatttctccttgtacacatattcccgaaggtaagtcataaataccgttaacaaggatataaatgaaaaagattgtatgtgtactgttattatttacctgcttgtcacagataagtataatagcacagaataaattcactctatcagggaaagtcacagaccaacatggtgcacctttagcattagcaaccattgctattgagaattcttcatccggaacctatacagatgataatggcaggtactccttgaaagtttcacctggcaaacgcacattggttgtatccttagtaggctatcaaactgtaaaaaacaccctggatattcagcaggacaaagtactcaacttcacattacaagaaagtgctgttactttgaactccgttgaggtttatggaaagacacagacacagaaagtgaaagaaggagttttttccgtcaatgctctcgatataaaacctatagtaaattcgctaaataacctcaatgacctggtaaaccgtacaacaggcattaaggtgagagaagaaggaggtgtcggttcagactttgatttgtctataaatggtttatctggcaattctattcgctactttttagatggaatgccgttggacactaaaggaagtggagtttcacttgctaatcttccggtgaatattatagaccggattgaaatatataaaggtgtggttcctgccagcttgggaacggatgcattgggtggtgccatcaatattataaccaaacaagaaaagaaaaattatctggatgtctcttatggcatcggttcattccatacgcacaaagcagacttgaatgcacaatttgtagaacctaaaacaggactgattatccgacctactgtgggagtaaattattcaaagaatgattataggatgaaagacgtgcaaatgcgggatgagagtggtgacaatttcatatatggtaatcctaaacgcttccatgatgactacttctccttactggggcaaatagaggtaggagttgccaacaagtcatgggcagatgcattcttcgtttccgcttcctattccaagacagataaagaattacagacggggtctgttcaagacaaagtatatggaatggcagaaaagaactcagatgcctggaatatctcagcacattaccagaagcgtaatttcattctgaagaatatgcagctgaatgctgctctctcccagacttgggatcactcattgactgtggacaccacctaccgaaaatattactgggatggtggatacatagatggccagcgtaatgaaattatgggcaaagaacgatctatgcgtcattataagcgtccactgactgtggtccgtgccaatctggattataaactgaacaatcatcataactttaacttgaactatcatctgagtcgtaccggcaacgaccgttatgatgatttagataccactttcgagccatccaacgatgttgtgaccaaacatatcctaggcttttcctacaatcagtcgttattggatggcaagatggagaatgtgtttttcataaaggattatatcaatcacccgaatatccggcagaccgatcagcctagcgtgactggttctgaagcggtacaaggttccacaaccaagaactatctaggctacggtgtcggacttcggtacactgtagcggaagctttagccgtgaaagtgtcctatgagcatagtgtgagacttcccatcgcacgcgaactattgggaaacggtactaatatctacgccaacgtagcactgaaaccggaaaacagtgataacttcaatgccggtctattcggtacgtggcatccgggtaccggacataccttctactacgaagcaagcggattcttccgcaaggttgacaactatattcagagcgaagttgctgaaaaagaaggtacaatgaaatataccaatgtacccgcagtccacattaagggtgtggaaggagaggtacgttacgattggcaaggtaagctgcaacttgccagcaacgtcagctatcaagatgcccgcgaccaacagaagtacaagaatggcggaaaaccatcggctacctacaacaaccgtgtacccaaccgtccttggttgtttggtagtgcggaagcatactatactttccgtaacgtggcattaccagaaagcaagctacgcctaggttgcacttatcagtggatacactggtattaccttttgtgggaggcttatggtgccactgaaggcaaggcacgcattccggctcaacatatctgcaatgctgatattacctactcatggaaacgcggacgctacaacattgctttagagtgtaccaatttcctcgacaagacagcctatgataactataagttgcaaaaacccggacgtgctttttttgccaagttccgattattcattaactaatcattaataattattcaagatgaaaaaattcaaatttacactcttggcctttatggcagccatgatggcaatctcatttacggcttgttctgatgatgatcctactcctactccagatccgggtatcaatgaaggtgattatcacttcgacctttatgtaaccgtaggtaagcatggcggtatgagcagtaaaaacactactattgtcactagtaccagtacattgacggctgatagaggtgtcatcaccgttgaaggagtaggatcggaactcggagattactctatggagtctatctcaaaagggaaatactattatcaaatccctggttccgctgaccgcttcgtaaagtatcagatcaagaataataaaatcgatgtgattgcagagcgccctttcaagactaatacttataaagtacgtgcctacacacatgcctggattgacgataacacactcgttatcatatctaccaacggcgacaagaataaagttctttatacgaaactgaaagcagacgatttaactatccttgatgaaggtgaagtaactatacccgctcctaccgactggaaaaagctgacaagttcaggtattctcacctaccgcaagtcagacaataaattatattacttctactactggaaagaaaaggcaggccaaactgttgcaagtgaacaagagcctaattttcatgcagccatcatcaacccatcaactatgaaggtggaaaaagatattatttctcccgttgaaggtgaaatggcaggaagtgcttacggagaattgatgcaggactgtgtagcgtatgacgaagctggtaatctttatctggcttgtttccatgaagaagcaagcggtcttgaaaaaggaatgttgctgcgtatcaaagcgggtgaaacagagtttgatacctcttacaatggttattccaatgcagatggtaagttgatgactgttcagtatttaggaaataacaaagctctggtatatgctcgcaacgataatgcacctattagcgacaaagctgctgctgcaggaataaagaaacctacagttattgatgcattctcacattactatgccatcattgaccttactactggaaccaaaactcgcctgagctacaatggcaaagaaattgcttacagcggtggccgcttctcgcaacgttccgttatctttaacgataaagcctacatcggtgtagatacagaagaggatgccaatgctattatctatatctacgacattaagaccggtaccgtagaaaagggagcagaagtggaaggtaaattctacttcgacatgatacgtgtcgttgaaaacgattaatcatcatatattcaggtacaggttatacgataacaagaatcattaatctctttcttgtaattttcgtataatctgtacttaaaatataaattgacacataacctttttcaaaatatttaaaaagcatcatttctaccttatgaaaaagctatttatccttttatttctttgcaacctcactttcctatgctctgcgcacgagggggaaaacttcgtagcaagcgatatgctcgcaagtatgaaacccggtgataaagccgccctgctgatggtacacttcggtactacacacgatgatacccgtgccctgactattgacgctatcaatgcgaaagcccgcgaagcattccctgatctggaaatgcgtgaagcctttacttcccgtatcattatccgtcgtcttaaagcacgcggcatcgagaaactaactccgctagatgctatgctccgtctgcgtagtgaaggttacacacatgttattgtgcaaagttcgaacatcattgacggcgtagaaatggagtcacttcgtcgagatatggagagcgtacaacctttcttcaaggaaatccgtatcggcactcccttgctttattcagtggaagatgcagaaaaggtagttgaaatattgaataatagactcaccaatacgcaaaatcaaaaagcatccgctaagaaaggtgagcatttcgtacttgtcggtcatggcacctatactcccagcaccgccatttacagccagatggactatatgctgaaagctaacggactgagtaacttccacgtaggtaccatcgaaggatatccttcatttgagacaatgctggcacagttgaaagccggaaaggcgaaacaagttaccttggtaccatttatgttcgtagccggagatcatgccaagaatgacatcgccgaagattggaaaaaagcactcgaaaaagaaggctacaccgtgaatgtccgtatggaaggactgggacaagtacccgagatacaggaaattttcatcaaccatatccgctttatgctgaaacatcgcatgctgaatatcatggaaaagaaagccggatatgctgccggaaaagatgtggaataacagatgaatatcattaccaaattaatgtactctttacataggatactgggcacactgctttgtatcctatttcttatgtggttcctctccgcttttgtgatgatgtaccaccgctttccacgtgtcagtgcaaaggaaaaactacaaaagcaagaattactctccacctcaggcgactcactgcctgatatcacttctgtcctttcacgtctgcccaaaggagaaaaagtgagaaaactcaccttagaccgcagcctggggcaaacaatcttccatatccgtaccaacaaaggaatacatgaacttcacctggacccatcggacacattgttgattatcgacaatgaacatatccggcaaatagcctccttatggtcctcctcccccattgcatacattgacactctacatacactggatcagtggatacctttcggtgaactgaaaaaggaaatgcccatttataagatacattttgctgatgatgcaaaaacacagctttacataagttcacaaagcggagaagtattacaactttccaacaggaacgaacgcttctgggcatggctgggagctattccccattgggtatatttcacttggctacggcaagacgccacattgtggagtaaaaccgttatttggttatccggcataggttgccttatggtaattgcagggatatgggttacagtcgacgtatggcacaggacacgtaagagtcatcgccaagggttctcaccttaccggaagaaatggtatcattggcactatgtcagtggcatttttttcggaatattcgtattgacctttactttcagtggcatgatgtccgttgccgacattccggaatggattcataaaccggctttgaagagcagtccgctacgtacactgcaagcaaaggcgccccaaccagaagattacacgctggattatcgcaccgtgattaccagtttcccgaaagttcggcagatagaatggagcaatttccggaaacatccctactataccattaaagatggaaagggagaacaatatattgatgctacggatagtgtaccacatactctgcaacttcaggaaaaagagattcgggaaggtgtggaaagtgtatatgctgccgacagtattccggcacatcaacgtccggagatacacatgacactattgaaccattttgaaacttattaccgcgatatgagtagtatgtatcgtggacgaagtcaacttcccgtctggaaaataacggtggatgatcctgaccggagtgttttctatattcatccagaaacaggtatcatccgttatgtcaatacctcttcccgttggaaatactggagttatacggctatgcaccggatgcgtcttccgggcttgaattcaaataccactttacgtaagacagtactatggatattactactgggtggaacagtaacttcagtaaccggtatagtgttgagcataaattatgttcgaagaaaatgtcgcaaaaaacaaaaacgcttactatgaacaagaaaagaacaggaataatccttggctgcataatcgccgtggtcatcgtttgctttgcagcctacaattattggtgggcacctacccgcatcctcatcatcaatcccctgcccgcacaagcagcagacatcgcactgaataatgattgcagccatatccgcgtgaagtgcatcaagatggaggaagtgaaagacctttccggctatgatgccatcatgatgtacggacgcggattgtttctggacgaaacacaagtagcggaactggaacgggtagctgccaaaggtattccagtttttaccaatgcgctaagacacttcaacttcatcgtcaaccacaatatcactcctgaacaacaggagaccctgcaaatgtatttccaaaatgcttgcagacagaactacaggaatgctttgcgctatctgcgacacatctccactccccatcgactgggtgaccgttcttttgaaaatcccatagaattacccaacaacctgttttatcatcaggaatacggccaatacttcaaaactccacaagagttgactgaatatctgaaacaaaaacaactctaccacgaaggtgggcgcagtcttgcttttatctcaggtatcagttttccggtggaaggtacccgcgcccatgtagataccctgatctcccgtctgacacaggcaggtttcaacatttatcccatcaccggtagcggtaaggggcgcgaagacctgatacgtacccttcatcccgacggattgatttatctgcctatgggacgtctgggaaatgactcgctcattaactggttacatcaggaaaatattcccctcttcatgcctttcccactggtacaaccgcgtgaagaatggctgaaccccaacgtacctgtaagtggaggtacactgacggcacgtgtagtagtacccgaaatagacggaggcatggcccccttatgtatttccacacaaaatgagaatgaagaaggatatattctgcacacaccggaaccggaacggatggatgccttagttaaacatatcagcaaatatatgtcccttcgcgacaaatccaacaaggacaaacgcgtcgccatctgttacttcaagacacccggtaaagatgccttgctggcaagcggcatggaggtgattccttctctttataacttcctgaaacgcttgcgcaatgaaggatataacgtaagcaacctgcctgccaccgtagaagaattcggaaacaggatataccgtgacggctctgtcatgggttcgtatgccaaaggggcacaggaacaattcctgaaaacagcacaccctgtatggctgtctaccggacaatatgaaacctgggcaaaagaagtgatcctgccggaaaagtacaaggaagtgactgaccgttatggagacgctcccggcaatttattagccacgaaagacagtatcgccattgcctgcctgcgattcggcaatgtgttattgtttccacaaccccgtccggcattgggagacgatgatttcaaactggtacatggcatgcccgtagcgccgcctcacagttatctggcaccttatctgtatatgcagaaaggttttaaagcggatgcactgatacacttcggtacacatggaaacctggaatataccccgggaaagaatgtgggtttatcacaagcagactggtcggaagcactggtaggtaatctgccgcatttctatttctatactacgggaaacgtaggagaaggtattatagccaaacggcgtacacatgctgtactcgtcactcatctgactccgccttatgcggaaagtggcatgagacagcgatataaccaattgttggaagatattcataaacttctggatgaaggaacggaaggacatcgcatgctgggaatgcgtgtcaagaaagagactgttcgtctgggacttcaccgggacctggaactggattccgtaccggacaaaccctatactgccgaagaactggaacgtctggatgcctttaccgaagaaatagctaatgagaagatgctgggtgcatactacacgatgggtgaaccttattcggaacgtgacttactgcaaaccacccttgccgtcagcgcggatgccctggcttacgaaacggccaaagccgaccgggataaaggcaagattactacggaacaattgcaagactttacatatatagcccaccattatctgccaacggcaaagaaacgactgacggctatgttacagaatccgcctcgtgatacggctgccattgccccggaccttcgccccgcattgcgttatcgcgaacaactaatagcttctaccgccaatgaattcaacgcaatggtgcgcggcctgaatggaggaacagttctgcctgctccgggtggagatccggtattgaatcctaatgtattgcccacaggaagaaatatgtatagcgtaaatgctgaaacaacccctaatccacgtgcatgggaagacggaaaacgactggtggaagcaaccctgaaacaatataccggcaaacatggagaatatccgcggaaagtgagttatactttctgggcgggtgaatttatcacaaccgaaggagccacgctggcacaagtcttctggatgttgggcgtggagcctgtacgcgatggacaaggacgtgtagtagatttgagacttgtgcccagcgaagaactggggcgtccacgtattaatgtagtggtacaagtctcaggacagcttcgcgacatagccggatcacgtctgaagttactgacggatgcggttcgcctggcgtcggaagcaaaggacgaaacatatcccaactatgtggcatcgggaacagtgctacaggaaaagttactggtggaaaaagggacttccccaaaacgtgcacgggaaatgtctgtaatgcgtgtattcggtcctgttaatagtggatacagtacaggaatcatgggatataccgagcatagtggatcatgggaggatgaaaaggaaatcacccaaggatatctcaataatatgggtgccgcttatggtgatgaagataactggggagaggttcagaaagatttgtttgcctctgccctctccgaaacggatgtagtgattcagccgcggcagagtaatacgtggggacctatttcattggaccacgtatatgaattcaccggcggattatctcttactgtaaaaacactgacgggtaaagaaccggatgcttatatggccgattaccgtaaccgtaccaaccgccgtatgcaggagaccaaagaggcgattgctgtggagacgcgggctacgatactgaatccgacattcatacaagaacggatgaaaggcggtgcaggttcggcacaaatgttcggagagattttccgcaatatctttggctggcatgtaatgcgtccgtcggcaatgaataaggagatttttaatgacctgtaccggatgtacattcaggatgaaaataagctcggaatacaagattattttctccgggtgaatccggcatcctatcaggctatgactgcggtgatgctggaaagtgcacggaaaggctattggaaagcaagccctgaacagttgaaagcaacagctgcactacatgcacaaataacccgtgagaagggtgccgcctgcacggagtttgtatgcgataatgccaaattacagtcgttcgttgcagataatctggatgcgaaagaaaaacaggaattcaatcaggatatgaaagcagtatatgaagccgcttcggccaatggaaaagatgtagtattgaaagaaaagaagctgacaccggaacaggtaacgcagaaacgtactacaaacggattagtgattggaggcgtggtactggtagtgttcattgggctggttgcattaatcaaaagaaggaaaagtaaataacttcataatgattagtgtttagtgataagtgattagcaccatgcagagtaatagcgcagccactaatcacttatcactaaacactaatcactaacaatttaccattcacccaataactatgaattacgtcattcccatattagcaatcttcatcaccctcagcttcctgctgaaggtcggcttctatccccgttggggaacgtggctgacagcactatgttgtgccctatttgttttactcattactccttgggtaaccgaacaatctaagacagcaatagcagcctttttcgcttcccgggagaaaatgctggatgtatcagtttgcatcacactggaagccgccatcctgataaccttttgcttcgactgcttctccagaatgcgtacaagagacactgcattcaaacgaagcgtcacctttctgctccacctttatcccggtttattgataggtggcgtactatgctatgtactggctgaattattattctcttttccgggcattgatttcaatatgctctcgtggacagtagctaccaccacattcttacttatcggtgtcggtgcccgattgctacaaatcctcttggaagataaagccctgcgcctcgaagtcctttttattgtaaacatattcatagtcgtactgagcatcatagctaccggctactaaataaatagtaactactaaaattataaatatcattatggaaaccatttcaaactcactcttctggatatccaacggactacttgttccggtcatcgtattattactcctgttcttcctccgcgccattatccttgccggaggtttcttcggagaattctaccaacgaatgaaactgcaaaagcaactctccgaaatgttagaaaccatcactcctgaaaacattaacgaacagttacagaacttgccccaagtcgggaaacaacctttgctccgttgcctgaaaaagcttgccgaacaccgtgataacgctgcctactgcgaacgcctgcttgccaacttcgaagtagacgccgaaaaagagctgggacgctcgcgcactttcatcaaactcggcccgatgctgggactgatgggaacactgattccgatgggtcccgcccttgtcggactggctacaggagatatttcctcaatggcttacaatatgcaggtagcctttgccaccaccgtggtcggtatggtgattgccgcagtcggcgtcatcactctgcaagtgaaacaacgctggtatgcccgtgaaataaatgatctggaatatctggacaagactctgcgaaacaaaaccaatgaataaccctcagcctcataaaagaatatgaaacgaaacagactgcttcacaaccaaacggactccgacccgatgggtacggtagcgaacctttttgatgtagccatggtctttgccgtcgcactgatggtggcccttgtcacccgcttcaacatgacggaaatgttttccaaagaagactttaccatggtaaagaatcccggaaaagagaatatggaaatcattacgaaagaaggacaggaaatcaagcgatacactcccagcgaggaacaggaaacttccggcaagcgagggaaaaaagtcggtgtagcctaccaactggaaagtggagaaattatctatgttccggaataatgatagacatccgtcaccctttgaataaaagttaaagagtccatacctataaacaagggtttttaacaatagaaatacccatcagtgggtattttcttgccctcatcttccccatatctttgcatttccaaacaaacgataattttatgataaagcaaagattcttaacgactctcttaatgggaagtatcgctgccggtgcatgggcacaggctgataaaggtgaaacttccgtagataaaactgtggatttgaatcctgtagtagtaaccggtacgggtacgcatcagcgactgaaaaatactccggcaccggtatccgtcatcaccgctaacgaaataaaacgtgccggaatcacggatttccaacaagccatgaccatgatggttccctctctctccttctctccgaatgcgatgggttcgtatctgatgatgaacggactttccaataaatatgtactgatactgattaacggacgtaaagtgacgggggatatcagcggtaatatcgacatcagtcagatagacatgagccgtgtgaagcgtatcgaggttttaaacggcgcagcttcttcgctctatggttcggatgcgattgccggtgttatcaacatcatcaccaaccagccgaaagatgaaatctccttcaccaccaacagccgttatacaagaaagaatcagttttcacaaggcctcaacctggacattgccaaaggaaagctcgcctcttacactgcttataaatacgatcactcggatggctggcaaaacagtggcctgaccgtagacaagaatgatgacctggttgaaaccctcgatcagctttccatcggctacagcatgaataacttttcgcagcaattcacctacgatgctacggaaaaactctcgttctatgccaatggcggatattactggcgtatgaccgaccgtcccgccaaacgcgacggcatgacaggcggaaatgattataatacgcattacgaaggctacaactggggtacaggagccaagtacagactgaataaacgttcctccatccagttggattatgtaggcaacaattatacttcgcgctacaaatacatgctggcagccggtgattaccaaccgggggactacgcattcaccaaaagacagaagttccatgatgccgaactgaaaggtatcttcggtttcaccaccaacagtactactgtcttcggagtggactaccgcaaggacattcttgttcgtcccgatgccgatgtagacaagggagtatatactttgtcgggctacggacagcatgaggtaaaactgtgggatcacttcacaggcattgtcggtgcacgctatgactatcacgaacaggcaggcggacgtttcaccccgaaagtggcagccatgtacaatattggaaacttcaacgtacgtgccacgtatgcagcaggtttccgtgctcccggtgtagacgaattgtattacagcatgttcaagaaaatgggtagcaaatacactatctctatcggtgacgccgacctgaagcctgaacacagcaactactactccgtcaatatggagtaccgcaccaaccgtttcagtgcctctgttacgggatatctgaattatctgacagatatggtgtcttccaaagtaaccgcattcaatgatttgtccgctgaggcccaacagcaactgaaagaagaattccccgaactggcagacttatcatctaccaagaatgtgaacctgaaagaatacatcaactttgaaaaggctaccgtccgtggttttgaggtgagtttgtcaggcaatccgttcgccggctttacgctgaatggtaactatacctacgcttatgcccgtggtaaaggtgaagaaggctggcaaaacattcaacgcagcatccgtcacacggcaaccatcagcggaaactatgcacattcatggggtgactacaccatgaacctcaacctgaacggccgtctgcaaagcaaatgctactatccgggagatgccgacggagatgctccgggttacggtatctggaacctgaacacccgccactccttcgactgtttcagcagtttcttcctggaacccggtatcggtatcgacaatatcttcaacaagagagatatgagacctctgacgaagaacttcaccctgtactcaccgggacgtatgttagtggtgagtctgactttaaaactaaagaattaacgcataacaacttattattgatatgaagcatcttttcatcactctttgtttactgagtgtggctctcttctcctctgcacagggggagaagaccgcccttctcattacccattacggaagttcggatcctgatacgcgtgcactgacgctcgacgtaatcacccgtgaggcaaaagaaacttttccgcagtttgaagtgcgcgaagcgtatatctctcccatcgttcggcgcaggctggagaagcaaggcgttcataaagacagtccggtagacgcactgctgaaactcagaagcgaaggatattcgcgtgtactgatacagagtacaacactgattgaaggaagtgaaatgacttccgtccgccgcgatgcggagagcgtgaaacccttctttaaggaaataaaggtgggtaacccattgctttatacagtagaagattgcgaaaaggttatcgaaattctgacacaggaacagcccggaaagaaagaggatgtcatctatgtgggacatggcaatcaattgccaagtaccgccacttacgccatgctggactatatgatgaaagcccacggactgaaaaacttccacgtcagcaccatcgagggttatcctacactggacgctacactggcacagttgaaggagacacgcccgaaacaagtgacactgataccgttgttgctggtatgcggtaatcatacaaaagaagacatcgtcggagtatggaaaccggaaatggaaaaggcaggttatcaggccaatgtccgtatgcagggactgggcgaacaacccgctatccggaagttatatatggaacacattgaggcgttgctgaaatagctacaccctttccctcttatggctacaccttttgccccggatggctacaccattccaggcaaagggtgtagccctttttacacccttttatacccgaaatttagagaatagaatgtatctttgcatgatagaaatataagcgatatgaaacagccaaagataatagttgccggcatcggaccgggcagcgaacaagacattacgcctgcggttctggaggcggttcgcgaagcggatgtagtagtgggatataaatattatttccgttttatccagccttatctccaccctgaaacagaatgtatagatacgggtatgaagcgggaacgcactcgtgcggaacaggcatttgaattggcggaacaaggaaaaacggtttgtgtcatcagttccggtgacgcggggatttatggaatgactccgctgatttacgagatgaagcgggaacggaacagcaacgtcgaagtgattgccttgccgggtatcagcgcttttcagaaagcggcttcactgcttggtgctcctgtgggacatgatttctgtgtgatttctctttccgatctgatgacaccgtgggaacggattgagcgtcgcatccgtgcggcagctatggccgatttcgtaacggctgtatacaatccgaaaagcgaagggcggtattggcaactctatcgactgaaagagctgtttctcgcagaaggacgtgctccggagactccggtaggttatgtacgccaggctggacgggaggaacaggaagtacatctgacgacactcgctgatttcaatcccgaagaagtggatatgtttacggtcatcctgatcggtaactcgcagtcttatgcgtggaacggcaagttcattactccccggggatattataaccgtccggataaggatgaacaaccgactaaggggataggtcaggacatcatgatacaaagtttccggaccattgagtcggaactaaagaataagaatattcctctggatcataaatgggctttgctgcacgccatccataccacggctgattttgaaatggaaaaggtgctgtatacggacaaaggtgctgtggaaaagctttatcagaaaatagcggacggtcggttgaaaacgattgttacggatgtgacgatggctgccagtggtatccgcaaaggagctttacaacggctgggggtagaagtgaaatgttatctttccgatgaacgggtagcggcaatggcagcggaaaaaggaatcacccgtacacaagccggtatacgtctggcggtggaggaacatccggatgccttgttcgtattcggtaatgcgccgacggctttgatggaactttgtgatctggtacgtaaaggaaaggctgtaccaagcggtattattgccgcgcctgtgggctttgtacatgtacaggaatccaaacacatggtgaagccgttcatggaaatacccaaactgatagtggaaggacgaaaaggaggaagtaatttggctgcaacgctggtaaatgcaatcttgtgctacaatgatgcggaacagttaaggccgggacgggatgtgtaaatagatacgctatgatacgaaactttatcatcataggcatggacgacaaccgggaacctttcttcccgcccgaagtgctgcggcacatccgggaaggaaaagttttctccggcggcttgcggcatcgggagattgtagagaagttacttccggaaggtgcggaatggatttccataacagttccactggataacgtctttgcccaatacgaaaacatttttgcagactttgagaagaaggcttccgatgcatctattgtcgtgtttgcatccggagatcctctgtttttcggcttcgccaatacggtaaaacgaaaactgcccgatgcaaagatacgcctctacccgactttcaattccctgcaaacattagcacacaggctggtgatgccttacgacgatatgcgtaccgtctctctgacaggacgtccatggcaggaactggacaaagcactcatagaacgtgcccacaaaataggtgtactgacagatcgggagcgtacccctgccactatcgccgcgcgaatgttggaatacggatacaccgattacacgatgtacatcggtgaacacctcggcaatcccgaacgcgagcgcattcgccggatgagtcttgaagaagctgaaaaagagacatttgagcatccgaataatttgctgctctgctacgatacccgtagacggccagctacggcacccgtagacgatcagctacggcacccgtatacggtcagctacgacacccatagcaaggaagctctcctccctatagatagtcagccctccataactgaacaaccccgccccttcggtcttcccgacgaacaatttgcccacttggacggacgtgcccgcatgattaccaaagctccgatccgactccttaccttgcaggcattggaactgaatcgccgccgtgtcttttgggacataggtttctgcacaggctctgtctccatcgaagcccgcctgcaattcccgcatcttacggttgtttcgttcgagatacgtcccgaaggagaagaactgatgcgcatcaactcccgacgtttcggtgcgccgggaatcacagccttaatcggagatttcctgcaaactgatctggaacctctcccccgccccgacgctgtctttatcggcggacacggtggaaaattagaagatatactggtacgcctgaaagaagtattgcagcccggcggttgcatcgtcttcaactccgtatcccccaatagcagggaattgttccgtaaaggggcagaaaatgcaggaatgtctctgcaaccctccctgcacatcgcactcaatgattataacccgatagaaataatgaaagtaaccttatgaataagaataatgagagccaccctatgaaggtagctattatactgatttccgaaagcagtctgcccattgcacgaacgctgagtaacgagtttcccgactccgaaataatcactacgactcctgcacccgactgcacatacgtttctttttacgaagaatttatggctctgtctttccatcgctacgatgcctttattttcataggtgccatgggcatctgcgtccgcaccatcgccccgcatgtgaaagataaacatacagatcccgccgtgatctgtgtagatagcactggccgctatgccgtttccgtcctctcgggacacatcggaaaggccaacgaaatgacagaaaatatcgcccacattctcggcgccgaacctgttatcaccacccaaagcgaccgcaccggcctctgggcactggacaccctgggtgataaatttgactgggccgccattcccggtgagacggaatatggtatgatgaataacatcatcagcctttttgtgaagaaagttcctaccgccctcttcctcgaagtacgcgatcagggaacggaatatctggaaaagacctgcccgccacacgtagatatacattacggcttattccgggatatagacctcagccgttaccagctggttatactcgtcactcctttcctgcacaatacgcatgacacccctgcactcttttatgtgcccaaggtattgcatgtcggcgtaggtctggcacatcaggcaggtcccgtgcatgacatcgttgaaaacatccttggtacgatgattaacagtaccttcatgccccgtgccgtaaagtacatcgccaccattaacgagaaacgcaacgaaccggtcattaaggagctggaacgtgcctatcagatacgctattacagtgcggaggaactgaaagaaatctccgtccccaaccccagtccggtagtagagaagcatatgggtacgcccagcgtttccgaagccgccgcctttctttccgcgaacggtggtaaacttctgttggacaagcaaaaaggcggaaactacaccatggccatagccatcgaagaaggagtactccgttactacggacatatcgaaatcgtcggcgcaggtccgggtgatcccgacctcatctccgtgcgcggaaggcaaatgctggagaaggcagatcttatcctctacgccggcagtctcgttccccgcgaacttacattctgtgccaaaccgggtgctacggtacgcagttcggcttccatggacttggaagaacagtttgcactgatgaagaaattctatgatgaaggcaaattcatcgtccgcctgcatacgggagatccctgcatctacggtgccatccaggaacagatgaactatttcgaccagcatcgcatgagttatcacatcactccgggtatttcttccttccaggctgctgccgctgcgctgaagtctcagtttaccattcctgagaaagtgcaaagcatcatccttacccgcggtgaaggacgcacccccatgccgaaacgcgaacaactccacctgctggcacgctcacaaagcaccatgtgtatcttcctcagcgccggcattgccgaacaggtgcaggaagagctcttacaggaatatcccgaaaccactcccgttgccgtttgctaccaccttacctggaaagacgaacgcatctatcgcggagagttgaaggaccttgccaagattgtgaaagagaacaacctgacgctcaccactatgattgtcgtaggtgaagccatcgacaatcgcgaaggcctttcacggctctacgcccatgagttcaaacatctcttccgcagataaaaagggagtgatttcacattttgttcaattaacaactaaaaaacaatgatattaatattaggcggaaccaccgaaggacgtatcgctgcccgtacccttgaagaatctggaaaaccattttactactctaccaaaggagacgagcaggaagtaaccatgcaccacggtatccgcctgcaaggcgccatggacgaactggacctagaacactgttgccgggaacataacattcaattactggtagacgccgcccacccctttgccatacaactgcaccagaccgtagagaaagtagcccataccctgaacctgcttgtcatccgattcgaacgtatttatccgccacgcgatgaagaacacatcacctggtgcgatgattttgaagatgccatccggcaaatcaggaaagaagatatcttcaccctcctagcactgacaggcgtacaaagcattgccaagctaaagcctctctggcaggaaagtgcctgttgctacttccgtatccttaaccgtgagagctcccgccgcctggccgaacgtgaaggttttcccgaaaaatatctgcattactaccatgcaggcgaagacgaacgcatcctgttacagcaacttcaccccgaagccatattgataaaggaaagcggactttccggaggattcaatgaaaaagtggaagctgcccttcaagaaggtatccgcatttttgcaatccgtcgtccgccaatgcccggaagttttatgatagtgaacggtgagcatggtttgcgccggatgattgaaaaacattttccagatttttatcctttgcgtagtggtctgactacgggtacttgtgcagccgcagccgctgtagctgcaacctgggatattttcaacgttcaacgccagccccgacccgcagaattccctgttattctccctaacggagaaaccatttatgttcccgtcgaagagcaagaactctacccgcatcccagctatgtgaacgatgactggatgctggaagcagatgccactgtcatcaaagatgcaggtgatgaccccgatgtaaccaatggcatgcagatcaaggccaatgttgccgtacctttccgctttgacgatccaacacccgcagaacttggagctgatgattataccgttatcgtctgtggaggcgaaggtgtaggcattgttaccctatcgggtttaggactggaagtgggaggacctgccatcaacgttactccccgcaaaatgattgaaaacaatgtaaaggcatgccttcaacgacttggcatttccaaacaacccaatccttttgccgtcactatttccgtaccgggtggcgaagagatagcccggcggacttttaatccccgtctgggtatagaaggcggtatttctatcatcggaacttcgggtatcgtgaagcctttctcttccgaagcatttgtagattccatccgcaaatccatggaagtaggtcgggcaacaggaagcccgcgcatcgtccttaattccggtgcaaagagtgaaaagtatgtccgggggtactatcccgaactgcctgcacaggcattcattcattacggaaacttcattggagatacgataaagattgccgcagatttggaaatcaaagcggtgactttgggtatcatgataggaaaagccgtgaaattggcagaaggaaatctggatacgcacagcaaacaggtgacgatgaataaggatttcctacgtgaagtggccctttctgccggatgcggaggggaaacacttgcagttatcgaaaagataactttagcccgtgagttatggacattgctctctgccgaagatttgcaagccttttgctcccgtttgctcgaactgtgccatcaatattgtgacccgttgctaccggaaggagaactgacgattctgctcattagcgaagaagggaaaataattacatagaataaaaaaacaagttttacatgtagtctatcaggctgaaagtcctacgctatataatgaaagcccttcaggctatatgcgaaacttaaattaaaaacctcaaatatgaaacaccctcaaataatcctcgtcaccggcgcttcttccggttttggaagagtcattgctacgcagttggctgcacaaggacatatcgtttatggctccagtcggaaagcagtatccgataatcccggcttcaaaatgttgcaattagatattactgatcctgcatcagtatccaatgccatatcgacaattctgaaagagcaaggtagcattgatgtacttgtcaacaatgccgggatgggtatcagcggagctatcgaactcactaccgaggaagagatacaacgtcagatgaatacgaatttcacgggtgctgtccgtatgtgtgcagcagtactgcctttcatgcgcgaagccggacacggacgaatcataaatatcagttccattgcaggcgtccttgccgttccctttcaggctttctacagtgcatccaagtttgcgattgaagggtatagtgaagcactttatcaagaagttaagccactgggtatacaagtttgcgtagtcgaaccgggagatttccagactggtttcacagcgcagcggcaagtgagccagacttccctctcccatgcgcaatatggggagagttttgcaaaagccatgcgaaatgtagagttgtctgaaaacaatggttgccgaccggaaaagttaggcaaagcaatctgcaaactggtaaatagccgccgccctgctttccgcacaaaggtcggtccatgggaacaagtattctttgcacgcatcaagcctatgctgccgtttagtctggtagattggctgatcaggaaattctattaaatgataatccgactacataattgtatgtaatcatataatttatatctttgcgagcaaataaacatcaaccccttacaaggttcaagtaatgaaacagactattctcactattttctttgcaatcatagcattgggagcaaatgcccaatcccctatctcctttcaggtaaaagccggagtcggtacctccaacttctatggagaaaatgtagaaagtgacacacgcatcgcctacaaagtaggtgtcggcatgaactatgagttcaaccgtacatgggtgtttcaaccatcactgaacttcgtatcgataggtgcccgcgaagaagtggaatatgtaggcaaagtgaacatgaacgagttgtatatccagctccccatcatgatggccgcccgcctcaaccttggaaagaattacagtgcttccctgagtgccggcccgtatattgcctatggcgtaggcggaaagacatccggcgagatggaggaatatgattacagtagtgaatacaatcctaacagaagctacagattccgcatagatactttcggtaaccggatagatgacaaaatgggaaacaaacgctttgacgccggccttatgttcggcctcaacatcgaatatcacaaatttatattcggagcagagcttcaattaggaatgatcaaggtaaacgaacagctggataacctattgcaatcatccggcattgagaaattctctcccaagaatctcgcttcgtttttcaccgtaggataccggttctgatttacaactgctccgcctgctttcgtttcatttcattcagtacactgcatgtcaacggtatggcaagaatgaacgtaagaagatcagcagtagcctgacacatttccacaccctgcaaacccagataatgaggcaggataaaaatcagcggaataaagaacaatccttggcgggcagaagaaataatggtagcctttaccggtttacgaatcgtctgcaacatcatattgctcatcacaatccatgaacccaacggaaaagtaatgaactgccaacgcaaggcagcagcacctactgcaattacatccgggtctcctttacggaacaaagaaacaatctcttctgcaaatcccatgcctgccaacgcacacaccaacaagaagatgaatcccacctttacacaaaaccagaatccttgacggacacgcgcatacaatcctgcaccgtaattgaaaccgcataccggctggaaaccttgcccaaaacctatcaaaaatgcattaatgaacattgcgatacgggtgacaatagacatgcctgcaatagccgcatctccataagccccggcagccacattcagcaaaatagtagctacactcgccagtccctgacgggcaagcgaaggagtaccaccaccaataatttcctttatgaaagccagtgaaggcgtgaagttcctgaaacggatacggatattgccaccctttctgcacatatacaacaacagggagaaactacatatctgactgatgaccgtagccaacgcagcacccgatatacccatatcgaagacaaaaatcagaatagggtccagtatcacattaatcaccgcgcccgatacgattcctaccatcgcatacgctgcatttccctggaaacgaatctgattgttcagtaccaacgaagcagtcatgaaaggggcacccagcaatatgatgcccagatatttttccgtataaggcaggatagtaggtgtagaacccaatgcaagcgacaacggggtaaggaagataagtcccaccactgccagaaatatacccataaacaatgcccagaagaaaccggtagccgccatcttctctgcattcccagtctcctgcgcaccgagtttccgcgaaatatagttccccgaaccatgcccgaagaaaaagcccaccgcctgaataatggacatgaccgagaacacaatacctacagccgccgtcgactgggtattgatctttcccacaaagtacgtatccgccatattatagaatgacgtaaccaacatactgataatcgtaggtacagccaatgatactatcagacggggcaccggggtggtagtcagatagagataattatcttttgtcgaatgtctcatagaattttcacaatctctgcaagcagttcatcaatggtttgcacagtcaccgcttcgccgtttacggggtgcagtacaaaagtaccgtcccctttcaaatctcccgtttcaatataaacgtccgactccacgtttcggtttgccagaataccatttctttgcaaagctttccgcaccatagcgtatttttgtccatgtccgacaatacggatctgggaagtatactcattgttcacccggaataatcctgtctccagatcaaacacaattcctttacgggcaaagaaactactgagggttccatccagtgaaaggtcttcgggagttccgatagtcaccccgttcgccttatccatcaaccagattttatccgcaatctgcaaggcaagttccaggtcatgtgtagacaggaaaatagtcttatccgtctgccggctcagctgatggagcaattgcatcatttccactttactcgggaaatcaaggaaggcagtaggttcgtccaggaaaatcaccggagtttcctgtgacagtgccttggcaatcatcaccttctgccgctcaccatcactcagtgtatgcaccatgcgatgtgccaggtgagatattccgaccaggttgatagcatgatccactacctctttatcttctttggagagtgttccccagaaaccggtatatggactgcgtcccagaccgataagttccacagaagtcatattgcggatatcgcacttctcagtcaggactacactgatcacttttgaaagctgtttatccgtataagagccaatctcttttccctgtatacgtatttcaccggataacttcggttgaaatgcggaaagtgtacgcaatagtgtagacttccccaccccgttggcacccaacagacaagtcaactccccgctattgattccggcacaaatatcgcttgccacgactttcacatctcctttaccgggatagccaatggatagtttctcaatatgtatagtttcctgtttcaagacctctttattttcaattctcaattattcttccagttcccctttacgcttcctgaaaagcacggatgctaccaccggagcacctaccaaagcagtcaccgagttcaccggcaaagctccttcaaatcccggcatgcgggctatgaggttgcacaccaacgccaacgaagcccctaccagcaatgtggcaggcatcagtatccgatggtcagatgtatggaatatagcccggcaaagatggggaacagccagaccgataaacataatcggaccgcaatatgccgtcacaattgctaccagtacacctgaacaggagatcaccaacaggcgtgccctcttaatgttcagccccagattccgggcatatccatcacccagcagcaacagattcattgtctttatcagcaaaaacgagagtggcaacaagaccgccatgatacagacaaacagtatcatctgatcccccgacacacgggcaaaactacccagtccccaaatgacgtatgcacgaatatcttcctccacactgaaatatttcaatacgccgataatggcacttgccacataaccgatcatcacaccgataatcagcagcgtcacatttccctttactttctgtgaaacgtatacgataagtgccattacggacagtgctccgataatcgctgcaatggacaacgccacttctcccatatatccgagcttgctcaatgccacaccgcccatcgctcccgatagcaataccacacaggctactcccaggctggcacccgaactgatacccaacactgacggtcctgccagcggattccggaaaaccgtctgcatctgcaaaccactcaccgatagccccgctcccgccaccaatgccgtcaatgcctgcggcacacgggatttccaaatgatgttctgccagataatggactcatccgtattcccccataagatgttccagacggaacgaaaaggaatatggacagagcctaacagcaggttcagcaagaaaaacaggaatatggatgccagtatcaccagcatcaggagcagtgtcggtcttttcattgcaaacgtgcgtagtatttcggttggtaatcaggtaataaatcggggtggaacgcatggatcagatcttccagcactatttccggttccataggcatactttcatagaaaggttgctcgcgcatattacaataaataacgcctttgtcacggaatgcacggaagtcggcataacggggatcaagggatttcaaagcgtcatatgagaatgtaccgtcgtaactattcacaatacgccagtaatcggcactctccgcctggctgtatactgtttcaaaatccagtgtaacgccaccggaacggggatcgtccttcaagaagtaatcggctcccgcatcacggaacagttcggccaggaagctcttaccgcctactgcataccagtttcctccacgtatctcaccgctgaagactaccgggcgcttcttcacatcagcagccagttgtttcaggtcgttataatgcttctctatagcagcaaatttttcatttgcctcctcttcctgtccaataaacaagccgatgaatttaatccattccgcctgtcccagcggagtcatttccttatatcccaggtgcggaaccaaaggtattccgatttcacgcatcgtatcatatccaccgcgcttgaaaggggagataaagatgacatccggattcacactcatgatcacttcattatcaaagttaccttcaattcctattttagctgttttaccagatttcaagcgctcattcatttctttgttgaacaaatgtcgtgtactggttatacccaccaccttatcgcaggcttccagtttgatgaaattggataattgtaaagaagtcatgcaaatggcactgcgcacaggtgtttcgatcaccgtataatcagaaggaattgcttcgggtttcatcccccggggcaccaatgcataatggaaagtattactactttcattttgaggatcgcgcaagtccaccaagcggacatgattgggaagatatttcacttcaaacccttgggcatagaccggataaatagagtctgtggctgatgcagaagctgtggtagcctgtagatcagtagaattttgtttgtttttcgggccacaagccacacataaaatacttaaaaggaagacagttattgcagtagttcgtttcatgacaataaaaaggtatagaattcgagcacaatattcgtcatttttggggagatacgcaaatacccgtcctataatttaaccgaatttgtgcccgaacacctcttatataagaacgtctaaaaattcatcagatcattcaatgcttcgctcatgctgggatgtgtaaatatataatcacgcaagaaagtatattcctgtcctgttttcatcacgatagatacgatattaatgatctcacttgtttccggtccgaacagggaacagcccagaatcttatttgtatcggcatccactactaccttaaacaacccgtcagtctcgcctaaagtacgtgcccgcggaatggctgctaccggaagtgtattcacctttatgttcagtcctttcttacgggcttccatttcactcagtcctacacgtgccagaggaggatccataaataccgaataactcacaggctcacggtcgtctgtacgccgttctcctgcaccgaataaatcctcgcggataatgcgataatcgtccaatgaaatataggtgaattgtaatccaccttttacatcgccaatggcacggatggccggattagtagtacgcagccacttatctacaataatggctccccgttcattcactttcacaccggcaacttccagattcaaccccgaagtattcggacgacgccctgttgccaataagatagcatctccttccagatgatggatttcatgagttacagcatcctcatagatcaccgttgcaccgtccacgtattgtactttcgcgttgagatggaaaacaatgcctttcttttccaatacggtctgtacgctggcggcaatgtccctgtcttcgcggccaatcagttcgtgatacccttcgagtaccgtcaccttcgaaccgaaagaggcatacatggaagcaaattccaggccgatatagcctccacccacaatcaccagccgttcgggaagttcttccagttccatgatggaagtgctggtgtatacgcggggattctcttttattccatcaataggtggtacgattgtttccgcaccggtatttataaagatctgagacgactgcaattctatgacttccgtctccgtccgcacttctaccacatcaggaccggcaaacgatccgacacctgtatacaccgtcacattaggattatcagccagattatgatagttcttattccgcaggaaggaagtcacctcttctttacgaccaatggcctgacgataatagtccttcttctcttcccacgtagcctttaccggagtttccttagccagatgtaccaacgtctttgtaggaatacagccgatattgatacacgtgcctccatacatacgatctgaacgttctactatggcaaccgtcttctgacgttttgcaaattcggcagccagggtcttcccacccttgccgaaaccaatgataatggcatcatactttttcatatctttatttttttaattgttccagtacgctcttcgcactgtctgctaatataacaattgcaccggccaaaatggctgtatcttttataactaatcttcctgcaccggtcaataaagggaaaccaaactctccactgcccaggttgggcacccatacttcgggtgtggtgacaaggaaagaaagcgttccgagagtcatgataatagcaagtcccgcacctaccagtcctactttcggccaaaatatgccgaggaatgtaaggataccgatgctcataataagaatacccaatccgtgagaaaaaccatacgtattattctccttgtgccactcatgcttcgcggcatcaaattctccttctttcagcttatactctttatagtcgggagcatcgtgtgtatagaagaagctcatgaaagggctgtttgccacaaaaggtacgatgccttccgcttcataattccagaacttcaatccgccgatccaaacgaaaataaccagaattgccacacggataagattgatacctaacttttgagtagatgcagccagtgtcagggctgctacgaacatagattttaattttgtttccatacgattattgcattaattaattgttttgttttcctgatgcaaaaatcggggtttatgtcggagcatgaaatggcaattctgccgtatcagttggcaatatttcccgttgtgttcaatttacggaaattcgatacactttcaccggtcattttcttgaaaaagcggctgaaagtggacaaatcctcgaagcccagcagttcgctgatttccttggcgcttttaggggtatagagcagtaatctcttggcttccgcctctatccgttcatggataatgcgcaacggggaaggtactccgcaggaggcaaacaaattggagagtgtctttggggaacggaataacaggtcggcataatcctgtacctgcttcttttcgcggaagtgctggtcaaccagaatataaaaacggcggacgatatcaaaggctttttcctgttccggcgtgacgccacacttttcacgggcaatgcgggtacaggtgatgataaaacgtttgagaatgatacgtaacatttcctcttgcagattatcgcgaacagcggactcctgccggaagatacgaataatgtcattcaggttggcggattgttccggtgaaagtttcagtttcatcacccgggaagaaccatgaaataggaaaccgttacaggatacttcgtcatcatgaccgaatatacagtagaaattgctgttgaacaggaaagtgaggtactctccctccaccgatttaatttcaatatgctgcaaaggagtaagacttatgatttcgtcctgttccaactgtatgggaatatggtctatctccagagtcaagtttccacttcgtacccaaatgaacttatataaagtagtatcctgttgcagtgctttattttcgtggaaacaaaaggtcattgccaagttcccgttcaggcgggtatttaattgataatctatcatgatgttaaaaagttagagttctttgtcgtatgccgaagtacaaatatacgctattccggaagctaatgcaaataaaaagaagcaatctatttcatcatctccgcttttcgtaacgccctaccccatgtaaggtcatatttcgttataactatatttcagtttatgagtagaatatacaatcccgtccctaataaaatagagcaagccatattcttaaaaagcatttgaataacgactacacagatacccgatagtatttccggagtgccgtatgaaggtgatagaaaatctatatctttatagcaatagactaccaacataccgaatatggccggaggtagtactctacctaaatagtttacatattggggagtgtgcgcagaagacctgaaaacccagaaaggaatccaacgggtaagctgtgtgacaagcgccacgatgaatatagtaacaatttgttctgtgaccgtcataccagtttctccttatcctttgtagtcaaccaacgcaccgtaaaaatagtagtgataatcaagatggtgggaagcatgaaatatgtcttaccaaaaagtagaagacatccccccgcaaccactaatcctaatatggaactgccgtgtgtgcgttctttttgccactggctaataaatatcacgataaacaaggctgtcattacaaaacccactcccttgatgtccacaacagctttacaagcagaaactgcaccaacaacagtcccccctatccatgatatataaagatacaacgaaacaaataacatgaaccaattccggtctgttcccggaggcacatctgtcatatagtttaacgaaaacgcttcgtctatcaatccggaaacagcccatagtttttttcttcccattcccctatacttttccaacatggatattccataaaacagatgtcttccgttcactatcagcgtcagcaacaaggcataaccgggattgaacgtactaagcaataagctgacggtaacaaactccattgaaccggcaaatatagtagccgccatgcagataggccatatcatgtcaaaaccgcaggaacgcatatacaccccatatccgacaccaagaaaagctataccaagcattaccggaaatgcttttgtcagtgccagtttacgtgcattatgaaaatcttgatttttattattcagcatatatat

SEQ ID NO: 6556 - DNA, 190 bp, Unknown
  gut microbiota DNA sequence
acaaaaagtgccattcatgggagatgatgagcccactttttattgtttttcagtgaaataagacggtctgcccggcgctgaacccgaccaatcggcaaaggttttccatgtacagcatttcacggaaacagggaaaccgcgcaactgcctttgatccgcattaatttaaaaacactctattgtaaaatca

SEQ ID NO: 6557 - DNA, 3116 bp, Unknown
  gut microbiota DNA sequence
tgcgtaattgtaggaagatgggcagatgttatcagcattcgttgaagttcttcgatatgttctcttttttttgcggatagggtgattgactgtacattatcaggaaaattgtcaggaatactattctgtatattatccactaaatcggctttgttataaacaaggataagctgctttctttcacaacggggaaggagttgaccggccaactgtgttatttgagcttgggcattcgtagcatcaatcatccaaaggacaatttctgcttgatccaacttttggaaagtgcgttcgataccgaggctttcaattgtatcgctagtttcacgaatacctgctgtgtcgatgaatctgaaagtaatgccacctatattgacagtatcttctattatatcccgtgtagtgccatgaatgtcgctaacaatagctttgtcttcattaagtaagacattgagcaatgtagactttcctgcattcgtttcaccgataatggctacaggaacgccgtttttgatggcgttacctacgttgaatgaattaaccaaacgagctatgactttctctatgttgttcgctagttggcaaagttcggagcggtcggcaaattccagttcctcgtgatcgctgaaatccaattccaattcgatgagtgaggtgaaatggagtaattggtcacgtaaggtagcaagttccttactgaaaccgccccgcatttggctcatggcaagacggtgggtcgctgcagacgatgaggcaatcagatcagcaactgcttctgcttgactcaggtccattttcccatttagaaatgcacgctgggtatattcgcctggggcagccatgcgacaaccattcttgatgagtagttgtaatactttctgaagaatataggcagaaccgtggcaagtgatttccgtactgttctcaccagtataggagtgaggagcacgaaacagactaacgagtacttcatctataacttcagagccgtcataaatccgtccaaaagtaagtgtgtaaggcttgctgtcccctaactctctattagtagcggcaggagtaaaaatacaagatgtgatttcgatagcttccggtccggaaacgcgaatacatccaatagccccgccctgggcggtagctatggcgcagatagtatcttggttcattatttacagcttgttttatgacgcaaagatagtgctttctcctgattttatatccgataagatatttaaatacgttcgagtactttaagaataagatggtcaattgtatttttatatccggtgttggcttctttaattaatcggttggcaattaccatgcagacagtcatggctttatgccccatcaaacgactgaggccggccagtgcggaactttccatttcgaaattggtaatcttataaccgttgtattcgaattgctcgattttttcgttctgatgcgggtcttccaggggaacacgcagttcacgtccttgcggaccgaagaaaccgccggcagcgatggtgacgcctcgtaccatatcatctcccgctatacggtctatcaattcggcattggcatcaattacgtaaggggcgggagcacacatgtttcccgaccatcccatgtggttgaggaaagcgcgttcaaagggcaggtcgcaaactgcattacgtccggcatagaagttcagcaggccgtcgaaaccaatggatttggcagaacatataaaagttcctacgggcgtgtaaggttgcaaaccgccacacgtaccgatacggaccagttccaattgacgcagttggggcttttcctctctcgtctggaagtcgatgttagcgagtgcgtctaattcgttcataacaatatcaatgttatcgcaaccgataccagtggaaacaacggtgattcgtttacctttataagtacctgtaattgtcttgaattcgcggctctccacttcacattctttattctcgaaatgtgaagcaaccaatgctacccggccggggtcacctacgaggattactttatctgccagccattcaggctttacgtgtaaatggaacacggaaccgtcttcgttgataataagttcggaagatgcaaaatactttttcatgttacgaggtattataagttcgtttatataggtaactttaccggtttatttgctcaatggctggttggatgtaccggttaccggtttggcaatgttctcgcgcatcgaagtgtcggcctcgatgtttttcatccggtaataatccattatgcccagattgccgctgcggaaagcttctgccatagccttaggcacttcagcttcggcttcgataactttagcgcgtgcttcctgtgctttggctttcatttcctgctcgctggcaacggccatggcacggcgctcttcggcttttgcttgagcgatatttttgtccgcatttgcttggtctatctgtaaagctgcaccgatgttcttgcctatgtcgatgtcggcaatatcaatagacaggatctcaaaagccgtaccggcatccaatcctttgcgaagcactaatttggaaatggagtcgggattttccaaaaccgatttatggttttcggaagaaccgatagacgatacgataccttcgcctacacgggcaaggattgtatcttctccggcaccacctaccaactggcggatattggcacgtacggttacacgggctttggcaatcaactggataccgtcttttgccacggctgtgacgggcggggtatcaatcacctttgggtttactgacatttggactgcctcaaacacatcacgtccggcaaggtcaatggcagtggccatttgaaaaggcaattcaatgttggctttcgaagcggataccaaagcatgcactactttctcaacgtgtccgcccgccagatagtgtgcctccagttcatcgcgggtgatgttgctcaagccggctttatgtgcttcaatcaggccaggcacaataatatagggcggcacgttacgaatacgcatcagaaacagttgaaccagtgatatgttgactcctgagactttggcagacagccataggaaaaacggtacatagtggaaaaatagtaccaggaaaatgataccgcct

SEQ ID NO: 6558 - DNA, 3116 bp, Unknown; identical to SEQ ID NO: 6557
  gut microbiota DNA sequence

SEQ ID NO: 6559 - DNA, 831 bp, Unknown
  gut microbiota DNA sequence
ctgtaatggtacactttgttcttcaaaaccgatgtagctacaatgaatccgagttactttttccgggacagacaaggaaaactttccgtctatatctgtaatcgtacctagagatgtttgtgatactccggcttttttcagttcatcggctgatacgtaaactgaggcgccgatgagtggctcattatcttcaccggagatcacgactccggtgatagtgcgattcgcggcattggcaaaaaacaatgcgttggcgaaaaggcatatcaaaatacaaagatgtctttttctcattaattgtaaatgtttagtgattgatttgttttatttgactcctagagctgtgttaattcgtaaaatcatatcttcataatggtagcgtgtagccgtatcggaagttccgagacgattctgcaacagcttcttgatacgtaacaactcaccgcgctttactgagattgcatctgagatgcggttaagttggctaccgtagaagttgagcacacgtggagctcccatgcggtcttcttggcgaagtgcccgttgttcagctgtataacagctacagaacggagtggcatggtcaagcaaaaagtgctcatcggcaatctttttgttgatttttactgcttcgggttctgctgcggctgtcagcaatgcatcaaggaaattcttttgtaaagaacgttccatgacattggggacacctccccgttcggtaactccaaaaatatttttatgaagtccatccatcagttctactaccgtaaaggcctttttcccattgacggattcattttcaatcatacgcatcaagcgattgttgcccag

SEQ ID NO: 6560 - DNA, 4350 bp, Unknown
  gut microbiota DNA sequence
taatgggtatttcagaaaacgcggattctcccctactttgcagtcgagaaataaaacttatgcaataccctaaagatgacatacaaaaagaaattttgaaagctgccgaaaaagtattcctcgaaaacggctttccgaaggcttccatgcgtgaaattgcgcaagaagcccaagtagggttgagcaatatctataactatttcaaaaacaaggatgatattttctgtacggtggtacggcccgtaatcagtgcattcgaaaggatgctgcacgaacatcacgggcgttatggagcagatatcatggagatgtattccacagaatacctacgatatgtgatagaagagtacatgacattgatacaaaagcatcgcaaattgttggtattgctatttttccatgcacagggttcttcactggaaaacttcaaggagaacttcaccgaacgctccacatcacttgtgaaagagtacttcagagatatgaaagaaaaacatccgcaaatgaatattaatgtaaccgacttttctatccacctgcacacggcatggatgttcaccatgtttgaggaattgatcatgcatcgagtcgggacagaaaatttggaacagatagtcacagaatacatcacattcgaagtaactggttggagagagcttatgaaaatataagctctctctttttttgaatgaatctgaatattgttcgtttttaaaagtatgatagattatgaaagagaaactgaaaaagaaaaaaggaatcgcccgcctgtttgagattgcaggcgagcggaaagggttgctgatcctggccggtatcttgtcggcaggaagcgctacgtgcatgttggttccctactggtcggtataccgcgtattgcaggagttactgcttcacgccagtgacttagaaaaaatagatagcgggatactgatatattggggatggtttgccttcttcggactgatcggaggattattgctactttatgcggcactgatggcctcacatgtagcagctttccgtatcctatacggactgcgtatcaagctatcggaacacattggacgcttatcgttaggatacctgaacggtacatctaccggaagcatcaagaaaattatggaacagaatgtagaaaagattgaaaacttcattgcccataccatccccgaccttgtgaatgtattggctacggtcactctgatgtttattatcttcttctccctgaatggatggatggcagcgatctgtctattctgtatcgcattgagtataggattacagtttgccaacttcttcgggaaaaaggcacaggagtttactaaaatctactttgatacacaggaacgaatgagcgcctcagccgtacaatatgtacgtggcatgccggtcgtgaaaatcttcggtcagagcgtccggtcattccgccgtttcaatagtgagattgaggcgtataaggaatatgcactgaaagtatgtgatacatacgaacccggtatggtggtcttcaccatattactgaactcacttattacattcattctgccgataggtttactattactgagccatgagccacaaaatctagcattagccgctgtctatctattctttattattatgggccccggagtagcctcccctatttataaactgatgttcctcggatcgggcacacgggaaatagacgagggcgtagaacgtattgatcgtatctttgccgagccgcccgtatcggaagcacaaacaccgcaagtacccgtcggttatgacatcgaattccgtaaggttagtttcgcttatgagaataaagcggagacaacccgtaccgaagcgctgcgcgacatcaccttcacagcacgccaaggtgaaattacggcactcgtaggtccttcgggttcaggaaaatcgacagtagccaatctgattccccgcttctgggatgtagcggaaggcgaaatacggatcggaggagtcaacatcaaaaatattcccactgaaaagttgatggacattgtttcctttgttttccaggatagcttccttttctttgataccctctatgagaatatccgggtaggaaactccagtgcaggacgcgaggaagtgatagctgccgcaaaagccgcacagtgccatgagtttatagaaagccttccgcaaggttacgaaacccgtatcggagatgagggcgtctacctttccggtggcgagtcgcaacgtgtctgtgtggcaagggctatcctgaaaaatgcccctatcctggtgctggacgaagcgactgcttttgccgatcccgaaaatgaatataagatgcagcaggctttgcaacatctgatccagaataagacggttatcatcattgcacaccgtctctcgtccatcatttcggcacagcaaatcatcgtactgaacgaaggaaagctcgtacagcatgggaaacacgagatattaagtaaaatggaaggattatataagaatatgtgggacgcttatacggatgcgttccgctgggaactaaacagtaagaaggaggtaaaagaatgaatgcaatagaaaatattacgatagggcacaccgaacgccttcgcaaacctgtgggctacacgatgcttgccaacctggcaaatattgtcccattctgcctgtccatcgaagcgatcaacgtgatattccgcgctttcgatggcagtggaatgccgctggacactcaacggctctggactatttttatcctgcttgtagtgtatgtatttgtcatggcattggccgaaagggcttcttaccgcgccaatttccggggtgcctatgaaatgagtgccgcaggacgtgtcagcctggcagagcatttgcggaaactctcattgggtttcctctcacgccgcgatccgggtgatctttcgtccatgctgattacagactttaccatggcggaaacaggtatttcgcatcatctgccccaattgatgggtgcactggtgatgcctgtacttgccttcctcggcttgctatggatagattggcgaatggccgttgccatgtttatagccctgccacttgccgtaggaatattgctgggcagtacttacctgcaatacaaactgagcggcaaacagattgccgccaaaatcaatgcaggcaatcgcctggaagagtacttgcagggaatacgggtaatgaaagcatataatctgctgggcaacaagtttgtccgtctgaagaatgcctttgctgaactacgccgtgcctgtatccgccaggaagcattactcggcccgttcatactgctttctgtaacgttgatacgggcaggtctgacgttgatgatactttgtggtacgtacttattaataggaggagatttatccttgctcacgttcgttatgttcctcgttgtcggttcccgcgtcttcgatccgctgacttcggcactgaccaactttgcagaattccgatatttctccattgccggagggcgcatcctggcgctgatgaacgaaccggaaatgcaaggaagtaaagaagctccggaaagcggtgatattactttctatcacgtatcgttcggctatcagaaaaaacaggtactgcatgatgtatcagtaacactgcgcaagaatacactcaccgctctggtaggtccttcgggcagtggaaaaagcaccatgctgaaactatgcgcacgtttttacgatccgcaacagggacaggttttatttaatggagtagatatgaaaaccctggaaccggaatcgctgatgagccatatctcaatggtattccaagatgtgtatctgtttcaagatactattcgcaacaatatccgtttcggcaaaaccgacgctacggacgaagaaatagaagcggcggcccgcaaagcatgttgccacgatttcatcatacgattacccaaaggatatgatacgcaggtcggtgaagggggttgtaccttgtccggtggagagaagcagcgcatttctatcgcacgagctatattgaaagaagctcccgtagtacttctggatgaagcaacggcttcactcgatccggaaaatgaagtggaagtacagcgtgccatcaatacattgattgcaggacgtacggtaatcgtgattgcccatcgcctgaagacgatcaagaatgcagataacatcatagtgttggaggaaggacgtattgctgaacaaggtaagcatcaggaactactcaataataaggggctatacgccaagctatggaatatacaggaaaagacattggggtggaagttgtaaatctcaaagaccactcaaaagaattctactaaaataataattcgcccctacaaattaatcacgatatgattaa

SEQ ID NO: 6561 - DNA, 1733 bp, Unknown
  gut microbiota DNA sequence
actgatggtacctatctggaaagtatctaccaagacctttgccacattgggtgacaggaaggcaggcagcgtaggccctaaatggattttcttcacacccagactcaacaaggccagcagtacgataacggctttctgctcgtaccaggcaatgttatacacaatcgggagttcgttgatatcattcagttcgaacacttctttcagtttcattgcaatgactgccagtgaatagctgtcgttgcactgtcctgcatccagtacgcgtggaatgccgttgatatctcccagaggcaacttattgtaacgatacttggcacaacctgctgtcaggatgactgtatctttaggcaatgccttggcaaattcggtataataatcacgtcccttcatacgtccgtcgcaacctgccataaccacaaagcgacgaatagcaccgctcttcacggcatctaccactttatctgccagttgcaacacctgattatgggcaaagccaccgatgatttctccacgttctatttccgtaggcggctggcattgcttggctatctcaataatttcggagaagtcttttctaccttcggcatctgcctgaatgtacttgcaaccgggatatccggtggaatttgttgtaaacatacgttctttatattcagcatttgccaacggagggacgatacagtttgttgtaaacaggataggaccattgaaagtagtgaactcttcacgctgcttccaccaggcatttccatagttgcctacgaagtgggaatacttcttgaaagcaggataatagtgagcaggaagcatttcgctatgtgtgtacacgtcgactcctgtaccttcggtttgcttcaatagttcttccatatctttcaggtcgtggccgcttatcaggatacccggacgcttccctactccgatatttacttttgtcatttccggattgccatagcgttcggtattcgctttatccagtaaagccatagtcttcacaccgtattctccggtctggagcaccatctttacccattcgcctgccgaaagtgattttgtggcagtggcagccaaagcatgttgcataaaagtatggatagaagcatcgtcatatcccagacgcatggcatgttccagatatgccgccatacctttcagaccataggtcatcaattctttcagggaacgcaggtctatgtcgggctcacgcagcacacctacgctttccgctttggaagtatactcatcacgtccaccctgccattgcagttcgtcgatttcaggcaaggaaatacctttttctttggcttcttctattaaacggttacgcaatgccatacctttatccaccctgttcagaatgctttcatcatcaaagttggcatttgtaatggtacagaataaggcatccacaacaaaacggttcacttcggcagctacgggatgtccggcgttacggaactcatcggtaacgactgatattccacgtaccacgaacatcagcaaatccattgcctctgctgtatgactttcttttccacacacacctttcaagatacaaccggtgcctttcattgtttcctggcactgataacaaaacattttagcttccatcatcttattctttttatttagttaaatactcatgcaaaattaggttgttctataaatgataatttaccagcgtagcgctggagcaaggttctccttcggcgtgcaagtaatctttcaga

SEQ ID NO: 6562 - DNA, 13239 bp, Unknown
  gut microbiota DNA sequence
tgtccggaggtcaataggattggaagcgtgcaaacgaaaatgaataaacgtcagatagttaatgcggtatcaaaatacttacatttattctggatgaaataaacgcactgataagtgggaaatataatatcaataaggcaaattctgatatgtagtaacccttttgttggtatgtagtaacctttttgcccatatctagtaaccatatcaatcataagtagtaacccttttctgcataaaaaacagttaaaactgcaaatatatactgaaatagcgcattgttataatcattttattcatagaatatgctggaatgtaaatatgtgaaatatagtatgtcattaaacatattgaaatgctaccatgatgagtgcatattaactgttttgctattattatgatgttttgctttctaatcctttcaatttcctttgatctcatgtctgagaaataggaatatgtatctattcattttaagaactttgcaatgtgattgtttgtttatactgcaaattaactaacaacttaacatgaatcaattatgcgaaaagtgaatgttctttatagtatggtattcatgattacactctttggagtatctgtaaatcatttgaatgcttgtacccgtgtagtctatcagggtgataataatatgataataaccggtcgtactatggattggaaagaagatacccgtagtaatatctggattttcccgcgaggtatggagcgcaacggagaggtagggaaggacccgatgcgttggaaatctaaatacggcagtgtgataacttcggcttatgacatctgtagcactgacggtatgaatgaaaaaggactcgttgccaatctgttgtggctggcagaatcatcctatccccaatggaacggtgagagaccggctttatccatagccgcctgggtgcaatatatgcttgataattttgcaacggtggatgaggctgttgccgaggtagaaaagaatactttcgatgtggtgtcggatatgatgcccgacggtacgcgtatggctacccttcatctttccatttcggacgctacgggtgataatgctatttttgagtatgtggacggaaagttggatattcatcatagcaaagcatatcaggtaatgacaaactcacctgtgtttgatcaacagctggcgcttgatgattactggaagaatatcggaggaaccacttttttgccgggtaccaatcgtgctgccgaccgttttgtgagagcttctttctatataaacgctattcctaaaacagaagatacccgtacagccttggccagtgtattcagcgtgatacgcaatacttccgttccgttcggtatcagtactcctgatcagccgaatatttcttcaacccgatggaggacagtttccgatcagaaggataaagtttattactttgagtctactttatatcccaatgtattttggattgacttcaaggatgtggatttctcagagaaagcgcctgtcaagaagttgaatcttctttccggtaaaacgtatgcgggaaatactgccaaagagtttgtcgctacaaaacctttccagttcttgggaatcaaatagtaggggttttacgctcataaaaaaatgaaatgcaccctgactacgcttagaaagggtgcatctctgcaaaacaaacaaacagtttcaaccttttatgaccaaaactgagatatactatatatactacaaatatatcttaggttttctatccaaaaaccttgtaactgcaaaggaagctaattttgaaagaaatgtctctatttcttttttacttgttataaataaaagtctccgggtgtattaaaaaaagtgcaataatactatatatcaagcatttgaaaaaatgcaccctgactaatgaaagggtgcattttaaccaaaaattgcctatcttagtcttcacagactatataatatgaagtaaagtaagtgattttattgagtaatcacactctcttgccttaggtcgttataaataaaagtcctcgtatgtataaataaatatctaaattttttgaatattaggtgtttatactggcaccagccattttgatatatttaaaaagcgagaacaggacgcaggcgacaagacttgtagaacttaaggcttttgctcgcagaaccggtgtgaaactgtagatatatcatctggtcaagacgttcccaatcttctgaactcgatgaataactaccagaacttgttagttggatagcctctggtatctggcttaattggccatttataaaattatatatttctgtagtatatgaccccttccaagtaatatttacctcacctgaacacaacaaagataattccttgacagaaggaaaataccaattacttgtattacttggagtaacacccttttcactatcgcggaattcttttatcttagctgcagaattggccaaatagtttgaattttcttcgtcatcattgaacttgtcgagaacacaagtgtggttataacccaaaatcttatttaagttaattccatcttgttcaactattaagctgacatacttattcgatagttccgtctgatttgcgagccattcgcttatactccgaaagttctcttgccacatcatttccttgaactccgttagggaaacaaccaatccatgtgtacaagaggggtggtctatctgtaaggctttatcgtctttacttggatcaccaacccaaaaaacaataccgatacagtttgctttttgtgctattgtcaggtctttgtcttttcctactaaacttccgtctttcatgagaaagtcaccaatttctatcacaggttcccagtcgctgattgtagcagtatatcgattgcctggtttatattctttcccatcttcgactttaattgatgctttgtgattctgcacgctgccaataagggttactgtaaatattccaccagtttttacggacatttcttcaggcataaagcttaaataggcggttagactctgattctctaaggcaatatctttaagattcaatgtcgtacttttagtttctgtgtccgtcccagtttcccataccagagcatctaatgttcctatttctaccggaatattggaaagctcaaactttaggatactgcttttcattttcaggttgatataattcaagtctgtaatgccagtagcttcaagcaatatataatttctaagatggtctgtattattgtttccgatctgtgtctgaccatccatattaaggctgacaataccagttccttctgctacagtaatactattgggataataaatattatagcttgttgcctcatcaatctccaatccggtaaaatctccggaagttgcaccgtcttctccagaatagaaataatcttcgctacctttataagcattttcagcaaatcctaatacagcaagtttatctccagtttgccaagttagttccagtttagtatcattatatgcgattctggtcttcgggctattatcataaggtgtacttacatggaaggtcatcattcttttacagcctgtacccagtgtatttatttcatctccggtgcagccgagaagtactgatacaagagccagcatcatcattcttcttaaataaaatgctcttatcattgctcaattgttagaatatcatttatcatgtcttccagatcactgctgcttgctctgttataggaacctctattgctactccgtgtagctgaccctccgtcaccaactccgggcagatttccacttgtagcaatcactccttcattctccatctttatcacctctatcgaaggtgccaaatacttttgtttatgtttcatattaaattaataagtgtgttttaaggcaataatatcctaaacaaagaaagagaaaatattagttattgtattttatcatatctgtatgcttattaaaaaaggtctcaaagcttattaagaaaagtattaattttctcaatatcaatggcaattctactgtgattgaatttcagatgaagtactctttttattacctttaacacaaaacactacgaaatttaagtatgacgaggaaagcgtgaaagatatcgaaatgcattatccggatgttttttataatacatcgatagatagacttactaatgagcttttcaaatttaattttttgaaaatcaataaaacaaaaagcacttcctgtcatttgcttacggaggaaatgcttcacacaaaaactaaattagactaagttttgtaaaacacctcttctccgctgattaatagtatgatatgaaggcttattttaccccgactggtataaactggaatgaaataaattatgaactatcaagattttgcagtttcataaaacgtatattataagttcttatatttgtgcatcaaatataaatgatgcgtttatggacgaatctgatagaaaaaggtgactgattgttttttacttaaataatcacgtttattgatgtcttagctatcatatatcgtacaataaacccattgagagtgatttctatttttttgtataattgtttttttgcaactttgccataattaaaaacagttatacaatgagaaaagtgttagtcattttattcttttttgcattctgtagtacattcatgaatgctcaatttagtatcaccagtcaaggttttaaaaataataatggtggtgattatgccgtttacgaattcccagggaagcagaaagccgaattgtttcaggctgcttcaaccagtatcttgaaatcaatgactgggaccttaccgtcttattattcaaataatgaggattttatagtgttaaccaacaaagtccgcaagcttgtgtataaggggatatgtggtttaaccgcagaatatattttgcgctttgcgattgatgatggaaaaattacggtttatgctcctaaagttgatttgagtggaatagctaatggtgccgaaatactattatttcttgatgctggaaagaattggaatggacgacatttccatatatttgataaagaaggtaatttaaaagaggacgagataaaaatgaaattagaaaactatttcaatgaagaaatagaaaatttgatgcagttgaatttttagtattagagcaattctgtttgatataaggcagtcgaataagctgccttttttgccttttccttactattatctgcagaaataatactacttatttatgaatataataaatcccgaatctgttttttgttcaagggagattcgggattgaaaagttatattgagagaattagagtaacttttgtatcaaggctaaaagcatatttaaaaattggatgctattttcatagacatactttggatagagctatatttgattttttcgatcagtttcgcaggattaagtttttaatagataaataactaaaaagctaaaagaggacgcacacgataggaactgttggacttacggccggtgtaggacaagatgccaaggtggttgaacctcacattccacgcggcgttgccgctgtcgccgctgtactccgtactcgaccagaagtagtcgaggcctttgtcgaaaacatttgatccactgacctttttgatttgagtatccaacatcttctttccagcttcacccttctcattaccttgcccccaacacacatatttcaactcttctacagaaggccagtaccaaccgctactgcttgagggagacggatggtctgtttcaaaagcatccaagcccttgacgggtttcacacaaaggtcctggtccttaccattattaggattctctatatacttattatactcctctaaagcaatggtgttggcgtaaccctgcatgtttttatcttcttgaatactgataaaatcgtcgggacgcttaccatccgtccacgtagcgttagccagccaatcattcacaaactccttaccgttatacgtccaccatttcataataactttatttgggttatccgggtctggcatatcccacaaagaaacgaccaagccgtgcgtaccgtaggggaatttactgtccaatagggtgtaattatcgcccttaatatcaccaacccaatagacgatgccgatacaggcggcttgctgtgcatcggtaagtgttgttgcatcctttcccaacagcgtaccgtctttcataaagaaatctcccgcttgcagttgatgtgttttctctatagttgttgagctgccaccatctactacatactttctgtactgaccggtagtggcggaagaagttgtaaattcccattcggcggtggcagaggtggcattggtatagcttccggaaagattggttgcggcaggatttatcaggtaacgatacataccgtcgctcgtccggtagggggtgaaaccgttgaatttcgtatcgggggcatcgatgatgtaatcgggaagcggcttgctgtcggcatccgtcagcttgtactttatctttggcaggtctatcaccaccagcgccattttgtgctgcatggagaaagagaggcttttaccggagggagtaccgaaggatatcatcaggtcggagccggtgtagtctgtatatgttccttgattggtagagggagcccagttcttgactaagtcagcaaagaaatcatcaacatcagtgacagaagcattaaccttgtccgctatcttatcgttggattgccaagggtaataagcataataggcagcaccggcaggaattatcggtgtatcgccatcctctgttttccatacgaggttgccgtcaccggcatccgtttcggcagtggctacgaggcaaagattgtttactccaactatttcgttattcttcacggcaaagacgcctatcttgtcgcctgcggtgaattgggtggtatagtcgttctctgtggcacgagtgtcgggtttctcgcctgcggcgggagcatagccgccatcggacacctcgatggtaaaggtggtgcggttggtgtcggtattctcattaccgggcagttcgttttcactgcatcctgtcagcagaaaggctgagacaaacacaacgaccgcagcaagttgcacgaaggccaccgctgtgatattcgggatatggggaatgattcgtttcattgtcagtatttttatttctgacccgcttcgcgggattaaatattaatagataaataatattaatagaaaaatagctaaaaagcaagaaggggacggactcgaaaggtatggtagtacttaccgccgctgtagtccacgcggccatcgtagaagtacacgtaccacgcgttgcggctgtcacggctgctctccgtactcgaccagtaaaggttaccgaaaacatttgatccactaacctttccgatttgagtattcaacatgtcctttccagttgtaccttccccattaccttgcccccaacacacatatctcaactcttctatagaaggccagtaccaaccgctactgtttgagggagctggatgggagttttgaaaagcatccaagcccttgacgggtttcacacgcttattaccgtccttaccgtaaccatctcctgacccattctttacgtatttattgtactctttcaaggcaatggtattggcgtaaccctgcattttatccgttacttgaatactgttgaaatcttcggggcgagtattatcacccgaccactgagcgttagccagccaaacattcacccactcataaccgccatacgtccatgtcatttctatctccccattatccggggctgacatatcccacaaagaaacaaccaagccgtgagtgcaattgggtttatctctctttaataacggatcttccccagtaatatcgcccacccaatagacgatgccgatgcatgtacgttcagctcccgtactcggatcggtcaatacgggcttaatgtccagcacgacgaaggagtcgtctgtatatttgcggtagccgccgtctgagctcttcccgtcactataatagtaatcaccgattttcaggtcgtctgcagtgaagcctttcttaagtattttacttgtaacgttagttgtttcttctccaccgccccatgtgccgcccgttttcaccgtcatcacttccagatagccatgcttcacggtgatgttataggtatattgcgtgccgcttttaaggtcggcatctgtactctgcggagtataataataggtattaccatccctcagggaaacagcgatgaatttctgttcggacatattctgcggaatgacaagagcggcataggttttcagtatatcgctgctgccggaggcggtgatgtctttcggagtgatggtgcccatagtgccgcctgaaatatcccatgtgccggtggtaacatttaccctggtgggtgctgtatatttacccgaaagggcgaggttcttttcgttgccgataacgacacttgagataacgtcggcatccgttgccgcttccgcattcttgatgtttatcaccacacgggcggtctggtgggtgaaggcaagggatttatccgtgctaccgaacgagatgtcttttggagcggcataaaggaagtcgctctgctgatagccttcgccttcattttgatccggctgtacgctccatgatgtgggcactccccctgtatttatccccccggaagcagtggaactgtcaccgcaataccaggccctgatggtcttcgtctcgtccttgctctgccagtagaacggatcgtcggaggtcagggtgacattgttgccattatttgacggagcatatatctttatctcatcacttacctgtacggctatccggtcggtagtagtccattctccgtcggcagtgcccgcacgtgttacggtcagcccgtccacggcagctgtaaacgtcatcgggtatttcccatcaggtagacgtttgtcactgtcggtctcctcagtacagcctgccgccataattccggtcaggcaagctatgcacaggctgatactaagtttcttcatctttctgttcatatcggatttttctatttttatctttttcagtttctttttcattgtgccaccgctccctgcgaaaggagccgttacaccttttcatacgtgtacctccggactttacgctaccgtccgggatggcttttgttattcttccatttcggcttcaccggtataagaacctcctgggccccaaggattaattgaagatgtaatatcaaggctggtcaggttaactgtgatctcgtatttgtattcattaccagctgtcatttcaatatcgcctatcggctcattatcagcatctgtcaagttttgggagtagagtacaccgcctgtattcagtgttaccctgatgaaacgtcgtttcccctccacttcttggtttagcgtttgcggtatgactactgcactaccgctgaggttggtgcctttatccattactgtgattgctattttatccttatccgcttcagctccagatattgtacccgtacttgggtcgagcttggtagtaggcagtacgttcaacagttccaccttagcacctgtcaaatctggggtacccacacctgaaattagtgtgacggtcacttttgaaagtaagtgcttgaaagtgatatttacatgatttttggtgcgacctaccgggtttttgtcgggtgttccatacatgaggtcacttgctctataagcgtcatcactgctttggtctgctacaacttcgaaatcaacttgctcttcatcaatggatgtcactgttcctgacggataataggcatagatattcacatcctttccactggtaggataatagggctgggggcttgtgctcattgagccgtctccgcctgccgtgtaaaccaatggctgggtatagctggtagtcgcggtttcgtctgtagccacagcttcattgataaacacgtctatcttttcacctgctgcaaattgtccgctttgaatgttgcttgcagcacgtgtgctattaacctgttgtaccgctagtccgctactcaggcgtatttctcccgcccaattgtccgtttcttcattgttgcaggcaaccataacgattgctgccgcggccgtagccattaaaaatcttgttttcatactgttcttttcgtttttatgttaatattcagaattttcaatttccctgttattcggcacttcccgtttctccctcaccgttcccgggctgccagtcagtgacggaggattccacttcgactgacatcctgttgaccgtaatggtatatatatatttctttccggcctcgaaggattgcgatttgggtgcatccttgactctccaattgaaggttcccacatccggtatgtcgaaaacaaggtacatcccttccgtatctcctacaggcaatacgatagcttccgccgctgtcccgtcggcagccgtcagcagttctattccggtttcttccccttcctccgggatcaccacctctccgcctgccacaacgtcgtatagggcatttgtccgctgtccggtcagggttattcccgtacccgcgagtgccgtgttgtccaggccgtttcccgcctggatatcgagggctattttcaccagcttgtgtgtaaaggtcagtgccacctgcggatggtccttgtcctttcccgtcaccttgccggctcccagcaggtcaatgaggttctgcaccttctggtcggtcacgtccacggtataggtcctgccgtccgttcccagcgttttctgccagggatagtaagctatgaaatcgcgtgtgtcaccgtttgtgggaaaatagatggtctgcgcggcatcggccggtgagaatgtcccctttgttgcatcggaggttgtggtgtacttgcggtttgaatcttctacactcaggctttcaccgcttccatgcattgagaaaatcccgatggcgtcgcccgcctcccatacatcgtcatgggcgcgggtctgtattccgctggtaacctgcaatggagtgcgtccggccgtagtgccgttcccatttacgtcgttttcactgccgcatcctgccagaaccagggcggcgacacaaaaggggaggatcattccgcctcccggcctgtgccggatgaagttctttctcttcatttttcttcttttttttgttttacattatatccctttgctacgcatattctctttgatgggggcatgctttaatggatgtctatgtctccgccgtccaccacttcccagcctttaatgacagccccgactccggcctctgcgggaagctccagcgaggtgtataacagcaggggctctttttcaccgtcggaaaaaccttccagatactcggtcaggtcgtttgtgatggtctgcctgtccccgcttttcaattccagtatgagtgtcagtacctgtctttctgcgggtatcactcccagcaggcgtaggtccgccttgagtacgggtgcgccttcctccgttccgtccctgaagagaggtatcaccgcctttccccgtgagtccgtgagtgttccggtgcccagatccacggaagaggcaatgccttccaaggttgcagaaacagaggataaccgttccttttcaccctcttccatcttcatcaccagagagaggagccggttgtgctggcgcatggacatgcttgtcctcaatgtatcgtcagccgttatctccacctctttgactgcggaaaagagatagccgggcaggggttccagagttccgtcttccaaggtgtttaccgtggcggtggcttcatcggtggtgattccttcggccttgctacaggccagcagcttgtgttgtcccggtgagagcagggaagggaagatgtagggcgtacttcctacctcatactcttggttgtccacatgcaggatataggtatccggtaataccgcttcggaagaggctcccgcccagtccgcggtcaccacaagtgctcccttgtcggggtgttgcgtattatagagatcatctttcacgcaccctgccagaagaaggatggtgcccatcaggagaaagcctgtttcccgggttctggagtattctttccgaaggttgccggtatgctgttttttgattctgtctttcattgtcctttttcttatttgaattgccatacaagggtgattccggcatggtttatcccccagtagtttttattcgctttcccctgtttgatacgcacaccatcggtaaccgtgtatttttcatactcggcatgggtgcagcccgcaccgatggataaatccagtgatatggagttgttcaaccgcatctggtacccgccggtcagtcctcctcccttcaggtctccctgcttgccggtgtcgcctaatttatagttgaagctgcccatgtggtacatcgctcccagatagccccgcttctctttaccgatataatggcgtagctccggtgatatttccagcagggcgtatcttctttctttgttgtcccagctccaggaagtccatgaaccattcacctgtatgccccagttcctgtttatacgccattcgatgcccaggtccggtgtgagtgttgcccagcgtagcaggttcagccgcagggtgaaaccgtaatcccctgcctttgcctccgtagcaggaaccgtttgtgcgggttcggtggtttcttcacggatatcggatgtagtggctgtttccgtctgtttctggtattcttcctttatagaccggctttgcacgggttgttcagtagtggtgtcttcaccctgtccggtttcagtttcccggggtaggggaactgctatccttacggtgacataatcaccgctatcggcatggttacgggtgataaagctgctttcatgtagtccctgccgtatgattaacttggacttcacccggttggaacgggtcttggctatcctcatgttttcagtctggctgtctaaggaattgcaataaccgtctacatataagggtatttttccttccaggatctgttgtttgtgctgttttacacactctgacaggcggagtaactcatcttgattgtccccgaaaggtatatagaacatatccttttggggcacaaaacggaacatgtaaacagtgtccgtctgttcctgtgcggataatggcatgccgacgagtacggggatgaagagtacaagcaattttttgataataactgatttgtccatattgtttttataggctttacgttggtttgccataaagcctttcaaaatgttgttaaataaagacaagtataa

SEQ ID NO: 6563 - DNA, 351 bp, Unknown
  gut microbiota DNA sequence
ttttggtagagcagttcgcagagcattgacctggtccatattgggatgtggctgttttgctaatgcatctggagtaaccccacttagagctgtttgtacagcagaataagtagcattttcaattttggctataggatattgtccattatacccccatagatagacaacatgctcaatgttatctttgatatagtaagctatattcccataacaatcataatttagatatttaatacgaagttgaggagttgtatttcctttggcaacagacaagtcttggagtagtatcctattttgttcttctttatatgtgtgtattttacgacttacaatagaagtatttatactttc

SEQ ID NO: 6564 - DNA, 3253 bp, Unknown
  gut microbiota DNA sequence
ttttgctatatgcatattacaaaagtgtgactaaaaatggaataaatgacctatgtacgatctattaataatttatatacctttgtagcatcttacacataatcaacccttacaaacaggaagtcataatgataaataaactgttgacacttttacgaagcccttatccatcattggtgaagagatggaaaagcgtgataataccttcacttatagtgtttctgatcctttttgtgttgcagccttttggcatttctatgatgggaggctataaattctgggtagtgttaggttatggagtggtttcttcattggcactgagtatctccacgtatttgtttcctgctttgttcccccgttatcatagtgagaagaactggacattaggccgcgaattgttaggaactttaggagcttgtttgctgattgcgataggtaactgtttctatacggcttgggtatttggttcattcatattgagttggaaaggatttctgataagtttggcttgggtggcggttcttgctcctttccctattgtcttctttttgatgtggaatcgtaatttgcagctggtacgtaatctgaaggaggcaacggagatcaactacgctcttgcgaaaagagagaatactcagaaggagaagattcggacaaggaatgaggaacagataggagaggggagagcagcagaagaagtggcagcagaagaagaaactcctatgcaattggttttctccggcggaacaaaagaaatgctggaagtggatgcccataccttattttatgtagaagcagaagggaattatataagagtagcttacagtagtgcggataagatgcagcaaaagttagtgcgggctactatgaagcaggcagaagaagcggttgctgcctgttcgttcattgtccgttgtcatcgggcctttctggtgaacatacgcactgtggtaaaagtagatggaaactcacaaggataccgtttgaggctggaaggatgtacggaagaagttccggtttccagaggctatgcaaaagagataaaaacgctgatagaaggggggacggaagggtagtcattcgtcacagaataaagaaaaatacagccattcgtcacaggaggagtgctgtttgtcacatatccgggcagtctgtcccggatatttttttgcctgaaattcttagtctatgtttgctgacggaaatcgtaaagaacatagattaaatgaaaagattgattctactttttagtgtaagtgtattgctgacggtgcagcacttggaagcgcagacagctgtgacagataccgttttcttgcaactatacaatgacagtgtagatttgaacgaagtggtagtgaaaggtaaaaaaacacctgttgccaacagtcgttggagtgatatgagtccagtggaactggtgactgtgggaggtgcaaacggtgatttgtatcaggcattgcagacactgccgggtacgcaggtacaaggagaaagtggccgtctgctggtgcgcggcggaagtagtgatgaaacacagacatacattgacggaatgcacgtcttgaatccttatacggctacaggtataaactcaccggcacgcggacgttattccacttttatgttcagtggtgtcaatctggaatcgggcggggctccgttggaatacggggatgcactttcggctgtgttaccattggagacaaaggataagagccctatcaataagttaggcatcaatgcctctacggtaggcttcggtggaggaggtacacgggctttcgataaaggttcgctttcggtgaacctggattatcaggacttatgtgtctatgatcatatctattcaggacgtacggattttgaagatccttaccggatgatgaccggatcggcacaattccgctatcatcccgatgatgctacgcttttcaagatttatggcggatatgatcatactgacttttccaattatgaaggcgctgaacgtagattgttcgatttgaatgagaataatttctatctcaatacaactttccgtaagcgtacttccggtggatggaactggtttgcaggtgcagcattctctttctttgaacagaagataggtaatgtatcactttcggcagatcattggatggaacaacaacaggaacttcatgcaaaggcaaaagtgttcaagcgtatttctccggcttttcgtctggatatgggagtggagagttttatccgccggtatgagaatcgttatcaatatcagatgaaagaggcggagggaatagatagccattatgaaatgaatccgacgattagtgcaggctttctttcggcaacttactatccggtggagcaactgaaggcggaactttctgtccgcacggaatacacttcattaaatgagaaagtgaatttctcaccccgtctggctgttaattactatttgggaaatgtagtactctctgctacggcgggacgatatacacagttgccggttagcagattgctggctcaggagaacaagttgaaatcggaatcatgcattcagtataatgtgggtgcacagtatgagggtgatggacgtttctacaaagctgaactttattataaaaaatatgatcgtctggcattggtggaaaagggaacggtagatgcagcggaagtgttgacttccggtggttatggctacagtaaaggtttcgacttattctttaatgaccgtgtcctgctgaagaatctggaataccaactttcctatacatataatattgccaagcggaagtttcaggaatatacggaactgactactccgcaatatgccactcggcacaatgcatccgtagtgctgaagtattccattccgcgaatcggcacgatagtcggtttgacgaaccgtttcagcagtgggcgtccttatcataatccggatttaccgggcttgatgaatgatcatgtaaagccttataacagtcttgatctcggactgacattcctgcccagtaagaaagtgattattcatgcttctgctaccaatatcctttgtcggaaaaatgagtttgggcgggtgaataataaagctattctggcttcaaacgatcatttcttctatatcggggtgtttatcacacttgggaagaaggcggcttatgatgtttctaatttctaatattgatacgcggacgacgcagataaggcggacgaacgcggattaaaaactatattaattaaaaaaaaaggtccgcgtccgtccgcc

SEQ ID NO: 6565 - DNA, 31174 bp, Unknown
  gut microbiota DNA sequence
ataaactctttaaaaacaattcaaatgaaagcaatgattattagtttcgtatgtgttttgacttttgcaactcaaagtctgtctgcacaaaatcttactctggaagtacgtggtattgaaaatgtggctggtaaactttatgtcgccatctacaactctcaggagacattcatgaagaagccgcttgccggttttgcagtagaggtgaaggataaagttgtgtctatcccttgtaaagggcttccggcaggaacttatgccttttccatgtatcaggatgagaatggaaatggtaaattggataccggtgctttcggtattcctgtggagaagtttggtttcagcaatgatgccgaaggcgttatgggccccccttcctatgaaaaatgcagtattaccttctctgaggatacaactttagtggtacatctgaaataaacttcagataattctttaactttgtagctcacaccttaattaatgtaagtattatgagacgagctacacaacttttcggaatatgctggctactttgtctgcttgctgcctgtggagaatcccattttatgaccgatgcttcgtatcgttcgcgcgtggagcaggactttcagcaaaagaaggctctgatgccgcagggagaactatttacgatactggatgatgcttcgctgagcacttatgagcaggaagccctggaattcctttatgcctatatgccactggcggatattactgattatcccggtgaatttcacttaatgaatatccgcgcatcccagcgtgccgcagaggaaatgccttgggggaagaccattcccgaagatttgttccgacactttgtacttccggtgcgggtgaacaacgaacaattggatagtgcgcgggtagtgttctataaggagctgaaagaccgtgtgaagtccctttctttatacgatgccatcctggaagtgaaccattggtgtcatgagaaagctgtctatatgccttccgatgcccgtaccagttcaccactggcaacagtgagtactgcttacgggcgttgtggcgaagaatctaccttgctggtggcggcacttcgctcggtaggtattccggcacggcaggtttatacaccacgatgggcacatacggacgataaccatgcatgggtggaagcctgggcagatggtaaatggcatttcctgggtgcttgcgaaccggaaccggtactggatcttggttggttcaatgcccctgccagtcgcggaatgttgatgcacacaaaggttttcggacgttatgaaggaaaagaagaagtaatgtccgttaaccccacgtatacagaaatcaatgtgattgataattatgcgcctacagcgcgagccaaggttatggtgaaagatgaagcgggaaatccggttcctgacgcctgcgtggagttcaaactctacaattatgcggaattctataccgtagcaacgaaacataccgacaacagcggtatgtgcggactgactgccggaaaaggggatatgcttgtctgggcctccaaagatggccgtttcggcttctccaaactttcttttggcaagcaatcggaactgaccgtaacccttgataagcaagcgggtgacagtttcacagtagatgttgatatcgtgcctcccgcagaaagtgccaacttacccgaagtgacgccggaacagcgggcggaaaatgaccgcagactggcgatagaagactctatccgtaatgtctatgtcggtaagttcatctcggaagaggcagcacgcaactttgcgagagattataagttggatcgggatgcagtagccaaaattctggttgccgcccgtggaaattacagagtaattcgtgagttcatgactcgtctgcgttctgataactccaggaaaggaggaatagaccttttgcagcagatttcggcaaaagatcttcgcgatgtccgtctggatgtgttgatagatcacatgcagtctcgtgtgcgtacgacgaatgccggatatttccgtaaatatgtgcgcaatccgcgcgtaagcaatgagatgttgactccgtataaaactttctttggtaaagtgatttcgaaagaagatgttgaggcttatgtggcagagcctatgaagatggttgcatgggtggcaaagaacattcaggtgaacaaggaatgtaatctgggggcgcctcctgtatctcccgaaggtgtgtggaaagcacgtttggctgatgcccacagtcgtgatatcttcttcgtgtccatggcacgcagcatgggagttcccgcacgcattgatgaggtgacgggtaaagtacagctgataactgacgatggagccatagatgtgaacttcgaagcagccggacaggcacctgcgcagaggggcaggcttgcagctacatatacaccgattcagtcactggataatccgaaatattattctcatttcactatttccaaagtaactccgcaaggtaatttgcagttgttatcttatgatgagggtgacacagacatgggtggcggcgttacatggagcagtttactgaaggagggaacgtctctggatgccggagattatattctggtaaccggtacccgcctggcaagtggtggtgtattggcgcaaatgacatcattgaatgtgaaagcaggtggacgtacagaaacgaaattggtgatgcgtgaaaataaagatgaggtacaggttatcggaaacttcaattcggagagcttgttcacaacattggaaggcggcaataaacaaagcctgcttcaagcctgtggccgtggatacttcgttgtcggtattcttggagtgaatcaggaacctacaaaccatgccttacgggatatctctgctttgaaagccgatctggagaaatggggtagaaagctggtattactcttcccgaatcaggaacaggccggcaaatatcatgctgctgacttccccgatttacccaatactgtgatttatggaattgacacagaagacatagctcaacagattgtgaagaatatgaagttgaaacacaaagatacattgcccatatttatcattgctgataccttcaatcgcgtggtatttgtttcacaggggtataccatcggtttgggtgagcagttgatgaaaacggtgaaaggactataagaacagcaacaatagagtgggagaggcttatttgcaagcctcttccattttttgtatcacttccggtgagggcaacccctctgtcattcctgtcagcaataaactgaagttatcggctaacacttcttccgggtcaatgatgtactgagtattacgtcccattctgtcataaaaatcagaggcttcgttaatagagtaaaccactgccttaccttctttctcaatcgctttgcaggtatttttatcgatgggaacgaggccaatgttgaggtattggaagaagctgcctccctcataaggcttggttgaataaattaccatgcagcaatctttcttttcaccgttgatggtaaaagtagcataactgtcgtggcggataacatccggattggagataaaccgttcttttaactcttcgggaaattctatttccttcggaagaatattaaaaccgatgatgctgtacatcttcttgcggaaatccggattgttccgggtaaggacgtgaaatgcttcatgtgccaacaattttgttacatattcaggatgttcgagcaacctgtcgataagtacgatgtaagtatctcgggtatatcctcccgcaccaccttcttcttttatcgttgactttattaatctgacttcttccgggaaaggaagtttcagctctttttcacggataatctgattgatggattgagatgacttctgaagcagagccgtttcctcgtcattccaattacgggtctgtgcgccggcaaactgcaaatatccctgttttccaccttcgatgccaacggtgtgtgaagccaagtcaaatgagctccatctgcggatatgctcgtcttctttctgaaggaggagtgcggcttcttcctgtttcaggaaagtagggacaatgctgtcggaagtggagtttgaggaactttgatttttagcttcatgcgcacatgaaatgctgaggagagttaataaagtgattacacttaatgccttcatattgattgctttaaattaattcttaatggaattggtcaacgcctttattgttttttttacgcgttctgcggtagtgatggggcgacgatactcttctatgttcacagtacctcccatcgaaacagttccatttctgtgcagcattttgctttcgatggtctctcttgctgagaagtggaactcccggataccggtttccgtggcgatgtgagcgatattattttcatttactccgcaacctgccagcaggataatgcgcccgtctgcctgctgctgcaatttctttaataaagggatgccctgttcggccgtggcctgtgcaccggaagtaagaatacggttacaacctaactctatgatttgctccagcgcttcctgtggattgcggcatacgtcgaaagcacgatggaacgtaacggacataccttgtgaaacttcgatcagctgcctcattaaggacaggtctacatctcctttagcggtaagacaaccgaatacaactccgtctgctcccaattgacgggcgttgtcgatatccttcagcataatgcgttgctcaatgggggagtacagaaaatctccgccacggggacggatgatgacgtgcaaaagagtctttgttaaggcttcccgggcaatgacgatatctccgtaggatggggtagtacctccttccggtattccggcgcataattccacccgatttgctcctcctgcctgtgcggcgaggcaactctccacggagttggcacaaacttcaaattgatattgctccataattgataatcaggattacttggtttgtagatgcaaaaataagaaacagtttcgtgaatgacaaagaaaacaaaaagaggcagggattttttgtttccccacctctttatcactagtttcaatctttacaatttatttcgcatagcttactgcgcgtgtctcacggattactgtgatcttcacctgtcccggataagtcatctcatcctgtatcttcttcgcaatttcaccggaaaggttttcagtctgcttatcgtcaatcttatcagcaccaacgattacacgcaactcgcgacctgcttggatagcatacgtcttcgtcacacccggataggccattgccaactgttccagatcgttcagacgcttgatgtaagcctcaacaatttcgcgacgtgctcccggacgggcacctgagatagcatcacatacctgtacgatgggtgccagaagactcgtcatctccacttcatcgtggtgggcaccgatagcgttgcagatatctggtttttctttgaatttctcagccaacttcataccatagagtgcatgcggcaattccggctcttcatcgggcactttaccgatatcatgcagcaatccggcacgttttgctttcttggggttcagacccagttccgatgccatcacagcacaaaggttggctgtttcgcgggcatgctgcaacaggttctgaccataagaagaacgatatttcatcttaccgataatacggatcagttcaggatgcaaaccatggataccgaggtcaatcgtagtacgtttaccggtttcgatgatttcttcttccacttgtttacgtactttagatacaacttcttcgatacgtgccgggtggatacgtccgtcagtcaccaactgatgtagtgccaggcgggctatttcacgacgtacagggtcgaaagctgataatacgatagcttcgggcgtatcatctaccacaatttccacacctgttgcggcttcaagcgcacggatattgcggccttcgcgaccgataatacgtcccttgatttcgtctgattcaatgtggaatacggtcactgaattttcgatggcagtttccgtagctacacgctgtatggattgtattacgatacgttttgcttctttgctggcagtcagcttggcatcatccatgatgtcgttgatgaaggactgtgcctgcgtcttggcctcttctttcaaagactcgatcatacgttctttggcttcgtcggccgagagtccggaaatggtttccagtttttcgatttcctgctgttgcagtttatccagttcgtctttcttcttgtcgataataaccagctgggcttccaggttttctttcaccgcttcagcttctgatttcttacgctgtatctcttcttggcgttggttcagcaccaactcacgttgtttcaacttgttctccgcttgctgaattttctggttgcggatcgctacttctttttccaagtctgcttttttgttcaggaacttctcctttacttcgagcaacttattctttttaatcacttccgcttcagcctcggcttctttcagaatgttgtcatatttggacttcaaaccatgtttgaagaacatgtacgacagaaatccaccgataatgaaacaggcaatggatactagtattgttactgtcatttcaatttgttttaagtatataaataaaaaacgcactgcaggaaagctaccctcattcttttttaagagggatactttcacacagtgcgtggattttctaattcttttgctggctctggtgttctgaggaaaggcttccggacgtttacagtcctttgaagtatgtttccaacacctctgtcagttcttctatcttgtcggcatacggacgagtatcgtttcggtttttcattttcaggttctccaaagcaaattgataggccaccatggctataattttttcgggagtcacattctggtaatgttctcgatacgcattgagccgtatatccacctgtttggcggcttctctaaccatttcttcctcctcgcgcagtatggtgagggggtaggttgagcctgccatttgcaggtttatctttattttatcgttcatacatctcgttattcattcaacaaagcgatgcatttatcgacttcacgcactaatttggacaatcgcagtttcgtctcttttacgtcgctgccgttaaggctgattgtcattgctgtttttaggttcgtatagtcatcttccaaagcttcatattcggcatgtacctgctcgcattcttcttgtttagtttttagaagttgctttaattcagcattttcacgcctcaattcatcatgcaaaaagatcaaatggcgcagtctcgcttcaaaggtacttaatcgcttcttttcttcgtcagtcattactataccaaaattgtacacaaaaatacaattaacttggagattacaaaaacttttcagggaaaaatgttgtaggagaggtgaaataaccggaaaaaggaatttgtgacgtttgaaaatggaatcttcggcggtggctaaaaactatatcaatttgtacattttactaatcttgatactgcgatacactaatatttttcttgcataatattaatcttactacaactatatttctttcttacaatagatgtggtaagaatataacatagttgtagtaagaaactaatataactgtggtaagaataatattattaatcctgatgattagtttatcgcagtgcaggaattagtttcttgcgacatgacatttagtttttagttatatattgctcattataaaataatttatataataatttggtttataaaataaactacttatatttgcagtggagttcgaacccaaaatatgtttttattgtgaaaatctaaattgtgtatgattatgaaaatgactggtattaaatgggttacgctgttagtgttaggctttggtgcagtatctgtttctgctcagagtgacttgacggtgaaggtgaagaatatccgttcggcgaaagggaaggtgatgattgctgctgataaagggcagtatgcgatggcggacgctactggtgatacagtgacgcttgtattgaaagaagtacccgaagggaaatgcaaattgtatgtgtaccacgatgaaaacggtaattatcaattggacagagtagacggtgtaccgacggagaattgtgcgattgtggatttagacatgacagctggagcaaaaacaattgatgtcgagttgaccgatctgcggaataaagctaaaaaataatttaatggaagagaaagacattattatggaagacaaagaattgaacgagcaagagagtttgaaacttatcactcaaatgatacagaatacccgacgtaatttagatacgggtagtggaaatatgtttttgttatggggatatgtttctgcaatagtgacgttggtagtttttgcaggaatttattggacgcgaaatcctgtttggatgtggggcttttggggagttccggttttaggttatctctttagcttcatactggtacgtaagcaacgtaagctcgcaaagttgtatggcgataaggtcttgaatgaaatgtggcaaatcatggggctactttgtattgcgattgtacttggagcaacgtttaccaatcattatgagataattctgccgatatgcgcaattcttatttctctaagtagcattataaccgggagcataattcgctatacactcttttccggtttccctgcttttggaattgcattgggactgaatatgttattcaatattctggataagacttcttcctatttgtcattgttagaatttgtattggtgattgtttttgcattgattattcccgggcatatcctgaattattgtgcaagaaaggataataaacgatgagcaccggatcattaacagcagaaaaagctgatatgtttgaagaaggcaatatagaggctattacccgaatgatgcaaaatcgcaagaaaaatctgctttggctggcagttacctcactaatggtattttgcctgtattggctttctaatgtggtgttatgggtgccttggagtcatagtccgcaattgggtatcattctgatgctgactgtaaatcccgtcttttggggagtaggcatatatgtttgtctggcttgcgaaagtggagtaggaaatctgatgaagaaagctcttctgctagccttgattgcggtaggaatatctttgctatccgactatctgttttttgcagtatacatgaagtcgaaggacgtatggcacattaccacattctatggttatgcttggttagctgtactggcttttggggaggcactcttattaaagaaaaaattgatggctaaactgtatcccgtaacgaaaagactgttttttgtattgggcgttttcctattagtgttattgctgtctttgtcttacctattagtagaatgaaaaaatgggaacttgggtgatatatatgcttgcgggtaattgggctttgatgctctatttaatactaaatgtatatgattgggaaaagtgatatattaaagaaagggaatcaatcatgaaagcgaatcgttgggagagttttttaacttcctggaaattcttttcattgctggtggtattgcaattcattttgatgcctgtagcgacgaaagattttaggtttgaggcagcgggagacatcgtattctatacgttgcagcatgcctttattatggatatgtattcatacagcttttattttcaggtggtgatgatcctggctttgatagctgttgtagtctggaagggaaagtttagcagagtttttactgctattataggttgtttttacctgctttatgctgtgatacagaatatggctgtaacaggacagcatggtttcagcatggtaacagtgaacgttgtaatgattggtttcgttgcattagtctggctgtgtgctgcatggaagggcaacaatgagttttcttttgataatgttacctggaaaaccggttggacgatacctgttgctctgttttgtttgtggtggccgatgagtctgaaaacggcattgccggattttcagctgcattatttgtatgatggcggttcggcattggctttctgtccgatgactcctgtgtttctaactttgcttgtactaagtaaaaggggagtgaacagggtagtgttgcgggtgacggcaatggtaggagttattatcggatgttataatatgggtaattttgcttctgataccggattttatgtcggattgtaccacttgcctctgctgggcatgtccatttatgcgttgttgcatagcagacagaagagaaagagtccggaatgtgtatgattaaaataatttgtattgaatatggacaataagaaattgaatgagcaggagagtttagaactcatcactcaaatgatacagaatacaaagttcaagatggtgaaaaacgctggaactccttttttagtatggggatacatgactgtggtgacctctttactggtttggtatcttttgaaagaaaccggcaattattactggcagtttttatggcttctgatgccggctgtttcttacccggtcactatctatagccagaggaaaaagcaaaggatggcaaaaacgtatatcgaccggatagtaggatatgtatgggtagttttcggactatgcggattgctgatttcatgtgtatctatgatctattggagtctgcctatactctttgtgatcctgttgatgatggggatgggaactactttaaccggactaattataaatatgaaactggttacggtaagcggtgtgctgggtatatttgcatcattgggttgtctgtatatagacaagtttgatcagatattgctttttgctttagcctttgttttcatgatggtcatcccgggacactatttgaacataatgtcaaaacgaagagtttaatgtattatctttgcactataaaaatagaaagaaagcatgtttaaagaactgaaccccttactgcattccgaactgcgcctggcggtgatgtcgttgcttattggtgtcgaagaggcagactttgtctttatccggcaacagacgggggcaacggcgggcaacctcagcgtgcagattgataaactcaataaagcagggtatgtggaggtgacgaagacgttcaagggaaagatgccttgcactatctgtaagattacgccacagggagtagacgcttttgaggaatatgtggaagcactgaaaacgtatattataaaataatgaaagcaaactttataatcagaccagctttgcagtcggatgctgttgagctgaaaaatttatttcagaatactgttctcgcgataaataggcgtgattactcacaggcggaagttgaagactgggcatcatgtggggatgatctttctaatatagaagatatgataaagacccattattttattgtagctattaatcaacagttggaaatcgtaggtttttcatctatcacttcccagggttatttacactctatgtttgttcacaaggattttcaaggtgaaggtattgctacaatgcttttgaatgaaatagaacagtatgcaattacaaatgggattatgcggattacatccgaagtgagtttaacagcccgccctttctttgaaaaaaaaggttatatagtggaggaagagcaaaagcgcaaagctaatcagctttctcttactaatttctggatggccaaacagacgatatgtccgaaaaacttatagaatagacaaaaatcagattgaagttttccgatattattctctttttcttgtaacatttcggagtgacccgtatctaaaggaaaaactttagaatatatggtgatgaaaagattacttttgaccctgatgttattgggaacttctcttttgatttttgcacaggattatcctttttcggtagtaaaatcgggaacaggaaaacaaacggttatatttatacccggttttgcatgctcgggtgatgtctgggcggaaacagccagcgtattgaaagacagctatacctgctatgtgctgacgatggcgggcttttcgggtgttgcacctgaagagtgtccatcattcgagagatggaaaatgcagattgcaaagtttatcaaagaggagcggatagagaaacctattctcgtggggcatagtatgggaggtggtttggcacttgcaattgcggctgaattcccggagcttacaggaaagattgtgattgtagatgccttgccttgtctgatggctttgagagttcctgattttaaatctgctcctgataatgactgcacagatttaattgacaggattacagctatggatgaggagcaatttgcacagatgcaaagaatgagtgcggcaacgcttaccactgattcattgagatttaccgaaattgtaaactggggattggcatctgacagaaagacgtatgctaaactattctgtgatttctcgaatacagatttaagggaatgtataaagaatatagttgtcccttctctcgtacttttggagccttatttcaaacatatagatacggtcattaagaatcaatataagaatttgtcagtagcacaaatcagatatgcagataaaggcttgcattttgtgatgtttgatgatagggaatggttcattcatcaaatttgtgaatttataaaagagcgttaagtggaatttgaagatatatataggaggtactggaataaaatattccgcttatgcatggggtatgtaaatgactacagcttagctcaggacatggctcaggaaacttttattaaagtctggcaatatctgcccaccttcaggaatgaagccaatattgatacttggatatttcgtattgcaaccaataactgcctgcgtcagctggaacggaagaagcaaatcttatctacgcagtttcctgccgatttgtttgaagatgaaaagacggatattgagccgcagattcagttactatacaagtttattgcagaactttcggagatagaccgcattatcatttcgctggaactggaagatgtcaggcaaacggatatagcgcaaatcattggattgtcggagagtaatgtccgtgtaagaattcatcgtataaaagttcggttaacaagaaaattcaaagaatatggagagtaatattgatataaaagaattgtggaacaggcagactgttccggctgccgatcaatctgaaatattgaataagatcagccatttcagaaaaaacggtcttaaaaaggggatatttcttgatgttatcttagtgttgactatcctttttatgatatttatctggatctatttcaaaccgcaattcttgagtactaagattggaatcattgtgggaatcctgccgatgtgtattgtggtggcggtcaatcggaagataacttctttgtataggtcattggatgagaaacagtcgaatatcgattatctgaataatttgcttatgctgaaagagaaagaaactttcatgcagactaaggtaatgagtttatatttcattttgctatcctccggtatccttctttatatgtatgaatatactcttaattcatcttttatgttcagactgatagcgtattctgttttgtttttatggattgcccttaattggtttattctacgtcctgtaatgattaaaaagaataggcggaagatggattgcttaattaggcagatcgaaaagattaagtcgcaagtggatgaattttagtttctaaaaaaaagttgtacatttactcgctcaaaataaaaagatgcagtatgaaaattttagttacttacgccgtacagggcgagtttacggagttaaagtttcccggattgataggagaggaagaagttcacatcggctatattcgtacgggagtaggcaaagtgaagtcagcttattatgtttctgaagtgctcaatcaggccaagccggacttggtgatcaacgtaggtacggcgggaagcattgattgccaggtaggagatattctggtgtgccgtcattttatagaccgtgatatgcagaagttagccgatatgggtttggaatatgagattgattcttctgccttgctggcagagaagggatactgtatgcattgggcaggagaaggcatttgtaatacaggtgatacttttctgacggaactttcggatgtgaaaggcgatgtggttgatatggaagcttttgcgcaagcctttgtttgccgtgctaaaaatgtgccttttattgctgtgaagtatgtgacggatatcataggacagaactccgtgaagcattgggaggataaactggctgatgcacgtaaggggctgggagaattctttgaacagataggtggagcggtaaaataagcatctacttcagcgtcttaaatgaaaggatatgataggttactcctgctgcaataatcaggagtattacttttacccacatatatggaacgataaaaaatacgcagtagagcatggtgatccacatcagcgagatggaaattatctttgcgcgtagagggatggctttgttttcacgaaagttgcggatataagggccgagatgcttttgatttaataaccagttatataggcgaggcgaacttttaaagtagagtgcagccgtgagtagcagaaatggagtagtgggtaacaacggcagaaaaatgccgaggataccaagtgctaaagagagtgtaccaagtgctatataaagggttttcatgccgcaaaagtactctttttttgtttacggagaaagttctgtttgctttgttgtctgacattcgctttaaatgcttatgtttgcgaagaattttcaataaagtcaaaacatgtatttgagaaagtccgtcttcacgctattgctgatactgtgtaatgtatttgttgtggtggcacagaccaccgcagactctttagcacttgttactgctcattggaatgtaatttctatgggaaaaggtgtactttgtcgcgaagcggagttcgtttctttgtatggtgttccgcagcatgttgctattcttgaaatcaaaccggagcaacatcggtttgacattttaattcattctcctaaagaagaaaccagtaatgctgcccgtcgttccggtgcagtggcggctattaacggttcttatttcaatatcaagcaaggaatttctatctgctatttgcggaaagacggggtggtggtagatactactgcgaccggtgtactcagcactgtatccaatggtgccgtgaaaatagataaagggaaactggacatcatagcctggaagaaacaggatgagaaaacttgcgaacagaaagaagggagtattctcgtttccggtccgttgatgctgctggatggaaaagcttgtgacttgtctgcttgtaaccggtcattcgttcagactaaacatccacggagtgccgtggctctgatgaaggacggaacggtgtttctgattgcggttgcgggccgtttcgaaggtaaggcggaaggtatcaatatccctgagttgacacatcttctccgtatattgggtgcaaaaaaagctttgaatctggatggtggtggctctactacactttggagtgcttctgcaccggataatggaattgtaaacaagcttactgacaataaactttatgataataaaggggagcgtaaggttgccaattcactttgtgtttacgaataaaagcggaagatttaaactgtaatccttagaatttttgtacttttgtgccgtgccgaggtgacattaggtgcgacaacagacaaagtattttcttaattagcgtattaacaagaatatgtatacagttatcaaacgcatggaaatatcagctgcccatagcctgaaactttcctatcgcagcaaatgtgaggatctgcatggtcacaattggattatcacagtctactgccgttcccgggaactcaatgccgatggaatggtagttgatttcagtcacatcaaagaaacggtgaaaggaaagctagatcaccgtaatttgaatgaagttcttccattcaatcctaccgcagagaatatagcccgctggatatgcgagcagatacctacttgctttaaagtcgaggtgcaggaatctgaatccaatgtagccacttatgagaaagaataaccctactgaaagccggcacaaatattttttatgagaaagattaatgagattttttatagcttgcagggtgaaggctatcacactggtacgcctgctgtctttatccgcttttccggttgcaatctgaaatgctctttttgcgatacacggcatgaagaaggtgtgctgatgtccgatgatgaaattattgccgaagtaggaaggtatccggctgttacggttatcttgacgggtggagaaccttctctctggattgatgaggtttttatcgaccgtttgcaccaggcgggaaagtatgtctgtatcgaaacgaatggaacgaacccattgccccaaaatattgattgggtgacttgttctcccaagcaaggggtgaagttggggattacccgtatggatgaggtgaaggtcgtttacgaaggtcaggacattggagtctacgagttgcttcctgctgaatatttttttctgcaaccctgttcatgtagtaatactgcggaaacagtggcgtgcgtcatgcaacatcctaaatggcggttgagtctgcaaacacataaactgattgacattcgttaatgaatcgggtagtgttataggaatgtaatgtgaatgacatctttcttttgctttttagggtttactttgccgtgaaattaaaattctaaaaagagaagaaacatgaaatcaattcgttttttatccttgctgcttttgctgaacttgtttgcagcaggagggtatgcagcagaccaacccgttaaaaaagaaattgtcgtaagtggtgtggtgacagatacgcagaaacaacctgttgtaggtgttgttgtgacagatggcgttaattttacgcagactgatgataaagggcgttatcagttggtatctgatcccgcacagtctaaattcgtttatctttctgttccggcggactacaaaactaatgtagagaatgcattacctattggctattatgccaggattgatgcaaaaaagaaaaagaatcgttgtgatttcagcttggtgaagagagaacagccggttcaggattttacctttatagctatctctgatccgcaggcaaaaaatgaggaacagctggatcgctttgcttcggaaactgtggttgatttgaaggaaacattgaagcaattgtctttgcaggaagtttacggaatggttctgggagatatcgtctgggatgttatgcctttgtatgattcgtataagaaggttatctctgatttagacttaaccatgtatcatgtgattggtaatcacgactttgatcagcaatatacggcactgagccttgctacgaataaggaagaatacggggaatcggtgttcggtgagcattttggaccgacggattattctcttaatgtagggaaagtgcatattatttcgatgaaggacatagactataaaggtaagaagaaatatacggagcagtttacccctgaacaattggaatggttgaaaaaggatctgagctatgtgaagccgggtactaccgtactgttgaatcttcatgctcctacggctaacagtacgggtagaggaggagccaatgcccgtaatgccgaacaactttttgagatactaaaagattataagacgcatatctttgtcggtcatactcatttttatgaaaaccgcattgtgactcctgttatctatgaacataatattggtgcagcttgtggtgcctggtgggcaggacatgtaaatcgttgtggtgctcccaatggctatctggtggtaaatgtgactggtgatgacatttcctggcagtataaggctaccggtcgtccattcgattatcagtttcgtgtgtataagccgggtgaatttcagagccagcctaagtatctggtggttaatgtctgggattatgatccggcatggaagttatcctactatgaagacggtattgagaaaccgggcgtaatggaggcttttgacgatgaggatcaggattatattacaatgaaagaaggaaaagctacaggctatcatacatcgcacttattccgggtacgtcctacggataaggctaaatccgtgaaaatcgtagcaacgaatcgtttcggtcagagctttacccaaactgtagatttgaaatgacaggctttgaatacttgtttataacgggtttataaacaaaaatagctgcaagtttttacttgcagctattttcatcttgcacgggaggagaggctcgaactcccgacacctggttttggagaccagtgctctaccaactgagctactcccgtgtttgcggctgcaaaggtaatgtaaactttcaaatatgcaagagagatgagcgattattttaacgctctctcgtcttataacatctgtaagtcctgatacataatgcggtaggctgctgcttttttttctaaagcaagcggataagcgcgcgaagaagaaggcatccgatagagtcgcataggtctgccatcaaaaacaaactctgtaaaatctcccactttcggcttttcaagagagaactgttcgcataaagtttctgttgctttttcacctgtggtaactatggctttacattccggtaagcgacggagcataccctcgatatccgtaggttctacaacttccagaaatttgtcggatgcattgtcctgcaaccgtcgtatggcggtagctgtatcaaatagggcaatgcctttttcttgcaggaaaggaataatgcaatctttgtcgaaagcttttgccgcttcgttcagaaaatggttcttatcattgaagaacaagagtcctacaatccgccacatatcattgttccagttcggataataaaactccatcgaccaccttttcttttgaggtggaaaacttcccagcatcagcaaacgggcgttagcaggaagaaagggttctaaagggtgtcgctcgatttccatacttactatttttaggataaaaaatgtctgaaaagcccggaatatgattcagacttctcagacgactctgtgattttcttatgcaaaagtatagattatttccggaagttactctgctatttccaaattactcattttttctgtgatgcggaaagggaagtccggatattcgtacaggctgaaccgtgattcggttttgccttccgtataattccagatacttgcgtagtcttccacatcttctcccatggcacgcagttgtcgcaggtacgcggctatggacttattctctacgatatagacctgtccgagctgattgattatcgggctgtggcgacgtgttccgtcgtggtcgaaacgaaggatacgctttccgtcttcggtcattcccaccagattgaacgtcatgctcttaccaatggcgggtaggtttaacacgctgcggtctgtggcaaggaacggaagatgatgtatcttcaggaagtggcggatacaggatgcaggatcaagtgcggtttcgagcgatgcagacaggttgaaggcatcttctttattcagtttgccgaaacgcttttcttcttgctgttcctgcatggaacgactgtttggtgtaaagactgcgttgttttcttcgaaaccttttacggagaatgtatagtaacagacaactcccagttcgttaagtacctggcgtaggcgagtggtatgtccccgacgtgaggcagctacgttatacacaagttggttggtaatcagccagcctgccgataatagtttgcgaataccttcctttgcctcgggagtaacctccagtggagtttggaaatgcgtttgaataatgaactgacggataccgatgacggatgctttctccttgaaagttcgcagaatttctaccaattcattgttgatacgcattggcagataagctggcaaacgcgatccgaggcggatacgctgtaattcggcatacttttctccttccgggcgttcctgattggctttccgtttacgggcagccatacggtaaacggcttccagaattgtgttcagcgtcttgttctgactcatgagggcatctccacctgtgatgaggatatcacgcaattgggtatcttcctcgaagtaagtcatcagacggcgcaatttcttctcccatgtttctttaggacgcagggagtcaaactcaaaattgagtcgtttactctggaagtcatacatacgctggcaggaagcacaaagcccgccacaagcgcgtcccatggtgtcgggaatgaggatggctacttccggataacgacggtggatattgtgtccgtcgggcaggagccagccggccgcattgggtttcccggcttctactatgtcttcacgttcccaggcgcggatttgcccataagtttccaccagttgcggggagtagaggatgtagctgcgcagagattcatcgttgtaccctgtgctaccgggatttaacaagtgcagatagtaaggcgtaacgaagaaaggcattcctttcttgcgggcacgagataacagatacatggtttcagcagaaagtgaattgcccagaaagcgatttagttccgtagggcttttggcagccatggccagatggaaacggaagtcattccaccattcgctgacaagacggtatttctcttcgtagctgatgccctcttcaaagtggtagcgggaaacagcggtacggtgctctatcttctgtatcaatgcgtgcagaatacgctctttatttttggcatggatcagttgtacgtcttcgtccagtccgctgggccaacgctcggtccacgctttgacgcgttggggtgcggggagtagggcagcaggatgctgtaagcgtttgaattgctggaaaatatccaggaacacgtctgtttccacatcttcttccagatttccggtaagaaacgcgtatagaagtgacagggtagaaacaatcatttgttcatcggtagaaagttcatggacttcctggccgtcatattcaatcagaagtcgaatttgcctgacaacttcactttccgtatcagcctgattggcaatgaattccgaaatgccttgcttgaagctttccgtaccgtcgctctgttcggcgatgcgtacaatttcgggaagttcatttcgataaagttgcttcaactgggataaagtgagtgcaagcattttcttttgtttcataagcggttattttttaatgattaatactgaaatagttgcgagctgcgaactgcaaacaataaactacgagctacaaattacgagctacgagttacaaattataagctacagataactctgaaagcctttcaggctgcctgacttattgagcctaaatcaagctatttgaattctcaaatcttctgaattatgaaatcttctgaataatcagattacttgaactaataggttttgaactatcaacttatcagagttttttaacttacccagtgcaatagtttgtcactgatagcttgtagtctgtagcttagcggataaagcccgctatatcttacaacaatctctttgcataaagtgttgttgctccttcgagcaaaaaagttgcataaaaataacaaaaaaaggcgaggaaatcatttctcgccctttctattgattatttctttagaaaactttttcttttgataacagtttttacctgatagatatttcaaacttatttctcttccgtggctttgtttttgggttcttttttagccagtaatacaacgttgtacacgtattctgtcatccactgctcggagtatcccagacgctctttatattggcggactgccatagccgtcttatgtacatcgtcctttttccatacggttttggtgcagacgtcatgtacggtcttttcggtcatactgcgcagtgcacctttaaaaacagagggcacgcggaacttccactgcatcaagttgcccatcaacatcatcaggtcttgtgagaaaccttgatacataaacaagtatgcctgcacatcattctgtgtgcggcaatgcttctttacggaagcgtcgatttccttgaagaagttttcactcagtccatagtcctgcatcagcattttgcgtgaagcagtcttttcggcttgtcccagtcgtccgccctgggtcggtattttaaacaggcgtttgaagttggctacatccggcacgaaacgaatgttcgtaattcccagattagcggcaatcacggactggaaataaacgcgtgtcagtgacacgaaatcttccacgtttttggaggaagtaccctcggaattctttttaaatagtttggcaaatatacccatcttatttatgttttatgatttatgatttataattgccggggcaattgcgattgcaaaagtacgaaataagttgatttacaccaacaattgtataaatcataatttataaatcataaatctcttaccagcactccacgtcattttctacctctttgagacggtcttttgtgaaaacagggtctttgatacccgcccgtttctgtgcacggtagtcttccagcagtttgaaagcgtatttaccgagcaggctgatggcaatcaggttacagagcgccatcaatcccatggtgacatctgccagactccaggccacatccagtgcagcgagtgcaccaaatagcaccataccacctaccagaatacggtagatgttcaatatccatttcttacgggtaagataacgtacattggcttctccataataataattacccagaatgctgctgaaggcgaagaaaaacaaagcaatagcaacaaaaatacttcctgccgaaccaatctcgttcgtcagcgcctgttgcgtaagttgtactccattggtagagccgtccagtggcgcaccgctgaaaagtataatgaacgcagtgcaggtacatataattaatgtatcggtgaaaacgcccaaggtctgtatcagcccctgctttacgggatgtgtgacgtgtgcggtggctgccacattgggagcggaacccataccggcttcattgctgaacaatccccgcttgataccttgcatcaatgcaatacctataccaccacccaatgcctgttgccagccgaaggcatggctaacgatgagcttgataacggcaggaagttcagtgatattgatagctacaatgatcagtgccaaagcaatatatcccaatgccataacgggaacaataatgctgcttactttagcaatgcgctgtacaccaccgaagataataagcagcgtggctatggtaataacccctcctacgatggcgtggtcgaaaccgaatgcatgttcaaaagctgcacacagcatattgctttgtacggagttgaaggcgaagccgaaagtgatcgtaatgagtacggcaaacacagtacccatccacggttgtttcaatccttttcgcatataataagcgggaccgccaatgaaagagtctttgcctcttaccttatataattgtgccaatgtggactctacgaatgaactggcagcaccaaacagggcaatgacccacatccagaacactgctcccggcccgcctacagcgatggcagtggccacacccgccagattgcccgtacctacacggctggcaatggagatggcaaatgcctggaatgaagagatatgcttttcacccggctttccgttcgttcctgccgaatcacccagtaaacgtaccatttcacttatcatgcggaactgtacgaagcgggttttcagcgtgaaccaaaaggcacatcccaaaagcagagcgataaggatataagtccagagaatatcgttgattgaattgattatattcatgctatattgtttaatatttacttgtttaatgatgaactgtcggttcttctgtctgaatttattgattataaaggtcgcaaaagatatattttgtaactgattgaatattactgtgttgtgttgaggtattctaagactgcgactgaggtaccctaagtatacgactgagataccctaagtatgggactgaggtaccctaagtatcatactgagataccctaaaataacaactgttttgtttttttgtttttctgtaaataactttttcctcataacccaaaagtagaagtcaggatagaagaataatcatttattttagtctgaagtgaaacttatgaccttcaaataccggttctacaatatcaaaccggatgaacttggcaagtaaatgttccgctgcacgtcgggaaaggcgtgccagcctacaatacctgtttaacgatagactgtcattttcttccaacaagtcaagcaacaactgttcgcgctcagtataagttatcagttctccccgcggactaccactttgctgccatacacgcagatgaaccggtgtagcgagtatattctcatccttgatgcgcagataagccaacggttttcctgtttcatccttggcatatacgggtttttgcagactttcttcaatctgcactaccagcacgctgcgtccttccgcctgaaaggtctgcatggtataattcacttccggctgacagtacatttgtgctgccgcctctatcatatattgttcctcatcggagcgaactccggcgatctttccgttatcttttaccccgatcagcaaccgcccgccgtccgtattggcaaaggcggagagcgtttttgcgatcttacgggcatcggaaatctcaaacttaaagtcctgcctttggtgttcgccttcggctatgagcaagtgtatgtattccgtatctgtaaggggtttcatgcctgcaaaagtaggtaaaaaacgccagaggacgtttttttgtgcaatttttgcggattatttcaaaaaaaatattgtttttctgcatttatttcaagaaagagtgtatttttgccagacattattaacgaagtaatattaataagaaaaggattatgaaagaattagttgaaaaagttgctgaattgtatgcagcattcgagaaagatgcaaaagctcagattgaaaatggtaacaaagctgccggtactcgtgcacgtaaggcttctttggaaatcgaaaaatcaatgaaagcattccgtaaagcatctttggaagctgctaaataataagcacgcttactgaaagaattgaaagaccgtctcaatgagaacggtcttttttgttttatccggtacaaacatagggccacccgatattttcggtatacccatcaaataataagcaatttgttcagccgcaagataacgcggatctctttattaattctttttcaaactatatacattgtgtatatgatatatcttttatatctttgtaaaaaaagaaaggagttattatggcgacaatgacattagagaaaaaaaggaaaaatatagatttgcctgttgacgtattacagcgcttatcggttttggctgcttcacaaggtaagagtttgaaagctttcatagagcacctcttggtggtaaaagcaaattctatttctgtggaagttttagaaaatcccagtccaagtggcgattcctttttcgaagatgcagaaaatatggctgagatttcagcacgagtgaaagcacataaagcaggaaagacaaaatctgccataaagcttaaatcagccgaggaaatcaagagctttatagataatctctgagatgaaatatatcatagagtttgaagccaaggctatagaggatttagctaaattgaagaaatcgggaaataaagcattaattactaaaatcgaaagattacttttggaaatagcagaacaccctactgtgggaactggacaagtggaagcattgaaaggtactctatccggttattggagcaggagaattgataagtttaatcgtattatttataccattgaagaagaaattgtgacagttacaataatttcggctaaagggcactatggtgataagtgataagttgtgtagtggatatgaatgaaaacgtcctcaataaactgaaaatactggcggagtcggccaaatatgacgtctcatgctcgtccagcggtaccgtgcgttccaacaaacccggtatgttgggtaatactgtcggcggctggggcatttgccatagttttgctgaggacggacgttgcatttcactactgaaagtgatgctgacgaactattgcatctacgactgtgcatattgcatcaatcgtcgttctaatgatgtgccgcgtgctacgctttctgtcagcgagttggtagatctgacgatggagttctatcgccgcaattatatagaaggattatttctgagcagtggtgtggtgcggagtccggattataccatggaacgcctggtgcgtgtggccaaggacttgcgtacagtgcatcgtttcaatggctatatccatttgaaaagtatccccggtgccagtcgtgaactggtgaacgaagcgggattgtatgccgaccgcctcagcgttaatgtagaaataccgaaagaggagaatctgaaacttcttgcccccgagaaagatcataaaagtgtatatgcaccgatgcgttatattcagcaaggcgtattggaaagttcggaggaacggaagaaacaccgccatgcaccacgttttgcccctgccggacagagtacgcaaatgattgtaggggctacggcggaaacggacaaagatatcctttttctttcatctgctctttacaaaggacctacaatgaggcgtgtttattattccggttatatctctgtgaatacgtatgatacgcgtttgccggccctgaagcaaccaccgctggtgcgtgaaaatcgcctgtatcaggcagattggcttatgcgcttttatcagtttaaggtggaagagattgtggatgatgcatatcctgacctggacctggagattgatcctaaactgtcgtgggccttgcgccatccggagcagtttccggtagatattaatcgggcggattatgagatgttattgcgtattccgggtgtcggagtgaagtcggcaagattgatcgtggcatcccgtcgtttttctaagttaggtttctatgagttgaagaagataggagtagtgatgaagaaagcgcagtactttattacttgccatgaacttcctatgaagacagtgaatgaaatgactccgcaagcagtgcgcagtttgctgataacgaaaccgaacaagaagaaagtggacgaaaggcaattgttacttgatttccacgactaagagagttcctttccatgaatatatttgtttttgataatactttcgagggcttgctgacttctgtttttgaagcttattcccgtcgtgtttttcctgatgcattgtttccggaaggagagccattacccttatttcatgatgaagtcttcacggtaatcaccgaagaagaaaaggcgaagcgagtatggcgtggtttgcaaaagaaactctcttccggtgctctgtcttgccttgcccaatgttggctggcagaggaacaggaaactccgatgcttttgttccgctatattcgtaaggcgattgatgctccccgttccattgaaactaattttgccgatccggatgtattggaattctcgcgtatgtggaagcgggtggattgggaacgtcttcgtatgctccagtttatccgttttcagaaagctgccgacggcaccttctttgctgcggtagagccggaaaagaatgctctaccactggctatcgatcattttaaggatcgttttgccgatcagccctggctgatatacgacataaaacgggcgtatggcttctattatgatttgaaagaagtacgtcaggttacctttgaagaaggttcacgcgagggacatctggtcacgggtatgctggatgaaagcctgatggataaagacgagaagctttttcagcaactctggaagacatactttaaagctatctgtatcaaagaacggctaaatccgcggaagcataaacaagatatgcctgtgcgttactggaaacacatgacagagaagcagtaacaagatcattcgatttgttctactgttacatccggccattcctgcatcagtgacagcatgtgcccttcgtcattactccgcttggatttgataaccatagtcactatatacctttctgtatctccggaacctaatctttccattttgtaggagactaacatataatttcgggatttaaaacgatcggatacttccttaaggatatccttatttccggtagagaacgttatcatagagcttttcatccctacacttttgaacaggatgctgagcagttccaatccagccagagtgagcagggtagcggctatacttattacatacattccggctccaaccgccagaccgatgcctgctgtagcccatattccggcagcagtagtcagccccctgacaatttgtttttgtaatatgatggtaccggcaccgataaaaccgataccgctgactacctgggctgctacacgactcgggtccagcgagacgctgttttctttgataatgtcctgaaagccatattgggaaacaatcatgatgagggcactgcccaatgatactaaaaagtgagtacggtatcctgcttctttggcacggtattctctgtccaagccgatgatggcacctaagatgccggctactaatagtctgagtacgaaatcgaaatctaatgtcatattggctcctttctgtgttttaagttactgtactttttctttcggcttgccccgaaagaaaaagataccaaaaagaaagaggcaccggctacgtctccggagtagccccggaagtgcagccttgagtttttcttttggtatcttttcttttgtctcaagacaaaagaaaagtacttaatttataacccatgccctattatgcggcaccgtctttttcggatcatagtgcattcccgcctgtgtcggtattttaagaacgtatgtacgtccgcttttgttttgtaaagaactatcgcgcagccatgggttggcatccttcagttgggcgtaggtaatacctttactcttggcaaattgtgccagattgtcgatacttgttgttacgttgacttctgtatgggggatagctgggtaaagatgttcccgttttagtaaaaagccatagcgctgcggattactgatgacggctttagcggcaagcaggcggaacatgtaacgggaagtctcttctacaagccaaaggtctacggcttgatctacgagctgttttttcagttcagaggagatgcggccttgtccaccattgtaggcagcggctacgcaaagccagttaccatatctttggtaggcatctttcagatacttgcatgcggcacgggtggctttctccacgtgataacgttcgtcgatattggggtttacttcaagaccgaattcgcgtccggtagtttgcatgaactgccacattccggctgctcctgccggactacgggcaagggtattgaggttactctctattacggcgaggtatttgaaatcatcgggtacaccgttttccttcaatataggttctatgatggggaagaagcggttcgcacgcttgatggtgagcatggtggtggagtgcatataggtgaacgacatttgttcacggtccatgcgttcacgatgatcgtagcgcgtcagatcaatttcctgtccggcaaaggtgattttatccggtacggaaggggaggtgacacaatagggaacttcggatttaacggattgctgttcagggtctatcgtgctgtgcccaaacagaaatggaagtgtggcaccggcgcatagagcaactgaggtaactatcaggatatgtattgagctttttttcattttcaaaagtttgtttggttcgaggtcgaatatacaatatttacgggaatgaggcaagaactatggtgtctttacaacgaatcttagttctttataggcaatctttcccataaccaccgggggatcattcgccagaaaaagacaactacacggtatctgccgtcgattacaatgacccgttttttccggttcaaggcatggacgatactcttcgctacctgattggcttgcatcaacatagggaacttaccacttttcagtaagtcggtagcgacgaaacccgggcgtatgtctgtgaaatggatattcaagtgttgcatccgggagagttgtgccaaggcttcgatgtaagtattctggaagcgtttcgttgcggaataggccggggcgatgcccaatcctttggtgcctgcaatggaactgatgacagcgatgtgcccacctccttgggttttgaagtgattgaaggcggcggtcaccatgcgggtgaatccttctacgttggtacgagcggtatttagttctatttccggtttcaggtccgggttctgacttcctatgccggagctgaggaagaacaaatccatgccacctaacttccggatgagtgtttccagcagggtgggggcatccgaatctgttacgtccagacgttgaatttcgatttgtccgggggcggtggcttgcagtttctccaatgcttcttcccgtcttccggcaataccgatgtgccaaccttgctgaattagcagtttggcaacttcttctcctatgccggaggtggctcctataataatggctcgtttcataattgctgtattagtagtttgttaattgcatgtgcaggatgggaaagggcttgccttgcgcatctgtttcatcccgacttattacttcaaagcccctgttacggtagaagcggaaagcctgttcattttgttcgttgacatccactttgcggaaacctcgttcgtttacggcaaactctaataatgtcttgccatatccttttccctgttcgtcggggtggataaacagcatttctattaaatcgtcgcttagtcccagaaagccactgatgcggttgtctttattctttataatatagagttgcactgcggggaaataaacgttctgtaccagaggtttgtagtattgaatatcttcttcactcaagaagtgatgtgtactgcgtacggatgcttcccaaagctcagagagttcgggataatctttctccgtggcgacgaagatatttgtaggaagattgtt

SEQ ID NO: 6566 - DNA, 406 bp, Unknown
  gut microbiota DNA sequence
attcgaggcggctgtgatacttgccgttcttgttgaagtagtcgatgccccattcggagttcttgtaattgaacttcgcgctcaggaaattctctccccatagggtgtggggcgaatcggagagttggaagttcacaacaccgcccgtttcgcggcggcgcaggataatgttgactacggcgcccagttcatcgtctccgtactgcttgccggggtcttcgatgaactccacacgcagtacgtctttggctctgacggccgctatctccttgtctgtcactttaatgccgttgatacgggtttgtacggacccaccaccgctgacgctcatgctgttgctcagattgtccacttgcagacgggcaatgccgagattgttcagcaggtcgtaggcaccgaacgagcg

SEQ ID NO: 6567 - DNA, 755 bp, Unknown
  gut microbiota DNA sequence
agtgccttcacattggcagaagtcaaacgaaaagcgttgaaataatcaggttcggtattaactccttcgcaaataatcagaaatgtttgtttcacctcacgtacactactgatacgggttatctttctttcgatacgcggatttatatttttcctttttgtagccgtcatggtttaattttcttgggtattaaacaagcgggttaaatctccaacaattggaattgctccatactttcctgataaataatctttttcaaacgaagcatcattacgtactttatactctgccaatgaataaagttcggttgcaccatagcggtctttttgtgtaaaccaaacctgatcccgccggaatatattagcactcaacaaatttgtatcatgagtagtgaaaattaattgagcattttggggatttgtttcttttgaattaaacaaggcaataattctacatgtaagaagaggatgcattttagagtcaaattcatctattataagacgctttccattatccaaagcatcaatgatagggtatgccagagaaaaatactttattgtaccttccgattcatttttcctgaatgggaaagtaatagttttgacttcatgaccttcctcgtcatattgcgtatgtgtactcacaatagcattatcaattttttcaatattttcaatacctaaatcagcataacgggaaaactctacaattctctgtttcattttgatatcatccagttggatagttgctgtatt

SEQ ID NO: 6568 - DNA, 1995 bp, Unknown
  gut microbiota DNA sequence
cgaaaaatagttagaagggcatttcacttaacgagatgtggcatttgccttgttcaagtgtggcatttggaaacaataaacccaggatcgtcaccggaatgacaaccctgggttagcaaattattcagaaatagattcttatgcaaccagtgcgctaccaatcaagaatgttgcagccaaagcaacaatagcataaagttccgggaatacggcaaggatcaatgtattgctgaatacatcgtgaccttgtccgatagctgcgataccatttgcacaaacctgtccctgacggatagctgagaacaaggcaaccaatcccaaggcaatacctgcaccaagaatagcggcagcctggatggctgtcatttcaggagtaaggataccgaaaatagtctggaacataaagtaaccggcaaaaccatacaaaccctgcgtaccgggaagtgctgtcaatacgaggaagtttccgaatgcaccgtcgttcttcttcaaagcaccgatagctgcgttaccggcaatcgtcactccataggcactaccgatgccagacaaaccaatcattactgcgatgccaatgtaggcaatcaataagttcatttccataatcttacgttttttattgttttaatttttaattctataattgttattttttaaatggcttatattcttttccgcctccttcgtaaccggaattcttaaagaactccacgaaagtcagacgcatggggtgaaccatcgcacccagtacattcataaacatgttaatggcatgtccgataacgaatatcagtaccatcacaatcggaccgacaatcacattgtcagggctcatgcccacagccagactgttgaatactcccgcaaggatacctcccgacagaccgagggcaaacagacgaacatacgacagcacatcgcccagcaaacccgtagccatgttgtaagaatcccacaaacccagtccgatattcataaacacgttcttaccgggactgttgaagagaaatatcataacggcagccacaccaagaatgcacagatgtaccgtaccacccaaaggcatcacttcgggcaacatgaatcctactccgcaggatatcagcaacacaatccaaccgatagtggctacggcatacttaaagccgaactgtatagcctgattgactgctttcagtatcataccgaagagaatctgaatcacaccgagtatcagtgacaactggaacatggcattattatccatgaacaaatgatccttcatatactgcaagaaaggtatgttaatgtcatagaggctcactccgaagaacgtacccgtcagcattccacagaagaatgtagaagcagccaatatctgtatcaatgaaagaatcggcttcatcgtagcactgatattcttggcgaacatacggtacagcgtagcggcaaggaacaggaacaacccgtaaccggagtcgcccagacacaacccgaagaacaccataaagaacggtgcaaagaacggtgtcagatccaactcactgtatttcggaagcatgtagagtttgcatatcggctcaaaccaggcaaagaaccccttattgctcaattggataggcacattatcttccggtgtcggattcgtaatctcataatagatatgctgttcatccagccatgcggcaatttccttttctttggaagccggcgcccagccttgcagcaacattagtttttctccagctgtagcctctgtgttcagtatcacctgagaaaactctatttcagtgttcacctccttcaaggctgcttgtaatgaaggttgctccttctcagcaagcacagccagcttttggtcattgtccgccaaagcctgttcagtctcctgacaaagtatctgcacacgggtcaatgaataaggaggtaactttatctgctctgcatccaaatctacttccacttcattcttagttacagtaatgaaatagatacgtgaggatacacaattgataa

SEQ ID NO: 6569 - DNA, 6233 bp, Unknown
  gut microbiota DNA sequence
ggcatcatgcagaagattcaaactttcaggctcgaaatcaccccagggttccagggcggctttctccttctgatagttttgtagctgttgttgcagcttcgttttttcactttgcaacacatccacttcgtccagcacttccagcccgcgggcagcagaagcgggtgtagtttccttcgcttcgcccaatccatgcagcattttcaatgttgcctgcaaacgcgaagaaagccggatgctgtcctgcaactctgcattatcagctactccctgctgtttttcagccacgtgcactactccaagttcgcgcactccgttcagaaatgcctcgtactccttatgatatacaaggaatgtgagcttcttcatttttgtaatcatgcttctgcctccttcctactctcttgatgggatttcatgattttctgcgatgacttggagaggttctcctcgtcttccatgaagcgcttgatctttcgcagagcatcctgatagcctggaatctgcactttctcaaagaggtttaccttttgggtagtctttttacgtgcatgttccagcaagcccagtttggcgacgataaactcccgttcgatagccgtctgtgccaacaccttgagcaaatgtatgccgtcggcataccatttgggggcattgaacaggctgtaggggcgtatttcgaaatcaacgttttcgagcagcggcacccgtacaccggcaatcttcttcacgccgagatgtacatcgctcacctttatcaatgaggagtcaaactcattccaaagggcgaacatcgcttcgtaggcctggatttcccgttccaacttctcatccagcgcggcagcttctgatttgcagcgcttcacttccatgcgtagtgcgctctccttattcttgataatagggagtgtacgtacccgcactttcagttgcttttccaactgctggagggaagttttattatattgaaactttatagccactttattagtgattagttgttagtgattagttatttgcttttggccagaactcgtcaaccaattctttcttgatattcacttcttccggacggaaatacttaccgaacaggctccaagccacatcgagcatctcagttgtatcgaggttcacatcaatagccagcaattggttggagtaatccttggcaaatgcaagggtacgttcgtcataatttgtcaggtcgaaaccgttctccaacttcgtcttggcgttggcagcatcggcgtacagacgtacagcagcattcatcacctgcggatggtctttacgcgtcttcttacctgtaacgagctgtttcagacgggacagtgaacggaacgggtcaacgataaccttaccgatatctgtatcacgacgcaggaacaactgaccttccgtaatgtaacccgtattatcaggcacagcatgcgtaatatcgccaccggacaatgttgtcactgcgataatggtaatggaaccaccacttgggaactgtactgccttctcataaatcttagccaaatccgaataaagagaacccggcatagaatcttttgaaggaatctggtccatacggttggatacaatcgccaacgcatcagcgtaagaggtcatatcagtcaacagtaccaataccttttcattattgttcacagcgaaatattcggctgccgtcaacgccatatccggaatcagcaaacgttctaccggaggattctccgttgtattcatgaaactgacgatacggtcgagcgcaccggcgttggagaatacattcttaaagtacaggtagtcatcgttcgtcatacccataccgcccaggatgatcttatccgtctcggcacgaagtgctacgttcgccattacctggttaaacggctggtcagggtcggcaaagaacggaatcttctgtccggataccagcgtattattcaagtcgatacctgcaataccagtcgcaatcagttccgacggttgtttacggcgtaccgggttcacagacggaccaccgatttccacttcctgaccttcgatagacggaccaccgtcaatcggatcaccgaaagcgttgaagaaacgtcccgcaagctgttcgctcactttcagcgtaggcgacttacccagaaatactatctccgcattggtcgggataccttccgtaccctcaaatacctgcaaagtcacatcgtcaccggcaatcttcaccacctgggcgagcttgccgtttacggttgccaactcatcataccctacccctgttgccttcagcgaacacgtagctttcgtaatctgagtgaccttggtatatattttttgaaatgcttttgttgccatctatttatttacaatttagcaatttacaatttacaattttcgcattctaactttttaccacctacacacacatgccgaacggcaaattgtaccttgtaaatggtaaattgtacttttccttaggctttacgttcttcaatcagttcctgcaactgcttacggaatccttcatattcttctgatttgaacttcgagtagttcatctgcttacagatattgatcattttcttaaaataatccattacttcattgaagttatcgaattcaaactccgtatgacagatatcaataatcatgttcaggatatcttcctggcgctccatcggcgttacagcgtcaatttcgtcgaaagcatcctgttgcaggattacgaagtcgatcaattctgatttccagaatgttacatgatattctacaggtacaccgtcatcacccaggatattgatctgttcggcaatctccttaccgcgttgcaagcggtttttgatttcattcaccttaccgatccactcgccattgatgtgagttttgatatattcctcaaattcaggatattcgatatatttagaataagaatcaatcggattcacggcgggataacgcttcttgtcggcacgatcctgttcaagagcgtagaaacaacgggctaccttcttcgtattctccgttacaggctctttcaagttaccaccggcaggagacaccgtaccgataaaggtaatagaacccgtttcaccgttacccagcaccacatatccggcacgtccgtagaaattggaaatgatagaagacaagtccatcgggaatgcgtcaggtccaggcaactcttccatacggttggacatctcgcgcaaagcctgtgcccagcgggaagtggagtcagccatcaacaataccttcagccccatgctacgataatactctgcaatcgtcatagccgtatatacagatgcttcacgggcagctaccggcatgttcgaagtattagcgataatgattgtacgctccatcaacttacgtccggtatgcgggtcaaccagttccggaaattccgtaaagatttccacaacctcattggcacgctcaccacaggcagcaatgattacgatatccgcctccgcctgctttgaaatggcgtgctgaagcaccgtttttcccgtaccgaacgggccggggataaatcccgtaccaccttctacgataggattcacggtatcaatgacacgtacacccgtttccaacagtttgaaaggacgcggtttttctttataattcgtcatggcgcgtttcaccggccatttctgtatcatgttcacatggatgtcattcccttcttcgtcagtcagtacggctacgatatcttcgatgctgtactcaccttcgtctacgatggatttcacggtacatacacccttttgagtgaaaggcaccatgattttcaggggttggaagttttcatccacttggcccagccaggcagcagcttccactttatcacccactttcaccagaggcataaagtgccatctgcttcccttgtccagcggataggtatattgtccgcgtttcaggaagactccatccatcttatcgaggtcattttgcagaccgtcatagtttttcgaaagcatacccgggcctaatgtcacctcaagcatgtgtccggtaaattcggcttcagcccctactttcagtccgcgggtgctctcaaacacctgcacgtacacatgggtacctaccaccttaatcacctccgccatcagtcggtcaccgccggtcgagatgtagcaaatctcgttctgtgccaccgggccgtcaacgacgagggttaccatgttggcgataacgccactaacagttccttttgttgccatataattatgttatttattttatctgaattctgcgggaatctgcacttcatccttcagcgttgctatgatgctgcggaacagctgattacccttttccttatccaaagaaatccaccgttctatcatttccagttgcagcagaaaaacgaacagacgctctacggtgaaatagttgaagaaggtagcttcttccatccaattccaacgtaactggtcaattttcttttcccgttccactaactcttcggtttcactgatcttcaccaactgatccaggaagtccacctctcccgtcagcccgaaatcacgggcaccggatgtacgcaaagcctcgcacacttccgtatctcccactatcagcggagcgatatccatcttgaatttccgggcagtcagtgccaccagcacattgttcattgtcagattgaacgcaaaccaggaagacacgaacttattcctacacttcattgcatacgcatagtaaagcgcagccagacgatcctcatgcagaaaatcatcctcggcaggagtattgaaatattctgaaataaaagtggagagataggaaggaaatacggcatcagccacctcgtcaccatctttaagcgatgagataaactcagccaattcttctgcggaataatttccacgagagtcaatggcagcgtctttatcctttagtaatttcagaacgttcgcattgtcaaacttcagataaaacaggtcaatcaaccgtctatcttcgtcggacaaatccggatacagttccgctttgaaatcagctaccgtatagctcagtttgctatcctccaaagtgagttcgggcaaaccggctaccaagtagtaatagtatttactcatatcctgtggttttagaacagcatttccactaattgcggacgcaggaattctttgaagtaattcataaattcttcttcaccgaagtttactttgtacgaaccatcggcaggcgaaacggtgaacaacgtcttattaccatttacctgttctattttcacacctttatccagcaacgcttttgcttgtgcggcgaagtatttcttcaggccgtcggcatcggcggtagagatcacgataggctcgttcacactccatttggaagctaatgcaactatgaaggcattcagataatccttatcggcagcaaatgctttcacatccgcattgacaatcttatccgtcacaagtgtagcgatttcagacttcagtgcattcactgcctggccggcgaataattttaattccgacttggtattttctgccagttcatcggcagacttacgagaggcagccacaattgcttcagcttctttacgagcgtcttccacaattttcttggcttcatcttgagcgttagcgataagtttctgggcctcagtgttacctttttcgaccccctcgcggtaaatcttatcagtcaactcttgaattttgttttccatatacacaggagtaattttaataattatataattgcgattttttccctttttattagattcgagtccaaaagtactaaaatcccttagaaaaaagggggaaagaatggaataaaaacgtcctatttttcaaaaaaagcctttttataccatttttattctgtaaagataaggatgaagtttcaaactaaaaagaaattgcttgctgaaaaaggaaaatagaaggttcaaagaggaaaaaaagctactgaaagtaaccattatacaaacattatacctataaacacaaaaagcctccatatcatttcgatatggaggcttctctctaaaaaacggcaactacctactctcccactttacgcagtaccatcggcgtgatcaggcttaacttctctgttcggaatgggaagaggtggaaccctgatgctatagtcacctaaataagttagacatgatgcaaaaaagcaaagattttaaactgaacgtatatacctgccatacaaggcaacaaccaaaagtgaacgggcaattagtaatgctcggctatgatgttaccacctgt

SEQ ID NO: 6570 - DNA, 343 bp, Unknown
  gut microbiota DNA sequence
aatactaaaactcttgaagccatagcagaggtatttgatgtttctcccggtattttcttcgataatcctttggaaagtaatacggaaaattgttttaataaagaggcggaaatcgcttatttaaagaagattctcgaagagaaggaacgtctaatacaagtcttattaagtaagaaataacctgtaatagataagaaatgtaggcatattgtaggctatataattatacaaataattaataatcaagcgattaaagaacgttacttgaatcacaaataaaatccgataacttgaaaagagttatcggatttattttttaattactttcgcttttatagacaac

SEQ ID NO: 6571 - DNA, 3258 bp, Unknown
  gut microbiota DNA sequence
ctggaaaccggaagaaggagaatcatccatatatactgtaaaagaaactatatatatggcttacgcagctgtgaaatttgattttacttttgagatgaataataatattacgataaaaaaatggactatcagagatatagcaaagcaatcttatctgattccgaatataaccgataatgcctgggaaactctaataaaaattcaaggacaagtggatcctaaagatgatgataatacaatttgggttacagattataaaatgccggaaggaacagcattatcaccatatgaatcttcccaagagattaacttaaagtttcaagaaaataaatggatagatccaaccgcttattatttgcctgaaaccaagaactggatttcggactttggcaagcaaatctatatgctttcgttaaccgtagaatcaaatggccaagaatatgaactaacacccaagcaattcccaaacttagaatcactggtacgtggcacacatgtcaaggttcatgctaagatttcagacgtatcacccggagcggaaggggaagtggaactcgaagcacaagtggtagactggatttcagagccagagataaaaggagactgggaagaagtaaattccactactgaaataccctaacaaacttaaaaaaatgatgaataataagattcaatacatattaatagcactgtgctcggtgcttggtgcctgttcatcagaagaagttccggtgaccattccacagcaggacacggaaactatgacattcagtgttgccatgaatggagacaatagtgatgaagtgaatgtggttccctatttcaaaaaaggggatcaaatccgattatacaatccggtgagttattcaactccagactttacagataactccccaacagcatacatctacgaatgcgactttgaaaggactgcattagatgaagaatatccgtacaagtttattccctttaacaataagggtttcaaatggaagaatttgaatcctacatctatttattatatgtttgaagcagcatacttccccggcaataagtatttcaatgaagtaccgtttgatcaaagtacaaaggaaaacttcaaaaatgccgatttactgcttacccatcaccgccaactcatcagtgaacaagacaaaaccgtaaaattaaaatttcaccacgcatttgccatggtacaggtaaaggtaaaactcccggtcagcgaatttcccgatcaaggaatgtttccagaaaatgctttaaagggtgtttatatgcgtgcaatgctgaggaattatgaagtggattattcaggagtgatagataatgacgcactccgtacggtacgagtccccaaaaatgatgaagcacttcccgtcaataacccgaaaagaaagaatatccaaatgtattgctcatcaaggacagcccccacaccggaaactgataatacaggtaaggaagttatttatcaagaatatatttttcagggaattgtaccagaacagaattttttaaatgaaggtaatgattttctctatttccaagtaaagagacatgatgctgaagaggtactatataagtttaaaacagaaactttgacattgaaatcatcgcacatacttaatttgatactgtctattgacagcaatactttagaaataatcgttctgacagcagaagttaaaccctggaatacagctacggttgatgatatggaaataggacctgttacacccacaaactgatagatatacatatgaatacacaaagaaaattatattctattttatcgggatttttactcattgcagtgcttctgctgacaggagcatgtacaagagaggaaacagaaaatactattccggtatttaatcccgatgacccgattatgatttatgctacggtagatggaacaagtatcgccacccgggctggtgagaatgaaaagataaagagccgaactatgcttttcacttatccgtcgttatctgccggaaagatacaaagtgcaatatgtgagttcgatgaaaaaggatacggatatgtatataccaataacagcaaaacggagaagttgagatggaaagatataaatattacgggaaaagatactatctatttggataatcttgtgaattatcctgtacaagaccctacactgacaaccattcataaaaaaaataatgagatagaagtatggattgataactttacatatttctattttggtccggaggatccgaatatgagtacgaatagtggatataaagctatgatagcgcccgcgaatagtgaggaggctaaagaagtggatataatctggggaatgatcctcaatccggaaataggtcaaccgctccgatttgagctagtgcacaagatgagtgcagtgacatttcgattttacagtgacgatgaatctattcagcaagctttcaagaaggaagttaatgtctggttgaatagtgtgaaagtaccgctaaataatccagttaccccatcttccactatcttcagaagaaataatggagtgattggtagaactggtggatataattttgataatgcatgccttgttgaaaacaaaccactgacgaaatcaaataatgaggatacccaaacaacaacgtattactctactcctatgtggattttcccaccacatagtttcggtgcttatccttttggtagcacttattggcctaaagtgataatcgaaatacaagatgaagatgagaatcaaaagactcaatacgcaggcttcctgcctgcaagaatgaagtattatacaaaagataacgtttttgacaacatctccctggaattcatgtcagggtatcacctcataatcgatgtaaagctggttaaagattttggtaatcctgaattacttttcggggatattcaagtatggccatggagcagagtaatgaccgacaatcctacgataaacgaaagtggaataaatgattggagtgaccttgtggcactggtggaagaattcaatgaaaattcctcagagacaaactacagattgatgagatatggaaattgggatgaaaatcagtggaaattcaaattatggaaagatatagaaataccgacaaatgtgccaatgccactatttgaatccgacaaatttgaaattgattttggagaacacataattgttatacaaaatacagaagtaaatgctgaaaattataaaatattcttgtgctctaaaaattaagtaaaagatgagaacagatatca

SEQ ID NO: 6572 - DNA, 426 bp, Unknown
  gut microbiota DNA sequence
gtttttaggattggctttgcgacgtgtagctgcaagcattcgggcgtgttcctcttctatgcttataggcgtgtctccttttcttccgctttccaaccatttgtccaattcatcacgatagataaacaagtgttttccttgtttgatgattggaataccaccatgcttggctttgtaataaaaagatgattttgagataccaagatattcgcagacttcatcaacggtcattggaacatgggtgtccttttttacttcgttatgctgctgatgaagtttttccgccagcaacgtttccatacttgcgattctctcgcaaagttctcctaccacttcaggcaggtcattaaatgttagtttattcctttgcatgatataacactgttttgtttaacatgctgcaaatcaacacaatgatgtaacgct

SEQ ID NO: 6573 - DNA, 5636 bp, Unknown
  gut microbiota DNA sequence
taaaatattcttgtgctctaaaaattaagtaaaagatgagaacagatatcaagtacatttccataacaggagttttactcctcattcttctcaccgcttgcagcgaagaaagcggatgggaaaatattgtgggcacaaataagtacctacaaatagaaggagagattgcggggactgatgtggtaaccaaagtaacaggtgacgaccttggaacaaacatccgttttacggaaggtgatcagataggtttctattcgtttcataaaaacaaatgtgcaggaggcacacaaagtagtcatccggacagcgaaacatgtgataaagaatatctgaaaaatgaacctttatcttattccatatcttctggaacaagcaaatttgtattcatatcggaaaatgtacaaaatgtaataatgaacacattaggtttaacattcgcctactacccctattctgatgcaaaaccagcagataattacctgccagctgatgatcatacccactatatccatatattcaatgaagattatgaaaaaaatggaggttatcaaatagaagatatactcaccgctaccaagcgacaatattcagatgtgaattatacatttggccatcaattttcgatggtactgatattcttaggaaaagggttcactccagaaaaaaataaagcattgaccgtacatctcactgaaaaagttatcggtgcacatatcacccggaagtggaacggaaacgccgaacagtttacattcacagtagataaagtaccaacagataatgaaacgactggactttctgccttcaaaacccgcaaaatagaaaattataagttgtctgaaaccgaaaaggaaagtagaactgtatatccggtaatcctgccttctgggatggaaatagattatattgaggctactgatgtaaacggcaatatacaaaaaattagatcagtaaaagaaacactgcctgaattgaaatccggatggaagtatccaatgaccattcggatggatggtatcgtacccacagtgtacccccatgaaatagagccatggggtgaaccgacaaaaatagaagtagacaaattgccgggaatttacacttccgatgattttgagaaatggcttgctctgtataacacatatattgctgataagaaggatatccccgaggaaaaacaagattcattagaaaagtatggagattatacagaacaaaagaaatggatattctaccttagggatagtatagactgctccaaaatagagagtacaagcggtacgcttatcaaaaggctggtagaaggagtaacattggatggtggtaatcacattctgaaaaatcttatgctagacttaaaagacagtgaacctgagcaaggaatgggactaattggtgaaattactgatggcggatatttgcaaaacctgcgtatggaatttgtaacagtaagaagtaaaagtattgataaaccttccggttgcatcgctgccaggatcagtggcggacagataactaattgcacggtgaggcaagcaatcatgatttgtaaaagtacttcgggaatcttggcaggagaaatgacaaatggctcagtagataactgcaaatttcatggtatggtacaagcacctttttatccgctaccgaaagaggaatataaaggtattgtgggtaaaatagatgctggtacgattattgataacaatttaaccaatcatgtgatttttatagaggcagagtaaagtttcaataaaaaagaaacagtatgaataaaaagataggaataatatatagtatgctattattggtgttgtgcagttgccacaatgaactagcacccttatccggcagagatatacgagaaggagtaccggtacagttcacagttgagtgtccgcaatatgacatgcagacaactcgatccattactgacaagagagaatttaaaacaggagacgtaatacatgtatcagcagtattcaaacttgataaagagggtgaaagtgaaaagcaatacgccactcttacgctgacagaagaaggttgggtgaatgaaacggattttccaatgaactggccatggaatgccgtaaatgcgacatttactgcttattatctggaaaaatggaatggacctattacagacagcactcccttgaaaccggtagtattagatcgcttcgtataccagacaacagaagagaacaatcctgaccctctgaaagccgaagtcgcagatgtaaaaaacggacatgctgtacatttgaagtttcgccacctttgcacccggctcactatagaggatattggcgatgaagaagaatattggctgaagtataaaacatttcttggggaagagaattcccaagtcttactgaatgcctgccaattgactctccaagataatacattaaaatttgaattcgtacatgaggagagcgataaagtttccgctcaagtatttacaaatgaagagaacggaaaaagaacggccacttttcatctggctccggacaattacagtacgtttatgttgagacggcgtaacgactatccctacattaccatctctcaagtagataaattaaataaattagaggcaaataaggaatatgtcatctcattggaaaatctgacaggaaatatccatccagacgattcggatgacgagtggtggaatgatcgagatccggaaattcctgattataaggatttcaagattcaggattttctaaatgcccttcaacaatgcgagcaagactatatctgcaatacgaaaaaaggcgatccaataacagtcttaaagaaagacgagtatcggaaagaaatgcacctcatgactgatgtagatttcgaatatgggactttccaatcagtagaattgcccaatacagtgacttttgatggtggaggcaaaagcattttaggtgtggcacacccattgttcagcaccctgtatggaacggtaaaagaacttgatatagaaaatgcaaaaatagatagtaaagatagtggtatcaaaactgaatggggaatattagctcgtgaatgcgatggaggaataattagcaatgtcaatttgataaattctgaattgaaggttactattccacaaactacaaatgatccagcatataatatcggtgcactgataggttgggtaaaatctggaaatatatccaacattcaattggttgataacatatctgttacagtagattctcaagatgagaatagttattatatcttgtccgtaggtggagtaattggtcagttcaatggtacgttaatgaaaatgagtaacctcacgggaggatcagtaatacatgtgacgaatagcagccagggacattctacacgatatacaggcggagtaatcgggcatcttaatggaattatacaagattgcgaagtgaatgtaatggttgatgccagtaaatccattggaacatggaattatgttgggggaatagcaggagtagcaaggacaacattatccgagaagaatacaactatagataatacgccttctattatgaatatatccgttgtaggaagtgtgataggaggaagaatcccccaatatgaacgcaatgaagagggcaaaactataacttcccattcgtctaccggaggcattgtgggacatgtgcaagcagcttcagtaacaggaggagttacttttagcaaagtatccattgccacgaactataatgtttcagactatacttactacaccataggtggcgtaataggttctatgaagaatgctgtgcatattagcaacaatgaaggatgggacaaattcaatgccgacttctataaggcctatcactatcatgccggtacattttgtggcggcggcggaacaacaacagatttgaagaaagaaaatacagccgaaggtacaggtgcatttgtcggtacagaaaacaaaaactaaataaaaagaatcatttatgaaaaatctagttagagtaataatatatatgtgtttgtctacattcctttttgccagatgcgacaacgaaaagatggagggtataccagagcatccagttgaaataacctttgcaggaaatgaaaatgtttttgcacaaacacgttcttattatcccatagggcaagatgggaatggtcctctatatggtactatctatatacggcaaatagaagctaaacaaattgacacaaacggaaaagtcaccgaagggacaatatcttggggccattataaagtggcatcaggcactggagatcaattggagaccacaggagatatagaaccattaaaatggaatagtagtcagactagttatttttttcaagctttatccgtacctatcaatgcgaatggagaccctacaggagtggaattcacccataaagatcctaataacgaaattggaaatggtaaagtgacattcggaggatataaaactggattggaatatttcgtaggtgccactgtcgggccgcaacaattgtctccccatggtccgaaagtagttataaccctgcagagacaagtggcgaaagtgatatttggggggatacatcatatagatatcaatggaaagaaagaagaatacataacagattcttgcgacatcatatttcctaacctgccagctaacgccacattcgatatggggcattttcgtgaacaacagaaggaatatgatggcgtattgaaagataaccatgactggattacgctaaattacgaagattctcagaaaggcattgtcgtaaaaaattggtataagaaaacagggtcaattcagattgcagaagatatattacaagctatttatgtacctccatttattttctgggataatacagaaaataacagacctgaaaatcaatctggcttttttgtcataaaacgtaagtcagccaatggcatcaaaacttatactggaaatatcaacaataacaacaatagaatacagctatttgccggtgagtctattagattgaatgttacattgaaagatggtccggcaacgggcggtggtgacggatcgattattacagaatggagtactgcgggagaggctgatgttccccatcaccctattcccggtatttatacaaaagaagaagctgagaagttgcttgaggcattgcaatcaaaaacacccaataaaatcccaatccctgaagctttttataaaatggaggatggaaagaaagtaattcgcctttttataaatatcgactggagcagtttaacagaaacactgactcttcctgacaatattgtccttgatggacaaggatataatgtgaaactgggagctaatggctctattgagggaaatctaaaagatatttatatcagtggtaaaagtattagtgacatctgataagctttaatatttaataaatactaattcattgatatattgaataatattttggcagaaaaccgacacatttagagcctggtgcttattagagggataatttatcacgcaataagaatggttatcatattttttataacaaaaaaggtcctaattctattaagaattaggaccttttattgagaactgagcggtgcgtacgggactcgaacccgtgaccccatgcgtgacaggcatgtattctaaccaactgaacta

SEQ ID NO: 6574 - DNA, 9529 bp, Unknown
  gut microbiota DNA sequence
aaaagagggcctgaaaaaatatttttatcaaacattttggtcattcaaaaaataccttttacctttgcgcccattaaacgaacgattaaaagacaactaatcttccttaatcacccgtttatagcttttggctccagaagctccacatagatgtttcacagcttctttttccgcgatggtaggaagttctgaaatgaaatgaatgcagcataagttattaaaaataatcgcattacataatttgaccggtaggtatttcactactccggtgtccctaaaaaatgtccttacgcgaagttgctttgcgaaaatatcatgactgaaagtactcactctcagctttcaactttcaactctcaaaatctccattggtttgctgttcgtgtctcttatagtcgtgaactgactcttaagtctattcttgataaagagaacatagagagctttattcctatgtgctatggaatggtgatgaaaggtggtaagcgtgtccgtagattggtgcccgccatacataatcttgtcttcgttcattctacgcgcaaacgtattgatgctttgaaggacgaacttgagggaacgatgcctatacgtttcattatgaatcgtgaacattgccgtccggtagttattcctgatgtgcagatgcgcagttttattctggtagccggtagtcacgatgagccaattctttatatggaagcagccgaactgaatttggtaaaaggtcagaaggttcgtatcactgatggtgttttcaagggcgtaatcggtgagtttgtccgtattcgccatgatcgccgtgtggtagtcaatattgaaggtgtcatggctgtagctactacctttatcccgccttcgcttgttgagccgttaactgttgattgacactctgttgattgacattaatcattgattggcattgttgttgataataatcgttagttgatacataaatattgtgtcctcttaaatctttcgaagtatcttctctttttgaaataaaacatttaataatatgaattctaattcttcatcattattttccttagcccatgatcttctaacctacgggcttgatggaagtcccatttatgcggaccaatttacacgtttgaaccgtgatgtttacgaacgggctatcgaactttacaacattcatggagctacggccgaagaggaggctgaactttgccttgctttgttagtggctttcgctgcaacgatttatgataatggctgcaagcaggaatatattcagaatgtcctggatcgtagctgggaggtgcttccgaagctttctgcgtcattgctgaaggtgcgtttgttaacttattgttatggggagttctatgatgagagtttagcaaaggaggctcatgaaattataaatacttgggataaggcagggttgagcttggagcaggcggagattgcagaggagttgaaggggtttgaggagaatcagtatccgtgggaagcggtggaagaataaataatattttaataatctttttgtcttatatacataaggtattatgatttgtgtaactgataaatctaaatgttgtggttgtaatgcttgtggtgatatatgtactcatcatgcaataacctatcaaacagatattgaaggattttggtatccaattgtggatgagacaaaatgtactaattgtgggttgtgtgaaaaaatatgtccggaattaaatattgcatcattaaagaagaatgactttgacaaacctgttcaaacgattgctgcaataaataaaaggatggatgtgagatggaattctacttctggtggtgcttatactgctttagcagaagttatgcttaaacagggtggttatgtaagtggggccatctataatgaagatttcagtgttcgcaattatgtatcgaataatcaaaatgatcttgagaaactgagaagttcaaagtatcttcaaagcaatgcagaaggattgtttattgaaataaaaactttacttaaagcgggaaagaaagtcttagcttgtggtactccatgtcaaatgacggcattacgttcatttttacggaaagattatgagaatcttatcatcgtagactttatttgtaggggagtaaactctcctaaagtatatcgtaaatatttggattctttagaacaaatatttggtggtaaggtagtctatgtgaaggcaaaaaataaagaattgggatggcgtaaccttactcgtaaagtgacatttgataatggcaaatcatactatggtgtaagtatggaagatgattttcgtcgtggatatcatacgaatgtgttctgtcgtccttcttgctattcttgtcagtacaagggatttcctcgtattgcagatataactatagctgattattggggaattgagaaggtagataaaaatctggataacaacattgggacttctatgattttgctgaattcgaagaaaagtgtagcttattttggtaaagtaatggaacaattggaatggaaagagacggctttcgaatctattttggcaggtaatccagcattgattcattccatatctccggctaagattaatagggctcaattttttgaagaccttgacaaagggacttttgatgacgtggtgaagaaatatttcccattacatagcaaaaaaaatcactcgtttgagatgaaattgaaaagtaatctgaaattcttgtttcatatttggaaatgttatcgtttttcgcttcgttcttatttcaacttcattaagataaacaaacgcaaggatactattagtaattttaaggagcataaggtaatctttacaatgccaagcacagtatttgacattcatcctactgcgaagataattgtagatgctccgtttgtttatggcagtaatcctgttaggaatatgaagatgcctacatgtcttcgcatggaggctaataccactcttgaaattcatgatggtccactcactcgttatggaaatgttccatataatttgaggtatggtgcttatattgaaatagttaatggaggaaaactgactatcggacagggagctgccaatgttggcttgactattatgtgtgccaaagaaataacaataggtaatggtgttcgtataggacgcaatgtttctatccgtgactggaatggtcctcatgtaattgtaaatgatcaatacgtgaatcatgcgcctgtacatattgaagatcatgtctggctttgtactgggtgttctattatgccaggggtgacaattggagaaggttctgtggtagcagcaaatgcactggttacccataatataccaccacgtagcttagtaggaggttctccagctaaaatcattaagtctgatatagaatggtattaatttcttttccataaatatgtctgacaataaaagaattgcaaagaatacagtatttctgtactttcgtatgctccttattatgggagtatcactttatatctcgcgtgtaatcttatcaatattaggagttgaagattttggtatatataatgttgttgggggaattgtagtcatatttactactctttgtggttcattaggcagtgcaacttcgaggtatattacttttgaattggggcgtaaggattatgagaaactgaatagggtctttagtgctgcctttatggctcattgtgcaattgctttacttatcgtgattctttgtgaaacagtgggcttatggcttttttataaaaagatgattattcctgctgacaggatagaggctgctttttgggtatttcaaatttcattgttgacaactgtcttttcggtcacgcaagttccttacaatgcttgtattatagcacacgagaatatgaaaatctatgcttatgtgagtatcgttgaagtattacttaagttggcggtagtatacgcattgctcatttcacctattgataagcttgttttttattccatattactctgtgttgttcaagtgagtgtaatgtttatttatcgtttttattgtcggcaatatccggaaagtaaactgcgcttttgcaaagatagatctttatttatagatatattctcatatgcaggctcggatatgattggctctgtttctgttttggctcaaggacaaggtctgaatatattactcaatatgttttatggtccggtagtcaatgctgctcgtgctatagcttatcagttacagagtgcggtaactcaattctccggcaatttttttacggctgtaagaccacaaatcattaagctatatgcggagtgcaaattagaagaaatgatgcgcttagtgtataatagcagttggatttcatattatatgcttttgatggtttctcttcccttatgttttgagaggaattttgtattgtcattatggcttggtgaataccccgatcatacgagttctttcattattcttattataatactttgtttgatacaagcattgaaaactccacgtactactgtctatcatgcaactggacatattcttcgttccaatatttttgttggaggagtgctttgtatggctttcccattggcatatttatttctaaagttaggtggaagtcctgaatctgtattttgggcagcaaacatatcaatgattgtatcagagtttgtgagtatgtttatccttagacgatatataaaatattccatactaaattattttatcaatattcattgtcgttgttttggagtttcaatggcggctactgttatattgtattatattcaacaacaattagaatttggttggtgtagattaatattgatgtcacttgcctctgttattatcacaggtatattagcatatatgtttggtatagattccactctccgaaatggattgaatagacttgttcggagtaaaataataaggagaaaatgaaatataaaactttatctaatggcattcagatgccatctattggtttgggaacctatccactgtatgcaaagcagttgacagatatcttggttatggcttatgaggaggggtataggttgatagatactgctgataattattataatgaaaaagatttgggtgaaagtttatgctatatctataatcaattaggggcaaagcgtgaagatttctttttagtgtctaaagttagtgatgaactttatcctataggagattatcgtccgggttccaatagaggtgtttatttttggaaatcttcccgtgtcatgcaggctcccaatgctgtacgcaaaatacttgaagagaaaatagacaatacattgaggtttcttaaaaccgattatttagatttatggttgatgcattggccctaccctgatttctttctggaactatggtatgaaatggaaaggatatatgctacagggaaagtcaaggctatcggagtgtgtaattgtcgtgtacggcatttggaatccttgaggactcaaggattttctgttcccatggttaatcagtttgaatcttctcctttaaatacaaaagaggggattgttgattattgtattaatcatggtatagaaataatgacttattcccccttgatgtctttaaggtttaaggacgttcctcggttctctagattacttactatgcttagtgaaaaataccataaaaatcctgcccagattattcttagatttgatattcaacgtggactagttcctattcccaaatctactcataggaatcgactggtagcaaatattgacttgtttgactttgaattgactgatgatgaaatggtaacattgatgaactgtaatcaaaatcgtcagacattacctgaatcaaaacaatgtcctggcctttaaattacatacaatgaatattggtacttttataagattagcgagtaacaaggttataaatcacactcaatggtatgatagatattggggtggtgttattaagttttggcatacgaatcagtttaatctcgactgtgtcaatttaggaagcaatagtggtttatatggatttgactatactcaaattgaaggagtgcaaggtgctaattgggcattaggtcctcaatctcttgtccatgattttaatatcttaaagaattattttagttacctgaaagagggaggaactgtatttattcctatttgtcctttctcttgcttaatatcaaggtataacaaagaaagtaatttgaaatattatacgatactgcatcctgcaaccataattgattttgaagatagcgaacggacgaaagctttatcgattatgcattatccgtttaaagctatgcctttatattgtattaagcaattgatgaaagatgttattcgtaaagctataccttcaagaaaaaaaaagatagattttgtagttgattcaaatagagtgttgacaagttggcagaaacaatttggaatcactgatttaaatgcctctctttcttctcaacatgctgaggaacaaattattcgagctgctacattgcatgagatgatatgtttctgccgagaaagaaagttaaaacctgttgtggttttattacctatgcatcctgcattggtacgacagttgtcagattcatttcgtcaacactatatatatgattttattcagaaagctgatataggtgatacaccttttattgatggttttgaagaaaaaaactacttgaatacagattttcgttcatcgtatcttttaaacaagcaaggggcgatgaaattcacggatcagctgtgtaaacgtttgtcgatagggcaagagaattgtttttgagtaaagtgaaatatttaagtgtttattgttagattatatggatataggtattgttacattatggcagtctaaagataattatggtcagctattgcagtgttatgctctacaatgttatttaaaaaagcaaggacacaatgcttttcttatacgttttaactataataagaacaatagctcttttaagaaaaaactaataaaagcattattgatatacccaatggtgaaaaagatgtttacgtatgataagcgaagaaaagaaagtgaattgaaaaggaagaatgataaaagaaatgctgcaagaaaatttgatgaatttagaaatttgtatatttctcaaacagaagctttgtattattctttagaggatttaaagaaaaatcctcctgttgccgattgttatataacaggtagtgatcaggtttttggagcaaatttgaaagtagttgacaattccattttctttttgagtttcgtgcctaaatcagcacgtaaaatatcatatgcagcgagttttggcttaataaaatatccacaagatagagttggaaaattaaaggaactgttggatgattttgattttgtatcaataagggagaaggcaggtgttaatatttgtaattctgtaggtataccagcaacaaaagtgttggatcctgtatttttactatcaagtgacgattatttgaaatttgtcaaaacgtctaaatatacatctccttatgtatacatctatagcttaaatatcaagcaccctaatgaaataatgtggggtgatttaagtagaatgatggctaattataaacttgtcgttactcattccagtgggtattttgagggggatgagatattctccaatgcagtttatgactattctacaatatctgaatggctatctaatatttatttttcttcattgtttgtaaccacctcttttcatggagttgcttttagtattttgctaaaaaagaagtttgtttattttccattgtatggagaatatgcacgtgctaataatagggtgttagaattgttgaatattttaggattaaacttcttggttgttaaaaatacgaatgattttgaagctgcaattaatacaacgatagattgggagtctgtgtatggtaaactattgccagaaatagtattttcaagaaaaatgttaatagcgaatctgtaagtatgaatatattattttattcagtatgggatatatcccctcaaaaagggggaaccgaaagaataacttctactttatgtacagaatttaggcgtgaaggacataaatgttatcttgtttataaaacaaatttggaccctaattttgaactgtgtgagtttgatggaaagtttaaaattggggcaaatacttctgatgaagatattataaaatatctcttggataataaaataaatgtaatacatattcaaagtaatttcctttttgttcggagaatcagaaaaatacgggatattaaccatttatccttaaaaataatcttttctcatcattttgaaccaggctgggaagaacgttctgtttctatgtctgatattcttttggatgttagacaggcaatcacaggcttctctaaattagttcatattataagattgtttttgtatcctataaataggttacgcatatcttatcttaatcacaaatactatagactatcatacgagaatacagataatgtagtcttgttgtctaaatatttctttaataagtacatgcagtacatgaagatgactgatgttagtaagttacgttctattcctaatgctttatcttttaatgaatttctacctttcatagaaatttctaaaaaagaaaagattgtattgattgtttcgagattagaagaaacgcaaaagcgaatatcgtctgcacttaagatatgggtggatttatattcatatacttctgttgaaaattggaaattatatataattggtgctggtagatataatgaatattataagaaaatagtgaagaaacatcgtctgactaatgttttttttgaggggatacgagacccaaaaccatactatgtaaaagcatctttattcatgatgacatctgaatcggaggggtggggacttactctgacagaagctatgcaatttggatgtgttcctattgcttttgataattatgactccttgaaagatattattattaacgactataatggggttcttgttagtcggaatcaacaatctgattatgtagatgctatgttgagtttgatgatagatcattcttgtcgaaatttattagcacatcaagccataaatttctctagaaagtttgcgattaaagaggttgcacatcagtggctaaatctttataaagaataattgttttggatcaaaatattttaggatgatgttgtattgggggattttgttttcagcttttattgttgggtatatatcgcaatataaggctgtttattcgtctattgtagttttgaattataaactatgtgattctcggtcaattcattatttcccatttttagtttttttatttttcctattcatcctttctggctttagaagcgtaggaacagattatgaatcctatgtgtcctattttgaaattgcatctaaattgggtggtgatgatgtagaaatagagttaggatatttttatttaaataaatttttgagatacttttcggataattatgtgtctatttttattgttacttcttttataaacatctttttttttactatcccattactgaaaaagtcg

SEQ ID NO: 6575 - DNA, 443 bp, Unknown
  gut microbiota DNA sequence
acggtcatctgaccacgaccgatacccgcacaaatattactcatacgataattgtaaccgatcttttcatgctggtaatgagggaaaggttcacgagcctgcgtagcataaaacatcgtctgcttcttggtgctttcatcaggaacgatcaaagccccgccacccgaagtagtgatcatcttattaccgttaaaagacaacacgccaaaggtaccgaaagtaccgcacttctggcccttaaactcagagcccaaagcctccgcagcatcctccagcactggaatatcataattagcagctatcgcgcaaatctcatcaatcctggcaggcataccgtaaagatgaacaggaagaatagctttcggcttcttacctgtcttcaagattctgtctttgatggcttcttccagcaaaacagggtccatattccaggtatcctcctc

SEQ ID NO: 6576 - DNA, 439 bp, Unknown
  gut microbiota DNA sequence
caatttaaaataggaaactttttatccttcaaagaacaatctacattgtcattggttgcatcggctttgaaagaaatacaggttccggctgaagatataatctttagtgtaggaaatgtcggattatccttaatgaagagtgcggttgtttatggtgctaatgcatccgggaaatccaattttattaaggcgtttgaattctttaaatggtatgtgataaactcatcgaaggatattcaagcgggagaacgggttaatatagaaagtttccggttgaattcgctcactgtgaatgaaccaagttattttgaagccatattctgtgatgaggacaatcaatatcgttatggttttgaggctgataattcattggtacattcggagtggctctatcaaaaggctaataaaaagagagctaaggaagtggaattattctatc

SEQ ID NO: 6577 - DNA, 340 bp, Unknown
  gut microbiota DNA sequence
ccgccaacgcaaagattatgtccactgcgtccggtaacttcctgcatcacctccggatcaatatccatatttccatgggaagttcccacgataatgtcatcaaactgctgtgtcacaactgcatgcacatcatttctcataaatgtacatggataaagtgccaggtcaagtgctgccagaagagccacacacacgaccaataccaggaacgtttttaaaactttcttaaaattgcgcataaataaatcctctcgctactgctgttgatccaaagaatccgatggatgccagcagacaaaaataaattgctacagtaattggcagactcagtcctgcaagt

SEQ ID NO: 6578 - DNA, 682 bp, Unknown
  gut microbiota DNA sequence
tcgggttgaaaattctcccaaaaagtattttccgcagttaataactttaggacagactgtagatttggtgtttattgctcagaagatgcaggatcgttcttcactttctattggtgatatcaagagtaccatgcagaactttgtggagaaattgaaagagcagttgttggaaggtaagacagtgaatattgccgggttgggtgtgtttttgctggctgctaagtcgaaaggagaggaaaaggcagaagatgtgactgccaagagcgtggacagcgttcgcatattctttcaagccaataaagagttgaagataaccaagactgctacgcgtgccggtgaaaagttggatctggtcagtttggacgattatctgaaaggtctatcaaacgttcctgcgggaggcggctcggacggtggatcgggagataactcgggcgatggaggactggatgagaatccactcggataaggagagctgaaaagtaaaagttgagaatgaaaatcaaaagaatcgctatgaagaaaacgaattggaaggtgatttttaaagtgattattgccgttgctactgccatcgcaggtgtgattggagggcaggcgatgacattttaagtatagttgatagacgaagagaagccgttatccgagaagttgaagttcggataacggctcttttttatct

SEQ ID NO: 6579 - DNA, 710 bp, Unknown
  gut microbiota DNA sequence
acgtgatcggtctggcattctactttattcaatctcaattcggaattctcaaactcgacccggaaagttattatgtcgatacagtatcggtctctttcaatatctggctttttcttttgattaatatcggtacattgttgtcgtcggtgctgatgttgatcggtccttctttcctgataacgaaaatcaatccggcaaactctatgcgatatgagtaagtcttccttccggatataagtaaacaggtttattatcttctcataaaatcacctttccctcggaaaaggcggcatagcttgaaattaagagattgtatcggttggagaatatcgaatatgggcaatgagaaataatattttctgcctccccccatttctttggctgtccggttaatcacaatagcttgcgttatgtaacgaagcagccatatcaataatgcaatacctgctaccagccaatgaaagttgagtatgccgaatacgatacctgccatacaagcgacatagaataacaggcgggaaaatgtttcgaatcccgacaggtaacgttgtgctccacggtagaagcgtgcggtagccatataactaactttttcttccttccagtctttgtagcggtagacgggctgtatacgcatcgtagcgttgaagtcagtttctacgcgcgtattcgttttggttactatttgattaatgaacaagtcatcttct

SEQ ID NO: 6580 - DNA, 351 bp, Unknown
  gut microbiota DNA sequence
gagtcaattcggcgtatctgccaatcatctgctcaagcagcgtctgttggaagaattgaagaatgagttactgtttgctaaccgaaacgtgaaccagctggccgaagagtttcatttctccgacccgagtcatctgatgcgtttctttaaacgtgaaactggaaagacttttacgcaatatttgcgcgactaccaaaatggaatatacgaatgaaaacggacagactggaaagcttgcagattggccattcccataccaaagatgttttcaacgacttacaaatatgcttagtgggaaatcctatttcagcctaaaatgtgcatcacattccgcagtgtcaagttcaccat

SEQ ID NO: 6581 - DNA, 636 bp, Unknown
  gut microbiota DNA sequence
agaggtatgttcgggaagttcctcccgcaatgcggttacggcttctttcacagcctgaaatacatcggcactgtctttgcggtgctcaatggtagtttcccaccatgactccccgtctgtatatccggccgcttctgccagatagtcaaaaggatctctgtatacggtggggataatctcctcctgttgctcttcggttgtattatggggctcctgattttgcgccatcgaatgtaccagtggtaaatcgaaaaagcgtaacggtacttcgttccgcagggcgtaaactatcgtctgccattccggagagaattcggcaaacggatagaacaccgcattctgtggctggtcgggttgataggcaagtaaggcgacgggtggttccatttgctcattcagcacgcatggaagcagagtctcggcttctgccggaccttccagcaagatgagatcgggctgaagctcttgcaggtattccagtacgttccggcatgaaccgggaccgtgatgccttattcctaataagtgaattgccattcttttaatcttttagttcgtatgatggagtgggaggtatcagatcatatcccttgatgcacggtagatatctttccatccgtcgcggttcttcactac

SEQ ID NO: 6582 - DNA, 324 bp, Unknown
  gut microbiota DNA sequence
gtacgtccgcgatccggatttgccgccatttcatcgagtcctttccggtgatacgtgtaccacatttcccggaaagcgtcggatgcgttatcttgcaaagccgtcgctacggcatggcggttctggttgctatcaaaagctttccagcccgtccacgacatctcagactgggccatgttcacgatttgctgggcttgctgtatataggtagttccacctttcggggcgaaactatcgaaatcaagccccaagatcacatagacgtaaaacacgatagtggccgtaagattgctggtcagcgtatttgagttatagtccaatggc

SEQ ID NO: 6583 - DNA, 922 bp, Unknown
  gut microbiota DNA sequence
tatctaatcctgtttgatacccacactttcgagcctcaatgtcagttgcagcttagcaggctgccttcgcaatcggagttcttcgtgatatctaagcatttcaccgctacaccacgaattccgcctgcctcaactgcactcaagatatccagtatcaactgcaattttacggttgagccgcaaactttcacaactgacttaaacatccatctacgctccctttaaacccaataaatccggataacgctcggatcctccgtattaccgcggctgctggcacggagttagccgatccttattcgtatggtacatacaaaaagccacacgtggctcactttattcccatataaaagaagtttacaacccatagggcagtcatccttcacgctacttggctggttcagactctcgtccattgaccaatattcctcactgctgcctcccgtaggagtttggaccgtgtctcagttccaatgtgggggaccttcctctcagaacccctatccatcgatgtcttggtgggccgttaccccgccaacaaactaatggaacgcatccccatcggttatcgaaattctttaataacaaaaagatgccttctcgttatactatccggtattaatctttctttcgaaaggctatcccggaataaccggtaggttggatacgtgttactcacccgtgcgccggtcgccatcaacctattgctaggtcatgctgcccctcgacttgcatgtgttaagcctgtagctagcgttcatcctgagccaggatcaaactcttcattgtaaaagtattgtgactgcgcaaattaataattaattattaaaaagcgacagtgtttttgctctgttcaggacgctcggtttattaaaagtcttcaaattacctatatatataagttacttgacggttctttttt

SEQ ID NO: 6584 - DNA, 484 bp, Unknown
  gut microbiota DNA sequence
actctttatatttctcaatcacatgcttcctgctttggataatctgccaacgatatacccagcaagtagtcaggaagtagatgcctgcctgtatccataatgcacggtattcaaaggctacttcgttgagtgtagctcccatgctattgatgcgtacgtagccattgatgccgaaagtggacgggaagatataagagaagtatctccagaaatccggcatggcggctcccggccaggaaacacctgaaaggaacaataagggtacggatgtgaagacgaatattaacatgcaggtttcacggttgcgtatggcaatagaagctgtcatggcaaagaaaatacatgctgccagataaggcaacataaagagggtcagcacacccggttgagctatctggatgagactgaacaggcgtggcactacacagagcacatatacggatacaagtgcatataccatgaaataacttaagcctttacccag

SEQ ID NO: 6585 - DNA, 464 bp, Unknown
  gut microbiota DNA sequence
gtataaatcaatctttcagtctgcacaccatatcccacagtgcttttgcagagttaaaattctccggaataatatctgctggagtaatcgtaatgtcataagtatcctgcaattcacttacaatagacagaattgcaaaggaatcaagaattccatcgtcaatcaaagtatcacagttttcaaaatctgcatccggctggatctcttccagtaattcaattaattcttccattttttcatatctccttattttttgttttttcagcaattccattatttttcggtattgccatggtcttttatttctctgaatttaaaagatctgtatgtacaccatcccgcaccatgcgcagtccctctccctctgtccagaaatagattctcggaagaggacggctcaggaataaatagattccttctgtaacggaataagcacctacccgttcaaataccagtatatcatg

SEQ ID NO: 6586 - DNA, 236 bp, Unknown
  gut microbiota DNA sequence
gtatcatcaatctttactacttgattctggtaatatcctacattcttcttgaacatccaattccattgtagtcccttatccatcacatcacaataattgtaatactcatggtttccgggcacaatgagcacttgccgataatttacagctgcccatttccaaaaatagctcaaaggtgcaaccttgtttttcaaatagaatatatctccggcaagaaccagaacatcgccagttac

SEQ ID NO: 6587 - DNA, 190 bp, Unknown
  gut microbiota DNA sequence
acgcggactttaatcttttagacgcggatgacacggatgacgcggatttttaaagctgcgctatacataccggcatatcacaccgaaggaaaaaagaatccgcgtcatccgtgtcatccgtgtctgaaagattacttgcacgccgaaggagaaccttgctccagcgctacgctggtaaattatcatttat

SEQ ID NO: 6588 - DNA, 210 bp, Unknown
  gut microbiota DNA sequence
gaactgtgccctgaacgctttgagtttagcattgaatgattccgccgctgcattggttgccctcctttcaaagaaattgataatattcagatagtgggtctgaatggatcgtgccactcttccgaaagcaagaaatccggatttatctacctcatcataccatcttgcaagtctcgtcaaggctacatccttaaacttacactgatgata

SEQ ID NO: 6589 - DNA, 358 bp, Unknown
  gut microbiota DNA sequence
agaaactggcttatgaagctgttcaggagatgcgtgtgaaagcacgctgggaggctttggatgaagaatccacacagattgcctatgcaaaagcctgtggcaggatatatcacgctcccgttttctctaatggagacacgcggaaacagctgctggcaagaagtatctatcttctttacaaaaaagaatccttgtggacccagtctcaaagagaacgggctgatatcctgtttaaagagtatccggagattaagaaaggctattatctggccatgcgtttaggcctgatttatcatcagtgtaagtttaaggatgtagccttgacgagacttgcaagatggtatgatgaggtagataa

SEQ ID NO: 6590 - DNA, 387 bp, Unknown
  gut microbiota DNA sequence
aataattcttaaaaaaatgggagaaagcattagactatgaatatacaaatattcggaacaaagaaaaactttgacagcaagaaagcagaacgctatttcaaagaacggggaattaaatatcagtttatagatatgaaagaaaaaggcttaagtaaaggagaattccaatctgtctgccaggcaattggcggttatgataaactgatagatactgactgcaaggataaagacctgctggcattgatcacttatatcgcagaggaagacaaggcagagaaaattctcgaaaaccagagcatcatcaaagtccctgtggtaagaaacggaaaacaggcgacagtaggatatcagccggagatctggaagagctggaagtgatagttatag

SEQ ID NO: 6591 - DNA, 347 bp, Unknown
  gut microbiota DNA sequence
ccattcaggaagagcttgacaagcgcaatgtgaagattgaatttgacgtggcttccaatcctgagtttatgaaagaaggtgatgccgtggatgatttcatgaagcctgaccgtgtggtagtaggtgtggagtcggaaaaggcaaagactataatggaacgtctttataagcctttcatgatgaataactaccggttgatatttacggatatcccgagtgcagaaatgataaaatatgctgcaaattccatgttggctacacgaattagctttatgaatgacatagctaacctttgcgagctggtaggtgctgatgtaaatatggtccgtaagggtatcggttcagat

SEQ ID NO: 6592 - DNA, 297 bp, Unknown
  gut microbiota DNA sequence
gatgattacggtatggttaacatccagttggctgctaagattctgaaggctaacccggataagaagtacaaagttgccggttatgctgacaaggctacgggtagcgcttcctggaaccagaagttgtctgaaaaacgtgctcaggctgtttacgacgcattgattaaggaaggcgttgataaggatcagctcgaactcgttggattcggtggtactgctaacatgttcggtaagaactatttgaaccgagtagtaattctggaataagatatagggacaaagagttgtaaactctaa

SEQ ID NO: 6593 - DNA, 372 bp, Unknown
  gut microbiota DNA sequence
tatgcaagaacttcaaagccccgagagaacacccttttctgaaataacccttgaaatggaagcggataaagagactgaaatatggtatgcgatgcgtgccacgtaccgtagagagcctgatgctatgcgtctgcttgaaaaggaaaaaatgggttgtttcgttcccatgcaatacaagattagcataaagaaaggtaagaaagtccgtgctttggttccggttgtacataacttactttttgtccatgcccgtccttccgaggtgaaacgcatcaaatcacaggtaagctatttgcaatacattacggatacccgtagcggtcagaaaatcattatctccgacagtgagatgcaacgctttattgcagtagc

SEQ ID NO: 6594 - DNA, 912 bp, Unknown
  gut microbiota DNA sequence
agcctgtatgccgcctgcaccgcccgccttggctttctcacccaacttccggcgttctgcgggactgaactcgctgaacgtgcgtttcagtatgggaagcagttccatgaaggtttctttttcctgcgaacatacccagttatttaccaggttccacaaattatcatccagcagcaaaatggaaccggaagaacggaggaaaccctcgaaccagtaggccatatctgccggagcattaccgatggaagaataataactaagggtattctgcgcttcttcggctgaaatgtctcctttgtcgttcagcagtcttgtggcatagccggacaacagcggatgtacattaacggatgtacgcacctggcggacgaattccagccacatcctgttcagttccggatcattgagagtggaaactgcataatccgtagacaccagtttgttgaatatgtccgtagcagcctcctcatctatattgatacaaacaagtactccacctgcaaggatacgggcaatcatagcttggagcatatcgcctacctttgagaaatccagattacggacattgccgtagcggacgatatttaccagatcgggtactgcctccatcatctcgataatatcagtggaggcagccgagaggcggtcgagttgcaccgtcatggcttccactaagtccggtagattggcagggattacccggtcgagcagccgggtgagttccggaatatgccgtatctctttcgtctgtttgagcagaaacttctgcgttgcttcttccagtgtatttccccagatagccttttcgatgatgcttataatctgttccggcttatggtagagtgtccatttttctttgaaagtacctttaccgtcagtaccgcccggaattgcccaatctatgtcgagcag

SEQ ID NO: 6595 - DNA, 551 bp, Unknown
  gut microbiota DNA sequence
cacttgttttatatcagctgtagagagacgctcaatgagtttctccttgaataactctggagtaatatcctcattgttaaacttcttgcatcgttctgccaaatgaataaaatccaacggaatattatggcgtacataccattcaaagtcataccaatcacgacctttgactctattcttccatgcacgatagaccagtgcgtgcatcttgcctgcaaacaggtccggaagtgtgaaacaacgggtcataaatgaatgtggctgaagcaatagtttctgttctgtcttgaagttcaacggtggacaagtatctacttcaatctttatctttattgacttctctgtctggaaagtcacatcatatacatcggtattatctttaagaaatgccgattcgacctttccgaaattcttcttgtcttttttctttatttcaacctcacggccaaccattgcaaaggcatcaatgatagcaggaaagtatttcgtaaaatcaaacttatcatcttgcgcaagcaatgaaaaatccatatcctcactgaaacgttgca

SEQ ID NO: 6596 - DNA, 195 bp, Unknown
  gut microbiota DNA sequence
ttcttcatccaaagcctcccagcgtgctttcacacgcatctcctgaacagcttcataagccagtttctgtacgtggaaacggtcggtaacccgtttggcggcaggaaaacagctacgggcaatctgttccatattgggagccatatccaaggttatctcacgtacttgatagcgacgacggcgggaaagtctgag

SEQ ID NO: 6597 - DNA, 359 bp, Unknown
  gut microbiota DNA sequence
ttctgttttctgcttgcaccaccgttaccacagccatgagcaaccacacaaacattccccctttccgaagcaatggatgcctgagtaatctacggaattctccactgcgaccgacaagcatccacaacatggagatacccagcaaaatatatcctgcatacgtaacccctattccccacggatcataattcactgacaaccaactcccctccttatcatcatcaaaagaagactggtaaaagcgatacccctgacgagagaggatacgattcatggaaactggttccgcatcccggatatagctgacataatctgccggagcctccgtccccggataatactccacccggaaactgtcc

SEQ ID NO: 6598 - DNA, 180 bp, Unknown
  gut microbiota DNA sequence
caggacgctcggtttattaaaagtcttcaaattacctatatatataagttacttgacggttcttttttatacccagatgctgcgctttaattattaatttttaatcattaacttgcgaagcacctgctcttgtactacttgtattgtttatgtaaattcttcaaagatcgcttcttttta

SEQ ID NO: 6599 - DNA, 289 bp, Unknown
  gut microbiota DNA sequence
tcaccacagagtaacacagagtttcacggagttctattcttttgatttcaaattgattaaactctgtgaaactctgtgttactctgtggtgaattaattcataaccctacaaaagtgcacaaaacataaccaacagaaattcaactcatattctggatattagctatatacatcggacgcgcagcatctatatatcgaacatgtcgcatctatatatcgggcatgcagtatctatatatccaataccaccgatatatagatgctaaaagagcggaatgaaataaaagcg

SEQ ID NO: 6600 - DNA, 71299 bp, Unknown
  gut microbiota DNA sequence
gcatctgagtaccttaaatgccacatctcggtaaccggaatgccacacttgaagaagtgcgaagtatggcattccaggtgtttaagtgtggcatttaaggtactcagatgcggcatttcaaacacttaagtgtggcatttcgggtacttatatatcaaagctgagcgctaaataaaagttgatgtgatttaccctcactactctcactcttgaaataagcggttgatagactaaacattaagtgtgagtgagagtaaattttgggcgtgagggtaagttccctaccatcacgcccaaaatttcatttctacagatcaacttgctataacacaataagatatcccgtatttaacgtagataccgtataggtccgtaatccggcatttttagctttttttccccgcatagacggcggtatgtaaccctttccaagaattattctcctataaatgtatagtttctgtagggttcagttttcaggtcaaatattcttcaaagagaacttgatcattcttcataaaacagcttggtacataaatgatcgtttatccccccctatttattttttcccaattggggaaatagaacgtccatttatatcaagttattttttaagcattactaagtcataaaaaattctttttcttctttcagttttccccgagctccctgttcatcggtgttccggctgaaagatgcctgaaacaacaagcaggctgaagtttcagccggaatgtcgatgaacagggagctcgggagggctgaaagactgaaagagcatttctctcaaaaatgtattagtaatgaataaaatgataaagtaatactatctctatttacttaatattggaattatcatttaattcataacccgtcagaaataaagatttcacaagccactaaccatcccttaaacaatgataagaaaaagaaaaactggatgagtagtagtttttttcgtaactttgcactgttttaaagacattgaatgaatggagtttaaatacgacgttatcgtgattggcgccggacatgccggttgtgaggccgcagctgctgcggcaaatctgggttcaaaaacctgtcttatcaccatggacatgaataagataggacaaatgagttgtaaccctgccgtaggcggtattgccaaaggacaaattgtacgcgaagtagatgctttaggtggatatatgggattagtgaccgatcagaccgccatccagttccgtatcctgaaccgttccaaaggccccgcaatgtggagcccccgtgcacaatgtgaccgcaataagttcatctgggcatggcgtgaaatcttagaaaatactcccaacttgcatatctggcaagatacagtacgtgaaattctcgttgaaaacggagaagtggtaggcttaaccactttactcgatgtaaccttccgtgcaaagtgtatcgtactgaccgccggcactttcctgaacggattaatgcacgtaggacgtaccaaacttcccggaggacgtatggcagaacctgcatcttacgaattaaccgaatccatcgcaagacatggcattgaatacggacgcatgaaaaccggtacgcctgttcgcatagacggacggagtgtgcactatgaatacatggaaacgcaggatggagaatgtgactttcataaattctcattcctggataccagtgtacgccacttaaaacaactcccatgctggacttgcttcacgaacgaggaagtacaccgtgtattacgtgaagggttgccggattctccccttttcaacggacagattcagagtatcggtccacgttactgtcccagcatcgaaactaaaatagttactttccccgataaggagcaacaccagctttttctggaaccggaaggagaaacaactcaggaactttatttaaatggcttctcttcatcactcccgatgaatatacagatagaagcgctgaaaaaggttcccgcattcaaagatctggtgatttatcgtcccggatacgctatcgagtatgactactttgaccctacccaactaaaacatacgttggaaacgaagaaaattaaaaatctattctttgcagggcaggtaaacgggaccaccggatatgaagaagcagccggacaaggaatcattgccggaatcaacgcacatataaactgtcacggcggtgaaccatttacccttgcacgagacgaagcatatatcggcgtattaatcgatgatttggtaaccaaaggcgtggatgaaccttatcgtatgtttacttcgcgcgccgaatatcgcatcttgctacgtatggacgatgcagatatgcgtcttaccgaaaaggcatggaaactcggactcgtaaagagcgaccgttatgagttactgaaacggaagcgtgactcgatcaatagtatcatagaattcactcgcaactattcgatgaaaccggcattaatcaatccggtattggagcaattgggtaccactccccttcgccaaggatgcaaattgatcgaccttataaaccgtccgcaagttacgcttgaaaacatggcggagcatgtcagcgctttccgccgggagctggataaagttactgaaagaaaagaagaaataattgaggcagctgaaatcctgattaagtatgaaggatacattggacgtgaacgaatgattgcagataaactggctcgtctggaaagcatcaaaataaaggggaagtttgattataatgccattcaatccctatccaccgaagcaagacagaagctagtgaagattgatccggaaacgatagctcaggcaagccggattccgggcgtatcaccaagcgatataaacgtattactggtgctttcgggcagataaagcgaatacgttccacgtgaaacaaagaattcaataaacgcattaaaaatactgattatgagcaaagaaactcttgcaaaaagcattcgggaaattcctgatttccctattccgggaattctattctacgatgtaactacattatttaaagatcctgcaagactccaggaactttcagatacattgtatgaaatgtacaaggacaaaggtatcacaaaagtggtaggcattgaatcgagaggcttcattatgggacctatccttgccacccgcttgggtgcaggtttcattcctatccgcaagcccggaaagcttcctgcagaaaccattgaggaaagctacgataaagaatatggcaaagacaccattcagatacataaggacgccctcaacgagaacgacgtagttttgctacatgacgatctgctcgccacaggcggaacaatggaggctgcctgcaaactagtacaaaagatgaatccgaagaaaatatatgtaaacttcatcatagaactaaaggagttgcacggaatagacttattcaacaaagacgtagacgtacagtcggtactttcattataaacaaagagaagagacctgagaaccacatggagaataaccctgaacttaaaaccagcgaatatctgaaaggaattgtattgaaccttccggagagccccggtatttaccaatatctgaataccgaaggggttatcatatacgtaggtaaagctaaaaacttaaagcgaagggtctcctcctatttcaacaaagaacacgaaccggggaaaacaagagtactcgtcagcaaaatagccgatatccgatacattgtggtgaactctgaggaagacgctttgctgctggagaataatctcatcaagaaatataagccacggtacaatgtcttgttgaaagatgacaagacatatccgtctatttgcgttcaaaacgagtattttccccggatattcaagacacgtaaaatcatacgcaacggttcctcttactatggcccttacagccatgtaccttccatgaatgcattgcttgatcttatcaagcacctgtatccgttacgcacctgcaacctgaacctttcacccgaaaatatccgggcaggaaaattcaatgtttgtctggaatatcatatcaagaactgcgccggaccttgcgtcgggaagcaatcactggatgattacatgaaaaacatcggagaaatcaaggaaatcctcaaaggtaatacgcaggaaatacaacggatgctttttcagcaaatgcaggaactggctgccgaaatgaagtttgaagaggcacaaaaggtcaagagtagatacatgctgattgaaaattaccgtgccaagtcagaggtagtaagcaatgttctgcataatatcgatgttttttccatagaggaagacagcgatggcaaatccgcatttatcaattatctgcatatcacaaacggggcaatcaaccaggcttttacattcgagtacaagaaacgattgaatgaaaccaaagaagaacttatccaactgggcatcattgaaatgagagagcgatacaagagcctttcacgcgaaatcatcgtgcctttcgaggtggatatggagttgaaagacgtgatctttacaatacctcagcgaggggataagaagaaactgctggatctttccattctgaatgtaaagcagtataaggccgatcgcatgaagcaagccgaaaagctgaatccggagcagcgcagcgtccgcttgatgaaagagatacaggaagagttacaccttgaacatttacccatacaaatagagtgttttgataactcaaatatccaaggctccgatccggttgccgcctgcgtggtattcaagaaagccaaaccctcaaaacaagactaccggaagtacaatatcaagaccgtagtaggcgcagacgactacgcctccatgaaagaagtcgtaagacgccgttatcagcgcgctattgaagagaaagcaaccctacccgacctccttatcaccgacggtggaaaagggcaaatgggcgccgtgaaagaagttctggacgaactaaatctgaatatccccattgccggacttgccaaggatggcaaacaccgcacatccgaactgctttatggctttccaccgcagactatcggtttaaaacaaaatactcccctgttccgattattgacgcaaatacaggatgaagtacatcgttttgccattactttccaccgtgaaaaacgcagtaagcgacagattgcttccgagttggatgagataaaaggcattggagaaaagactaaagcagctctgctaaaagagtttaaaagcgtaaagcgcataaaagaagcatccctggaggcgcttacgaaggttacaggagcagctaaagcaaaagttattgaagaatattttaggagttaacccctccttctacatattcatacatacaaattgcaggcaatcacgaatttatttgtaactttgcatccggaaaagtttttaaaagattaggataaaaagaacatgagagtagtcatacaacgtgtcggacacgcttctgttacaatcaacggaacatgcaagtccgctatagggaaagggcttctgatattggtaggcattgaggaaacagacggacaagaagacattgactggctttgcaaaaaaattgtcaacctgcgtgtctttgacgacgagaatggagtaatgaacaaatcaatcctcgacattaacggtgaaatactggtaatcagtcagttcaccttgcatgcttctacaaagaagggtaaccgtccttcatatatacgtgcagcaaagcccgatatttctgttccgctgtatgaacagttttgcaaagatttgagttttctattaggcaaagaaataggtaccggagaatttggtgccgacatgaaggtagaattattgaacgatggccctgtgaccatctgtatggatacaaaaaacaaggaatgatgacattagaagaagctcagcatcaggtagattgctggatcaaaaagtatggtgtacgctatttcagcgaactcaccaatatggctgtccttactgaagaggtaggtgaactggcaagagttatgtcccgcaaatacggtgaccaatccttcaaagaaggagaaaaagataatatcgaagacgaaatagcggatgtcctctgggtactactctgcattgccaatcagacaggtgtaaacgtcactgaagcgtttgcccgcaatctggagaagaaaacccaacgggataacacccgccatatcaataatcctaaattgcaagaccatggagaagaatgaacctaaccagaacaagtatgatgccgcattggcaaagtacaacacacagctggacgatacggaagtagctgcccaggtagcgaaaatcattgcagaaaaagtgcccggaaaccatacggaggaggtcaagaaattcttgttccactgcattgatctcactacactgaacactacggacagcgatgaaagcgtgatgaaattcactcaaaaagtaaatcagttcgacgaagaattccctgatttggagaatgtcgctgctatctgtgtttaccctaacttcgcagaaatcgtaaagagtaccctggaagtagaggatgtaaaaatagcctgtgtttcggcaggttttccttcctcacaaaccttcacagaagtaaaagtagcagaaactgccatggcactgatggaaggtgcagacgaaatagatatcgtaatttcagtaggcaaattcctgagtggagactacgaaaacatgtgcgaagagatacaggaactgaaagatgtctgcaaggaacatcacatgaaagtgattctggaaacaggcgctctgaagagtgcttccaatatcatgaaagcctctatcctatgcatgtattcgggcgcagatttcataaagacatctaccgggaaacaacaacccgctgcaaccccggaagctgcttatgtaatgtgccgggctattaaagaatattacgataaaaccggcaataaagtaggtttcaaacctgccggaggcattaatactgtaaatgacgctgtcatctactacactatcgtcaaagaggtgcttggcgaagaatggctcaacaaccaatggttccgcttgggcaccagccgcctggccaatcttctgctttcggacatcaaaggcatggaaatgaagttcttctaagagcttccataccataataaaaactaaagaagcttgataggaaaagcgaaacttttcctatctttgcgacaacataagccaatagagttttggctaaagcattgtattagagaacgtttcatttattacctttttcctggaattcggcaaaattcaatctatgaaaggtaatgagcaaacgggtctcacgcactttcgtgtatatactcttgttatatatcgaataggcgtgagactgttgcttgtatttcatagaaggtttgccgaagcctcaggaatggtacaagtaacagttctcacgctttttgataacaaacgtaaagataagagtatggaaacaaattcggcacccctcttccatcggaatccacaggcacctcctgtgaaccgaaatcgtgaacaagcccttctcatcggactgatgagcggagagcaagagtttttttacacaaacagtctgactacgggaagaagtcgtgaggagctatcccgacatctttctttagccgtaagactaaaagacaaacctaacattcaactggtatttaactttctcaaagaggaaggagaacgcagcgcatacaacatcatgatttctctttttctatcggagcataacgaaaaaaaacgcgaagcactcatcaaagaacgctttcttggcatcgatcgcttcgtacaatattgcagaaatctgagtgacttcctggtgtacatcaaagagaataacacaatcgaaataaccaatgaagacctccaacgaggtatattagcatgggatttagggcatctggtaagtctcgcccgcgtatcttatgactatggacttttagctgaagaagaagcctggaagtacatagaatttgccggtaagaaatgccgtgaaacattcgcttgctggaaagagataggcaaaagcttcctgttaggacaaatcatgagctatcccggcgaagagaacttccaggaagcaatccgctatttcctgctttcgacggagagtcccgaaagcccttgggtaaaatgtaagtttggttgattatttatcgcggtccactacataatccaaataagcaacaaggccggcttttacatctgaatcaggcaaggatgccaataatgaaagtgctttttccttataggcaaacatggtctgcactgcatattcaatgccaccttgttgcttggcaaattcgattaatcgggcgatttcatcggccgaggcagtaccatttttcactttgacggcaatctcttccgcactttcatccttggtagagttcaaggcataaagaacgggaagggtcagtttgccttccaacatatcgtttcctgttggcttacctatctccttactatcataatagtcgaatatatcatccttaatctggaagcaaagaccgatatattcaccgaactggcgcgcaaattccgcctgttcatcggtcactcctaccgagagagcacccgatttggtacaagctgcaaagagcacagccgtcttcttacggatcacatcaaaatagatttcttcggagaattggagattacttacattagaaagttgaagaagttctccctcggacaaattctgtcccaaacgggaaaccacatcaataatagcgtaattatgcgtcttgcctacctgcacaagtgcagttgccaaaaggtagtcacccaccagtaccgctaccttattattataaatggcattcaccgacagctgtccgcgacgctcggtgctttcatccaccacatcatcgtgtaccagactggccgtatgtaataattcaagggaaaccgccgcatgaagtgattcgggacaaatccgtccatatagctttgccacaagcagcagcaaaatcggacgcatcatcttcccattcttttgtcgaatgtgtgagattacttcattcagcaaaaagttggaactggtaagcgaattgtcaaacagctttttgaaatcgtccagttctgccgctatcggagtttttatgagtgatgagttgtccatgcatcgctattttcccacaaaaatagtaataaaacacttaatacggtatttttttgtacttttaccatgaaaaaaaggataaatatatgaattctgacgataaactgtttcttctcgatgcctatgcattgatatatcgcgcctattacgcgttcatcaagagccctcggattaactccaaagggttcaatacttccgccattctgggctttgtaaataccctggaagaagtactcaaaaaagagaaccctactcacatcggagtcgctttcgatcccgccggaccgaccttccgtcatgaggcctacgaacaatataaggcacaacgtgaggaaactccggaagctatccgcctttccgtacctattataaaggatattatacgtgcataccgcattcccatcctggaagtagcgggatacgaagctgacgacgtcatcggcacgcttgccactgaggcagggcaacaaggcatcaccacttacatgatgactcccgataaggactatggccaattagtatctgaaaatgtattcatgtaccgtcccaaacataccggcgggtttgaggttatgggaatagaacaggtaaaagctaaattcgacattcagtccacccagcaggttattgacatgctgggattaatgggggatgcttccgataatattcccggatgtcccggcgtcggagagaaaaccgcacaaaagctgatcagtgaattcggcagtatcgaaaatcttctggagcacaccgataaactaaaaggtgcattgaagacgaaagtcgaaaataaccgggaaatgattatcttctccaaattccttgcaacaatcaaaatcgatgttcccatcaaacttgacatgaaagctctcgttcgtgaagaaccgaatgaagaagaactcaggaaaattttcgaagaattggaattccgtacactcattgaccgtgtactcaagaagagtagttccccctccccttcttccgttgctcccgatcttttttcaccaggcccgctttttactcaaaataacggtccggttcaaggcaatttgtttgaagaatttgcgtccaacgggccggaagattccaaaaattcaaatctcgcgcgtttagaaaccatcaatgccgactatcaactcattgatacagaagagaaaaggagcaaaattattaaaaagttgcttacaacgaaaattctctcaatagatacagaaaccacttcagccgaaccaatggaagcagaattggtagggatgagcttcagcgataccgaaaatcaggcttattatgttccggttccggcagaacgggaagaagcgttaaaaatagtaaatgagttccggccgctctacgaaaatgaaacttcaatgaaagtcggacaaaatatcaagtacgatattcttgttcttcaaaattacgggatggaagtgaaaggtgaacttttcgacaccatgatcgcacattacgttttgcaacccgaacttcgtcataacatggattatctggcagaaatttatctgcattatcaaaccatccacattgatgaacttatcggcccgagaggaaagaatcaaaagaacatgcgggaccttccaccagaagaagtttacaaatatgcatgcgaagatgcagacattactttaaagctaaagaatgtacttgaagaagaattgaagaaacagggggttgaacatctcttctatgaaatagaaatgccgctcgtacgcgtactcgccaatctggaaagtaacggggtgcgcattgataccgaagcgctgaaacaaacctccgaacatttcactgtccgcctgcaagagatagaaaaagaaatctatgaactggcagaggaaacgttcaatatagcttcacccaagcaggtgggcgaaatcctgttcgacaaactgaagattacggataaggcgaagaaaaccaagacaggacaatacgtcacctcggaagaggtgctggaaagcctgcgcaataaacatgagattatcggaaagatcctcgaataccgtggattgaagaaattattaggaacatatatcgatgctctccccctgctgatcaatccacgcacagggcgtattcatacttcttttaaccaggcagtcacagctaccggacgactcagttccagcaacccgaacctgcaaaacattcccatccgcgacgaagacggtaaggaaatccgtaaagccttcattccggacgatggttgcgagttcttctccgccgactattcacaaatagaattgcgcattatggcgcatctaagcgaagataagaatatgattgacgccttcctcagtggttatgatattcatgccgccactgccgctaaaatatataaggtagatataaaggacgtcacttccgacatgcgtcgcaaagctaagacagccaatttcggtatcatctacggtatttctatctttggattggcagaacgtatgaatgtggaccgtaaagaagccaaagaattgatcgacggatatttcgaaacctacccgcaagttcgtgaatatatggataaaagtattcagatagcacgcgaacaaggatatgtggaaacgatcttccaccgcaaacgtttcctgcccgatatcaactcccgcaacgcaaccgtacgcggatatgcagagcgcaatgccatcaatgcgcctatccagggaagtgcagctgatatcattaaagttgccatggcacgcatctacaaacgctttcaaagtaacaatctgaaagcaaagatgattttacaggtccatgacgaactaaatttcagcgttccagaggctgaaaaagagtttgtgcaacaaattgtaattgaagaaatggaacgcgcatatcgcatgcacgtacccctgagagccgattgtgggtggggaaagaactggttggaagcccattaattccacctataactttatttaacttacaatcagaaagcaactgaagtaatctgttcgaaatacagtttgctcaccataatatccggcaacatcactgccggatatttttttgtcatcaatcttggcaaaaagaaagcataagaaagcaatcacatctgacattttgactatatttaattcatatataatatttatgtcaattaaatacgtacctttgcagcgaattcaatgacatattgatagaatatagcaagagataacttaaaaacatatagaaccatgagaacaaaagtatttttaaaaacagttgctttatcagcagttattctttttagtgccatggcagcttctgcagctaacaaaaacaaccttatttacaattcggaagagaaagacggaatgatggttgggcaaaccgtttacaagatggacagtggaactttagcaaactacatgaagtacagctacaagtatgatgaccaaaaacgtatgacggaaagcgaaactatgaagtggaacagccaaaagaatacttgggaaaacgacctccgcatttgctatgcctatcagggaaaaagtatcactaccacttattataaatggaacagcaaacaaaaagcatacgtccttgtacctgacatgacggttacaatggacaatccaagcctgtaaatcttacagatactctcttaaaattctaacaaattgaacaaaccgaaacctttataagttttgtacaccaatgaaagccggaatacgcgatgtattccggcttttttcataactttgcctttcaaaaaaacatctatttatgatacctgccaacctcacccactacattgaaacagaaatcattccacgttatgagaagttcgacaaggctcataacctctcgcacgtacaggccgttatagaagagagcctttcacttgccaaacagtatgatgtaaatgaaagtatggcatatactattgccgcttaccacgacaccgggctttgtcatgatcgtgctacacatcacctaatttcaggtgagattctgaagcaagatgtcactctccgccaatggtttaatgaaatagaaatagaaacaatgaaagaagcggtagaagatcaccgggcatctacggaccatgaacctcggagtatttacggaaaaatagtcgcagaagcagatcgcgtgattgaccccactatcactctacgccgcacggtacaatacggactgaaacaacaaccagaagcagataaagaatggcactatcaacgttttcatcagcatttaatggacaaatatgcgcctggaggatatctgaaactctggcttccagactccaagaatacagaacgcctgaaagaactacaaactattatcctaaacgaagagttgctcaaaaaaacattcaacaaattattttcagaagaaaaaaacaattaaacctccaataatgaaagcactttattataatgccatacttggcatattactatcctttccctcatttttgaaagcgcaaatcagaccttttgaaccacttaatccagacaggatattctttaagggaaaggttgtggatacagataacaacgctctccccaaggtaagtatctacatacccggaagtatgcgtggaacaatttcagactcaaacggaaatttctacatagatgccaaacctaaagaaaccctatactttacctatgcaggaaaagaagatgcatacagacaattacaggagaaagatactaccggcttcatagtacaaatgcaaccacgtattcaaagattgaaaaatgtacatgtaagaaaagataagaaaatcattgaaaaaggtgaaccttatgaagacgaccgtgatggtacgtttgaacttgtatatgcagatgcctatttcccagatggtgaagaagctttatacaaattcttcaaagaaaaccaacaatatcctcaggaagcttttaagcaaggagaagaaggagaagtactaatacagttcactattgatgaaaagggtaaagctaccgatcccaaaatcctccggagtgtatcaccaatgctggatcaagaggcaaaacgcctcgttctttccatgccagcttggaagcctgccagacaaagaggtttgtgtgtagaaagtacctttatattgcctgtctatttccatatagatatatggaaacaatatacagaataacgctacatagcattgaaagacataggacaacgttaattaaaacctaatcttttatcagataaacagaagaatacctatctttgcagcaagaaaataagtaataacaaaatagataatggctttacaatgtggtattgttggtttgccgaacgtaggtaaatcaacacttttcaactgtctgtcaaacgcaaaagcgcaggcagcaaactttcctttctgtacaatagaaccgaatgtaggtgtaatcaccgtacccgatgagcgcttgaataagctcgccgacctggtacatccgcaacgaattgtccccactacagtggaaatcgtggatatcgccggattggtaaaaggtgccagcaaaggtgaaggattaggtaataaatttctcgcaaatatccgagaaacagacgctatcatccatgtgctgcgttgcttcgacgacgagaacgtgacacatgtagacggaagtgtaaaccccgtacgtgacaaggaaatcatcgattatgagcttcaactgaaagaccttgaaaccatcgagtcacgcatacagaaagtacaaaagcaagcgcagaccggtggagacaagaccgctaaactggcctatgacgtactggtaaagtacaaagaagcactggagcaaggcaaatcagcacgcaccgtagtctttgaaactaaagatgagataaaacttgcccgcgaactcttcctgctgacttccaaacctgtgatgtacgtatgcaacgtagatgaagcaagtgctgtaaaaggtaataaatacgtagatatggtacgggaatccgtcaaggatgagaatgccgaaatattggtggtagccgccaaaacagaagcggatattgccgaattggaaacttatgaggatcgccagatgttcctcgaagaagtaggactagaagagtcaggtgtaagccgcctcatcaagtcagcctacagcctgctgaacctgcaaacttacttcactgccggtgtacaagaagtacgtgcctggacgtatgaaaaaggctggaaagctccgcaatgcgccggcgttatccatacagactttgagaaaggattcattcgcgctgaagttatcaagtacgaagactttctgcaatatggcagcgaagctgctgtaaaagaagccggaaagctgggcgtggaaggaaaagaatacatagtgcaggatggcgatatcatgcacttccggtttaacgtataatcaattacaggttatgaaatatctcatagccggtacaggcggcgtaggaggcagtatcgccgcttttctttctcttgccgggaaagatgtgacttgtatagcccgcggcgaacacttgactgccatacgcgaacatggattgcgtctgcactctgatctgaaaggtgaacatacactaccggcaaaagcatatactgccgaagaatataacggcagtgccgatgtcattttcgtatgtgtcaaaggctattcggttgattctatcactgacctgatcaagcgtgtatcgcataaagacactattgtcatccctattctcaatgtatatgggacaggtccgcgcattcagcgccttgtacccggagtaacggtactggacggctgtatttacattgtcggtttcgtatcaggtaaaggcgaaattacccagatgggaaagatattccgcttggtttacggagcacataaagacacggttgttccccgtggaacgttggaggctgttcggcaggatttagaagaaagtggcatcaaagcagagatatctccggacatcaatcgggatacctttgtgaagtggtctttcatctctgccatggctgttaccggagcttattacgatgtgcctatgggcgaagtacaaaagcccggcaaggttcgggatacattcattggtctttcagaagaaagtgccgctttgggccggaaattgggtattgagttcaaagaagacattgtggagtataacctcaaagtaatcgacaaacttgccccggaaagtaccgcctccatgcagaaggatatagccaaaggacatgaaagcgaagtacaaggactgctattcgatatgattactgctgctgaggaacaaggaatcgacattccgacgtatcggatggtggcggagaagttcagaagttgaaacaataaacttaataaaaaaatatattatgcttccattactcagcatcaattgggacccaaaccccgaactattcaatctgttcggtcatattcccgtacgctattacggtctgttatgggtcatcggtatcgcctgttcctatttcgtagtccgctaccagtacagagacaaaaaaatcggcgatgacaagtttgaaccgctgttcttttactgctttttcggcatcctcatcggagcgcgcctgggacattgcctgttctatcagccagaatactatcttcatcatttctgggagatgatattgcctatacagttcctgcccgatggaggttggaaatggaccggctatgcaggtctcgccagtcatggaggcacgctggggctgatgatagccctatggctgtactgccgcaagatgaaaatgcactatatggacgtattggacatgattgccgtagcaactcctatctgcgcctgcttcatccgccttgccaatctgatgaattctgaaattatcggcaaagcgactgatgtgccttgggcatttgtattcgaacgggtagatatgcttccccggcatccggcacagctttacgaagcaatcgcctacttcattttcttcctgctgatgattttcctgtataagaattacggcaagaagctgcatcgtggtttcttcttcggactctgtctgacagaaatttttgtattccgcttcttcgtagaattcctgaaagagaatcaggtagatttcgagaatagcatgtcactgaatatgggacaatggctcagtgttccgtttgtaatcataggagtgtatttcatgttcttctacggaaagaagaaaacacagaaataaaagaaaaatgaggatgtatcagacacgattctgatgcatcctcatttacactatttacgttgccacttactcttcgaggcatgctcccgcttcagaatatcacttaagggaacttcaaatatcttggcctcaacccatgccacaaaatcgaacttacgtaaaatctgagtctcatatttatccgcatacaaagtatgaacctcttccgccatgctttcccatattctcgctcgctttttccgattcgtatcaacgaaagagtaattcagaaatttaagcagaaatgattctaccttcagattataccctttatttttggacatttcccgcttaatagagcgaacttcggactggatatagtctacatcccccaactcataatgaatcatcacattcacgatcctaatggtgcgaaacagtggcagagaatataggtgtcctctcccgatagtcgtactcaaccgtttccgggctttcctgtactccccgttccccaaatggatcaaggcgacatacaaggacatttccgcctgttgctgttcttttaataaggccattttatcaatcagtgaagcctgatgttcagcaatccacaaacccgcctgttcaaactctcctctatcgatataggaaaatagcctgtatatgaatatcacataagttacattcaactgaaaacttgatgacggtgaagacagtttctccaacttccctataaagtaatccataccctcataattatgcataatgcgaagactctctaacattccttctacagtcatcagataatataccggaggattattccacagatgcgtattctcctcgaacagcttgttcagttccacaaacgaattgaaggctgctctgtaatctcccaccatcataaagtaattggcctgaaaaagctggtggtttttctttatctcaaagttttcgacgcctgcacttgccacgatactgatctcactcgtcaccagatcatccaacttctgtgtttcctccaatgatcgtgaagctcccctattaagcattctcaacttcaataactcatgcaatgaagactgttcattcagctgcctgatattctttagggtattattcatcttatattgcttgttcaggagcttcttttcatccacctcttcgaaatccagagtcaagagataattcagttccagcctttgcgccacaagcagtgcaaaatgattctcataatagacagctttttccttcacttttttcagtacctggaagcactcctgatacattgatttctcatacaacaccctggcatgcagcagctcattgaataacagataatagctatcctgctctgttctcagttttgtcaatatctctatcagcagatcaaacaggtaaataaccaccgtattgaaagaagaagtaggttttgctttcagaaagcattgtttcaactcctcaggatcgcttatcttcttatcatcaatcaacctgaaaagaaaaatataatctttctccggcttattggatatatacatggagaactctttcttctcttgtttcgtgagactattaatcaattgaatgagtgattcggacttcaacatagcattagcagatttataaaaacacatcttagcgaaagcaaggtagagaaaaaaacgaaagaaagcaatcttttcatggaataatatagcttttacctatattacaaatattaaaataaagcatctaatacaaatacaaacagatgtatatcaattatttaacacatcaattaacagaattatataattttaccagtattatatttgtgctctttttgtttgcttatgtattatgtatcgcatacttttggcatagaaaaagaaagcacagttcccgattatttaatcttaaactaataaaatagccatgagcaaaaatattattgtaataggtagttgtaatacagatatggtcatcaaagctgaccgtcttcccgtaccgggagaaacaatcataggtggtagtttcatgatgaatcccggaggcaaaggagccaaccaagctgtagctgctgccagactaaaggggaatgtacacttcattgccaaaaccggaaacgacctgttcggcaaacgttccatagaacaatatgaagacgaaggaatccatgttgaaaatatctattcagatctcacacttccttcaggtgtagcgctaattatggtggatatgaatggagaaaacagcatcgccatcgcttccggagccaatggttcattgagtcccgaagacatccggaaggcacagcctaccattgaaaaaggtgacatcttgttgatgcaactggaaattcccatagaaacagtggaatatgccgctcagatagccagcgaacagggtatcaaagtaatcctgaatccggcacccgcccgggcactctccaacaaattattacagaacctgtatatgatcattcccaatgaaacggaagctgaaatactctcgggaatcaaagtgaccgattgggaaagcgcccgtagagccgcggatattatcagtgccaaaggagtggatatcgtggttatcactcttggttccaaaggagcactgattaaagagaaagatacatttcatgaagtgcccgtacccaaagttaaagccgtagatactacagcagcgggagacactttctgcggtgcattgtgcgtcgctttatccgaagatgtagatgtgttgaatgcagttaaattcgcaaataaatgtgcatccatcactgtgacccgaatgggagcccagccctccctaccctatcgtaaagaaattgatgttttataaatagtaatttaaaaatctaataccatgtttatagtcgacagttattcattagcagttattttctgcgttgtcacgatgctttgttggggttcgtggggtaatacacagaaacttgccgggaaaacctggcgttacgaattattctactgggattacgtaatcggtatccttgccttctctctcctcttaggtttcaccctgggcagtacgggagatgccggacgcggttttgttgaagatttgaagcagatcagtatggagaactatgcaagcgcttttgcaggaggcgtcatattcaatctgtccaacatcctcttatcagcttccgtttctatggcagggcttacggtagcattccccttaggagtcggcatagccttggtattaggtgttttcgtcaattatttcggtgagcctaaaggtgatgcagtaattctgttcagtggtgtggcactcgttgtattagccataatctttaatgccatagctgccggaaagatgaatcagaaaggaagcagcatcaataagaaagggattatcattgccattatagccggtgtactgatgtctttcttctatcggtttgttgctgccgccatggacttgaacaattttgagtcacctacccccacaatggctactccatattcagcattctttatattcgcaataggtatcttcataagcaatttcattatcaataccatcgtgatgaaaaagccgtttgtaggtactcccgtgagctataaggagtatttccaaggcaagttcagcacacacatggtcggagtgctgggaggagctatttggggattgggtacggctctcagttatattgcagcaggaaaagccggtgcagctatttcttacgcactaggacaaggagcacccatgattgcagccttgtggggcatatttatctggaaagaattcaaaggctcttcccgtgcggtaaatattcttctggcctgcatgttcgttctgtttatatccggtttaggagcaattattatctccggagctaattaaaaaagaactcccgcccctctcttttatgctttctttttctattatctcaaagataagaggggaggagaaataaaagctttaaaaccaaaaatcttgtatcaacaaaaaacgtaaaattatgagagttatcaacatcttgttatactgcttcctacttaccatactagcatgcagtaatactaatgagcctgaacgacctcctgccgtccatcctcaaaaactaatagtggaaggaaagccattcttaatgttaggagcccaactgcgcacagactatttcctgcaattagataaaaaaactctaaatgaactggaaccgtattttgaactggcagctaatatgaacatattagtcatacaagttcctgttggttggagggatatagaagtgcaaaaagacatctataacacagaactggtagaaaagtatatcgaactgtgcgacaaataccagatgaaactggaaatcttatggtttggtagttatatgtgcggatattctgtagaggggtatataccggagtatatagtaaatgatcctgtgacttatcccgatctcaaaccagatgctgcttttgacggatggttaggaaagcactattacttgaaacctaatacacctgctttggtagagcgtgaatcaaaggcattgggaaaaatgatggaagccatctacaactatgacaatatacataaccaaaaacacacggtcataggtattcaaattgaaaatgaaccggatatgctggcaacccggcataacgaagcacacgggtatacaccggagcaaatatggcccgacctaataatcatgctggacaagttaggacaagtagtcaaaagttctccatacgattgctacacacgggtaaatcagacaacaacctatcctgaatatctaactaaaagtacagctattgcaattactgaaggtatcgattatgtaggagtagatccttacgaaaatagcatccaagctatagacggaaaactcagacaattgagaaagattgaaggtaattatgcacacattgcagagaatggaggtgaatatgcaaataatgaccttctcgctttaaaagcattcagtctgggttgtggatatgagatattcgaagtcatcactacccctcacccattcctcacagaatggacactgcgagggatctacaatcccgactttactcctaaggtacatacacagcaaatagtggatgcctttaaaatctttaaagaagcatgggtagacctcgctaatgcaaattatttggatatagcgggattcaacttaaagagtaatgacggaatggaacaaacctccgagagtaaaaacactactcacgcaggtatcaaatggagtaccaaatctcgtggagtggcctttgcgatagagtataatgaccacctgactgttgcttccaccaaaagtgatgagatggtattcaggaacatacaaataaaaagcatagaaaaagggcattatgatattgacggaaactgggtatctgaagagaaagcagaagctcccgataaccggcttgccatggagccttgtatagtctatagaataaagttttaacctactaaagaaaatacaatgaaaagaaatttatttatcacaggaatagcatgcacaatactattcctgacaggatgcaaagatgacgattctcccaacttgagaatagaagcagaatctaatattcaagttgaatgtaagaaagatacaatcaacatacctgtattctgcaatatgccgtccaaagcaaccattacctacgactcaccggacaaatccgggtggatctttcttttaccttcggtgctaaacggagatgggatattcactttgtggattgacgaatacagtaatgtactggaagatcgtactgccactttccttgtaactgccggtgacgaaacaaaagaaattcatattacccaactagctaagccctcactggcaacagaacctgcaaacatcgcccctattagtaataatgcaggagactatcaggtaaaagtattatgtaaaggaacctggcaagcaacagtcaatcgagaagcagcctcctggtgtactttaaaaaatgatacaggagaaggcgtaggaaatattaccattcacttgtcagaagtatctgataatgaaatgcgaatggctactattacggtcagttcaggtaacctgtcttcagacataaccatacaacaaggattcggaattgaaattaatggtctgatctgggcgaaaagcgatgttgctcaacctggatattttgcagcatctcccgacaccaaaggattattgtatcaatatgactcagctatcggctatcccaacaccagtccgaaagaagacaataataaacctaatggtttcagaacgggagcatacgacgacggaattccaagctggagagctgaaaagaatccttgtccggaaggctggagaattcccgaatatgaagaaatacaaagattgactggaaactcagggaacccttatttcatttgggcagaaccaacaaacagtcatttcctcgtacccggagccattgtaggtatcccgagagaagaagctgctcttgcaaacaaagacaatatgagaggtgctattttctggccgcagtctggtttccgtgacagagattccggtgcacaaatcatctggtggccggccaatatcacaagtatcacacgccccggacagacctgggaccgatacatttgttggataggcgcagacaacagtataagcaacaacgaatttgccggaaatgcagcagcttacccagtacgctgcgtagcaaataaaaaataaaacgaaaacatgagaaaattctaatttatacatattaaatcgataaattatgaaagactattcaaaacattatttcagacttttgcaaggaatggctttgtcggtatctgattacatcagaaatcagaagccaatcgtaatcatagttttcttgctagtgcattctatcagtatatatgcacaagacaatacaatctccggacttgtaaaagacaacgaaggagaaccattgccaggagtttctgttgccgtaaaagcaggagagtcaatatccggagtagtgacagatataaatggtaaatatcagctaaaagcttctcctgatgctaccatagaatttagctttatcggcttcaaatctatacagcaacaggttggcaatagaaaagtaataaatgtaaccttggaaatagacaaccaaatacttgaagaagtagtcgttgtaggttacggtactcaaaaaaaggtaaatcttacaggttccgtaagtgtaatagactcaaaagctttcgaatccgtgcctgtagccaacgctgtacaagcactgcaagggcaggttcccggcctgaatatttacagtaacaaaggtggagggcttaatcaaaaacaaagtatcaatgtacgtggtataggtaccattggtgaaggttccacgggtgatgccctcattctgatagatggtatggaagctgatattttctccgtaaatccacaggatatagagtctatttcagtattgaaagatgccgcagcctcttctatatacggatcaagagcacctttcggagttgtattggtaaccaccaaaaaaggaaaagctggtaaagcccaaataaactataataacagtttccgcctaagcagccccattaatatgccttcatccttagattcttacacgtatgctttatttttcaatgatgctggctacaattctggctggggatcttataactgggtgtcccaaacacgtttgcaacgtatcaaagattacatggatggaaaaatctcttatactactatccctctgaatggaagcaacacctgggccgacggttaccaagaaggaaatgacaatatagactactacaacttgttcttcaagaagaatgtttttgcacatgaacataatttcagtgtaaacggtggtacggacaagatacaatattacttgtcagccaattatctcgatcaggatggaactctccgcatgggcgaggattactctaagcgatatacgatgtcagccaagattagcgcccaattatccagagctgtatcattatcttcaaacacccgttttgtacgtaatgattttgtacaacctacccacatgaatgattccttcttttctgatatcggccgtcaatgctggcctgtgaaacctctgtacgacccgaacggtaacttatttgacgatcatgtacaacaaatgaaaaatggcggtcgtaaaaccgaacgcaacacttggctgtaccagcaattcaatcttaccatagagcccattaaaggatggcgtctgattggtgacctaagttatcggtataatactcaatatgcacatgaggacttacttactatcagtcaaattggtgtagatggagtaaccaaagtaagaagttgggatgagaattcttctgtatctgaaagtagcttcgccagtgattacttcaatgtaaatctctataccgattttgagaagacatttgctaaatctcatcatctgaaagcactggccggatttcaggctgaagctaacaactaccgtaatatatgggcacagaagattggtatcacttatcctggtaaaccaaccataaacacctctacaggtatagacaaagatggaaaagttattgctcccaatgtatccggaggacacaatcgctggagcactgccggattcttcggcagagtgaactatgattttcaggaaaaatacttagtcgaagccaatcttcgttacgatggttcttcacgttttcgcagtgatgaccgttggggattctttccctctgcatcattgggttggaacattgcaagagaggaattcttccaaccagctacgcgtataatgaataccttgaaactaagagcctcttatggtagcttaggtaatcaaaacactacagcactttaccccacttatactgttatgggaacaggtacaagcgacaagtggctcatgaatggtgtaaaacccaacatagcttgggcacctgcattggtcagctacgatcttacatgggaaaagatacgtacttggaatgtcggtatagatattggactgtttaacaatcgtttgacaggctcttttgactactttatccgaaacaccaacgatatggtaggtccgtcagaaaagttacctgctacattaggtattgccgtaccaccctccaacaataccgatctgcgaacagccggttgggaactggaattaatgtggaaagaccgtctgcaaaacgggttaaattacagcctgcgcttcacactagcagacagtcgtactaaaattacccgttattcaaatccatcaggcctgatagacagtttctatgaaggtaaatattgcggtgaaatctggggatatgaaaccatcggaatagccagaaccgatgatgagatggccgagcatgtaggcagtttagtaaatggtggacaaagcgcattgggtcaagattggcaagccggcgacatcatgtacagtgatctcaatgaagatggtaaaatagatgccggtgcacgtaccttagacaaccatggcgacttgaaacgcattggtaattctacaccacgctataatgtaggaattgatctgtcagctgactggaagggattcgacttccgtatgttctggcaaggaacgctgaaacgggactattttcagggaagttactatttttggggagcaaatggctcacaaggatattggttctctactgctctcaaaggccatgaagattatttccgtaatgacgaaagcagcccgttgggagtcaatctggattcctattatcccagaccattactcaatacaaacaagaaccagcaatgccagaccaaatacttacagaatgctgcatatatgcgcctgaaaaacctacaaatcggttatacgttaccgcgtaagatagtacaaaaaatgggagtacagaacctgcgtttcttcgcttccggtgagaatttgttaacgattaccgatctggtcaagtttttcgatcccgaaacaatagaaagtggtagttttgcacatggttatgcttacccactctccagaacctatgctttcgggctgaacattacgttctaatcggtaaaccaaatgaaaatcttaatgctcaaattaaaaaaaacacttatgaaaaatcatctcatatatacgctatcaggaatgttattcctcctgacaagttgcgatgctttcctcaatcaggaaccgcttgaccaactcgcacccgacgagtacatgactacggagacgaatgtagcctcttacgccaatgaccaatatcaaatgttgcctacacatggtacttatggttacggtactttcgaatcagatcagcataccgacaatatggctgccatgcaacccagtactctctacgctcctggttattggagagtaggacaaagtgacggtacctggtatttcggaaatatttaccgttgtaactatttcctggaaaatgtgttacctgcctatgaagctaatactataaccggcaaccgggaaaacatccgtcactatattggtgaaatctactttttccgtgcttttgactactttgaacggctaaggactgtaggagatttccccatcattacaaaaacttatcccaatgaaagcgaaatactaacggaaatcagtaaaagatctcctcgtaatgaagttgcacgtttcattctgtccgacctcaatacagccattgaaatgctgaaggaacaatcaccagacggtactaaaaaccgtgtcacccgagattgcgccatcctactcaaatccagagtggcattgtatgaagcatcatggctgaaaaacttcaaaggaacagcttttgttcctggcggtccgggatgggctggagcaaataaagaatacaatgccggctatactttcccatccggaagtattgacaacgaaatcaatttcttctttgacgaagctattgcagcatctcagattattgccgacaaacacactctgactaccaatacaggttacttcgcacagaatccagaagacacagaaaatccttatttcagtatgttctgtagcacagacatggataaatatgacgaagtattattgtggaagcgctatgactgggcacaaggtgtggctaatgaagtatgcgaatatgcttgtacgggaaatcatggtgtgggaacaaccaaaagtatggtagatgcttttatcttgaaaaacggcgaaccaatatacgcttcacccatgtgggctgacgagaataattcctattggggagacaacaatatggaacatattaccaaaaatcgtgatacacgcgctgatatctttatcaagaaaccaggacaacgcaatctgcatactcctccacaaggcactgtagcagccggcagagaatatgaaaccaaacctgacatcacagctgccaccgttactgataaatacaataccggctacgccatacgtaaaggtttaaatccggatggcaaatatacagcaaatacgcaaagtaacgttggctccattgtattccgtgcagcagaggcctatctcaattatatagaagcctactacgaacgctacggtacacttaatgacgttgcagaagaatactggcgcaccatacgtcgtcgagccggcgtgaatgaagatttccaaaaaaccatccgcctaacggatatggccaaagaagctgaaactgactggggagcctattccgccggacaagttattgatgccacccgctacaacatccgccgtgaacgccgatgtgagctgatggccgaagggcttcgttcaatggatctgcaccgctggcgcgctatggatcagatgatcactaagccttaccatatactgggaatgaatctatggcaagagatgtacaattgggactggtataaagacggttccggaaactcaatattgaaagaaggagaaaatgtatcatcccgtaatttcagtacctatttagctccataccacatcactgccaataacatcgcctacaatggttatcgatggcacatggcgcactatcttgatcctattgccatagaacattttctggtgacttcacaaggaggagacctgaatagctcccccatctaccagaatcccggatggcctatgatcggaggaggtactcccgaatagtagccggacaaagttcataaaatagattcattaacagataaatggaaaatatgatgtataaaaaagcaatattattagcctatactttggcctgtttttctttccttgccatagcttgctcagacagtgaagttgacgaaacaggaaaggaaccgatactacctcagatagaagtaagtaaagttgcaacagaaaatggtaaaacttatcttgaggtggatggtaagcccttcccactcctcggggcacaaatacgccttgatgccctgctcaactgtgacaaaatgagtataaacgaggtagagaattatttcaaaaaagctcaagaactaggagtgaactgtgtgcagattcctatttcctggaatatgatagaagcaaaggaagagaagtatgatttcaatatcgtaaattcaatcttacaatttgcgaataaatatgatctgaaaatagaacttctctggttcagtactaacatggtaggtgattctttcacctacctaaccccccaatacgtccttcagaattatcataaacgattcggtaggaacgacgaaggcagcttttggaattattacggttaccaatatactatgattcttgatgacagttgggtgttggagagagaaacaaaagctatcacggcacttttcaatcatatacgatactgggattcgcaaaatggtgataaacatccggttatcactgcacaaatacacaatgaaccggatgcactgatgcgttggagaattgaacaaaaagatcttaaatatcgtgatggaaccccactttccaaagaaaaagcatggaacatgacaacgaatgccctcaacgccgttgggaatgccgtaaagaacagttcctataaagttgcaacccgagtgaacctaatatacggtgatggaataaatcctttcccggaagccaataatgcatgtcccaaagatgtttttgacttgcaaggtattgatttcatcggagtagacgcttataaagacaatatcaagcagctaaaagagcaagtatcatcttatgcttccataaacggcaactatgcattggtagctgaaaacaaaggcagctactccaatacaccaagccttatactgacggcattggcattaggaggaggatatgatatttacgacctggcaacaagtaacttctttatcaacaatacaagcgaaccggaccaaattgaccatggcatctatacgtgggatttacaagaaaaagatttcacaaaccccacgagaatgattattaaagggctgactgacgctaatgtagacgttgctacagtgaaaccagaaaactttgctgcattcaacatcagcgacaaccaccccatagcagtaaaacagcaacaaatacgcaccacaaacgtggaaataactttctcaaccaacaatgcctctttggcatttgcactcgataaaggcagttatttgcttgtttactctactggtgattcggaattccattttggcaatggtacatttgaaaaagtgatttacggaaagtataacgataaaggtacctttgttgaagaaggaaacacagttttaaataaccagacactctatgcgaaaggtggcgtgctctataaagtgacatattcttctcaacaacctttaattagcaatacgattgaaaatatcggaaataatttataatatcatgaaaagacgactcattaccggactgctcacagtcttggccatgacaggaaatgcacaatccttcaaagaatggaccgacccggaagtgaatgctgtaaatcgtgctcctatgcatgcgaactactttgcttatgaatcagcagatgccgctatgcagggtagaaaagaatgttcttctaatttcatgaccatgaatggtacttggaaattcttctgggtgagaaatgccgactctcgtcctacagacttttggagatacgatttcaacgataaaggttggaatgatctgcaaatacctgccgtatgggaattaaacggatatggtgatcctatctatgtcaatatcggttatgcatggcgtaaccaatatcagaacaatcctcctcaggtaccaacagaaaacaatcatgtaggttcttaccgccgggaatttataattcccgcttcctggcaaggtaaagatatcattgcacacttcggatctgtgacttccaatatctacctgtgggtaaatggaaagtatgtaggttatagtgaagatagtaaattggaagcagaattcgatctgacttcttatttaaaaccaggacaaaagaatctgattgcctttcaggtattccgttggtgcgatggtacctatttggaagaccaagactttttccgtttcagtggtgtaggtcgtgattgttatttatatgcccgcagtaagaaacgtattcaggatatccgcattacacctgatttggatgagaattacaagaatggctcgttgaatgtaagcctgagcgtaaaaggtagcggtaatgttgatttgaaattactggatgccacaggaaaacaagtagccatgtcaacaatcaaaggtagcggaaatgtcgtgatacatgtggagaatccgtataagtggtcagctgaaattccatatctctatacgttgcaggctacattgcaaggcagtaatgaagtaattcccataaaaacaggtttccgcaaaatagagcagaagaacgggcagattttagtaaacggacaacccatactcttcaaaggagtcaatcgtcatgagatggatccggatggtggctatgtggtatctcctgaacgaatgttacaggatattcagatcatgaagagatttaatataaatgccgtgcgcacctgccactatccagatgataacctttggtatgacttgtgcgataaatatggcatctacgtagtagccgaagcaaatatagaatcacatggcatgggctatgatgcaaaaacacttgccaaacgggatgattacaaagaagcacacatggaacgcaaccaacgtaatgtacagagaaacttcaatcaccccagtatcatcttctggtcattaggcaacgaagctggttttggcccaaattttgaagcagcttatcgttgggtaaagtccgaggacatcagtcgccctgttcagtatgaacaggcacatggcaatgattttacagacgtagactgtcctatgtacgctgattataaccaaatggaaaaatatgctcaacgtaatgatatccagaaaccattgattcaatgcgaatatgctcatgctatgggtaattctctaggaggctttaaagaatattgggatttaattcgtaaatatcctcatttgcaaggtggctttatttgggacttcgtagatcagtctgtccgttggaaaggcaaaaatggtgcgaccatctacgcttacggtggcgactttaaccgattcgatgcttcagataagaacttttgcgacaatggccttatcagtcccgaccgtatccccaacccacatatgtatgaagttggctatttctatcaaaacatctggaccacaccagccgatctgatacaaggtgaaataaacgtgtacaatgaatacttcttccgcgacctctccggttactacctggaatgggaagtgcttttcgatggagagcctgtacgtacaggtagggtaactgaattgaatgtggctccacaacagacagccaaactcaagctcaatataggcaagatctgctcagacaaagaatgtctactaaatataacttatcgtctgaagaatcaagaaaacatgcttcctgcgggatacaccgtagccaaggatcagcttatactgagcccttataaaactccttccatggaattgaaaaatgcaaagacaaccaacactgttactgttattccacaaatacaagacaacgattcacactatttaattgttaatggtggagctttctgtctggaatttaataaacacaccggttacttgaaccgctataatgtagcaggtatagaaatgatgaatcaagatactcaactggtgcccaacttctggcgtgccccaacagacaatgactttggagcaggtttacaacaaaagtttgccgtttggaggaatcctggtctgaaactgacttcattcaaatgggagactgtcaatgaacaggtaatattatatgctgaatatgaaatgcaacacgtttcagcaaagttgaatctcacttatattatcaataacgaaggtgctgttaaagtaacacagaaaatggtaaccaatccacaagcaaagatacctcccatgttccgtttcggtatgcaagtacaaatgcctaaagcatttgaaaccatagaatattatggccgtggcccgatagaaaactacagtgatcgtaatcattctacaaccattggattgtaccgtcagagtgttaacgaacagttctacccatacattcgcccgcaagaaaccggaaccaaaacagatattcgatggtggaagctactgaatgcagccggtcacggactacaaatcgtggcagatgctcccttctccgcttctgccttgcactacaccattaaatcattggacgatggcattgataaagcgcaacgccactctcccgaagtgaaacaatctgatctaaccaatctttgcattgataagatacaaatgggattaggttgtattaacagttggggggcatggccattacctcaataccagattccttatggagactatgaattctcattcatattaagccctgtatatcacagttatttcaattcaaccttacaataactcataaaaatacatcattatgatcaaaagcaaaatttatctcttaagtgcatttttaatagctttgtcaagctgcacttcttctaagaaacaacaggaagtagaaatcacttcaaatgtagacagaattatcctggagacagatattgggaatgatgtcgacgatgctctggcgttggatatgctctacaaatacttggatacagacaagattaatttattaggtattatgatcaataaggaaggtgtataccctgcagagttcgtcgatattatgaatacctggtatggctaccccaaaattcccattggtattatacacaatggcatagattgtgaaaatgacgctataaactatgcaaaggctgtatgtctcatgcaaaaagagaacggtgagcccacatttaaacgttcattgcaaaactatgatgaattatcagaagctcctgtaatgtatcgcaagatattggcacaacaaccagatagttctgtcacaatcatttccgtaggcttctctaccaacctcgctcgtttactggatactcctgctgataacatatcaccacttacaggcaaagaactggttgcccaaaaagtgaaactgctatgtaccatgggaggatgctttgacaactccaatcctcttgaatacaatgttgtgaaagatattcctgcagcacagaaagtttttgctgaatggccaacacgtttagttacttctccattcgaagtaggcattaaaatcaattatccggccagtagtattgagaaagattttcaatgggcaaccgcacatccgatggtggaggcttacaaaagttatcaaaaaatgccctacgaccgtccaacatgggatttaacatccgtattatatgcagttgaaggtccctcctacttcaagatttctgtacccggacatattgtcgtaacagatgaaggagccacacagtttacatctgatgacaaaggaaagcaatattatctcactgtagattcaattcaggcagataagattaaaaaacattttgtggaattactgtctagacaacctatccatttcaataataaagaagaataaaaacagatactttaaacaataaacaggaagagaaaaacttgtattggaagtttttctcttcctgttttaacgacctttctatccaagaatacctatattcttttcgtctgccatcactatctcacaaatcctcttcattatcaattacaccaattcacacggattatctgatatgattcatttttaatctgtgcaaatccgtgtagcctgtgatcccctactcttgctttatgtttttgtgacacatctatctatttttatgccatttcccctcaggaatacatttatgtcgtgaaatcatatatcatatctgacacataccggtaactttgcaaacagaaaaagatatcataggtaacaaaacaaataggtaagaaagattccaaaacaggagaacaaaaaacaggtagttcagacttaaaactactacctgttttctaagaaaagaaaaatgaatatacaaacatacataactatttaaactaagaatgatgaattcaaaacaaacgcttttcagtctattaatgtgtgtactggcaatagcaggttgcgacacgcaaaaacaagctatcgtgggcaacgaacttgccttaacacgagctaagcaaacattggattctttatacctgaactattccgtttccggtacatgcctgttacgtgaaaattacccttccaatatcggagagtatacagtaacctatctggcatctgaggaacaaaagaatatgcccaatctctattcttatttatggccctattccggaaccttctcagccgtaaatgcattattcgccacaacaggagataaagagtacaaatcggtactcgacaataaagtactggtaggtctggaagaatacttcgataaccggagaactcccgaagcctatgcttcatatatcaacagtgcaccgcaatccgatcgtttctacgatgacaatgtctggttaggcatcgatttcaccgatacatatatgctcactaaagaacccaaatatctacagaaagcacaactcatctggaagttcatcgaaagcggtaaggatgataacctgggaggtggtatctattggtgcgaacaaaggaaagaatccaagaacacctgttcaaacgctcccggctcagtcttcgcattaaagcttttcgaagctactaaagacagtgcttatttcgtaaaagggcaacgcctctatgaatggacgcaaacaaacctgcaagattctacagactatttatactttgataatatcaatctgaacggaaaagtcgacaaagccaaatttgcctacaacagtggacaaatgatgcagtcagccagcctgctataccagttcacgggccaagagaagtatctgactgatgcacaaaacatcgctaaaggatgccataactacttctttcaggactatacaccggaaaacggagaaccattcaaactattgaaaaaaggagatgtatggttcattgcagtcatgctgagaggttttatcgagctctatcaagcggataaaaacgaaacttatctggactctttcagcaaaagtctggattacgcctggggacatgcacgggatgagaaaggactgttcaacacagacttcagcggaaagacccaggataacagaagatggttacttacacaagctgccatggtagaaatgtatgcccgccttgcagccatcaaataataagaaaaaaaatactaatacctaaaaacatgaaaaagagaaatatcggtttatgcgctgtagcgttgttctgtatgcacaacaatgccaaagccatggaaccatccctgaaacaggacaacaccacagtggtgaatcatgctcagatagccgctgcctacaagacaaaccgtcctgccgtaaaaaacagactctacacgtctaaagccgtagaggccgaaatcctgcgggtaaaaaagttactgaccaattccaagctggcatggatgttcgaaaactgtttcccgaacacactggataccaccgtacattatcgtttgctggatggtaaacccgatacatttgtctataccggcgacatccatgccatgtggttacgtgattccggtgcacaagtctggccatacgtgcaactggcacataaagaccctgaactgaagaagatgttagaaggcgtaatccgtcgtcaattcatgtgcatcaatatcgatccttatgccaacggatacaacgatggccctactggtggcgactggatgtcagatatgacagacatgaaacccgaactgcacgaacgcaaatgggaaatagactccctctgctaccctctccgactggcttaccaatattggaaagagactggtgatgccagcgtcttcgacgaagcatggatagaggctatcaccaacatcctgaaaacgttcaaagaacagcaacgcaaagacggtgtaggtccttacaaatttcaacgcaagacagagcgtgctctcgatacgctgaacaataatggtctgggtgctccggtcaaccctgtcggactcatcgtttcctgtttccgtccttcggatgatgccaccacacttcagtttctggttccgtcgaatttctttgctgtatcttctttgagaaaagctgcggaaattctttcaactgtaaaccataacagctctttatcccaggaatgtacagctttggctgacgaagtagagttggctttgcagaagtatgccacttacaatcatccgaaatacggcactatttatgctttcgaagtggatggtttcggcaaccatatgctaatggatgatgccaatgtgcccagtctgctcgctatgccttatctgggtgatgtggatgtgaacgatcctatttatcagaatacccgccgcttcgtatggagcgaagataatccctattttttcaaagggaaagcgggagaaggtattggcggtcctcacatcggatatgatatggtatggcccatgagcatcatgatgaaagccttcaccagtcaggacgatcaagaaattaaagaatgtatcaatatgttgattaatacggatgcaggtacaggctttatgcacgaatctttccacaaagatgatccggcaaactttacccgcgcctggtttgcatggcagaatactctttttggagagctgatactgaaattggtaaatgaaggaaagcttgaattattaaatagcctttaaagaaaaaatataccatgaaaataccgaggattataaattatgtctatctgggtgctttctgcctttgcatgtcatgggcagagggcaacgctcagaatcgagacttcggaggattgaaccggtatgcaaaagaaaaccgggaactatcacaacccggtaagaaagaacaaagggttattttcatgggcaactctatcactgaagggtggagaaatacacatcctaacttctttaaagacaatggatatataggacgtggtgttagtggacaaagttcttatcagttcttattacgtttccgtgaagatgtcatcaaactttctcctatgctggttgtgattaatgctggaaccaatgatatagcagaaaatacaagtccttataatgaagaatacacgtttggaaatatcatatcaatggctgaattggcaaaagccaatagaataaaggttatcctgacctctaccttacctgctgcctcatttgggtggaatccttccatcaaagacggagcagataagatcgtttctctcaataacagaatcaaggaatatgccaaaaagaataaaataccctatgttgactattatcaagcaatggtgacaggcaacaacagagcattgaatccggcatacaccaaagatggagtacatccgaactccgaaggatatacgataatggaaagcctaatcaaaaaagctattgataaggctctataaatagtaacccataatttaccttaaacacaatacagtatgaaaaagttcctctttttaatcatactaatcataacctgtgaagtacaggctcaagaacaaggaaagattattatgtccaatcccttgaatctgagttatcggtttcaaacagacggtgtttgccgacgtgaagctgctgatcccgttattatcttatttaaagaccaatactatctattcgcatctcattcttccggatattggcactcttccaatctaagagactgggattatatcgaaaccaaaactctaaaagccgcagaggtatgggcacccgctgttttcgtgtacaaaggtgcaatatattatttgggaatgggagaaagccgaatttacaaaagtaccaatccagaagcagatgaatgggaagaagtgaaatatgaattgcgaggattgggggaccctgcttttttccaagacaatgacggtcgggtatatctatattatggatgctcagataatgaacctatcaggggatttgaagtagatcctgagaacagtttcagagccataagtcctgaagtagacctgataccccattcctctgatcgtttaggttgggaagttttcggtgagaaaaatgaacaatatgataagaaaggttggaatgaagctccttgtatcacccgtcaaggcgattattactatttgatgtatgcaactcctggtacagaatttactagctactgcacaggagtttacactgccagaaaccctctaggaccctatacctgtatgccgggtgctcctttcgccatcaaaccgggaggatttattaccggtgctggtcatggtcatccatttaaggaccgttatggaaataattggtatgtaggtaccatgattgtttctgctaaagaacactttgaacgccggattggcatattcccggcctattatcaggatggatatgcccacgcaataaccgactataccgattttcctttcattctgcctgaaaaaaaagtagacttcagccgatataatatttctgctgatatgaatctgctttcttacggaaaaaagatgaaagcatcttcctccttagaatcacatacagctgccatggcggccgatgaaaatattaaaacctggtggtcagctgcttccggtaaaataggagaatggctagaaatggatttaggaactccaatggaactatcagccatacaagtcagttttgccgatgaaagttttcaaacttatcgacgtgacaaagtgattcctatctatcagtacattatagaggcctctcttgatggtataaaatggaagacaatagtagatcgttctcaaaacactaaagatcagatttatgaattagtcctccttgacaaagttataaagacgcgctttgttcgcataaaaaataagaaagagtttgctgttggaaacttttctatagcagatatgcgcttgttcggtaaggctaaaggcaaaaccccacagattgttaccggattaaacataaacagagggaaagacagaagaagaattgcattctcatggacaaagcaacctgttgccgacggatatattatccgctggggtatctctcccgaacacattgataatgcggtcatggtacgtggcagtcaagctgaatttggtttcttcgattgtaatatttcatattacatcaccattgaagcttttaatgaatcaggaaaagggaaacagagtaatcctatcaaaatagattaagtactaataactaatacaataaaatatgaagattaaaaaaattacagttttatgtttattagctgccaattgtctcatggtatctgcccaaaagtggtttacacctgatgtagaaaaacaggtaaacatacttttgagccaaatgacagttgaagaaaagttagcctatataggtggtgtagactggatgtacactaaaaatattgaccgtctgggaattcatcgtatgaaaatgaccgatggacctcaaggattgggtactcatggtaaatcaacggcttatcccgctaccatcacgttggctgcaacttggaatgaaaacttagcttatgaatatggcaaagcattgggacgtgattgcagggcaagaaacgtgaacatcttattaggtcctgccgtaaatatttaccgttcagcactatgcggacgtaatttcgagtacatgggcgaagatccttatctagcctcacgcacagcagtgggttacatcaaaggtgtacaagaccaaggagttatggcaactatcaagcattttattgcaaacaattccgactatgaccgtgatcacatcagtaacgatattgatgaaagaactctgaatgaaatatatttcccatcattcaaagctgctgtacaagaagctgaagtcggtgcagtaatgactagttacaatttgctaaacggcgtttacacaacggaatctccttggttactaaaagatgttttaagagatcaatggggcttcaatggtgtagtaatgtctgactggggttcaacacactattgcatacctgctgccagaggtggtttagatcttgaaatggcaggtggtgagagaatgaatccgaaagatatggcttattacctaaaaacaggtgatgtaacaatggatatggttgacgaaaaagtacgtcatatcttacgtgtcctaattgcttttggattcaaagatggtactcaagcagatagtaatatacccttggataaccctcaatccacagcaaccgctttggaagtagctcgtgaaggcatggtacttttgaaaaatgaaaaaaatatccttcctattaatccgaacaagtacaaacacattgtagtaactggaaagaatgccaaaggttatgtacatggtggaggtagcggtgcagttgttccatttcactatgtaaatatgttcgatggtattcaaaaagaaggaatcagccaaggagttaaagtagaatttctggatgaatttgatttcttccccgcaattatgtatacaggtaatgatttaaaggaagccgggttcaaagccgaatattttaataatatagatttcaaaggtgcccctatagtctcgcaagttgaaaagaaaatcaattatgtttggagtggtacgggaacaggcctcaacgatatgcccaaagaattctatgcagttagatggagtggcgtaatgtgtccggataaaactgctgaatacgagttcacactcggtggagatgacggctatcgcatgtttattaatggtgaaacagctatcaatgattgggaggcaagagcctatcacaaaaccaatatcactaaaaaactagaagccggaacaaaatataagattacgattgaatactatcagaaaggtggttcagctaatgtagatttccgttggaaagtgaaaggtgataacactgactattttgcagactacctaaaaaaggcagacctggtagtagcttgctttggacacaactctgatacggaaggcgaaggacacgaccgtccatttggtttaccagaagaagataagaaaatgctagcaagtatcttcaagagccagactcctgttataggtatcgtaaacgcaggtggcaatattgagatgcaggaatgggaaccttccatgaatgctcttctgtgggctttctatggaggtcaggaagccggaacagctgccggtgaggttttattcggtaaagtaaacccatctggtaaactgcctatgacattcgaaaagaaatgggaggacaaccccgcatataacagttaccatgatcccgacggcgataagcatgtgaaatatacagaaggtatcttcattggttatcggggctatgacaaactgaaacgcgacgttcaatatcctttcggttatggcctgtcttatactactttcaatttgtccggtgtatcagtatccaaacaaaatacaaacggctctgtcgaagtgacctgcaagttgaccaatagtggtaagcgcgatggtgcacaagtggtacaagcatatgtaggtaaagtaggaggtacgattgaacgccccgaaaaagaactgaaaaagttcgagaaagtattcctgaaagcaggtgaatcaaagacaatcaagatgacactccccaaagatgcattcacgtactatagcactaatgctaaatcattcgttacagatgccggtacctacaacatcatgttaggttactcttcaagagatataaaggcagtgaaagcaattcaaatacagtagtccataactaaaaactataattcctaaaacaatgaatactaaaaaactatgcgcggcactcttgcttgcatccagttttctgaccgtatcagcacagaaatggtatacccctgatatagaccaaaaggtagaggaactgttaaagcagatgaccgtagaagaaaagctatcctacgtaggtggagttgattggatgtacacaaggaacattgatcgtctgggcatcaatcgtatgaaaatgacagatggtccccaaggattgggtactcacggtaaatctacagcttatcctgccacagtaatgctggcagccacttggaacgaaaacctggcttacgaatatggtaaggcattaggtcgcgattgtaaggcaagaggcatcaacattttgctagggccggcagtgaacatctatcgtgcagccatgtgtggacgcaactttgagtatatgggcgaggatccctatctggcaggacgcacagctgttggctatatcaagggtgtacaggatcaaggtgtaatggccactgtgaagcacttcatcgccaataactccgattatgatcgtaacaatatcagcaacgatattgatgaacgtacattacacgaaatttatctcccggcttttaaagctgcggtacaagaagcagaagtaggtgcagtaatgaccagctacaatttggtaaatggcatttggacaactgaagcaccttggttactgaaaggagtattgagaggccaatggggtttcaatggagttataatgtctgactggggttctactcatcattgcgtacctgctgtaaaaggtggcctggacttagaaatggctggtggagagaaaatgaatccgaaagatttggcttattacttgaaaacaggcgttatatctatggatatgattgatgaaaaagtacgccacattttgcgtgttctcattgctttcggattcaaagatggaaccaaagtggataacagtatcccattggatgatcccgaatcagtagctactgcactgaaagttgcccaggaaggtattgtattactcaaaaatgagaaaaacgttcttcctatcaatcccaaaagcaccaaacatatcgtagtagttggcaagaatgctaatggttacgttcgtggaggtggtagtggtaatgtaactccatttcattatgtaggtgccttcgacggtatccgcgaagtgggcgaaagctatggagtaaaagtagagtatgtagatgagatggacttcatgcccgaaatcatgtacacgaatgagaaacttcaggagaaaggacttcatgcagaatatttcaccaatcaacatcttgaagggaaaccgctattggagagaaccgaacaaaaagtaaattattcatggagtggcggtacttccattgaaggcatgtccaaagaacattattctgtacgttggagcggaattgtccgtccggcagaaacagctgagtatgaatttctggcaggtggcgatgacggttatcgcatgtacatcaatgatgagttagtagctgatgaatggaaagtaggtggtttcagaacctctacaatcgctagaactttgcaagctggtgtaaactaccggatacgctttgaatacttccaggaaggtggtggcgctgctgcaagcttcacatggaaacgtaaaaatgaaacaagagatttgtttattgaacacttaaacaaagctgacatgatagttgcttgttttggacatagctctgattcggaagcagaaggtggcgatcgttctttcttccttcctgaagcagattcacaactgatagcgagaatagctaaatgtaaaaagcccattataggtgtagtaaatgccggaggaaacattggaatgcaaagttgggaaccttcattaaagggattactctggggatggtatgccgggcaagaaggtggacacgctattgcagacgtgctatttggtaaagttaatccttccggtaaactaccaatgacttttgaaaagaaatgggaagacaatcctgcttacaatagctatcacgatcccgacggtgacaaacatgtgaaatataccgagggtatctacatcggctatcgtggttacgacaaacggggacgtgatgtacaatacccatttggttacggcctttcttatacttctttcaagctttctgatatggttgcctcagctcccaatgctgatggtactgtgaaggttacctgtaaactgaccaatacaggtaaacgagatggagcacaagttatacaggcttatgtaggaagagataaaagtggtatagtagatcggccggaaaaagaattgaagaaattcgaaaaggtatttttgaaaacaggcgaaacaaaaactgttacaatgacccttccaaaagatgcttttacttactatagcacaattgataaacaatttgtcacagatccgggtatttataatatcatgctaggtttttcttcaagagagatcaagggacagaaatctatccaaattcactaaatagataggttcaaagtcttgattttgagccatcaaataaaaattaattcaacaatagtattttttaactctaataattttttatggaaacacatttaaatgttaaatggaaacagtggtacttgttagtactgctccttatcttgggtgttgtcggctgtaaggatgataaggatgaggataattctaccatctacgatccttctgtacctgtagaaataacaagcttcacaccagaagcagctgcaggaggcgctcagtttctggtttatggtagtaatttcggaacagacttgagtaaaatcaaggtaacggttaatgacaaagaagctgtccttatcagttctaatggttcatgtctctattgttttgtacctaagaaagcaggagtaggtccagtgaaggttactgtaggtttaaacgaatcagcacaggaagctgtagctgaaaaggaatttgaatatgttccttctttggtagtaaaaacactgaccggacatattgatatagatggcaatagtacgattaaagacggttcttttgaggatgcacaattccaagctccttactggctggagatagatgatgaagataatatttatttattggaagaccagcaaggattacgtaaactcaatatgaaagaccgcacagtaactactatatggcgtaccggaagcggagttaatcacccgcgttctatggctttcaatgcagatcatagtaaactatatttctttaatgaccaagataatagtgatgaaggtgtagctgtagctgtggcagaacgtagcaatgatccatcaaaagaagatttcgcttcatgggtaacagtagcccgtatgaagagttgttgtggaggagacgttcaccctgaaacaagcgatttattcttcaatcgttggaatggtggtgaatattataaatgggattttgatagaaaagacaaagaccagatattccgtttggataatggtttcaactccggattaatgtttgctccgagtggtaaatttgcctacattgtaagtatgggacaccattgtatctacagagctaactttgattatgcaacaggccgtttaatgcaaccttatattttatgtggaagcaagggtaaaaagggatatgttgacggtcctggtagcaaagccatgtttgacgaacctcagcaaggatgttttgatgatgatgacaatttctatgtttgcgatcagagtaataacctgattcgcaaagtagaacctagtgggcaagtcacaacttttgccggacgccaatatgaatggggttgggctgacggtgatttaagaaaagaagctagattcgaccgtccccacggcattgcttacaataaacataccggtgaattttacattgcggacaagaataataagagaatccgcatcatcacgaaggaataatattaatgagaaacatactatattatgaaaaagtatttattaatgtgggtgctacttttgggatgcctttctacgatatgggcacaaaagaatgtatctgaaataaccggaacggttcttgatgaaaataaagaaccactgattggagtaaacatcgtcataaaagataacccgggattgggtaccattactaacgtagacggccagtttcgcatcaaagctactgcctatcaagtattggtcttttcttacattggttatgacaaaatggaagtacctattgccggtaacaaggtaatcaatatacaaatgaaaccgtctagcaatagcgtattggacgaagtaacaattaccggtacaggtgtacagaagaaagctactattactggtgccatcacaacagtagacataaatacgttgaaaagttccggtagcgcttcaacaagcatcactaatgcattggcaggtaatgtggctggtatcattggtatgcagacatcaggtgaaccaggcaaggtttccgaattttggattcgtggtatttctaccttcggtgccaatgcaaaagctttgatattagtcgatggatttgaacgttctatggatgaattgaatattgaagatattgaatcattctccgtactgaaagatgcttctgcaactgctatttacggttcacgcggtgcaaatggtgtagtattaattactaccaaacgcggtaaagaaggcaaagtaaatattgatgtgaaagtagaaggtggttataacacccgtacccgtactcccgaatttgtagatgggtatacatacgcttctttattaaatgaagcaagaattactcgtaatctagaaccacgttacactcctacggaaatgggaatcttacgtcagggcttagacccggacctttatcccaatgtagattggaaagacgcattgttgagagatggtgcttggtccgaacgtgctacaatcaatgtcagcggtggtggatctaccgcccgctattatgtatctataggttatctgaaccaagaaggtatgtataatacggataatagtttaaaggaggattacaacactaacgccaatctttcccgctggacctatcgtatgaatgcagatttgaatgtaactcccactacattagtcagcgttggcattggaggatctttagatttgcagaatatgccaggtatgaacaatgaccaaatctgggagtctatcgtaggacaaaatccgataagcattccttttttgtattcagatggtaaaattccgacttatggaatggacaaccgcatcaatccgtgggtcatgtctacccaaaccggttatcaggaaaattggttaaacaaaattcagacaaacatcactctggaacaaaagctggactttattactaaagggctaaaattcgttggccgttatggctttgatacagaaaacaagaataagaataacagaaccaaacgccccgaattatggcaagcagagaatcgtcgtgatgaaaatggtaaattagtgatgaagcgtgtaggagaagagcaattgatgacacaatacagtgaagccgatggataccgtaacgaaaacctagaagcagagctgcattacaatcgtttatttgccaagaagcatgatgttggtgctacattgaaatatttccagtaccaaaaagtaaaaaccgctaatgtaggtgatgatatcatgaaagctattgccagacgttcgatgggtgtctccggtcgcataacctatgcttacgactaccgctactttgcagaatttaacttcggttataccggttctgagaatttcatgagtggtcatcagtttggttttttcccagctatatccgctggttggaatattgctgaagagaaatttattaaaaaccgctttaaatggctggagatgcttaaaatccgctattcttatggcgaggtaggtaatgaccgacttgataaggatgagtgggtaaaccgtttcccttatttatatacatttggttccacaaatggctgggattatggcgataataacaattcatatccttttcctggataccactattctcaaatttcctctccaaacttaggatgggagattgccaagaagcataatttaggtttagacttgtctatctatagtggaaagttcacagcaactgtagatatttatcaggatactcgcgaacagatttatatgaagcgtcagtatttgccacaaatcgtcggtgtcactagccagccatgggctaatgtaggcaaaatgcgctcaaaaggtattgacggaaacttcatgttccatgagaaaataggtcaagtagactttactgtacgcggtaatatgacctatactaaaaatgaagttttagaatatgatgaacaaatgaattcctatccctatcagatgacggaaggcttccgcttcgaacaggcgcgaggtctgatagcattggggttattcaaagattacgatgatattcgtaacagtcccaaacaagaatttggggattatatgcctggtgatatcaaatacaaggatgtgaatggagacggcgttattaacaatttagatatggctcctatcggtgcctccgataaaccaagtttaatctacggtttgggattctcagccaattggaaagggcttgatttcaatatccacttccagggagcgggcaagtcttcttatttcatcaacggttccagcatttatgcatttaaggatggtgaatggggcaatattcttacagatatggcaaaatcgggtaatcgttggatttccagtgaaatatccggtacctctgaaaccgaaaaccccaatgccaaatatccacgtctaagctatggcggtaacaacaataactatcggaactcctcctactggttgagagacggctcttatctacgcctcaaaactttagaaataggttactcactgccgcaaaagtgggtaaacaaaatgcgcatgacaaaagcacgtttctatatcttaggaaacaacctagctgtttgggattctttgaaactttgggacccagaattagcaagtggcgatggcatgaaatatccgttgtcaaagacatatactttaggattgaatgtaaccttctaaaaattgattttcatgaaaacaaagaatatttttctaacagttgcacttggaataggcgcctttgctttctcttcttgtagcgactatttgaatgtagaccgttatttcaatgaccgaatgacggaagaaaaactttttgaagacaaaaagtactctgaagaatggctagctggtgtatattcacacctattaggttgtaatgacgatgtatgcagcaaaggaaatactcctcataacttctctgacgacatgtattttggtgatcgtagcggcttatatcgcagtttgaaatatggattatataatgaaagttcttaccaattttcgtggagagaatgctatattggtatccgcgatgcttctacttttatccgaaatatccatgtgaacaaagatttctctccaaaagagattgccgattatagaggccaagcccgcttccttcgcgcctattactattggttgctgttacgtaaatatggtccaatacctttgctccctaatgatggagagatggactataccgcagaatatggggatttagcaatacctcgtaacagctatgatgaatgtgctaactacattgccgaagaaatggctatagccgcaggtgaactagagacgacccgcacgaatagtgatattaaccgtgctacacgaggagccgccttagcgctacgtgccaaagttttactttatgctgccagtccattagcaaatggaaatacagaaatggcggatttaacagatgacaaaggcaactctctaatttctcaagaatacgatgagtcaaaatgggcaagagctgctgctgccgcaaaagatgtaatggatttagatatctaccaactctatgtggctaaccgacgttacaataatgacggaggccaagcttatcccgaaactatcatgcctcccatcacaaatgaaaaccgcgaatattcagaaaacgaatggcctaacggatggaaaaatatcgatcccttcgaatcttaccgttctatttttaatggtgatgtacaacctaaagccaatccggaactgatcttcacccgtggtgtaaataccagaaaagaaggtgaaattagcgacatgggactagaagatatacaagttatggtacagcaccaaatgcccttccaaatgggtgggtacaattgccacggaataactctaaagcaatgtgatgcttactatatgagcgatgggagcgatgttccaggtaaagatgattgtctgggacgtggtgacggtagttcacgcataactggatttgtaactgaagaaaacaaagaccaatacaaaccacttcctgtcggggtatctctgcaatatgctaatcgcgaacctcgtttttacgcttctgttgcttacaatggcagcgtttgggaaatgactacttcgtatgatgaagataaacgtttctatcgggcatggtactatcatggctcagaaaatggcaagttagctcaatcacccgacctttatttgcgtacaggtattggtgtaaagaagttctataaccctcaggattcttatcaaaatggtggccgcatcattcacaaaacagaaccagctattcgttatgccgaagttttacttatttatgctgaagcattaaatgagctttcaagtagttacgaaatctcatcttgggatggttccaaaacctataccattaagcgtgacgaagcagaaatggcaaaaggaattgagcctatccgtattcgtgccggtgtccccaactataaagcagaggtatataacaacaaagatttgttccgtaaagcattgaaacgcgaacgccagattgagttatttgccgaaggacatcgctattatgacctccgtcgctggaaagatgctccggaagaagaggcaaccatgatgtatggctgcaacaccaatatcggagaaaacaacagagatcttttctatataccgaccgtaatcccttctatgccttcggtatttaccaagaagatgtatttttggcctatctctcatgatgaattaaagaaaaatagccgactgacacagaacccgggctggacctattatgattaacattaaaggaatacttttatgaaaacaatatatcgtatattatgcaccgtagtggtggttttcgcttgttatgcatgcaacaatgagtgggaagatgaattgtacaagcaaaccgtatcattcggaaaaaacggtgtagctgatatctatgtgaaatataaaccgaatggaaaaacatcctatcaggtaccagtcgtgttaagtggcaccactatgaacgacggtaatatcacagtgaatgtagcattggatgtagacacactaaccgatttgaattttgaacgcttcagatatcgggaagacctgtactacaaattattggatgaaacatactatgacttgccttccactcaagtaacattacagaagggcaccagtgtagggctgcttgacattgatttctcattaggtggaatcaacatgacagagaaatacatcctccctctgactattgcagaaggtgatggttatcaagtcaactaccgcaaacactaccgcaaagcattattgaatgttattcccttcaataatttttcaggtagttattctgctagtgccggattaatttatcaaagggacaaagaagaaaaccagcaaaccccgatgactatggatacccgtacagctttcgtagttgacgataatacaattttcttctatgcaggtgtaactgaagaagaactagaaaaccgcgaactgtataaagtcacagctcattttgaagatgatggaattttgacattagatgctccccataaagataagataggctttaacttcatttccggtggttatgtgatcagcgaagaaatggatgccttgcagccatatctgaagcatcgttatatcaaactggacatggaatatgaatacaatgagctgattacggataacctttatatcccatatcgttttaaaggttcattgactatggaacgtaagattaacacaacaatcccagacgaagaccaagccattatctggtaagtacaataaatcaactctaaatgagactgtgtataaagcaatacgcagtctcatttaataaataaaattatgaaaaatagtaatttattattaatgcttattgcccttttatcttcttgcagtaatagtttatttcagaatgaagatagttctttattagcattggaagaaaatactataatggatagaagttccttagatatccttaataaagattctatcgcagttatgaataatatgtatgatgcaatggatacaatactttatcctatggtatcttttagcatagaacgtataagtgagggtaagttgattataaatgttcccagattagataaaaaatatgtctataataatggaaaatacccagacctacctgagactaatgtaacaattaatacaggttgtttcctacaatataggttacatgataaagcgataggtggccctgaaaatccatggtattactataatccggattcaatacatgctacaatcccttattacgtagaagttccattttatcatccagatgactctcggttacttcgattatatcttaatcctgcaagttttccacaagctccttttgatcttcgaggaagattatatggcattacatcatttggaacaaagcaagtaaaaacaatgacagaatggtggccaagtaatggaagctatattgaatttagaaacaactttaatggttttatagagaataatcaagatagtgaagacagccgtcagcaagtgaatgttgttgctgaaatggtattaaatgtcaccatagacttggatgcgaatcacagtgggacttataagtgtcagtttggcagtcaaactaaatatctgcaatatacaaagggatataattgtctcacttgttctttctctgaaaggaaaacagttaaggcctatttaaattcaacatttactataactatgggctttggaggaaaagactataatttcattttttatgttctacctgggtatagaggtgatgtgctgacttcttttaatgatgcatatttgcatatgaaatttagttaaataattcattgaattgatattattatgagacataaacaatccatattttcttttttgtcaatagttttgtgtatcactgcacaagcgagcgacctctatcgtcccagccgaaatacagaattacgtttaccttctgtccccttaatcgtatcagaccccaatttttctatttggtctccctgcgataaactgatggatggaacaactctgcactggaccgatgcacccaaatcattgataggtgcattgcgtgtagatggtaaaagttaccgttttctgggaaaagagaaactggatctgcaagccatagcaccaatgaccgacacagaaatctgggaaggcacttttttaagaaaaaagccagccgacaattggatatctttggatttcgacgacaaagaatggaaacatggaaaagccgctttcggaagccgtgatctcccacgtgtccatacagaatggagcgaacagaatagcgacatttatgtacgacgtacatttgatataaacgaattggaatctgaaagagatttttacatcatttactcccacgatgatgtatttgaactttacttgaacggggaaaaacttgttactacaggcgaagagtggaaaaacaatgtatacctaaaacttacagatgaagcaaaaaagaaactccgcaagggaaagaacgttatagcagcccactgccacaatacaaccggaggcgcttatgtcgatttcggactctattgtgaaaagaaagatgctgtaaaatttgcagcagaagcggtacaaacttcagtagatgtactggcaacttcaacttattatactttcacatgcggtccggtggaactggatgttgtattcacagcaccgcaactgattgatgatctggatttattgtctactcctataaattacatttcttaccatgtccgatcattagacaaaaaggcacacgacgtgcaactttactttgaaactaccccggaattggctgtcaatgaaaacacacagcccacatccgccaagatattttctaaaaacggtatccgctatatagaagctggaaccatagatcagcctgtatgccatcataagggtgatggaatctgcattgactgggggtatgcttacttagccactcccagtagaacaggaacagaaatcggtttaggcgattattatgaaatgaagcggtctttcatacaaaacggaaaaagtggactttccacactcaactggtgggcaaaatgtgccgaagaacaacctgccatgacattcgtacacaacctgggtgcagtagataaaaccggaaataccggattcctaatgttaggatatgatgatatctactccatagaatatatgtatgaaagatatatggggtattggaaacatgaaggcaaagtgtctatcttcgatgcatttgagaaattaagagataattacctacagattatgcaacgttgccgtatgcaagatgaaactatttatgatgatgccctgaaagctggtggcaaacaatacgctgagatctgctccgcagcttatcgccaagctatatccgctcacaagctattcaccgacaaatacggaaacttactatttttctccaaagaaaataacagtggcggatttatcaatacagtagatgtaacttatccctccactccactctttttgacttacaatatagacctggtgaaaggcatgatgaccagtatcttcgactataatgccagcaaacgctggactaaaccctatccggcacacgatttaggggtatatccgatagcaaacggacagatatatggcgctgacatgccggtagaagaaagtggtaacatggttattctttccgcaaccattgccatgatagaaggaaatgccaactatgccaagaaatactgggatttgctgactatctggactaactacctggtggagaatggactcgatccagagaatcaactctgtacagacgactttgccggtcactgggcacataatgctaacctgtcgctgaaagccataatgggtatcaccggttacagtgaaatggcacgcatgttgggcatgaatgatgtagcagacaaatacataaccattgccaaagatatggcctgcaaatgggaaagcatggcccgcgagggtgatcactaccgtctagccttcgaccgtaaagacacctggagccaaaagtacaacatgatttgggataaaatgtggcagacaaacctgtttccggatgaaatcgccaaaaaggaaattgcttactacctgaccaaacagaatacgtatggcttgccactcgattcacgcaacacttatagtaaatcggattggattctctggagtgcctctatgtcagccaatcaaacggaatttgaaaagttcgtaagcccattgtacaagtacatcaatgagaccgtatcacgagttcctatgagtgactatttttatacggatagtggcaaaatggtaggcttcaaagcccgttcagtggttggtggatactggataaaagttttaatggataaaatacacagtagcaaatagaataaatatgaatatatctactatcaagaaagcattttacctattggtaggaatcggattcagctgcactctacaagctgtcgaacctcaaaaagacgtaacggataactacagaaataaccgctatccgctacttcaaaagccattaatagaacttcccttgggcagtatcaagccccaaggttggttaagagagatgctaatccagcaaaagaatggtgccaccggacagatggacaccctctatcctttagtcatgggcgaacgcaatggttggctaggaggtgatggtgaccaatgggaacgtggtccttattggattgacggcttattgcctcttgcctatatcctggatgataaagaactgaaagctaaggtgcagccttggatagaatgggctttgcaaagccaacgcgaagacggcttttttggtccggcaaaagactatccgggtgaaccgggattacagcgtgataattcacatgattggtggccacgtatggtaatgttgaaaatcttacaacaatactattcggcaaccaacgatgagagaatcatcacctttatgaccaaatacttccgttatcaactaaataccttaccacagaaacccctaggacactggagtttttgggctgaattccgtgcctgcgataacctgcaggctgtatattggctgtataatctcacaggggaggctttcttactcgaattagggcatctattgcaccaacagagttacagctttgttgatatggtaaaccgaggggatttgcgccgcatctgtacaatacactgtgtaaatctggcacaaggtatcaaagaaccgatcatttattatcagcaagacaccaatcctaaatacattgatgctgtaaaaagagggtttcaggatatccgtcaatttcacggacagccacaaggaatgtatggtggagatgaagcattacatggaaacaaccctacacagggttctgaattatgcgccgctgtagaattgatgtactcccttgaaaagatggtagaaattacaggagatattgattttgccgatcacctggaacgcatagccttcaatgctctgcctacccagatatcagacgacttcatgactaaacaatacttccagcaacccaaccagattatggtaactcgtcaccgccgtaatttcgatcaggatcatgaaggtacggatattactttcggcacattgaccggctatccttgctgtttttcaaatatgcatcaaggctggccaaaattcacacagcatttatggtatgcaacgcccgataatggtattgccgcctttagctattctccatcagaagtcatagctaaagtaggtaacaatgtatcggtcgtaattagtgaagatacctattatcctatggataaccgtatatccttcactattaaagaagtgaagaacaaaaccaaacaagtcgaattcccgctacacttacgcattccgaaatggtgcaaacgtgctgagataatagtaaacggcaaggcagaacaatacattgaaggagggcggatcgctgttatcaatcgtatatggaagcgaaatgacaatgtagaattacacttacccatggaagtttctaccagtacatggtacgagaatgctgtgactattgaaagaggcccattagtatatgctcttaaaataaaggaaaactggaaaaaagaaaatctcaataatagctggtatggcccccattattatcaagttacttcatccgaaccttggaattatgggttggtggactttgatcgcagccaagtgaataaaatagcacaagttagtattgatagccaaaaacagcaatcaatattcccctggaatcaagagaatgcaccgattgaaatcaagatgaaagcccgccttattcccacatggacagtttacaatgaaatggcaggacctcaacctttctccttctgcaacggtgctgaaggagaagaacaggaaatcacattaataccttatggttgcaccaccctacgtatctctgaattccccattgttggaaaataatttagttaacaatatcactaaaatcaataacaatatgaattttaatcatctgaaaacagcaatgatctgcctactggcagtatgcatccagatcactcatgccggcacacagcaagtgaatatcgagcgctctttcatggttggagacggtattgctcaattcatacccacagggtatgatgcaaagaaaattccatcatttgccctacaaagtgaaccacgtaaaaaaggcgaactggcatcaaactggacactaatgccggaattcttcttgaatgatggaaaagcaggagcttctctggcagtacctgaaggcacaagcctttatggaggtggtgaagttaccggtacgctactgagaaacggcaaaacgattaaattatggaacacagattcaggagcctatggagtagatggcggtaaacgcctgtatcaatcacatccttggattatgggtgtacgcaaagacggcacttcttttggtattctatttgatactacctggaaagccgaactctccagtatggatgacaagatagagttaagaagtgaaggtgaattattccgtgtcttcatcattgacagagagtctccccaagctgttgtaaaaggtctgtcagagctcattggaaccatgccaatgattccccggtgggcaatgggttatcagcaatgccgattctcctattcaccagatagccgcgtacttgaaattgccgataacttccgtgaaagacgtatcccctgtgatgttatatggatggatattgactacatggacggatatcgcatcttcacttttaacccgaaaggtttcccaaatccaaagaaattaaatcaagatttacatttgcgtggtttccacagtgcctggatgatcgacccgggagcaaaagttgatcccgattattttgtttacaaatcaggaacagaaaatgatgtatgggtaaaaactgcagatggaaaggagtataatggagatgcatggcccggttccgcagcttttccggactttacatgccccaaagtatctaaatggtggagtggcctatataaggatttccttgcacaaggagtagacggtgtatggaatgatgtgaacgaacctcaaattagtaatactcccactggaaccatgcctgaagacaattttcaccggggtggtggcaatttacctgccggtagtcacctgcaatatcacaatgtgtacggttttctgatggtaaaagcatccagagccggaatagaggctgtacggcccgaaaaacgcccgtttattctgactcgttctaactttttgggaggacaacgctatgcagcaacttggaccggggataacggctcctcatgggaacatctgaaaatgtccattcctatgtctatcacgctgggattatccggacagccctttagcggtgcagatataggtgggttcctgttcaatgcggacgcagacttgtggggacactggattggtctaggcgctttctacccgttctcccgcgctcacgcctgtgccggaaccaatgataaagagccttgggcatttggtaaagaagtagaagatgcggcacgtacagcattggaacgcagatacatgctattaccttacctctatactttattacaggaagcctctgaaaccggcatgcctatcatgcaaccagctttcttcgccgatcctaaggatttatccttgcgtggagaggagaaagtattcttgcttggtagcgatctactggttataccttcctgggctgaacaagcagcactgcctaaaggtatttgggaagagttctccttattccccggagacaataaagataaatatcagtcaaaactcaaaatacgtggaggagccattattcctacagggaagatcatacagaacactactgagaaatcactagacccgctcacactactggtttgtctggacgaacagggcaaagcaagtggtagtatgtactgggatgaaggagaaggatggtctttcaagaaaggaaactacagtttgcaacagttcactgccgaaaagggagcaaataacaaggtaattgtgaagttagcaggaaaaacaggcaagtaccagacagaaaacaaggacatggccattgtaaaagtagttaccaaacaaggtatacgtcaaggaagtggaaacctcacagagggaattgaaattcaactataaatatataatgaatactcagacaatttatctcgcctctaagccgcattatgaaatcctggatggattgcgtggagtggcagctgttatggtcgtagccttccatcttcttgaagcacattcggggggcaaccatctcgcacaaatcattaatcacggctatcttgccgttgacttcttctttatgctttcgggctttgtaatcggttatgcctatgatgaccgttggaaccggatgagtatcggcactttcttcaaacgtcgtgtcatccgcctgcatcctatggtaattatgggcagcattatcggcgcccttttctttttcttacagaaatccccctgttttcccaatatagataacgtatcggtaggaacagtcctgataatcatgctctatggctgtacgttgcttccccttcctttgaagtgggacattcgcgggtggacggaaatgcacccgttgaacgggccggcatggtcgctctattatgaatatatcggcaatatcctgtacgcactgtttgtccgtaagttcaacaaggttgccttgtccatccttgtttttctggcagcctgtgccaccttgcatctctgtcttacggcgcccaatggtgatatcgtgggcggatgggcattgaattgggaacagcagtatgtgggctttgtccgtttgctctatccgttctttgcaggtttgctgctttcacgtctgggctggctcatacgagtaaagaaacgtgcattctggtggtgtagcctgatgattgtaatagttctttccgttccccgtattggcggtgaagatggcttctggatgaacggactctacgaggcactttgcattatctttatcttcccagtcattgtttcgatgggagccggtggcaaagtaacgggaaaacgctctgtaggtatctgtaagttcctgggcgatatctcatatcccgtttatatcactcattatccgctgatatacacatatacagcctgggcatgcaataataatgcgaccatcaccgaaggtcttccttatatgatactgacctttgtcggagctttcgttcttgcttatgcctgcctgaagctctatgacgaaccggtacgcaaatggctgaccaatcgctttctaaaaggagcacgtaagatcaagtaaataaattcagcttcatatagctttcataatcctatctcccttatttatcgacctttacgctgaaagcatccctttaggggatactttcagctttcagccgtcaccacaactgcagaaacattcttcagtctcattacctccttaccacttgatacacatttccatactctgtgtgccgacgcaccacccccgctttcagcagcacttggccgaagcgcataggattgacgctgcgcatggcagcggaattcttttgctgaagttccctgaaaatctgggcagccgtaagaccgatacacttctcaccgaaattcgccacacgaaaataactatgaaaaacatcctctgcgggacaaacacggtagaacgcctcattctgcacctgcaacacctgctcctcttctttggtgaaccaatcacgcctccccgcaagcagttccgccttcagttgtgcataaatctggtcatgttctatatgggtacaatcgatcacccgctccacttccacgcaaagaaaacggcggcttcccgtagggtcggtaagtaagtcgaaacggttactggtaccaataaaagaggcgacacgaggcagttggcggaagctctgctgataggccttacgaatattcaagtcagacatttgcatcaggttcttcagcaacggcattttgctttcggcatacttatcaaactcgtccatattcagcaagcccatttccgccaaaaggcgttccgcctgcccttgcgaagtaagcttcaaattatccacataatatcgccgcagaaccatcggcatcaatgacttacaaaatgtggacttctgccgtccctgctcttgacttacaagaataggcgctacactgttagcatgtatgcctgccagccccgaccactgcgcggcaagccccagcatccagatgtgaaatccctgcacccaatgcggacagtcggaaacccgcaaggcgagctgtgtcagccggtcaacgccgtcccattgcggcaattcctccatatagagctgaaaggggtgataatcgggaatgtaagtagaatagatatagcgactcaaatccttgtcccagcaagggataccctcagcatgagcctcaatacagaaagcgttcaggtttcgcttaccgacaggcaggaaagcgaaatcacgctgcccggcaggacggaattcggtctcttccgtcaacagattataacggaaatcataacgtttcgtcagaaaatccataacctgtctcgtcaggcgaaccgttgtattcgtgttgtctccggattccgacacctccgatgttttctttttcgctttctgcctttccgataaagccaacaactgttgtgcctcacgcaacaagcgacgttgttccaatgtcattaatttctttttcataacttcttttcattttaatagtaaacaggtttcgttttgtcagtaccaacgctacgaatttactacaacgagaaagcgctttgcaagcattccatcaactatttttcagagaacacagttagaaagaaagtaaggactttcataggtaaatcttactaatatcactatctttgtatgctgacttataaacgacccactccagttgttcactcgaccaactccagtcactcattctaccaactccagtcattcactcgaccgactccagtggttcactttcaagacagcaccttcgagtcaacaagtatatacatttaaagcattaagaaacaagcattatggcaatagtttacgattggtacgagaaccccaacgcggaaggggaatcggaagaaagagggctgcatccccgcccgttgctcaacggcaaagtgagcatggagcaattatattatcgggtacacgaacgcagttcgctcagcgtgggtgatgcaaaaagtgcaatagacactttgacccagctttgcggagaagagctacgcgaaggtcgggaggtgcacatcgagggattgggctatttttcccccactttggaagccacacagaaagtgacccgcaagaccaaaaacaagcatttgaaactacgcttgaaaggcgttagttttcgcccggacattcgtctgaaagccgcactggcaggtgttacagccacccaaagtaaatacacgcgccactccctgcgactctccgaagtagagatagatatgcgcttgaaagagtatttcacggaacatgaactgctgcttcgcatcgatttccaggaattatgcggcatggcacgcaccaccgccaacaaccatctgcaacgattgcaaaaagagggcaaactgacaaatgtaggaagacgtgcacagccgatctatcgccccatgccgggatattacggtatgtcgagggatgcggaactcaagagataaagttagaaacacttcccttcaaaataagtgaaagaaaacgcatcgtcgctataagaacttttgttatctttgtgtcgttatgctacaaagcaacagattaaaaaacaatagtaggaggacagaaaatggatccattggaatatatagtaccgaacagaaagagacttccctacggaatgatgaactttgcggttattcgccgcgaagactattattatgtagacaaaacccgctttatccccctgatagaacaggcggatcgtttctttttcttcatccgtccgcgacgcttcggcaagagcctgacactgaacatattgcaacactactacgatgtaaacacccgcgataagttcgatgacctctttggtggcctctacattggtgaacaccccacaccgaaccgaaatagctacctcgtgctctatctcaacttttccggcatcagcggcgagctgaatgattaccgcaaagggttggatgaacactgcggtactaccatcgagagtttttgtaagaaatatgccgacctcctccccccggacacctgggaagaactgcacaccaaaagcggagctgtagcgcaactggagttcatctatcaggcatgcgagcgtgccggacagaaaatgtatctcttcatcgatgaatacgaccacttcaccaatgctatcctttccaatcccgaaagtttacgccgatacactgacgagacgcatggcgaaggttatttgcggaatctattcaacaaggtgaaagcaggcacctattccagtatcgagcgttgcttcatcaccggtgtaagccccgtgacgatggacgacctgaccagcggattcaacatcggtactaactactcactctcaccggatttcaatcaaatgatgggtttcacggaagaggaagtacgcgaaatgctgacttattattctaccaccagccctttccatcataccgttgacgagttgatagaaatgatgaaaccatggtacgacaattactgttttgcgcaggattgttacggtgaaaccacaatgtacaattccaatatggtgctctacttcgtcaaaaactacattatacgcggtaaagcaccgcaaaacatgatagaaagcaatatccgcatcgactacgagaagttgcgcatgcttatccgcaaggacaaggaatttgcccatgacgcttccatcattcagactttagtgagccagggatttatcaccggtgatctgaaagacggcttccctgccgccagtatcaccaatcctgataatttcgtgagcttgctctactatttcgggatgctcaccatcagcggcatgcacgaaggaaaaaccaaactgaccatccccaacatggtggtacaggaacaactctacacctatctgctgaatacctacaacgatgccgacctgagcttcagcagctatgaaaagagcgaactatccagcgcattagcctatcggggtgattggaaagcttacttcgactacatcgccgactgcctgaaacgttatgcctcacagcgcgacaagcaaaagggcgaattcttcgtccacggtttcaccctcgccatgactgctcagaaccgcttctatcgtcccatttccgaacaggacacgcaggctggatatgtcgacatcttcctctgtccgatgctggagatttactccgacatgacgcacagttacatcgtggaactgaagtatgccaagtataaagaccccgaaacacgcgtggaagaattacgccaagaagccattgtccaagccaaccgctacgccgacacggacacagtgaaacgtgccatcggccacacccaactgcacaagattgtagtggtatataaagggatggaaatgcgggtgtgcgaggaagtaatgtaatcttcctgaaagcacttccccatccttcagacggcagtttcagcggaaaagccaatgaatgagacaacaatgaaagatgaaagaactttgcagataatcagtgcgtactgaattatctgcaaagttctttttaattgtcacgaaagaagacatatacgtcacaaatgtataacacgcaaatcactataaaccaccatatttgcaggaaatattatatcaataaatccaataacatgaaacaaaagattcttttcttatcattcttattgggagccagttctctcttattctcccaaagcaagaaagatatagtagactatgtaaacccactagtagggacagactccagtttcgaattatccaatggtaatacctatcctgccatcgcaatgccctgggggatgaacttctggaccccacaaaccggaaagacgggagaaggatggacttatacctatgcatctaaccgtatcagaggtttcaaacaaacacatcaacccagcccttggataaacgactacggacagttcgccatcatgcccattacaggtgagcccgtattcgaccaggacaagcgtgcaagctggttcaatcataaatctgaggtatctacaccctattactaccgcacattcctctccgatcacaatattacaacagaaattgtacctacggagcgggcagccatattccgctttacctttcccgagagcaaggattcttatgtagtaattgatgcattcgacaatggttcgtatgtgaaagttgttccggccgagaataagatcatcggctacacgaccaaaaacagcggtggcgtaccggccaactttaagaactacttcaccattactttcgacaagcccttcacttactcggcaaccgtaagcaatggtgaaatcaaagtaggccaaccagacgttaaagaaaatcatgccggcgccattatcggattcgccacccgcaagggagaaaaagtatgtgcccggatcgcatcttccttcatcagtcccgaacaggctgaacagaatctgaaagaactcggttcaatgaatctggaagaactaaagctgaaaggtaaagaacgctggaacaaagtactcggccgaatagaggttgaatcagacagcgaagatcaacttcgcaccttctactcctgtttataccgcagcgttttatttccccggacgttccatgagattgatgcggcgggaaacatcctgcattatagcccgcacaccggcaaggtgatgcccggacgcttctttacagataccggtttttgggattccttccgcggagaactcccaatgattaacctgatatacccttccatgagccgacaaatggaagaaggtttcctgaatgcctatctggagagtggtttcttcccggaatgggccagtccgggacatcgcgactgcatggtaggcaataattccgcatcagtagtggcagatgcctatgtgaaaggcaacatcaaacagaatgccgagaaaatgtatgaaggtttgttgcatggagcaaacaaccagcatcccacggttccttcttccggccgcatgggctacaaggaatacaatgaattgggatatgtaccttccgatatcggtcaaagtgccgcccgtacccttgaatacgcctacaatgactggtgtatctatcagatgggggaaaaactgggcagacccgcatcggaactggacatctacaagaaacgcagccagaactataagaacctgttctatgctccttaccgcctgatgagcggcaaagaccgcaacggcaacttcccgcagcacttcgatccggtggaatggtggggacctttcactgaaggaaacagctggcattattcctggtccgtattccatgatatgcggggcttaattaacctgatgggaggtgacaagaactttgttgctatgctcgactctgtatttactacgccgcccgtattcggcgcaaacactaatacccggcaaagcctgatacacgaaatgcgcgaaatgcaggtcattgacatggggcaatacgcacatggcaaccagcccatacaacacatggtttatctctataactacgccgggcaaccctggaaaacacagtattgggtacgcgaagtgatgaaccgtctttaccagccaacccctgacggatattgcggagacgaagataacggacagacttcagcctggtatgtcatgtcggcattaggtttttattccgtctgcccgggtacggacgaatacgtgttgggcgcaccactcttcagaaatgccaagatacatctggaaaatggcaaaactatcgagatttctgcgcccctaaacagcgatgaaaaccgctatatcagcgatgtacgatacaatggcaagaagtatgacaagaattatctgaaccactcattattgataaaaggtgccaaaatcaggttcgacatggacagccaacccaactataaacgcggaacagaaccggatagcttcccctattctttctcagataaagaaaaataatcatgatatcaaacaatatgaaaaggaaaatagcaactttctccagtcccacaccttcagcaacaatggtatctcgacatacaattgttataggtcaatctcaaaatgctggtaatccttcaatgagatccagtctcctccccattcaaatccggcttccgtaaaaagccggtatgccaggtcgttgtgatctatcttgtacggtatatccgtcctgttatcacgatcgaaagcgtatggttcaccggtagcgggttctatgtgccaggagccgtcagctttttccttgacgtatggattgtaaagcgtattaatgtcgatggcaaggccaagtccgtgcttggaaatcttggtagtggagccggtcatgaagcggaagttgaacgatgaggagttgttggcacgcatagaactttcatcgtcggcatcgtagttgtcaatgagcaccatccgctcaatgcggtagtccgccaggtagagctgtcgaaatatgtcgatcgctttatcggcaatggcggcgttcaccaccatctcaccccgttgggggttgccgtcagcgttgcgatgcaatacttttagataacgcagttcggaccgattcaaaggacagtcctctttccatgacttgagccacatgcggctgaatatctggtcgctgatagcttccgaatagaaccaggcatccacaccggagtgttctacgtcaacttcggacaccaaagtttcggctatccactcatcgttaggactttgatgtccgaggtcgttgtcacatccaactaagagtaaggtaaaggacacgacaaagagcagcaggtattttcttcttatcatatttgttaatgtacttattatttgtctttacttctcaaatttccacgtcggcagttcgctgcgacgagtagtggaggtacagtagaagagagtgtcgcggtaagtgcgaatgtagtctatggtcacagtgttgtctgtaaagctctttacatgtacggtttgtaccggcttattggggtctgacatatagagggtatcgttgcggaaagcatatcgaaaccgtagcttattcaacagcgtatcattttggatggtgtagaaggtcattatactgtccggagtatagacttcgtagaattgctgttcatgcgggttattgatgtagtcgaaaactacggtatcagaaacggctcccagcacggcttgagtcactgtttcataatgccatgtgccaacgaaatccggcattccggattctgtggaatttgttttgtttgttgttcctttgcatgatacaaatgcaattgttgtcatcaagacgatactgacgatataaaatagttgcttcataataaaatgatgatttattgtttatattttttctgatttcagcgaattaatacattcttaaactctctggtgacagtctgtcccgtagaaagttcaaggttatagaataccgagagtgttccgtctactcctatcgctacatttaattccataatctgtccgtctttagtcaccatgcgcagttcaccggtagcattgttcacgcgccagtacatgctgagcgttctttcatgctcaccgaagcgtgcgtatacggtagatgaaccgtcctcacaaaacagaatgtctgtttcgcccaaaaaccaaccttcatcttgcattccggagtgaatctccacccactcaccgtttatcttttcgtagctcttagagtaattccatttgcctatgagcttctcggcaagcgtcttctgtgtttcatccatgcgggagtatttccatctgaactcaccatccatcaattcgcctgtctccgcatcgagagcctcgccgtaccccatttcaaatgaagtggcattcaggctgagtacatctacggtcattgttccgagtgtcagtttgttggcggcttcgtctgtttcccattcgcccaggttgagcttcgtgtatccatcgggagccgtaaatgcgctcaacactgtgccgtccgtgcggatagtataggtttgtccctgaccttcagggatgggatcttccacccacttgccatccagctttttgtagctctccttcatgctccacttgccgataacattctcggcgacgggtttcaggattttatcatcagattcgggtgtcgcttcgtcactgcaacctatgtttagtattcccattgc

SEQ ID NO: 6601 - DNA, 630 bp, Unknown
  gut microbiota DNA sequence
atcattaaaaacagagaaaaaatagaacagaatggaagaagtattcaagtacattatcggtctgggagcggcagtaatgatgccgatcattttcacaattttaggagtatgtatcggtattaaactccccaaagcgctcaaaagcggtttgttggtgggagtcggtttcgtcggcttatctgtagtcacagccttgttgaccagtagtcttggtccggcattaagtaaaatggtagaaatctacggattggaactcggtattttcgacatgggatggccttcggcagcagcagttgcctataatacctcggtcggcgctttcattatccctgtttgtctgggagtaaacctgttaatgctactgaccaaaacaacccgtactgttaatattgacctttggaactactggcacttcgcatttatcggggctatcgtatacttcgcctccgatagtattttctggggatttttcgccgctatcatttgctacattataacattggtaatggcagacatgactgctcctgcttttcagaagttctatgataagatggacggtatctctatcccgcagcctttctgccagagcttcgttccgttcgcgattgtaatcaacaagcttttagataa

SEQ ID NO: 6602 - DNA, 501 bp, Unknown
  gut microbiota DNA sequence
atagattctttcgcgccaggattccagtctttcatcacctacccggtaagggagaacgaattcacaaaagtcttcaaaagagacgtttttcccccaaggctgttcacgccatactttgaaagcccattcaatattctcaatcaaatagaccggatcaatatagatatcgctcttcgcttccagtttgtccatgtggaaagggccacaagcacgtttaatggagtccaacactttatccggatacatggtgcctttgccgtgaagctcaaaaagcttcaggtagtcattcaaaggttcaccttcatagctatagtgaaaaggcaggttttcaatgagaaagacggcagctttatattttagggaatcatccttatatttgtcaaggacgacctgcaatttagggttcgctgataatatatctttcaatgaagggccaactggaactttggtacaggaggctaatatttgaaaaatacagatgattaatagaaggctgtgttt

SEQ ID NO: 6603 - DNA, 197 bp, Unknown
  gut microbiota DNA sequence
ggctgtacgctgcttccccttcctttgaagtgggacattcgcgggtggacggaaatgcacccgttgaatgggccggcatggtcactctattatgaatatatcggcaatatcctgtacgcactgtttgttcgtaagttcaacaaggttgccttgtccatccttgtttttctggcagcctgtgccaccttgcatctctg

SEQ ID NO: 6604 - DNA, 35119 bp, Unknown
  gut microbiota DNA sequence
taatattttaataaagcatatttttgttgcgtcatgttatagataccttataaaagagaaagtaatcgaaagataatttcgaatatataatataggtaattaatattgttaactttaattttttaaatgcatgaagcaagttaatcttagaatctatcgaatgattcttcccctattagtagggttattcttgtctgttggcgtttatgcacagaatattaccgtgagagggcatataaaagatgccacgggattggaagtgataggcgcaaatgtcgtagagaaaggaaattctgcgaatggtacaatcactgatttggatggaaactttacgttgagtgttccgaagggggctacgttagttgtttcttttatcggctacaaaacagcagaaatagctgctgctcctactgttatgctgacattgcaggacgattccgaattgttaagcgaagtagtagttatcggatatggttcggtgaaaaagaacgatttaacaggatctgtaacagccattaaggctgaggaaatcaatcgtggtgctattacttctcctgatcagatgcttcaaggtaaagtaccgggcttgttggtaactccagcttccggtgacccaacaggtagtgctactatccgtattcgtggtgctgcttctttgacagccagcaatgatccgttgattgtgatcgatggtatacctgttgccggtaatggtgctggtatggctaaccctttatcaacggttaatcctaatgacattgagtcgtatactgtattgaaggatgcttcggcaactgctatttacggttcacgtgcttccaatggtgtcataatgattactactaaaaaaggtaagggcgacaaagttcaggtgagttacaattcaagctacagtatcaagcagaatacttctacgttggatgtaatgaatgctgatcagtatcgtgaaattgtggaaagggtatatacaggtgaacagctgacacttgttaaaagtatgatgggaaatgccaatacagattggcaagaccagatttatcgtacagccttttctactgaccaaaacattagtgtgtatggaaacaaaggcggccttcctttcagagccagcttaggttataactataacgaaggtacattaaaagtcggtgacaatcaacgtgctaatgcttctattagtttgtctcctaaattctttcaggaccatctgtctgtaaatgtgaatgtaaagggtatttataatcgtgctaattatcctgataacggtgctattggttctgctatttctttcaatccgactgtacctgtttattttactaatgccgatggtagcattgacagaacccaatgtaacggttattggaactgggtgtatgctgacggtgctgctaatacaaactcaagtattaatccattatcgcttttggaagatgtttataatgtgaataatacttggcgttcaatgggtaacttacaattggattataagattcatggattcgaagatcttcgtttcaacttaaacttaggttatgatttctctcatacggcaggtgacaagtataatgaactgggttcatttatggctaaaaaagcttctcctgatacttatgaagattacagtaatcaaaactcaaatactttgttagagttttatgctaactataacaaagaattcggaattcatcatcttgatgtaatgggtggttattcatggcaacattactacgaaaaattcaataagattatttattataacgataatcgttcagaagtgtataaccatactccgacaaatcgcaaagagtactatttggtgtctttctttgggcgtgtaaattattctatcgattctaaatatttgtttaccttctctttacgtgatgatgcttcttcccgtttcgctaaggacaatcgttggggattatttccatcagcagctttcgcttggaatatggctgaagagaatttcttgaaggataattcatttttctcaagtatgaaacttcgtcttggttggggacaaacaggtcagcaggatataggcgataacttctatccttatcaagccaaatatacagagtcttcatctcctactacaatgattccttggggtgatggttatatcactactttggctcctaatgcctacaatcgtaacatcaagtgggaaactactgaaacgttcaacgttggtttggactttggtatctttggtggtcgaattaatggtaatgtagatgcgtattatcgtaagacttctgatttgctgaacaatattacaacccctatgggtaataacttctcaaacactgtgatttctaacgtaggtaatatgaagaatatgggtgttgaattcaatcttaacttcattcctatcgaaaagcaagatatgcgctggactatcaacgtgaacggtacttatcaaaagacggaaattacgaagttgaccaatgatgattccacttatctgggagtacaaacaggtgcgaatatgggtggtaccggtggttatacttcacttcatcgtgtgggatatgctccttatacttattatctctatcagcaggcttatgatgaaaatggcaaggctattcagaacgtattggttgaccgcgatggtgatggaagtattacagaggctgaccgttacgtaacaggtaagagcattacacctaaattcttctttggtcttagttctcagtttacttacaagaagtgggactttggtttcaacgcccatggttcatttggcggttatgccttgaacaggatagcaatgaataattcttccgctttctctgatgattatacaaagggatatattaataacttatctactaatgtattgaagacaggttggacaagagctatctctaatgaacagaaatattctgatatgttcctggaaaatgcttcattcttccgtatggatgatatcaatgtggggtatactttcgataaatttgctcattggaagggtaatatccgtgtaggtgcttctgtacagaatgtgtttaccatcaccaaatacagtggattggatcctgaacttacagcaacagatggcgtagataataatatcgttcctcgtccacgcctctatacggtacgtttgagtattaatttttaaagatagaacggataaattatgaaaaaatatatttatagtttggcaattttaatgtcggcaatgacattgaactcttgtatcggagatttggatacaatgccactaaacgaaacagataagacagccgaacaggtgtatgttacattaggtgatttcgaaaaaggtttggcttacatttatggttctttctctttagtgagtcaaagtgacccgggatcggcagatatcaatgtgggtgatgccggcgccagtgaattggtgcgtcagtatatggtattgaatgaaatgtcagtaggttcattgaagtgtgtatggggagatacttatgtagctgacctgcagaataactcttggacaactgcgcctaatgatgccttgattgctgtctacacacgctgcatgatgattgtcactcgttcaaatgagtttttgttgcagagtgataagaaaatagatatggaaggtattaaggaacttcgtgccgaagctcgtttcctcagatcgttaggatattacattttgcttgatctcttcggaaatcctccttttgctttgcctgaaaacattggtggtgctttgcctacgcaaataggccgtgaaggattgttcaattggattgaatcggagttgaaagcgatcatttcaggtgaagacggcgaagctcttccgaataaaggtagtgttgcctatcctcgtgctgataaaggtgctgctcaagctgtattagctcgtatgtatctgaatgcagaagtgtatacgggaacagctcgctgggctgatgctaaaactgccgctgaagctgtaattgctatggggtacaagttgtgtccgaattatgaagaactctttatgcaggataatacggaaaatctgaatgcccgtaatgaatttatcttcgcgatagcttatgaccgtgacaagactcaaagttatggtggaacaacagctcttatcaatgcttctttgggtgaggatgccaataatggtatagctgctgctttaggttatccggcaggtacaaaaattagccgtgatcagtggaatggttatcatgttcctaatgaatatgtagctaactttgatctcgttggtgtagactgggaggcaacaagcggtttcggttataatcgtgagaaaagtgatcgtcgtgctttcttctataatataggtggtgtggaagcttatgataaagcaaatgttaattcgggttggagatgctggaagttcaatagtagggcttcagatggtactctctattctactgataattattctatattctcatcagctgacttcccgatgttccgtttggctgaaatgtatctgatttatgcagaggcacaagctcgcttggacggtggaactacaacagattctaaggcaatgggctatattaaggaattacgtgaccgtgcaggcatgacgactccgtcatctatcaatttggattttatcttaaaggaacgtgcttgcgagctgatgtgggaaggtcaccgtcgtacagatttgatccgttatggttactttacagcaatgtcattcccttggccatataaaggtggtatacccgatggtaaggttgctttgccgagttatcgtactgtttatcctctgcttcaatcagatttgagtgaaaactcaaacttagtgcagaatacaggttatcaatctaataattaaaacccaaataagagacttatgaaactaattaaaaatataatgctattgatggctgtcgtgctgttcgctgcttgcgaaacagatattgatacgccgcaagtaaatagctccgataaatatgttgcccctgtcattggacagtgtagtgatattattgtgaatgcagacaactctaaggatgaaacagttgtgttttcctggaaagccgctgactttggtttaccagtacaagtgctttatactgtttatttgactaagggtgataaatcttccttggtgggtacctcttcttccacttctttagctattgctaaaggcgatatcaatggagttgtaatcaatggtcttggtgttaatcctaatgaaaccgcagaggttcaggcttatgttacggctcaatttgcaggaacagatgagtatgaagcgattaaatccaatgtctcaaactcctttaaggtgactacttatgcagctccactgaagaatctgtatgtagtaggcttcttcaatggttggaaagaaggtgaagctgttgaaatctgggaaacgagtgcaggtactaatgtttatgaaggtttgtatgatttctttgaagatggtacatctgggcattcagcttttaaaattatttccgagcgcagttggggcggaggtaactggggttacgatgctttcaaggtagatagtcactttaccggtattgctggtggagatttacagttgcctgccggattctggaagatttcagtaaacagaactgcaatgtcaattgatgctactcctgtttctgctgttgatgtggtaggtacatgtaatggttggaatactgatgctccaagtctcttgacttatgatcctgttcaaaacgtatggctttctgaacctttaacttttgaagcaggaggtgaattcttgattcgtcttaactcaacctatgacaataaatatggtttaggtaattcaagtatcgctataccaggtggtattgaactggtagctaatggcggcggtaacatcatagttgataacgcaggtacatatgttatcaaacttcatgctaatcgtacaccgtttgttgtagaactcgttaagcagtaattaagcaataatctttaaaaaagaatgattatgataaaatatttaaaatatatgttcgtggtggctatcgtaatgatagctgccaccggatgccaggaggattgggaagatacattctcaaaagagcctactgcacctgaactcgtgaacaatggaatgattctgatgacaaagaatactatgtcagagtctattacatgggcatggtctgctgcccgtttcatgcagggtgaagtttcgtatgcactctatacgcaatatggtaccggtgctgctgtacaggtaggaactgctacaaaagacctgagtcttactatgacaaagactgattttcacactttactggaaggtatttctggtattcctgagaataattcatttgatctcgcattctacgtagtggcttcagatgctaatggtaaatatgagtcggctaaacagacaatgaaagtgtatgcttatggtgatgcggtatcagcagtagttgctgcttccgttccggagttggtacttgacataaatgaccctgccggtgaagtgcaattgttgagctgggaagctgcccgattaacttataacgaagctgtcacttatgctgtttctgtgtcttatggtggtggagaggcaattgaagtagctaaagatttgacaggaactacttgtacaaagactgttgatgaatggaatgagttgattgttgctactggtgctcccgaagctaaacctgctgaagtacagtttactgtaacggcatattctgaaacatatcctgatggtgtaccttctgcaccgttagcagtaacggttactacttataaggcaacttatccggcttatatacagcttaccggtacagataagaagcttccgcaaagtacgttaaccaaaggtttgtttgaatgctttgtaaatcttgcttctgatacgaattttaaattacttgatccggattcagcagctgagttgggaagtgatgacgctgaagctactaccgatgataaaggtaataaggttataaatggtactataggtggtaatactgctatatctctttctgccggtacataccgtatcagtgcaagtatgaagtttaatactcttcagattgtgaaagtagaatctttgggactgattggttctgctacagtaggtggctgggataaggaaactccattagagtatgatggtgtggctaatacatattctgtagttactacattgacgaaagacggtgagtataagcctcgtgctaatgataactggggatatgcaattgatgcagacggtatattcaaagatggaggtgataacttcaagtttgaaggagaaaccggtgaatataaagtggttgttgatgtgaataagcatccatttgcagtgaaggtgctgagcacggcattcccgacggaagaattcatttatattccgggtaatcatcaagattggtcgccagaagcggctcaggctttgcgtacaagtgattttgacggagtttataaaggtttcagctacttgaatggtgattttaaatttacgaaacagcgtgcatgggaacctggtgaatataacagtagtcacttctctacttacgagggtgggcttgcaccgagtaccgatggtagtaatatcaatatgccgacggctggtttctattacatagtcgctgatgttatgaatgctaagcttaccgcaacggctaccacttggggcattattggtgatgctactgctgatggttggaattcagatcagaatatgacatggaattctgataagaagtgttggacggctactcttacgttgaccgacggaactatgaaattccgtgctaatggtggatgggatattaatgttggtggaaagattgatgatctttctttcggaggagataacatgacagttcaagctggtacttatgatattgaattgtatttggaacgtacagcttctgatgctatgtactgtacaatgacaaagaaataagataggttgattttataaaaataaaggctgtctgggggaattattctgcaggcagctttttttaatattctaaagtatttgtagtaacttgtacatcagtaatggctaaatatgtaatacaatgaaaatgaaatttctttttatagcatttgctctactgctatgtcaatgtggtatggcacagcaaactgtttctttaggaaaacttatagagtatcctgactttagctcttcaattgttacctcgcgtgacgtctttgtttggttaccttctgattattctccaaaagagaaatatgatgttctttatatgcatgatggtcaaatgctgtttgatgcgaataccacttggaataaacaagaatggggaatcgatgaagttgttggaaaacttttgaatgaaaagaagattaggtcttgtattgttgtaggagtggcaaatatcccggaaacgagatatgcagactactttcctcaaaaagcattgaaaaatttaccagatagtgtagtttcggggaatgttagttttaatgcagataactatcttcgttttctggtagaagaagttaagccttttattgataaagaatattctacgaataagagtgttgagcatacttttgtgatgggctccagtatgggtggcctaatttcactatatgcactttgtgaatacccggaagtatttggaggggctgcatgtatgtcgactcatgttcccatgatattaagcaaggaactatctaaagaaaaagcggaccaatggtcgagagcttttaggaattatcttgatgagaaccttccgacggctaacagtcgtataatttatatggatagaggagatgctaccttagatgcttattatcctccttatcaggatgaactggacaaattgatgaggaagaaaggctggaaaggaccaatgtgggtgtctaaagtatttccgggagctgcgcatacggaagtggattggaataagcgtttagataatccgttattatttcttttaggaactgatagaaaagattgtatttgtgataaaaagaatacagatatgtcgcctgatgattatttgatttctaagtttaaagatgctgatatcgtgctattggctgaagatcatggtgttaaggaaaacttggacttcgttaaaaaaatgataccgaagttgtatgcgaatggtatctatatgttaggtatggaatttggagcatatgaggatcagaagcaattggattcattgataaatgcaccaagatataatgagaatttagctcgtcaactgatgttcaattataatacccgttgggctatagttgagtatatgaatctctataaagcagcttgggaatggaatcactcattaccggagcaagcgaaaaagtttcgtgttttaaatattagttatcgctacaattgggaaaagtttgaaggagctagaactccggaaaatatgaagcaagtgtttcctttagggaatacagaagattttcggtgtacattgttggaacgtgaagtgttgtctgttcacgcgaaaatattggttctgactgggactattcatgcatttacgtcctaccgttttccttattatgattatacttctcctggttttgtacgttatgagaatcgttttttaggaaatctgctgtacgataaatatggtaataaagtagtatctgtagctttgcaccagcctttctttaattatcctaatcagcaaccaacattaatttctccagcggctggaaagttagaactaataatggaaaaatctcagaataaccccattggctttgatttgaaaggttctcatattggtgaactgcacgattatagttattattcaatggggcataaagattttattctatccgatttgttcgatggatatatattccttaaaccaataagagaattatcctcttgtactgttgactataagtttatggatgatactaattggaatgaagctgtgagtaatagccctgatcctgattggcaaccacgtccacatgataaggaagaatattggagggtagtggagaactttatgaatattgaaaaaagatatgcggatgttcaatgaggtgaaagtattgagctttttttatctcatatggatagtaaataaaaataaatgctgtattgttgctgtaaaaaggtatggtaattgtccactaaaaagttctgtatttgatttaatctattgatctgtattgctttatcttgttgcttttttgtccacatctttttctttgttatattatacaaatgtgttatttttgttagtgaacaaaaatataatactatgaaaacaaaagctttattgaagagttttgcattatgtcttattgcaatcttcacaattagtgctcatgctcaaattagcaccaatgaattacctccaagtttttcatctgctttattctctgtccgttcgggtgatgtgattaatttgcctattcctgatgtagctgaagcattacatgaggatagtttgtttgcggatatgaaagatataccttatagaataggcttacctattactgtaaattatactttagagaattcagggaattggcatgtattaggtgatagtgtaagagtatggcgtttgcggttgcatgttgataaagcaaaggctttatcattgaactatgatagattctggcttccagaaaaggctaaatttttcgtatatagtgcagataaaactttctgtataggaggctttactgatttaaataataaaggggcaaaaaaaaatccagctaattttgctacaggacttgttgccggaagtgatataatattggaatactatgaaccgataaatgctattaggggcattatctcaatagataaggttatttatgcttataaagatatcctaacttattcgggaaatactagaactctgggatttggagatgctttgtcatgtaatgtgaatgtaaattgtccagaaggcgatggatggcagaaagaaaaaagggctgttgcatgtatatattatgatggatatttgtgtactggggcactgattaataacacctctggagaagactattttttgacagctaatcattgtttttcaaactatgatgctcaaggtaacagccaaataaatcaaatgatttttttattggaattatgagagtaaagattgctctaatggaacaaattttaatcctccaacctcaagtggagctaaattggttgctaataatgaatattcagattttgcattgcttaaattagtagaatcagttcgtaatatacctgcatatattccatactatttaggatggactaggagttcttctcttcccactaaaaggactgtaattcatcatcctcggggtgatataaagaaaatagctattgataataatactttaggaaaggctattaataatactcattggaaagctacatatgatgttggaacgacggaaagaggctcatctggagctccactgcttaatcaaaataagttagttgttggtcaattgcatagtggaggtattggctgtaatatatcagataattatggtcgttttgatgtatcgtgggattatggaagtgtagcgacgagaagattaaaagattggttagatgcgaataatacaggtatgatgcagttagaagcaagagaattgatgccagaaatagtgggaactaaatttatttgtgatagtagtacttattatataaagaatttgccagctaacgcaatggtggtatgggaatatccaactgaagcaaatagtgcaccacgaccacagttttatactaattatccagtacctaatcaatgcaccataaaaaataaatattattatccttacaatgcaaatttagtagctaagatagtctataatggaaatactttattgactttatcaaaagaagttatatctgatacaaaatcctatccttatgcaacctatatacaagaggcttgtcctttttatggggttaatcatccgagcataagcggcagagtagagaactctacatttgtacatcaaggttgtatggtccgtgtaacttttaacagtgactatgataaagatatctattatgactcttcaggtggaattactcataaacctttattttggaactatcatcggccaacaaagactttagaatttcaattaccatatcgttctggtggtttaccttttgcttttatacttgatggtgaaggtgtatgtaaaaagaaacgaataatattcttttcctatactggtaacggaaatgcaccagcttctgcttattcattgaaagtgctttcttcttcagagaatattaaagaaatacggttagttactgatgatgtgataaatgcgaggaatggtctgaactggaatttggaagtatacaatgtagcttatgggacaaaagttttagaagttaaaggtatgacagatttatcttatacgatggatacttcaggatggacttctggtatgtatgtaactcgtgtcattatcggagatgaaattttgactgagaaaataacagtaggaaagtagacttaaaaatacaataaatgcattctatagcaagaatgtgtgctatgagaatggcatttttttgcttatagaatgcagtattgttgctttgagagcatttactatataagtagaaacctaaaaatatattacttatgaaaaacttattattttttgcctctttattttttgcaattttatgtaccgggtgtagtagcgataaagataacagtgatgccgaggattgttctgaggctatttgtactgacgagttttgcagtattggagttaaaataaaatacgaagatgatacatctgtcgtattggatagttatgaagttatagaagttgctacaggaaaagtgcgggatgttcttaactgggggaaagaatttaacacatataccatcgcttcagatcttgatagagaagattttgcaggaaaagagattgagttgcagtttgttggtaaaataggagaaaaaatagtagttactaaaaactatgttgtttcagcaaactgttgccatacttatttgctaaagggtgatgaggagattgtactaaaggagaggataccttagtagggcggtcaaccacttagtagtaatcgagtcattactactaagtttaaagcctgtttaaaaactcctttttaaccgaacttgttgaggtgttatcaccagagcattatttccgtggacaggcttttgttgtgctggatagcccctctcattttaccatatctccattaccaatcttttctcaattaggagagaaaagatttggactagttctaaatttttgcaaaagtctgctattttaaatctccccttttaccaaagagcaactcgccccaaagatcctaaatctaaactggcggtatttactcccatagctttgaaagctcttacaatagtggagaatgatatactttttccactttcaatcttcgatatttgtgctcttttaactcccatcagttcacccagttgctcctgagtaagattccttgcctccctggcttgtttaatggcttcaccaatgagaaaggcattcaagtcagcttcgtatttatcacgtttcggagtgccttttacacctataaattcatcctctatttcttcaagggtatagaaatctttttctttcataatcacttatctttagcgttaaaatatctggttcttatctcttcagctttcgctatttctttgggtggagttttctgcgttttcttgataaaaccatgggtggctatgaccaatgtatccgtgccgttcactttatcccaaaaggctaatagtctatattgtatgcctccgtattgggttcggaactcccaaatatccgtgtcatccagtttcttgaatagcacaggatctattacagatgttgctttacgaatattataggttattttgtcgcttattttagaactcaacccttttaaaaatagacgagcctctttagacagcactactttaaatcttgcattttcttccatggttttatgtttatcgatgcaaaattacaaagaagtttcctttttaagaaacaaaatctgatatattcttgctttgtattcacaacaggagtgtatgctctgattcatgcaaccgtttgcgttacttcttcttcctcttctgtttcaagcacttgataatccggaataactactgtacttttgaaccattaactataaattgataccgaatgaaaagactctacgctttttttatttgcttgttagctattttagctatgcaggcgcaaatagtaactactactccggattttccaacggagaatgatgaagtcaccattgtttttgatgcaacgaaaggtacggctgggttgaaaggttttaccggtgatgtatatgcacatacgggagtgataactgacaaaagcactaagcctgaagactggaaatatacggtagctgattggggaattaatcttcccaaagctaaaatgactcgattgggaaatgataagtgggagttaaaaataaccccaaccttaagagaatattacgcagttccatcaggtgaaactatcaaacagatgtgttttgtatttcgaagctcagatggcttgaaaacgggaaaagagacagggagcaaagatatctttgttgatgtacacactgccggtttaaccgttcgttttgatcaacctgccgagaaagaaaatttgattaccaacactgctcttacaattcaagcttccgcttctgttgcctctgctttgaaactctatgtagatgctactgaaatagccatggaagctaatgctactacaatttctaaatctcacacgttctcaactgccggcagatatacgttgaaagcagaagctacagccaatggtaaaactgtttctgctacacaagaagtaacagtactgaatgggacaagcacctcggagaaaatgccccaaggagtgcgtcccggtattaactatattagtgatacagaagcaactttagtattgcaggctcccaaaaaggagtatgtatatgtagtgggggactttaatgattggactcctaaatcggattatcagttgaaacaagatggtgaatatttctggataactctttccgggttgacaaaaggtgaagaatatgctttccagtatttagtagatggttctatttatattgcagatccttatactgataaagtactggacccatggaatgattcgtatattgaaagtacgacatatccgaacttgaaaccttatccgaccggaaaggcagaaggcattgtttcggttctacagactggtcagactgcatataattggaaagtgaagaacttcgaacgtccggcttctgagcaattggttatttatgaaatgttgattcgtgattttactgaagaacatacattcaatgctgcaaaagaaaaactggagtacttgaagaatctgggggtaaacgcaatagaactaatgcctgttaatgaatttgaaggaaacacgagctggggatataatccttcattctattttgccgtagataagtattatggtacaaagaatgatttaagagcttttgtggatgaatgtcacagtcaagggatggctgttattattgatcttgtgctgaatcatagctttggtcagtctcctttctatcttctgtataaggatgcagatgggaagccctctgctgataatccgtggtataatcaagaatcaaatatcaaaaatacgagcctttcatggggatatgattttaatcatgagagtgagtatactcgtgctctggtggatagtgtagctggtttttggatgtcggaatataaaattgatggtttccgttatgactttacaaagggcttttctaatactccttatggggagaatgactgggcaaatggaccggataatgcacgtattgctaatttgaagcgtatgtcggctgccgtacaaaagcggcaaccgggtgcttatgttatttttgaacatttggcagctactagtgaagaaaggcagttaggagatgcgggtatcttgttatggtgtaataaaaatgaagcatattgtgaaacagctatgggatggagtggttcaaaaaccgatttttctggtttatatgcggggacaagtatgcctgccggtagtttagtgggatatatggaaagtcatgatgaagaacgtacagggtttaaagcctggaaatggggaaatacaggagtaatagcatcaactacgagtacaaatgccggaatgagccctgcaacaggaagtaatattaatctctctacccgtaccaaacgtttagccaccaatgcggccttcttccttaccgtacccggaccaaagatgatctggcaatttggtgagttaggatatgatttctctataaacaacaatagcgacggttctggatatgatgatcaaggtggttttcgtaccgaccccaagccgatacgttgggactactttgaagatgctgatcgaaagaaattgtatgagacgtatgctgctcttttagatttacgtcattcctatcctgaattgtttgcttcaaatactatatttagctggaaagtaggtactgctaactgggataatggacgtactttgtcggctacttccattgacggcaagtctcttgtagttgttggcaactttacgttggcagataagaacttttctgtaactttccaggaaactggtacatggtatgagttactgaaagacaatgagcctttgagtgtatcaagtactacacagactattgctgttcctgcccatgaattccgtctctttactaactttaaaccgactctgacaggtatcgagactactgctcctgatgccgaaaagcctttaatatattacaatagaggtatggatactttggtgctgcctgccggagaagctaaacgcgtagaagtatattctgtgaatggaatgttggtgatgacacaggaaaaatgtacttctgtcggtttgtctgctttgcccgttggttattatatggcacgggcttatatggaagatggcagagtacaggtttgcaaaataatgaaatagattagttacgataaaataggttagttgctgtaaatatgatcaacaacaaagtgaatttatgcttttcgaagaaagctgcgggtatattactcgcagctacttcttttttagtgatggcttgtagtgaaaatgtaaaagaattgtctacgctaagtacaaacgaattaggcattaccatacctgacggacagtcacgtgaatattcttatacagacaaaaacggaggtttctattatggaatgacctctacggatgattggggagattggtatgcaggctggaatatttatgccaaacgtatctttgccgattaccgtttgtatgtggatggagaaagattgcttcgggaaaatgcccgcacatcggtatatcctgacaaattagttcgccgatatgaaaaggctgtggaaacattctgtctggtggatgaaccgaagttgttgtatgttcgtatggatagtgtacaagggaagcagatctcattcatgttgatgggggaaaatgtggtggatgcacggaaggatggaaattctgtactctatacaacgaaagagtcaccggaaaatgcaatacgtatagcacccgtagcggagacaggaattgagtttgcagataatctgataactgttccggtagctgcaggtggtttcctgattgcttttggtacggaagaagatagccggcaagcaatagatggtttccgtaaagaaggagagaagtggttggctgcacgtagtcagcgtattcaatccttactgaaccataatcctttaaagaccaatctggattctttggatcatgcccttgcctggattatgcttaccaatgatcagttgatcactcatcagcacggtggttatggtatgtatgccggtttaccctggttcacagacttctgggggcgggatatgtttatttctatgccgggtgcagtgctttgtacagggcagtttgatacggcacgtgatattcttgcgtcatttgcacgttatcaggataccatttccacatctcctacttacggacgtgtacctaatcgtttgaatctggaaggtattctttataataccactgacggaacccctcgtttcgttatgcaggtacacgattatctgaaatatacgggtgacaccgccttcgtgaaagaaatttatccttcagtgaagattgctacagatgcttctcttcgcctgtatacggacgaaaaagggtatcttacccatgcggatgcggacacttggatggatgccaaacgtcaaagcaagtatccctgttcaccacgtggcaatcgtgctgtggatgtgcaggcattgtggtatacccaattgacgaatgcctcggatcttgcccgctacatgaaccgtgaagaagatgctcagcgttggaatcttgccgcggagcgtctccgctcaaattttgaacaggattttgtagacacagcctcccagtcaatctatgatcatctgaatacagatggaagtggggatgcgcaattccgtcccaatgctatctatgcgttggatctggtttctgatcctgacttgaagatgcatgagacaaaagaagtttgggaacgtctggtatatccgtggggagtgtcttcactcgatcagtccgacgaacagttccatccttatcatgagcaatggtatcgttatcataaagatgatgcttatcataatggcacgatatggctttggaataatggtatggccatgcagcggatgatagaaaacggacaagctgacatcgcgtatactttgttcaggaacatgaatcgccaggcacttgcggaaggtgctgtcggcagtttatcagagaatgcggatgcatggccacgtgccgggcagacatgggtgcgtcgaagtggaactttcctgcaggcgtggagtaatagcgagcatatccgcgtgtggaatcaatacttcctgggaattcgtcctgatatgctcaatcattccataaccattgatccgcagcttccttctgaattgaaggtagtggatagtcgggtaaatataggagatggtacattacgtatgattattgctaaaaatgatgcgagcggaacttaccgctatgaatggaccggtacacccgtaactctcaaactggatatcgattcttatcagacattggatattccggtttcaacagatcactcggtaagtatcaggacagagggagcacgtatgacagtggatgtctctgatgcctccggtaagaagacagccaattacgtagcagaacgggatgcgctcaagcaggaacagaagaaacaacaagatgattattttatgaatactcattttacaaagccttcttacagagaaaatatgaagagtatgtcccgttactttgatccgccattgacgtatcagagtgtggaataattctattcgtaaatcttattcagcaatttattcagccactcccagcggaaaagaaaccagcggcgggtactgctttgtttaccgccgaagcgtaagacaaattcgcggtaaccgtgcttgcggaaggggagaccgacatccataaattcaaggtgatggtatccccgctgcttggcatcgaacagagcataccatacggcaagtatacccgggtattgaagggcatacgtcttgcgcataccaccagagaaccaaaggtaagcactgtcttcggaatagatgcaggcactgccgcctattattttatctttgtaagtgacaatgaatattttgctttgttcccctttcatcatttcttcttccatgcgtaggaagaacactctgctggggaaatgacggcgtattttagaagaatagacatggtgcagcatctgggagaatgcatgcacttcctccggagtatgagcttcctttacttctgcaccattttttaatccttttttgatttgccggatgcgcgagggactgaagcggctttctacatgctcaatgctatgtagtgaattacgtacccgtagccagtttatggcgaagtaatggtttttgcggaaagatttataaccgaacagggagttttccaggttacggaattcaataaggaatgcctcccgtaacgcttcagccgttaaccgttgcaacatctcaccaaagacaaattctttgtcgatagtttcatcaaaatactctcctgttccataaacctcacatcgcttgataatggcgggcgggaacagacgggcactctttcgtactgctgccaatagcttggcaacaggcttttcggcttctgatgcaacaatgagaaggggcgtataacccggggttgcttcgtagatatgaaacaactcgatggagtgaaatgtattattgcccggcagttccgggatgtcactcccgtggtaatatgtcgtcagtttcaaaggcattgactgcaaatttagaaaataatcttgtatctttgcgttcctaaatggttatttagcgcaatgcgctaaataagttactaataaaatatgatatatggaaaatttcagtgaattgctaaaagtgcgccgcagtatgcggaaatttacggatgaagagttgacgcaggaagaggtggttactctgatgaaggctgcgctgatgtcacccacttccaagcggacaaatgcatggcagtttattatggtagacgataaggagttgcttgaaaaactatcacattgcaaggcgcaagcgtcgcaatttattgctgatgcaccgttggcaattgtagtaacggctgatccgttagtgagtgatgtgtggattgaagatgcttccattgcttcgattattatacaattacaggcagaagatatgggcttaggcagttgctgggtgcaggtgcgcgaacgtttcaccgcttccggtatgccgtccgatgaatatgtgcgcgaagtgctcgatattcctttacaattgcaagtgctcagtgtcgttgctatcggacacaaaggcatggaacgtaagcctttcagtgaagaacatctgcaatgggaaaaagttcatatcaataaatacggaggaaagtaacggtgggtgcagcaaaagcaaacaataaccgcgatacttacagggccacagcggttacgttgattgttttcggtatactttatctggtggacaaattgatacatttctcaagtattggtctgccgtgggtgatgaataaggataattttctgctttatacggcggtgatatttctcatcttcaagcgtgataaatcggtgggactggtgttgattggtctgtggctgatactgaatttcggattgataacggcattgctcggcacgatgtctgcctatctgctgcctgtgactttgctggttctcggaattattctatattggctggctacaagatgaaaaggagtgtacaagatacgccggtagtctttatcggtgccggaaacctcgcaacgaatctggccaaggctttatatcaaaatggttttcgtatagtacaggtctacagccgtacaaaagaggctgcatgtgccttggctcaagcgatagaggcggaatatacgactgaactttcggaagtatccagggatgcccggctctatattgtctctttgaaggatgctgctttcgtggaattattacccgagattgttgccgggaaggaagatgctttgctggtacatacagccgggagcattccgatgagcatttgggaaggaaaaacttcgcgttacggtgtgttttatcctatgcagactttcagcaaacagcgcgaggtggatttccgtacgattcctttcttcatagagagcaattcatccgaagatacggaattgttgaaggcaattgcttctgtcctttcggaaaaggtgtatgaagctacctctgagcagcgtagaagcctgcatctgacagctgtgttcacttgtaattttacgaatcacatgtatgctctggcggctgaattattgaagaaatataatcttccattcgatgcgatgctacccctaattgatgaaacagcccgtaaagtgcatgaactggaaccgaagcaggctcagacaggtccggctgtacgttatgatgaaaatgtaatcaataagcatctggagatgcttgctgatgaaccggagatgcaggaattgtatcagcttgtgagcgagaatatacatcgtttgcataacaagtaatgtttcgatgcataacaagcaatgttttggtacataacaagcatagttttatcctaaaacaagcattgttttttttgaaaggtaacctaatttaaaaaccgaatatagtgagtactatcaattacgatctgaaaaagataaaagcacttgtatttgatgttgatggcgttttgagtgctaacgtcataccgatgagttcggatggagaaccgatgcgtaccgtgaacattaaagatggttacgctttgcaccttgcctgcaaacagggtttgttactgggaatcattaccggtggacgctccgaagctgttcgcaaacgctttatggccttgggaattccttctgaggatatttacatggcttcttccgtaaaaatccatgattatcatgattttcgtgaccgccatggcttgaaaaacgaagagattctttatgtaggtgatgacattccggatattgaagtaatgcgtgagtgcggattaccttgttgtcctaaagacgcatcagcagaagtgaagaccgtttcccgctacatttcctatgccaatggtggctatggctgtggtcgggacgttgtagaacaagtattgaaagttcagggactttggatggatgataaagcctttggttggtgatctcctcttatacttaatgcttaaaaattaatactttaaatcgttatgttggacaatttagagaaatataaggtgattcttgcctcgggatctccccgcaggagagaattgatggcaggtttgggcgtgaattatgaagtgcggattcttccggatgtggatgaatcttatccggatactttgcagggggaggaaataccgctctacattgctaaggaaaaagcggatgcctacatacctatgatgcaaccagatgaactgataattacggcggatacgattgtatggctggatggtaaggttcttggcaaaccccgggatagggaagatgctttgcagatgttgcggactatgtcggggcgtacccatgaagttttcaccggtgtatgcataaccactaccgattggcagcgaagttttacagcacagactgaagtacgtttcgccacattgagcgaagatgaaattatatattacgtagataacttcaaaccgatggataaagccggagcctatggagtacaggagtggatcggttttattggggtggagaatatctcgggaagttactataatatcatggggcttcctgtgcaaaaactatacagggaattactgaaggtatagtttaatactctttctcgtttgccagattccaggcattcagaaaagatgctctggttatctccacaatcttttcccaattcaatctgtcggcatgatcggagggctggtggtagtccggatgtccatccgtatgataccagataataggaactcccgctttggcaaaggaaccgttatcactaccgcctatggggttatcccatggacgatagtcgggctccaaccggagattgtatttctttatatcttctttgagccactttccaaaagccgcgttggcttctgtatagaaataaaccacgtgcatcggttgctgcggtttattgttacggcctatcatatcgaaattcagataacccttgacttgtgaaatgaacgggcaggtttgtacaaagaattttgaacccagcaatcctttttcttcgccatcccagaaagcaaaaataatatttctttccggtttttttccgctggcaatgaatgctttggctatttgtaggacagctgatactccggaagcattgtcatcggcaccgttataaatctgatcaccatccagagccggatctattcctaaatgatcgaagtgtgcgccgacaattgcatactcattgacatttttaccgggaattattcccaggacattagtcattgggagtttctgatgaacttctttgctgaataaagcaatcgaatcggggtgtacttccaaccgtccttttttctgccgttctctccggtaggcttcaaaaggttgaaaataattgtctcctaatggctgtacttccattgcctgaagcaatgaagcaatatattgcgccgctaccttggaaccgtggtatccggcttcccgaccctgtaattcatcgtgtgccagaaaaccgatatacgcttcggcggatgcccggtttatgctttccagtcctttttccacgggagtctgtgctgctgccaaatagctgaaacaacagagtatagccagaatgcagtatttcttcatcagatatttatttatgcctttattcaatcatatccagcattaatggaatttcctcggctgcgataccttgcttgagcaggctgttccggtctctgtcgaatatttccaggaatgcgtccttgctaccactttctgccatagctttaccatagagtccggcagctttttctatatttcccaatacccatgccacgtgtccggcattgagataatctgttgcaagaggtttggaggcgagaagtttgtcataatacttcatagcctgttcatgcttaccactgacaaatgagcaccagccgataccgcgccatgctttcatgcagttgttttccagaaagtccagtttgaagaagtattgtagtgcatcttcgtatcttttctgttctgccaggcaacttgcggtatagaataacacattgtggttttctggttgaattgtttccacgcggtggtagtattccagagcggcatcgaaattcttcatctgacggtaacaggtagccagatggcggagcgtccacaaatgatcaggtttcagcatatcggctttcagataagcatccacagcttcctgatagcgtttctccttttgcaggcagaagcctgttttctggaaaatatccgcattggcctgtttccggtctatcaatatccggtagagctccaatgcttcggcagggtgctctttgcggaaatggaaatcggcaacagccaccaatagttcgggagcactcagcaattctttcagcacaggattacggtgcaaagcaatctcttcctggaagatgttgtggaactcatttctacgttggctgagtttgaagaaacgatataaatcgtgaatatactggttgctgataacgtcaggccgttctgcgtattgcttcagactggcgctattcttctcttccataaagtcactttggtcctggggcgtcatctggcttaacatcatatcccgctgtccttgcggaagttgggcaatggtgaaacagaatgaatacttatcactgttgcagaagaatccggattgcagaataatagagagtacagaactttcacttgtctggttcaagccgacctggtggataatactggagtgcatccggtcgaaaggatagaaccagttgtgtggttcgcggaagaaaggatagcctttcagttgtgcgaatgtactcatatagacatcagcgccttccaactgtaaatcgttcatttctcgtattttgtctcccagtcctgattgctcgaaagcctgttcccagtccggattacggtcgttttcatcagtttcttcaaaaccgaatttcatgttgcgcatgatattcacgttcctcatcatttcgggaatgatttcttcccgcatcttcttgtcaattttctcggtttcctggctgcgaagcagttggatgtaaacacggttcacctgtttactgaagtccggatcttctctgaaaagagaaatgcgtgcttccagttccgggtagagtgtaatgcgagtggggtagagatgcagggtgatgacaagtcctaccaaagccctttggttgatttgcggatgggtatggcggagtccgtcgagcagccaattgattttacgttcgtcgaaacactccattaaactaagtgtgacagcactgacaaacagacataaatcattgattggtaatgtttccgagcggagcatatcttctgcctgggcaaattcttccaaagtccagttattgttgctccaagtggtaagaaacataacctggtgtgtttcttcatgccgttttaagatagcgtccaagccttgatagtttgccaactgcgatacggccatttcgtccgagaatccttccagtatcctctgttgggcagagaggtcataagccttcggtaactggttgggatttctgcgcaaagaatgatagtagtgggtagatatctcatccagcaataggatgcgcgtctgatcggcaatttcccaggtatcggctaatagttgacgatacaatttatgccgttccggatctttcattcccagcttcatgtattgcagcatatactgataggaagtctggatttgttccaggcggttacgcaaagtccagtcattactattatataagaaagcatccagctgaacgagagcttctttcagccgtttatcttccagtaaactgactatctgattatattgtttttggatggattgttcattcatattcagtcctttctttaatactttagtataaggtacaaaaatgatgccaaaaaagttcgggttcttagaaaatactgactgcagttttggttgtcagtaattccagagctttcatgcccattacggagttgcctttggaattgagtcgcggactccatacagctactgcatacttgcgtgggcatacagcagcgataccaccaccgaccccacttttcccgggtaatcctaccagataagaaaactcgccggcttcatcatagaaaccgcatgtttgcataatggcattgatacgcttcacctgcgaagtcgtcagttcggttccatcaaaactgaacggtcttgtgtgatcggcaaaggggaggaaagaatgtgccagttcccggcaattcatacctatggaacattgacggaagtagaagcgaagtacccgctcgatgtcgttttctatattgccgtgatatttcagcatattggtgatggcggcattcagatatccatactcccgttcggaagcagccatgctttcattatattgaatcgtgtcattgccgcagagtttccgcacaaaagagagatattccctttccggatattcaagtactgagagcaagacgtctgccattaccaatgcccctgcattgatgagtggattgcgggggattcctttctccatttccagctgaaagatggagttgaatgcattgccggatggttctacgcctatgcgtttccaaagttcgttacctatccggccaaagctcatggcaagagaaaatacttttgaaatactctgcacggcgaaacgttcatcactgtctccctgggcatattccttgccttcgatggtgcgcagacagatgccataacgatcaggattgactttcagcagttcagggatataacttgccggtttgccttcctgtgcatacggctgtatttcttcgtatatttctttcagaattcggctgtattccatagcatgtaaggtttttctttagaagcgcacttgcaactgtgcttgtaataaattactgttttctccgatatggcggttgcagtacgtatattgtgcctgtactctgcacttaggataaaaccagtattgcagtcccactacgtaattggtttgcttgtcatccagcactttgcttttgttaaaatagtcataagatgcaatgacatccactttggggaatacatgtgcagatgccgttacgtagtagccgtcgcttttcacgtgtccatcttttccggccaggtattctgtgcgtacatcaaccggtttggtcttaatcactgcacctgccgaccaacggttacgcgtatagttttcacctacctgtatatccggattaagagtggaagtggctactgcgcatccctttcctttaacaaaagaaccacctacggatagccagtcgagcggatgaaccatcagactgcctacaatatctttctggttgttcttgtctttcagattgatgccttgtccattcatcaatgcaagattataatttaccagtttgccgaacaggtctccataaatcaggagacccatatcgcgtccgctgctggaaccatataacggatcgctgccgttgataccggccagataattgacagactgcgcgtagcaattgatcaactctacatagcagggagacattgggttttcaatggtatacatcgttttgaattgtccgatgcgggcggtcagttgggggaggaatttgtattcggtgtatgcttcaagtattttcccggtattggcaaagctgtacatgaagtaacatagccagcggtcagtgattttaccttgtgccatgaagataacccgcttgatgtcgaaggtattactgccatcgtcggcatcatcatacgtatatcctacctgtgcataaccggcaaggctgatacggtctttcagagtgtttactacgtcgtttaaacaagcatcttgtgccgttgctatcaggacagagaacaagaaagcgaaggataacagtattcgtttcattattttttatagatgtgaagatataagattaaaaaaggcaacccttcttttcaaagagctgcctttgggtatgataatgtctgtttttattcgttgatagcagcgatacccggaagaacttttccttcgattgcttcgagcaatgcaccaccaccggttgaaacgtaagaaacaccgcttgccaaaccgaacttgtttacgcaagctacggaatcaccaccacctacaagtgagaaagcaccgttcttggtagcctctacgatagcttcacctacggcacgtgagccatgagtaaagttctcgaattcgaatacaccagtcggaccgttccacaagatagtcttggagtttttaataacgtctgtgaagattttctctgtttcaggaccgatatccaaaccttcccaaccatcaggaatttggtcaaccggacagaacttagtgttggcgtcgttagagaaagcgtcagcgatcttagcgtcaacagccaataccaggtttacacctttttctttagcttttgctaccaggtcaagagccagatccagtttgtcatcttcgcaaatggaaataccgatctttccacccatagccttagtgaaagtataagtcataccaccggcgatgatcaggttatcaaccttactcagcaggttttcgatgatttcgattttagaagaaaccttagaaccacccatgatagcagtgaacggacgtttgatgtcattcaatactttatcaacagctttcacttctttctccatcaagtaaccgaacatcttgttgtctttgtcgaaatatttagcgatcaaagccgtagaagcgtgtgcacggtgagctgtaccgaaagcgtcgtttacgtagcagtcagcataagaagccaatttcttggtgaattctttctggctttcttttacggctttcttggcggcagctttttcttcgtctgtcgcatcttctgccaaaccgcggggtttgccttcctcttcagcatagaaacgaagattctcaagcaacagcacttcacccggttgcagagcagcagcttttacagcagcttcttcgcccatacagtcgttagcgaattgcacctcaacacccaacaattctgacagatgtttcaggatatgtttcaaagagaacttgtcagccggacctttcggacgaccgaggtgagaaccaataattatactgccaccgtcagccaaaattttcttcagcgtaggaagagcagcacgcatacggttatcatctgtaatgttgaagttttcgtccaagggtacattgaagtccacacgaacgaatgcctttttaccggcaaagttgaattgatcaattgtcataatactctattttatttaaaagtgttattaatttgttttcgtgagcgcaaagttagcatttatttctttcttttgctatgaaaccgtcatttattctttatcttccggcttctctttgctaactttatacttctcgcaataatatttgcacatcaattgcaaaccgcagttgtcacattgtggtgtacgtgcctggcagacgtatcgtccgtgcaaaataagccagtgatgagcaatgggaatgtcggcttccggaatgtttttcaccagttctttttctacactgaacggggtggtgcattggtccgaaactagtccgaggcgatggcttacacggaacacatgagtgtctactgccattgccgctttgttgaatacaacggattggatgacgtttgccgtcttacgtcctacaccgggaagttttatgagttcttccagtgtgccgggcacttcgctgttgaagtctttcaccaacatttgtgccatgcctaccagatgttttgccttgttattggggtaagacacgctacggatatattcatatatcacttccggagtactggcagcgagaacttccggagtcgggaagtcgcgatacagtggcggaacaatcatattcacccgtttatccgtacattgggcggagaggatgaccgctatcagcagttgaaacggagtctcatagtgtagttccgtttcggctacgggacgattttcccgaaaccaggcaaggactttttcataacgttctttctttctcatcgcaatttatttttatggtaattgggagctactttgccattgaagtagagcatggaaacaatggtaaggcaggctccgaataaataggctttatcaaaggtgctgacttctgcaatatagcctcctgtcaacataccgataccgatgcctacatcccaggaggtcaggtaggtggaagtggcggtaccacgttggctgttgggggcgaggttgacaaataaagtgttgtaagcggggaacataatgccgaaccccactcccagcaacaaggccacggaaaagaaaacaatcgtgcataccatgttgttccagctgataagatatacacaggccgaaagcaggaaaaaactgaacaccacgagatacagtccagcggaaataacctgcgttatcttacctctgtccacaatctttccggagaatatacgtgaaatagccattcctattgccatgaaagtgaagaagaaacctgtggtggcattaatcccaatttgtttggcatacatagccacatagttggtcgtcattccataaggaatggaaagcaacaagaggctgatacctgctggaatacctttcagcaatatgaatcggtcgagagatatcggttcccgtctcacaggtggtttataaggagtctttacaagagaagcgcaaacgaacccagccatacaggaccctagtgaacagcagaatatggtagtaaaactcattcccgcatcatgcagaaataatccagacatcggacccactgccattgcaatgttgtttgaaagcccataatatcccaatccttctccgcgtcgtgaagatggcatgatgtcaatcaccactgtgttaccacctacggttaccattccgaacgatactccctgtatgatacggaacatgataaacagtgtaagcgagcctgcaataatgtatccggcaaacatcgtcataaagatgaagtaagccatcaaatataaaggtttacgtgcaaaactgtccagaaaataaccggagaaggggcggatacacaatgcagctactgtgtagcaggaaagaatgataccgattgtggaattgccggcactgaatacttcggacaggtaaaagggaagtaccggtatcagcaaccagaatccgaaatacagcaggaagttggctgcgagaataaaacaataactggaagtaacaagtttatctttcattcttattaaattgagagttgagaattgagaatcgagagttgcctgtggcatgatagcgcagcccaactctcaactcttaattctcaactctccacttattttagtaagcggcttcgaattccttcaggaatcttgtgtcgttttcagagaacatacgaaggtctttcacctgatatttcaggttagtaatacgctcgatacccataccgagggcgtatccgctgtataccttactgtcgatgccgttactttccaatacgttggggtctaccataccgcaacccaggatttctacccagccggtatgcttgcagaacggacagccctttccgccacaaatgttacaactgatgtccatttcggcactgggttccgtgaacgggaaataagacggacgcagacggatcttggtatcttcgccgaacatttctttggcaaagagcaataacacctgtttcagatcagtgaaagatacgtctttatctacatacaacgcctctacctgatggaaaaagcagtgtgcacgatagctgatagcttcgttacgatatacgcgtcctgggcaaatgatgcggataggaggttgtgagacttccataacgcgtgtttgtacggatgaagtgtgcgtacgcaatacgatgtcgggatgtgcttcgatgaagaaagtatcctgcatatcgcgtgcggggtgatcttcagcaaaattcaatgcggagaacacgtgccagtcatcctcaatttccggaccttcggcaatactgaaacccagacgtgcaaatatatcgatgatttcgttttttacgatggtgagcgggtggcgtgtacccagttctaccggataagcggaacgagtgaggtcaatatcgtcacaacccgtatcctggctttcgaactgttctttcagggcgttaatcttttcctgcgccttgtttttcagttcattcagtctcatgccgacttctttcttctgttcggcagccacgttgcggaagtctgccatcaagtcattgatagcgccttttttactgaggaatttgatgcggagtgcttccagttcctcagcgttggcagctttcagtgcttccacttcttgcagaagctggttgattttatctatcatatcgtcgttattatttatttccgaaatacataaaacggtgcaaagatacaactttatcatgatttcgctcccaatctctttataaaattaatcggtcgcggggaaaaagtctgtggctggttaggtgtaaatcttcgtagcatctctatgcgatctccgtatcgtatagattgtggataatcattatccttgtcagctatgcactgtcctccttatctttgtgagaggttaattagcttcttctttgttctttttcagtgccttctgataaagttcttcttgcaaaacaaagaattctgccatgagctcaacaggaacacatgggtcgttttcatcttccgcattgttcatcaattgctcgattcttttagagagggaaaggtaacgctgcatttcagggtcataggggttaagcgtatgcagtataatgtcgcttttccttaaattagtttgtttcatcttttatgattgatttattcggcaaaggtaactgcttttttagtattcttaagtattccggcgtaaataatctttttgctaagcaattttttcgaacagatattaaaaaaatatattaataggtctctctgataacaacttaatagctattcaactatctttattacagaaaatagtggccacaagtgttttcgtattactaacaatatctatatagtgtcagattcttaacggaaggcattatatagtaactaatttgtaaactatggaaaccaaaaaaacacccaaagcaaacttggaaagcaagagacccacgtggttacttgtaggttatgtagtcgtacttgccttcatgttcgtagcgtttgaatggacgcgtgatattaagattgacacgagtggtcgtatcgtcgaaaatgtatttgaacaggacatggagatccctcttacaaggcaacctgaggttgctcccccacctccacctcaagttactcctattaatgatgttttgacaataatagatgatgacgctaatgtagaagaaaccaattttgcctcctcggaagaaaccggtgaggatgttgtagtgaaacacatacctgtcactgtggacgaagatgtaccggtagaagatgagatttttgaagtagtggaagaaaatccgcaatttctcaatggtggtacagtcggtcttttacagtatttgagtaagaatatcaagtatcccaccattccacaagagaatggaacccaggggcgtgtaacagtacagtttgttgtgaacaaggatggtagcatcgtggatgtgaacgtgataagaggcgttgatccttatctggacaaagaagcggttcgcgttatttctaccatgccgaaatggaagcccggaaaacaacgtggcgtacccgtacgctgcaagtttacagtgcctgtgacgtttaagttacaataagataaattttaaaatcattacattgtttgattaaaggtgagatggtttgtttgagtgtggatgcttgaatgaaccatttcactttgcatcaatagttcctacatcctacaccatttattatttttatctgattatcaggtgtatatatgatgtatgaagcggtgtaggaagatgcataaaagcttcatcctacaccataaaacagacaataaagaacgtttttatacttgtaatttactaattcacagattcttaatgtgcattgtacaaactttgcccggattcgtacaaatatcttttttagcctgcaattattcattactggagttaaacaccatcctctcatggtatagaaggctgaattatagatgcaaaatttgatatgcccctttctttttcccctaaagctttcatgttaatgtcattatgctataagtaaaacctcgttttccaattgtgggctgtctgtcccgcaattgcgggctgcatagcctacaattggaaaacgtatagcccgcaactgtaggacgaagttttgctacgggcaaaagaagaaaagtaataaagcaaagcgtggttttcatacgaccttttactcatcttttttattgttcctaagtattctattgtggaatctttttggatttataaaggataggtggggagatagagtaaaaaaa

SEQ ID NO: 6605 - DNA, 34562 bp, Unknown
  gut microbiota DNA sequence
tcacctcgacactgccagtgtcgcgctctagccagatgagctaaccccccttttttgatccttcgctaacgtttgcgaggtttctctctttttggtggcgcaaatataatgcattattctgaaataattgctatgtttgcgaaacaaagtgaaagaaaaaatatgctgatttataatacaacctatcaagtagaagaaggacaggaagataacttcctaatctggatcaaagaattctatttacccgaagtagaaaaggctggtgcattgcatacaccgcgcattgttcgtgtactcagtcaccgtgaagagggcagtacctgttattctcttcagtttgaagtggaaaattccggtattttgcatcgctggcatctggaacagggaacgaagttgaacgaagagctggttaagatattccaggataaagtagtaggctttcctacactgatggaggtgatagagtgatacagcctgttaaggaaaagataattctgggcattgaccccggtacgaccattatgggatatggagttttgcgtgtacagggaacaaaacctgagatgatagctatgggcattattgatctgcgtaaaatgggtgaccattacttgaaattacgtcatatacacgaacgggtgttgagtattatcgagagctatctgcctgatgaacttgccattgaagcaccctttttcgggaagaatgtacagtctatgctgaagttggggcgtgcacaaggtgttgccatggcggccgctctcagccgggatataccgatcacggaatatgctcctttaaaaattaaaatggctatcaccggaaacggtcaggcttccaaggagcaggtagcggatatgttgcaacgcatgttgcattttgcaaaggaggatatgcctacatttatggatgccacggacggtcttgctgccgcttattgtcatttcctgcaaatgggacgccctacaatagagaaaggatatcatggctggaaagatttcatagccaagaatcccgacaaagtaaagcgataatatctcatatctaatacttaatgcttgatactcaataattaatacatgacatttaatacttaaaataacgaccatgaaactgaatgaacttgccttgattggagtggctgctgctacgattgtcagctgttctccggcgaaaaaagagtacgcgtcttatgagctgtatcctgttcgctcgggtgacctgacagagatggagtatactcctgaagttacaaattttactttgtgggcacccactgccgatgaagtgcgtctgatgttgtttgataccggtgacagtggtcatgcttatgaaaccgtttcaatggtggccgataaggaaggaacctggacagcaaaggtggaaaaagacctgattgggaaattctatacattcaatgtaaagattaaggataaatggatgggagatactccgggcatcaacgccaaagccgtaggagtaaatggaaagcgtgccgcaattatagatatgaatgcgactgatcccgaaggttgggtagctgataaacgccctgcgttggcttctccggcagatgcgattatttatgaaatgcatcaccgtgatttttctatcgatccttcttccggtattcagcacaaaggtaaattcctggcattgacagaagaaggtacgttgagtcccgaacaattggcaaccggtattgatcacttgaaagaactgggtgtgacgcacgtacatcttcttccatcttatgactatgcttccgtagacgagaccaggttggatgaaaacaaatacaattggggatatgatcctcagaactacaatgtgcctgatggttcatattctaccgatccttatgatccttctgttcgtattaaagagttcaaacagatggtgcaagcattgcataaagcaggaattcgtatagtgttggacgtggtgtataatcatacattcaatacggctgaaagcaactttgaacgtacagtgccgggatatttttatcgccagatgccggatggtagctttgctgacgcttccgcttgtggcaatgaaacggcaagtaaccgtcctatgatgcggaaatatatgatagaatccgtgttgcattggattaatgaatatcaccttgacggttttcgctttgatctgatgggcattcatgatatagcaacgatgaatgaaattcggaaggcagctacggcagttgacccgagtatcattatttatggtgaaggttgggcggctaaagctccccagatgccggaagactcgttggctatgaaagcgaatacttaccggatgccgggcattgctgcattctctgacgaaatgcgtgacggattgcgtggtccgttcaatgacaatcatcaaggtgcttttcttgccggagttccgggaggagaggagagtatcaagtttggtattgttggtgctatcaagcatccgcaagtggacaatgatttggtgaattatagtaaggcttcctgggctgaacagccgacacaaatggtcagttatgtttcttgccatgatgatatgtgcttggttgacagactgaatgcaagtgttccgggtattacgccacaggagttgataaaattggataaattggctcaaacggctgtatttacttcacaaggcataccgtttatttatgccggtgaagaggtgatgcgtgataagaagggcgtgcataacagttaccaaagtcctgactctataaatgctattgactggaaacgtaaagcagaacatgcagatgttttcgcttattataaaggtttgatacagttacgcaagaatcaccctgctttccgcatgggagatgcggatctggtacgtaagcatttggaattccttcctgtggagggcagtaacttgatagcctaccgtttgaaggaacatgccaacagtgatgtatgggaagatattatagtggcgttgaactcacgtaaagaacctgctaaactgacagttcccgaaggtaagtatacggttgtttgcaaggatggtttcatcagtgaaaaaggattgggtacactttacggatcagaagtgatcgttcctgcacagtctgcgttgattatttataaataagaatagcgtatatataataaaatatcgcccctacgagttgtgttacttgtaggggcgcatctgtattcgcccggatacataaaaattgagagtttgggcattatattatagtttgtgttattctttagcgatatccgttttccaggtaattccgcttatatccattaattcaagtttatatattccagttggtatatcgctagtgtttttttcaatattaatttctgctttagcccctaatggaataacgagactatgttccccgggttttacttttgcaacatatttattacgtatattgctcaccggaaaagaactaatcttcgccagaatgcagaaaaataagtccatccgactaccaggcggagagccagcgaaaacataccggaaaggtcataggtctggcctgacgggcgttctggtgttggttctttctccatagactcctgtattatttattttgattgttcttttttatgatatttggctgcaaaatgttccctaataggccacccatggcagttccccacaatgtgctgtttagtggagatgaggtaattggacaagtatccgtgctacagccgacatacctccaatatagatagccgccaatagccccgactattgcacctacgattgtaggccaatatcttttagcgaatgttttttccatcctttttaatacttttgatacatgtcttttaaagaaacagatttcctagggaaattgtttcccaatatatggattatttttcatattagttgcttaaaaaaggaagaattgattaaactgctctcattttgagcatttaaaaggaaaacttggtatctttgtggcatcactaaacaaaatacgtctgaaataatgcaaccatatactatatgtttgacgggtggtgtggctcgtaatccacttgtgcgattagctgcacctgcttccgcatcttttccggcagatgaacacattgccattgtcggacctaacggttctggaaaaagccttttggtagatatgcttatcggaaaataccctttgaaggaaggaacaataacctatgacttttctccttcaacgttaaagacagtctatgagaatatcaaatatattgcttttcgcgatacgtatgggtcggcggatgccaattactattatcagcagcgctggaacacccatgatcatgatgatgttccgttagtcagggatatgttgggagaagtcagggatgagaaactgaaacaagaactttttgaattattccgtattgaacctatgctggataagccgatgattcttctttccagtggtgagttgcgtaaatttcagttagtgaaagcactacttacagctccccgtgttcttattatggataatcctttcattggactggatgcccagacccgtgaattgttgaatactttgttggcaggactagccaaacgctctgccgtacaacttatcctgatactttctatgatggatgatatcccctcatatattaataaagtgctgccgatagctaatcgtacggtagggcaaatgatgcaacgtgatcaatatcttaccatatttcggaatgcagatatacttgtacccgaagatttacagcagcgtattattgaccttccctatgataataccaattatgtatccgatgaagtggtccgattgaataaagtcagtattcgctatggtgaccgtactattttgaaagaactggactggacagtgatgcgcggacagaagtgggcgttgagtggtgagaatggagcgggaaagtctactctacttagtcttgtgtgtgccgataatcctcaatcatacgcttgcgatatcagtctgttcgggagaaagagagggacgggggagagcatttgggaaataaagaaacatattggttatgtcagccctgaaatgcaccgtgcttatttgaagaatttaccggcgattgaaatagttgcctccggcctgcacgacagtatcggactatacaagcgcccgaaagcggaacagatgtctgtttgtgaatggtggatggatattttcggtattgctgccttaaaggacaaacctttcttgcaattatccagcggtgagcaacgtctggcacttctggcacgtgcttttgtaaaagatccggaattattgatactggatgagcctttgcatggtctggatacatacaatcgtcggcgggtaaagaagataatcgaagcattttgccgccggcaggacaaaaccatgattatggttacccattatgaaagggagttgcctgctactattacagatcgcatagctttaaagcgtaatcggtaatcagtcaaaattatgaagaaactgttattcctgtttttgatactttttttcttcttttcttgtgggagagggaaggcaccgataagtgaaagttcccggataatacccgactctttcgcaatcggtttgaatttgtataataaaggaagagcagtttatcatcattccaataacatggacagtatgttattctatatgcaattggctgaaggtttcttcatacgtgatgggcataaagcgcaggtgaaccgttacattgcttctgtctattcggcaagaggagaatcggatgaggctatccgttattttctgagggccagtcgtacggcagaagaatggcagtatagttttatctgtcagggaatagctgatgcctatactgctgccgggcgcttccgggagggggtatctggattagattctatacggaagaatatggataacaggcagatggtaccttattatcatttagctaaaggaaatctttgggccggtatcaacgaatatgattctgcttctacctattatcgtattgcgtcgatgtccttgaaccgttgggttgcagccgaggcatcccggaggttgaagttactatactcttcgctggggaaagacagctgctctttctattcagcacttgctgctaatgaacatcttgtaaatgaactgagaagagaggaaggagttgaaagccggacgaagtatgaaaaggctaaactggaaaatgaactgaaccggttgaaaatagataagcagaggcgggaaatctggctgttaagtctgggactttgttttgttgtggcattcgctgcgagttatattgtttggcaacgtcgcaaacgccagatgtataagcagctttggcgtgagcaatccctgagactgagtcagacggaacaattgttacagcagtcggaagagttgagtatattgcgcgaaaaagagagtcagcttcgtgaatcgctttttcgacggatgaagtcgtttcataaaattccctctttggaaaaagaagaggagagtgctgaagaggaaaatgataatcaaaatcgacgtatagccttgtctaatgaagaatgggaggatatacgccaaacggtggatggaagttatgataaattttcagtgcgattactggaagcttttccgggattgagcatgaaggatgtgtatttttgttgcttggtgaaaataaacgttagtattaaagatctatctgacatttactgtatcagtcgcacctcgataagtcgtaagaaacagcggatgaaacgagataagttgggattgacggagaataatgagactttggatgattttttgcgccgtttttgagcttttgtctatacttattgcgattgattaatttgtatatagcttataatcatgtgtttatatgattggtaacttataccttttgtctataagataatttgtatttccttccttgtccagctatctttgcctcattgtttcatgtaaaaaataaaaatatgaaaagcaaacaatggaaaagtgcaggactgatatgcctggtgtttattggagggttgagttcttgtacaaatggtggacaaggatcaaaaggtgatgcattagacgcacaaccgatagttggttcggtggagattttaaatggagattctgtatgggtttgcaaccaatcggcactgaaagatacattagtacttccattgagttattttgcagatgaattgcagattgtgaagttggataaccgggatgaagcattggtgcctgtgcggaatgtgattgtttctgacaattatatattggtatggggcaaagaccaaactccttttaagcttttcgataaatctggaaagtttcttggcaatgtgggagcttttggacaaggtcccggtgagtatcagttgatctatgatgctcagatagacgaggctggtgggcgtatatatttacttccgtggaatgcaagatctctgctggcctatgatttgaaaggacagtctgtccagaacatttcactacccggtttggtgccgaaaggtgtcttcaaggcaaatacaaaggattctcttttgtctgtattccttctgccttttgattatttgccgtatgtggcatggactcagaagtttagtggagaaatacaagatacgatacgttcacgccatttggccttaaaaccagatttcagcaatgaggtacatagtaataagaatggtgctgattttgatgtatctctttctccattctgggaacgccgtccggatagcctttatcattatgccaacggacgtttgaatcctcgtttcactatgaattttgcaaaaaaagaaatccctattcatgattacaaagaatttccacatcatttcttgggaagtatatccatagaaaaacaattggatgaaaacaatttcacgacggaggctcctgctgattttattatagataaacagactttaaaaggtgctttctataaagtggagaatgactatctgggcaatttgcctatttcctggttttcgtacagttgctcaaacggatattatacggccaacatggagcctgtaactctgaaagaaacattggaaaaatatctggtagacgttaaagacatttctgctgccgaccgggaacgtatacaaaagctggcagatagcattcatgagaatgacaataactatattctgtacgctaagttgaaataataaatgaaatacttactttacaattatattgctgtctctattgtttctctctgcctgcaagctgcgggcagagcagaaacagcgagaggcgaacgacacgattattgcagaacccccatctggtaccttccagtgtatctactcccgatacgtatgtatatgaaaccagcactatgcaactgtttgaaaccgatacgacaggtgtcttgaaacctttaccctttacttttaagtcagaaaaaggttcttcttattctgaccggcagatatgtgtagtttcccggaatactttctattatgctgataatgtatcaggaggaaaagccattattcgtactgtttatcaaggggacagtttgcatacagagcagatatataatcttgcatttagtaaaaaacatcctgacttatagcggacgtactccacttcaggtatcacgtgaaaacggtaaaagtgacggatatatctttgtggagcaatatgattggggcggtaatccggtagcacgttataaacttggccattggggcagggttgtatcagatgggaagcgattgtatcaggtatgttatatgtatgacgatccgctctttttgtatacattacccggaaaagattaaaagaggtttgcaagataaaaggctaaaatgattcatctctaaaaaatactttttatatttgcagccgttatggcgaagcatatacttttattttgcatattattaggtgtatttcttgtatcgggattcgaatctgtatccggcgatatgaaggagtataaggaacttcgtgtaacaggcttgcagcagggtaagacggaatgtaatatatctgaggcaggtgcagagcaatgtaggaaagtggtctatggcggagaatatgcgagtaaggctattggtaatatagcaacatccgtttcgcgcagtaatattccttcttcacaagttctaagatttaatgccctttcagttgtagcaaagatcgtcaaatccataaaggtgctacttcccgaagaaaaaagaatgtcttttccgtatcaactctctcttactcactattccagtagatactatatctatgcgttaagacatattattatttaatctttctcttttctataaggcattaagtgtgtcttatatctccttattacttcaattcatatgtatttctttcattgagaataactgaaaagtcgtatctctgttgtggaatatgtatatacctatatgttaatactcaatagataatggaatttatattagattttattcttcacattgatcaatatatgataaacattgtgcaggaatatcatgcctggacttatataatattgttcataatcattttttgtgaaacgggattggttgttactccttttcttccgggagattcattactctttgtggcgggagctattgcctcgttacccgggacgcctcttgaggtaaatattcttgttttgatcttgtttttcgccgcagttttgggagattcttgtaattatatgatagggcatctcttcgggcgcaaattgttcaataatcccaattccagaatattcaaacaaagtcatttggataaaacacatgaattttataaaaagtatggaggcaagaccataattatagccaggtttgtccctattgtgcgcacttttgctccgtttgtagcaggaatgggtaaaatgcattactattatttcatggtatacaatctgataggaggtgcagcttgggtggcacttttctgctatgccggatatttcttcggagacctcccgattgtgcaggaaaatcttaaattgttgattgtagcaattatagttatatccatattacctgccattatagaggtgatacgggcaaaaatgaaatcaaaaaaaacagaaataatttgatatttttattcttatgaaaaattctttttttagcaggtttactcccaaagaacctaagttctttcctctgttgaaacaattgtctgagattttgtctgcatcatccactcttttggtagaaagtttacaacatgataaaccggaggagagagcagattattataaaagaataaaagacctggaacgtgagggggataaattaactcatttaatccttgatgagcttggaactacttttattactccttttgaccgtgaagatattcatgcgttggcttcaaccatggatgacgttatagacgggataaacagttgtgccaaacgtattaatatctataatcctcgtccgatttccgatagcggaaaagaattgagtcgcctgattcaacaggaagctgtatatattggcaaggcgatggatgaacttgaaactttccgtcagaaaccggccgcattgcgtggatactgtaataagttgcatgatatagaaaatcaggcagatgatgtatatgaacactttatcacgaagctttttgaagaagaaaaggactgcattgaacttatcaagattaaagagatcatgcatgaattggaaaaaacgaccgatgtggcagagcaggtaggcaagatactaaagaatttgattataaaatacgcatagaagaagttgagaacatggaattgttagtaataattattgtactggctctgatattcgactatatcaatggcttccacgatgcggcgaattcaatagccactattgtatcgaccaaagttcttactccctttcaggcagtaatatgggcggctttctttaacttcgttgcattttttattgccaaatatttaatcggtggtttcggtatagccaatactgtgtccaagactgtgatggaacagtttattacactgccgattatattatccggagtgattgctgccatagcatggaatctgtttacctggtggaggggtattccctcatcttcttcccatacccttattggcggatttgcaggagccgccattatggctcatggtttcgatgctattcaactcaatatcattctgaagattgcggctttcatatttcttgctcctttgataggaatgattgttgccttcggattcacattgttggttctttatgcttgccggcgtgcacatccccatacagctgaagtctggtttaagaaattgcaacttgtttcttcggctatgttcagtatagggcatggtttgaatgactcgcaaaaggtaatgggtattatagcggcggccatgatagcagcccattcggaaggcttgggaatgggaataaacagtattgaggatttaccggattgggtggcattttcgtgttttacagccatttctcttggtacaatgtccggtgggtggaagattgtgaaaacgatgggtaccaggattaccaaagtaacccctttggaaggtgttgttgcggaaacggccggtgcttttactttatatcttacggagttcttgaaaattccggtgagtactacacatacaattaccggagctattattggagtcggtgctactaaaagactctccgctgtacgttggggagtaacaagaagtctgatgactgcttgggtactgactattccggtgagtgggctcttggcagccggagtttattgggttattacccttctttcctaaatcaaaaacaagtagcaattagttaataatgaggttatgaattggaattcacatcaatttgaaatgataagaggctacaaatcagttcatctggtattctaatgctttttttgaatgattttgttattattggaaagtgtgaaataaatattaatttcttgataaaaatgtattcatattaaagataattactacgtttgcacccgttatgatgaagtatatcttttgcatattgtttggttcacttttaatgttaggatttcactatactcctgatgaaaaagtgcaagaggctcagcccaatgccggggttgttgccatggatgtgcaatccgataccagattggcacagaagatttctgtgactgttgccggacaatcatatggaggaagtcacgctttcgatagcgaagcatccgattatacaattagtgacggggtgttaggtggtttgttttctttcagaaataccacaacaccttctaaagtcttgagattttgttctgctacaatcgtgcagatgctttgtctttcagatactcaacttccggaaaataaatggagaggactttctccggataccaattatattaaatattctaacggatactatgtctatacattaggacatattcttatttaattcacatttcttttctaacttgttgatagggtgaggagcaacagcttcttttctgcaggccctatctattgcttcatttatctttattatttcttatttaatttcatgctgacatggaaaacaaaaaatgtatttcctatggcttggagcatgaggcgggtgtcatcatatcgcgctgctatcagtgcggtaagtgtacggcagggtgtgtcttagcggaagaaatggattttcctcccagtttcttggtacgtttgcttcagacaagaacccctgaaaatgacaatcgtgtgcttggttccaatgctatctggatttgtttgaattgtgagaattgtattgcacggtgtcctaaagaaattgatattcctaaaatcatggattatctacgggagcagtcccgccaccggaactgtataaataaacaatcccggcctgtggttgctttccacagtgctttcctacaatcagtgagatataccggaaggttgtatgagataggtttagttgccggatttaaaatgcgtacctttcgcatgctacaggatgtaaacctggttcccggtatgttgaagaaaggaaaattgaaccttttgccggaatgtattgagagcaggcagaagataaagaagatattttcccaaactattgacaaaaaagaaaagtagaaaagtatgagaattggtttctatccgggatgttcgctgaatggtacttcccgtgaatacaatgagtcggttaaggcaataggaaaggctttggggattgattgggtagagttgaaagattggaattgttgcggtgccactgcggcacattccatgaataaagaattgtctttagcactgcctactcgtatattggcattggccgagaaacaaggctttcaggaaatagtggttccttgtgcttcctgctataatcgtctgagtgtggcgcaatatgaattggaaaataatgaaaagttgaaggatgatgtgctgacggtggtaggtttgccttatctgggaacagtaaaagtcttgaatgtccttcaatttatagaaaaatatatattggatatattgccggataagattgtacggccatttgctcatcaggtggcttgttattatggctgtttattacttcgtccgcataaagttttaaagtttgatcgtttggaggatccgcaaagtatggataagattatgtcaatattgggggctaatcctatagactgggcatttaagactgaatgttgcggggcgggcttgtccgtatcgcgcacagatttggttgggcgtctttctggaaatatcttgaaagatgccagcgacagaggagcggaagctgtcattgtggcttgtccgatgtgtcattccaatttggatatgcgtcgttctactatcaacaggcatttgatggaaccgataacaatacctgtgctatatgtaactcaagtgctaggattggctatcggactttcagctaaagacttagggttgaagcgtcattttgtgggtgtaaacttaaaggaggctgagttatgtcaagaataggtgtctttatatgccattgcggagaaaatatcggtgctactgttgattgtataaaagttgctgagctggctgcgaatatggaaggcgtggcatacgctgttgattataaatatatgtgttcggatccggggcagacactcataaagaatgcaattaaagaatatgatttggatggtgtggtggtaggtgcatgttctccccgtatgcatgaaccgacttttcgtcgggcatgtgccgaagcaggcctaaatccttatttgtgtgaaattgccaatattcgtgaacattgttcttgggtgcatgataaaggagaagcaactacacgtaaggctgttgacattgtgagaagtttggttgagaaggtaaagcggaatcgtccactgaatccgatacaggttcctattactaaaaaagctttggtgataggtggcggaatagctggtatccaagcaagtctggatattgccaattgtggatatcaggtgattttgatagagaaagatccttctataggcgggcatatgtcacagttgtcagaaacattcccgactttagactgctctcaatgtatcttgactccgcgtatggttgaggtggttcagcatcctaatattacgctttatacctatgcagaattggaaagtctggaaggatttataggtaatttcaaagcaagtattcgcttaaaagcaaagggtgttgacgaaaagttatgtaccggttgtggactttgcacaacgaaatgtcccacaaagaagattccgagcgaatttaatgcaggtttgggaatgcggactgcaatttatgttccgtttcctcaggctgttcctaataagccggtaatcgacagagtacattgcactcattttcggacaggaagatgcggtgtttgtgaaaaggtgtgtccgaccggagctattcgttttgaccaagaggaccgtattatatcagaaaatgtcggagctattgtggttactaccggatttaatgtactgaatacagactttttcccggaatatggctatggaaaatataaagatattattaccgggattcagtttgaacggttggcttctgcgtccggacctactttaggagaaatccgtcgtccttcagatggtaaaatccctcaaaaaattgtgtttgttgcatgtgccggttcacgcgatccggcaaaaggtattccttactgttccaaaatatgctgtatgtatactgccaaacatgctatgctttatcagcataaagtacataatggtgaatcttatgtcttttatatggatattcgtgcaggtggtaagaattatgaagaatttgtgcgtagagcgattgaagaagatggagtgaactatatacggggacgtgttgcacggatttatgaaaaaaatggcaagttgattgtaaagggagtagatactttactcggtgcttctcctgttgagatagaagcggatatggtggtactggctacagcaggagtagcaaataaaggtgcagaagacttggctcagaagatgcatatctcctatgatccatatcagttttttgcagaagcgcatcctaagttgaagccggtagaaacgaatactgccggtatctttctggctggggcctgtcaggctccaaaagatattcccgagacagtggggatggcatccggtgcagctgtgaaagtagcaagcttattttcacaagccaacttggtgcgtgaacctatgattgctgttgttaaccggactgcacctcccttgttcagtacttgtgtagggtgttttatgtgccagaccgcttgtccttatcaggctattgaacgtgaagagataaaagatcggacaggcaaagttttgaaaacagtagccaaagttaatccggggctttgccagggttgcggaacatgtgttgctttttgccgctctaaatcaattgacatacagggatattccaatgagcaggtatatgctgaagtaatggctctgttgaacaattaaaaggaagttagatatgaatgagaataaatctgaatttgaaccgaagattgttgctttcgtctgtaactggtgtacctatgccggggccgatctaaccggaacaagtcgtttgaaatatgccaccaatgtggaaattgtacgttttccatgtacgggtaggattgattttatgttattgctgaaagcctttgctggtggagccgatggtattatagtatctggttgccatccgaatgattgccactatacatccggaaactttcatgcccgccggcgttggattgtctttcgcggactacttgattttctgggcattgatgttcggagaatctgttattcttgggtatcggcagccgaaggagccaaatgggcagagttagtcaatcagacagttgccgctattcgagagttaggaccttacgaagaatacaagaaggtagctgcatatttagaacaggaggtggcttatgaataaattggccgaaaaagtaaagtcacttttcaccgaggatctcgtgaaattggttattggctttgagaaggggagtcacggagtacgtccatttttttgtagaaatatagaggaggcagataaactggtttgggatgacttttgtacaaataatattgcagtttatttgactaaaacagaattattcggtacagataaaacagccttgtttgctaatctccctgcactgcgtactattctgcaactagcgtcagaaaatcaattgaagcaggagcaatggattattctcacattgaatgctcaggaagaagttattcagttcgacaactttgaagatatttatgcttatatggctgactatccgatgctggcgagtgaagaagaccgccaactgatagagaagatacaaaacatgactcgtgaagacagatggcaatattggattcatgaaatgtcaaaatgcattaagtgttatgcctgtcgtgcagcttgcccattgtgttattgcaatcgatgcattgttgaagtgaactgtccccagtggatacaggcatggtcggctccgctgactaatatggagtggcaggtaaaccgggtcatgcatatggctgggcgttgtgtagaatgtggagcgtgtgcaaaagcttgtcctgtaggtattcctcttcatttgctgacacagaatatgatggaaactatccggcatgagtttgaaaaacaaccgggtaatctggggaataagggaaatgtacttgccacttttagagtggaagataaagaagacttcatacattaatggaaacaatgactaatttacatatcagccagcatgctttggagcaatggctttatcagatggtaaacagtaagatagaagtgtttgcccctgtacatgatggagaaaaaacagatttccggttattggctttcggtgataaagttgctgatgattatgtacagactacccaatccgcgaagcgttttgcctttccaaaggcagaaaagttattctcatacagaaaagaagggaaagacgtaaccttacaggaaagggatctgaatgattttccggaaattgtgctttggaaggtgcgtccttgtgatgcggctggttttgctccacttaccggtatttttaactgggattataaagacgatatatataatgcgcggagggataaaataactttagttagtttcagttgtacccgatgtgatgaatattgtttttgtacttctgtccatggtggtccgggaaacacggaaggcagcgatatacaagtaacagaattaccggatcggagtgctttggtggagatattgactccgaaaggtaaatcgttgatagaacgttttgtacaggaaactacaccagcggacggaatagataaagagacatatttggcttctgttccggttcgtttcaagttagaacagctccgtgaaaaactggaaggagcttttgatagccctatttggaaacaacaatccgagcgttgtttggggtgtggcgcttgcgcatttgtttgtcccacttgtgcttgttttgatattcaggaagatgctcggggaagttccggtagtcggattcgttgctgggattcctgtggcttttctttatttactcaacatacgtccggacataatccccggcctactcaaagtacccgctggagacagcgtattctacataagttttcatacatgccggatcgtattgatgaaacgggatgcaccggatgcggacgttgttcccgtgcctgtccggtcgatatgaatatcgttgaacatttaatgtcaatagaaaatcatggataaacagaaagattccctttatcttccatatcggatgataattgaaaaaataacagatgaagctcccggagtccggacattccgcctgaaattcaaggaagaacgggaaggtgaggattttcatttcaaggccggacagtttggtgaatattctgcattcggtgagggggagtctactttttgtatagcctcttctcctacgcgcaaaggatatatagaatgtactttccgacaagccggaagagtgacaacaggcttatccagattggaaacgggcgccacaatcggttttcgcggaccattcggcaatacgtttcctttggatgaatggaaaggaaagaatcttttgttcatagccggcggaatagcacttccacctatgcgatgcgtaatctggaatgctttggatttgcgtgaaaatttcaatgatgtcacgattatctatggagcgaagtctgtggctgatctggtttataaagaagaattgagggagtgggataatcgtccggatgtccgtttggttactacggttgatccgggtggagaaacaccggattggaaagggcaggtgggctttgttccttctgtgctggaggctgttgctcccgacagtgataacactgttgccattgtttgtggccctccggtaatgattaagtttacttttcctgtattggaaaagttaggttttaaggacgaagacatttacacaactttagagaaccggatgaaatgcggtgttggaaagtgtggtagatgtaatgtcgggaagttgtatgtctgtaaagacgggcctgtgtttacaaaagcgcagttgaacaacatgccctctgaatattgaatccataattataatatatgctttccgttgtgaaacgggaaaagctgtatagaagtaaaatacataccgaagtgatttcaggcaaactgtatttacttattgcttctatatgggatgaggaaagcccaatgggaatagttttcatgtgtgtgtctaataatggtttctccattgggctcttttcctctttatcaagataaaacggtataaactgaaaacatttaacttaactatctgtttctaattatatatgcctcatttcttgaggtttcattttatgtaatattctatttttaatcataataaacagtttataccatgaagttttttattgacactgcaaatttagatcaaatccgggaagcctatgatatgggcgttcttgatggagtgacaactaatccttcgctcatggcgaaagagggtatcaaaggagtagataaccagcggaaacattatgtagaaatctgcaacatcgtgcaaggcgatgtcagtgccgaagtaattgctacggattatgaaggtatgattaaggaaggtgaagaacttgccgcactcaatccgcatatcgtagtaaaagttccctgtattgccgacggtatcaaggctgtcaaatatttcacttccaaagggattcgtaccaattgcacattagtattttccgtaggacaagcattgctggctgccaaggcaggagctacttatgtttctccgtttgtagggcgtctggatgacatctgtgaagacggtattgcactggtaggcaagattgtagaaatgtatcgatattacggttatactacacaggtacttgcagcttccattcgtcatacagcgcacatcatgcaatgtattgaagtaggggctgatgtagcaacctgtccgttgtctgccatcaaaggtctacttaatcatccgttgacggattccgggttgaaaaagttccttgaagactataaacgtgtaaacggataataaaaaatactctataagcctatctttcacggttttcttgaacaatattggcgtaaaatagaataaaacaactatttttgtgctcaatataaatataaaaagagaaaaagctgatgaaagaaaggcttattggattgataaagacgtacattctcttcgtctgtatctttatactacagaaaccgttatttatactctactacagttctttgtatgcaggaacttcctggacagaccctttcaagattatctggaatggtttaccgctcgacctctcgcttgccggatatttaacggctattcccggactattcttcatagcgtccgcctggacactttccaaggcactccgccgtatctggaacggctattatttcttcatcgctattttgctcgctgtcattttcattgttgatataggtttatatgagtattggggcttccgtctggatgctacaccgctcttttatttcttctcttcccccaaagatgcgctggcaagtatcagtatatggcaggtgctgggagggatagtagctatgatcctgtatgcatcattgctttacgttctttttctttggatacagaaaggtatctggaaaaggatgaaactgccttatcgccgattgtcggtgtcaggtgtaatgctgttactgaccggtttgctttttattcctattcgtggtggttttactgtttctacaatgaacaccggcaaagtttatttcagttccaaccaacgcttgaaccatgcagctatcaatccggcattcagcctgatggaatctctatccaagcaaaaagatttcggcaagcaatatcgttttatggaagcggcacaggcggatgagctgataaagaatctggtagatccgtcagtgctggacagtactgcaatggttcccgatactttacgtacgactttattcaagacagaacgccccaatgttatctttgttatattggagagcttctcatccagattgatgacaactttgggcggtgagccggatgttgccgtacagatggacagtctggcaaaggagggagtactctttacaaacttttatgccaacagtttccgcacagaccgtggactggtggctattctgagtggctatcccgcacagcctaccacgagtatcatgaagtatccccgtaagacacagaatcttcctgccattgcaggtagtctgcgtgatgccggataccgtactaaatattattatggaggtgatgccgactttacgaatatgcgttcctatctgatgtcttccggtttcgagaatattatttccgatcaggactttcccgtatcagagcgcttgagtaaatggggagcgcatgaccatcttgttttcaaccgtttgctggaagatatgaaagctgaggcggcagacacagcttcggcagaaaatgcccgtccttttttccaggtattgcaaacctccagcagtcatgaaccctttgaagttccgtatcgccggctggcgaatgatcgtttaaacgcttttgcttataccgatagttgtgtaggcgactttgtgaagcgtttccgcgaattgccgcaatggaagaatacagtgttggtattggttcccgaccatctgggtgcatatcctgaacatctgaataatctatcggtagatcgttaccaaattcccctgttattgataggaggtgcggttagcgaaccaagacgcattgatatatatggttcccaacatgatattgcagctactttattggcacaattatcattgccacatcaggattttgtgttcagtaaagatatgctgaatccggcttctccacattttgcattctttgccgtgccggatgcttttgggatggtgacaccggacaatcagttgatatttaattgcgaagctaatgccgtggcggtagatgaaggcagtacgaaaggaaagaacttgctgccgggcaaggcttatttgcagaaattgtatgatgacattgctaaaagataaaacaagatgatgctattagaacttttgaatgaggttgttgacattgatactgacatattcctctccctcaaccggatgcacagtccgttctttgattatttcatgagtacctacagtggtaaatggatttggatacccatgtatgctgccatttggtacgtgatgctacgtaatttccattggaaagtgactttgttctgcatggtcggcctggcactcgtaattaccattgccgaccagacgggggcgacattgatacgtccgtatgtggaacgtcttcgcccttccaatctggaaaatcctatatccgatatggtacatattgtaaacggacgtcgaggagggcgttatggttttccgtcttgccatgctgccaatactttcggcctggcgttctttgtctggtttcttttccgtaagcgatggctcaccgtatttatgatgggctgggcgttgctgacctgctattcgcgtatctacctgggagtacattatccgggcgatctcatagtgggaacactgatcggattattggccgcatatattgtataccgccttttcttgaaagtcagcgggtataagaccatgaagaaagttccccatatttatgctcctatattggtgggcggattgacgatagtggggatactgatatattccacggtgatgatcttatagattcagaactgataattgactgtcaccattgcttccctcggacgtatatttagccgtgaagtgtaactttgcgtggcggaatacgttgtgtaagcatactcttttttgttgaagagattgttaagggttgcttccaatctccatttttttcttttatagataagggatgcatctgcgaacactgtgttgagatgtgtgttttctcccaggtcattccggtaatgttcgccggagagccgcaggtccacttgtccgatactgaatgtgagatgtaatcgttgtacgaagtccagtaacggggtgagacgggtgtcacttcctatcttgctgccaccatagcctaatgtggcatgatattccgcttcaaaaacatctgcgggcgaccagattattttaggctctgctttcagataatcataacgataggtttgcagaagactttgctgattacctttgctgtcagccaggcgtgtaagctgttcaccattgctgcgactgagtagtagggtgagtgaggttttcaaatgccagtcgtatatacctttggacaaagtactgctgagattccagctgtcgctatggttcggtagttcacgacgagtgtagacaatggcatcttcggaaacactctgttcgaaaagggtattccgattgctgcggctgtaggttagtgcggcggtgatgaaaaattcctgtacagtgtttttgtactctccgtagagattgtaagtttgcgtggtgttggttgggaaaagtccgttgccgtctcgccaggtgcggtaatcggtttggtagagtcccggatacaagtcggagaagtctcctgccgaacgtttcagactgccataaagggagaacgtccaatgataatccagtttatagcgcaaatacgtggacggattgaagaacaggaacgaacgctgttgtgagaaataccgctctgctttcagaggaagggaaagtgttgtcagccattttccacgttccagttggaagtagggggtaagatacaatgacaggtgcgaagcattgaaatcattaggctgttttgtcggagtatatttcagggtagcccgttctccttgtattcctgccttatattgttgggtaaatccattatactttcgcagatatgtggcactgttatctgtgtagaagttatgttggttgaatttactttttccttcttcgagtagtaaggatgcaggctggtaagcatactgtgtcaccgaacgaaattcccaggttccgctttcccggttccggataagattgaagtagtttccggcacttagttgtgaagtttgcagagtttgtcccagttcctccgaacgtccgcgatttatttctccgtctacggtgaagcggttggatatataattccggctgctgttatcttcataatgcagttccagattagcgatgtcacttctcagacgataatggtaggtttcatctatttgtatggtatctgtcggttgataataaatttgggtatttccccgttgctgttgtattatatcatgagtatatccggcttgcaggcgtaagctgcggtcattattccatttgtacatacggttgccgttcagggtgtgggtttcattgaatagcaagcgattcttgtctaatggtgcgctgatgcccggttgggagagaaaaccggaaagtggaacttgttgctggttatttccggtcagtcttgtttgctcgttgctgaggtccttgccattgttatttgtcttgtaattatagacactctgttttcctttacccagttgaagggcattcagtccggcttcccacaggagtttgtcgttgttgtcactccatccggttcccagtgtaccgtttgttatccattggtcacgtgctttcgggtccagtttcaggttcaatgccacttcatcggaattaatttttcctttcaaggcctttactgactgatagttctccatgatttccgcactctttacggctttggcactcagattgttgttgatttggttataacgtccgcctgtcacatccattccttccacaaaataatggtcgatggctttccctttatactttacctgtccgttttcatctacatccacacccggaagtttctttaatacatcctttatgtgtacatctttggatgaggcaaattgtgccaggtcatatctcaccgtatcttttcgggtattgatacgtccgggacgtatttgtacttcttttagcatgatcgattctgcctgtaggttgatattcagagttcctgctgcactgatattgcgcatctctctcttatagcctaacaaggaaacattaagctgcaatgtcccgttatgtttccaaggcagagaatattgccctttggcatcggtcagtgtgtaatctatcatcatgtttccgcgtaacacactgatcattacagcttctaacggttgatgggtttctgcatctgttattttcccactcagagtttgagcacgactaaatgttgaaaaacaaagaaaagagaggaaagccataaggagaagtaatctgttcataatcatgcaaagttaacttgttctataaatgataatttaggggacaagggaacaagttgacaaggggacaaggggctgcgcagtgttaggctgcgctgtaaaatgataatttaggagtgtagttattgatattctgactatctcaattccccttctccagttggaggaggggtgcccaacgggcggggtggtaggtgagagaaaaattcctttatcttattatgaataggtattttattgttttacctaccacctccccctacgggtactccaccccctctgactcccccgttatcgggggagagcaattcccgagaggaggagaatttaagatacttcgcgtaacaataattatcatttcaccgcgcagcctaacactgcgcagccccttgtccccttgtcaacttgttcccttgtcccctaaattatcatttatgtaccaacttgtttttaagcgttaccaaattcttttcctgcttttttcttttttgcaatcagcgacgaacttgtctatttctttgctgagttgcttcagttccctgcatgcctggtcgcttagttcgtgttccctgttcaatttttccaggtattcttttatttgtctgatggcttgcagttcggctttaccggttgtctcgcagtgtttgtaaaggatgtcttcctgtgtgtcagtagttagctggctgttctttttaaactcatggttatgtgtatttaaaatatttgattctgcaaaggtaaatagatttatgcaggttggggaataatccggggtaaaagtaaaaataaataaggtaaagtacggataagttcgccccggtacgtcccggtacatcccgtttcgtcctttcgtttttggtctctgaagtacctttgttgtgtcctcaaagtggggatcctacggaaggtttcgggtaagacgtcgccttgtatcagtttccgttcgaaactattttcttcttttttaaactcaaaaaaattatgtcagtaacatttaagaaagtattacgtaaagaccctttccataaagatggtacgggtaaatactaccctcaattaatcgtttggggaaaatcggcgacactggaaagtattgctgttcagatgaaagaatccagttcgctcactctgggtgatatacagagtgtgataaccaacttcgttggtgctatgcgtcgtgagcttttcaatggccgttcggtgaacatcgacaacttcggtgtattcagcctttcggctactaccgaaggttcggagaagaaggacgactgtcaatctaccaagatcagatccgtccgtatcaacttccgtgcttccagcagtattcgtccgcaggtggctgccacgcgtgccgaagaccgtatggacttcgtggatctggagtcgcagttgaaggctgccggcagtggttcgggcggtggcgaaggtggcggcaacgaaggcggtgacggaggattggacgagaatccgctgggataggctctgaaaccgtagtcttcggaaattaaaaattaaacactaatcactaagttacatgagaacaatcgatcacatcgttattcactgttccgccacacgcgaagaccgttcgctgactgtggccgaactggaggaaaatcaccgttgccgtggcttccgcggtatcggctatcactactacatccgtaaggatggcacggtaatcaatacccgtgctttggaacttgtcggggcgcatgccaagggccataattctcactcgataggcatctgctatgagggcggtctggatgtccgggggcgtgccaaagatacccgtacgcctgaacaacgctctgcgctccggctgcttgtgcatcaactcctgaaacgctttcggaacaatgtccgtatctgcgggcatcgtgacctcagtccggacctgaacggtgacggagtgatagaaccggaagaatggattaaggagtgtccgtgcttcgaagtgagcagggaactgtgatttccactctgtgacaatcatttttttaattgcgtggaaaggaggtgtggaattatggcaatcaagaaatccgtatggagtatgatcttgaaagtagctgtcgcggtggtaacggcgatagcgggtgtgctgggcgttgatgcaatgaccccttaaaaatgcgctgctatctatctgtcggtagttcagcttgaaggctgaactaccattttttttatctgattttagaaaaataaaaaactgtcacgacatgaataagaaaattataactatgctgactctgttgcttatccagagtcttggggctttcagccaacacatgcctttgctcaatgtccccagtcctgaagttgccggactgggagaatatggtacggttcccataggactgtacaccggtgttcccggtatatctgttccgctacatgaaatgcaggtgggtggacagtcgtttcccattactgccgcttaccatctgtcatcggtgaaacctcagatgcaggaaggatgtttgggattgggctggagtttgcaggtgggtggctatatcaaccgctcggtcaacgggctgtatgacgagaagatgcatgctgacgggtatgctcccggatattatgctcatgctcatcagttgaaagggatgactaatgagcagtttgctgccgccaccaggaatatccgttccaatgccagtaccccatcttattatgaattgtccgccgatgaattctctttcaactttttcggttactcgggtactttttactataacggagatgatgactggacggtgatttccgatcaggatatccgggtagaattcaatccggctgacggagaaggatttgtaaagttgaaaaatttacgtcacgagattgaaccggggtcttggggagcacaaggctataataaccgtttttttaataaattcagcctgattactcctgacggatgccgttacgagtttggcggaatcaacgctactgaatacagcatatcgtactataaccgcaataacagcgacctgatagccactacctggcaattgtcgaagattataacccctgacaaccgtaccattacctatcggtatgaggcggctgatctgctgtgcgatttgaagtacatgcctcaatcccaaactctttatgaagcaccgtgtattccgcataatccgagtaggggcagggacgccatgacgggctttctcattatgcctgtccgcttggcaggtatcgagacgcctgacgaagacatttcattgaattactttgaagatttggcttatggcagccacttctggtccggggctcttggctggaatgtggatgagtattatcccgaagacatttaccaccctgcccaggagtttgacaggaaacagttttctttgttcatgcacactactttagattacactacttctccattgttgcaggaaagtattcggaaaaatctgaaacacagcgtgctgcatcgtattgggattcgaagccgaaacgacgccagccgtgccaggagcgtttacttcgattacacctttaataatcgcaggaaactttcgttaatcgcttcgcgcgagggtattccggtacttatccccgattatgcgtcggcacctggcatatttcttttgcgtggttacaaagttccggtttcgcttactcctgacaaagaccccgagtataagtttgcctataacacggaaaggccaatgccgaccagttataccgatcccgaaaccgattactggggttactatgtgggcagcaacgtttctttctcggcgatccctcaatttaggaaaccggttccgagcctgatattcgggcagtcggatgtgttgaccgaaatagtttatccgacgggtgcgaaaaatcgttttgtgtatgagctgaacagttattcccggatagtggatgttacgcatatacagttgaaaaaacagtcgggcagtgcgggcggacttagagtggctgccgtgagtcggcacgaccgtaacggcgttttactggacactaggaaatattactatgcggaagataaaaaagccggaagtgcaagcagcggcatattgagggaggctcctgtttatggaataacttataccgcttccgggggtgtcgttctggaacagatgtcggagggaggttatttcgcttcggtcactaacctgatttctccggtggtgggctattcgtgcgtcatagaagaaacgctggatgctgacggacattcacaagggtacatcaaacgaagttatagtaactacgatgccgatctttatggagatactcattttgatgaaccggctctttattccaatgcgggaggcgaatcggcagtgaaaccattcaccagccgttctgtggaacggggtaaattactttcggaagagacttacaacagtggcggtaagttgttgaaaaagtgcatacagcattataaagcggtgaaccgggatgattttaagactgcccatcaggttgccgtcttcttttgtacggatcttgattacgaaactttttcttatgcttgcgtgggtacgttgacccgcgtctatacttatagttatctgcccgattccattgccgaaacagtatatccttcggaagggaccattccgggctataataccggacgtaccctatcctatgatagccacaagttgctgaaacaagagaaaactttgaccagcaaggggagtagtcatacggtgaactacacctatcccgccgaccatagcaattgtcagtggatggtggacgcccatcttttatcgccggtagttgaaaaaattacagtagaaggcgaaaagtcactgaaagaaacctatgcctacggttaccacccccaaggctccaagtatatgccttatctgaaaagtgtaggcagcttgttcgacggcctggatagccgcactgactatcaggtggagaaaacggatgtgtatgccaatccggtggttaccgtaagtcggggagtgaccagcatctgcctttggagttatgaaggacggcagctcattgcccggatagagaatgccgcttatgataaggtgatgtcactgctcggtaaatctcccgaaagtttttctgccgtagacaaaccggatcacactacttacaagctgatagagggtgttcgccataagctgcctaaagcccgggtgacgatttataaatatacttccggaatgcagatcgactcggtcacttctcctgacgggcagagtgtattctataagtatgattatctgggcaggctgcgcgaagagtatttctatgagaaatccgccggtttgcttcagcggaagctcctgaatacgtatgactatcattatcaacactaatctgctaaaacataaaatgagaattatgaaaacgagatattattatttgattttcccgttactgttgtgtttgtcgcagatgctgcatgcgcaagacaagcctgtcaaaccgatagagcccaatgaaaagttgaatgcgggcgcttctgtgaccaaacagttggtttatcatgatgcgggggagaatacggcgaattattaccgtttctcaaccatggaacctctgttgttcagtttcagcttttccgacttttcttacagccggggatggggtgatcctttgccgcagactgtgatagtgcttaactgcaatctgacggggaatgagtctggaactctttcatatcttttcaggctcgctgtagaagggaagacgggagagtttctgatatcttccggaggcgagccgatggaactcccggcaggtgactatcagtttacgtttgccggacattctacgggaggtggactccattctttgcaatctaaggctgttacatctttttcaagtgtgattcccccgccaacttatttttttgatttacacatcacgaccgaagtaccgcccgctcccgtagtgcctgaccctgaacctgatgatgaagtgctgccggatattccttcccccaatcgaagccctcttgtcgacttgcccgccacttcggggatgaacagtgtttgctctttcgtcagtagagacggggggtggacgaatggttgcctcaccgtaaattatgctgacgatctgggacgcagcatcgaaactgcccggaatgggtatactgcacaaggaagcaacctggtaagcctacaagaatatgattcttggggaagaaaagggaatacttggcttgaagctgcaaaagacaccctggcgggaacatacctcttgcctgcacaatgcaagacactggctgcaagtaccaacggtagtgattcccgtccctatatggaaaccgtctacgaggaatctcctctgaaccgtcccattcgccaatacggtcccgggcaggactggaaatccaaagggaaagcgctgaatagcgtatatacctcgaacagtaactttgccggtgaattgcattgcatgaagttcgctgccggtgagaaaacaactgtgggaatgacggtaactgcgaccgggtattatgatgggggtagtctgcaagtggtgaaaaccactgatgaagatgggaaaattcagctggaatttacagctcggaacgggagcaaggtcctgtcgaggcaaatagaacttaaaggaagtgtgcaggtgtattatgatacctattatctctatgatggtgccggaaaccttcgggcggtactgcctcccgaactttcggcgaagacttcggcaacggggagtttggcgaaggcggagcttgacaagtatgcttacctttatgcttatgatagtttccgccgcctctcggaccggaaactgccgggggcggattgggaatgtttcatatatgatgataacgaccgcttggttgcttcgcaggatggtaatcttcgtaaggcgggaaagtggaagtttatgatttccgataagttcaacagggtgtgtttggaaggagtgtgtacgagttacttttttctgatgaatctacagttgcctggtagaaatgccctctgtgaatatgtgggaaagaagggagaacattacggttatgcagtcaatggtatttctttagattctccagtcttctgtaagataggttattatgataattaccgtttccttgatgacggtctgttgcctttggatgtggcgaaagattctttagtttatgcactgagagcaggatatggtgagaagtatgtcagtgccaagggaagcctgacgggtgtactcgtggcacaaatgggggcttcgggtgtgatttcaggtgagctcatgggcggtactttttactatgatgcccgtgggcgcttgattcagtctcattccggcaatcatctcgatggttttgaatcggaatacactgcttataacttctgtggacaatctgtaaagctgctgcatgtacattctgtaccgggtaaggcttctttgagtgaacagtatacttatacttacaatgaagcgggattaccgctgactgcacgacaccggttggggcatggtgtggaaataacgttgtctgataaggaatatgacgcattcggtcgtttacatcaggagaagcgcaatggcaattcttttttgaagtctgcatatatttataatgttcgttcgtggctgactggcatcgtgggtcagggcttttctcagaatatgtattataatgtggatgggttgaacggtacgaaattttataacggcaacatcagcagtatgacgtggaagttgggcaatgaaggtacgcttcgccactatatttttctttacgatcctctgaaccgtcttcaggatgccgtctacagtgaaggcagttccggcttcggcaatctgaatggtttcactgaacaggtgaccgggtatgacaagaatggtaatatccttggactgaaacgttacggtcagacgggcgcttcggcttatggcctgattgacaacctgacagtgacgctgaatggtaatcaactggcgtctgtcaatgacgctgttatggcttcggcctacaataatggctttgagttcaaagacggtgcgaagtcaacaatggaatatgcttatgacctcaatggaaatttaacaaaagatttgaataaaaatattatttctattcaatataatatgctaaatttgccaagtatagtaagtttttccgatggtagtactattacctatacttatagtgttgacggtactaaacttaggattgtacataagatagatagcgcaatcacgactactgattatttaggcaatgtggtctatgaaaatggtgttgccaagttgcttctgaccggttacggttatgtttctttgaatgacaaaaagtatcattattatttgcaggatcatcagggaaacaatcgtgtggtagtagattcatccgggaaggtagaagaaacgaaccattattatcctttcggaggtgcatttgcaagtaccggtaatgtacaaccttataagtataacggtaaggaactggatgcgaagaaaggattgaattggtatgattatggggcgagaatgtatgatgcggcattggggagatggcatgtggttgatccgatggctgagaagtattgcggcatgagtccttatgcatattgcaataacagcccgacgataaatgtggacttggacggtaaggactggtacatgcatagtgaaacgggtgagttgtatttcagtaaaaatagggaccaatggcagtttaaattgaatgataggatttattaccgaatcggcgataatgacatgctgggagatatgaaagatgtaacggaacgtgcgtataattatgatgaatctttatctttagctcaggataatggttactcgattaatccgattcaagagattttgtctgaggtttccagagaacagccttattctacgggaaagaaatctattactgttactactggtgaaatagaaatcataaatgaaaagtatggaatatttcctgtagagaaaagtgagaagaagaattttaaaacggaccctctgtataaacccaaatatgatgtagttgattatttagatgccattgctacaggggctaaaaaagtaaatttgattgagcgtaattattttacatacaataagcccactttgggagataagacaggaagtgttcttggaactgtttatggtgtaatggaaactatgacaggtaaacacgattatcgtaatgtgagagtctataagaattggaatagttatttgaaaaccacaggcggaaaaggccgaatgttgctatatagaaaatagattattaaataatatacaatgaaaataatatttttattattaagtggtctgttcttttttcagattaatgttttgtctcagaatggactttttgatgagcgcgataaactatattaccgggaaataataagtc

SEQ ID NO: 6606 - DNA, 1012 bp, Unknown
  gut microbiota DNA sequence
aaatttcccatattccctatactctgcactggcaggtaaagtaaagtagaaagtagatccctcccctttttttgactctacaccaatgccaccaccatagtgctctacaatggattttgtgatggaaagacctaaacctgtaccacgaatattatagttcatctttacaaagcgctcaaaaatagcacggcggctttcttcatcaataccgcaacctgtatcagctacgtaaaaataaaaactatcattactcagacgacggtatccaattctgacactaccttgttctgtaaacttcaatgcattctttaccagattattaatcacctgcgcaaaacgtacccgatcaatcattaaacgacattgaggcagtttttctacaaactcgatctgaatacccgatggtctgggatgtgcattctccgcagcacatatttcctgaatcaatgcatttacatccacatctccatctttatattccattgtattggcctctattttcgaaaaatccaataaatcattgatcatctgaaccaggaagtttttattatcattgatttctttcagaaaaatcatccgctcttctctacttaaattatcagtttcagcaagcacatttgtaaatcctacgatagcattgagcggcgtacgtatttcatgcgtcatattggcaataaaggcattcttcaattgattgctttcctcagccacttcattcagttgctgcaatgttttcaaacgcttggttttattgatggacacaacaatcataataaccagaagcaataaaataataaccccaaaacaaagcagcagtatttcattcttctgaaaaaaatcagtagcccaaagagcatataatgtagaaaaatccagattcataaagttggtgattaaaatattaggtaatcagacagtttaagtgatggcaaagataataaagaaaaaacaaatatttgattattagatacatgtttttccaaaaagataggctgtaaacctattaaaaaaa

SEQ ID NO: 6607 - DNA, 819 bp, Unknown
  gut microbiota DNA sequence
ataccaattggaatcccatcctctgatgattcctaaacggttgcttattggattaactttttgtcccatttaccttaattttgatcttcgttattacttttagaaccaacgaacaacgttacgtgatttgaacgcttacgaattctgtaacctctaccctgcggagccggtctcattcttttgagtgtagcaccaccatcaacaaaaatcttcgttacaaataattcgccactttcagctttacgttcgtttttctgctcccagttagcaattgcagagcgcagtaatttctcaactctggcagctgcttcttttgaagaaaacttcaaaacgccaagtgctctattcacttccatcccgcgaatcatgtcagccacgagacgcattttgcgaggggaagtaggaacattctgcaactttgcaaaatacatggtcttaagggcttcttttcttttttcagccgatattttttttcttgctcccattatatttatactttattatttcagataaatcctgttattttttcttattaccagcgtgtcctctgaaagtacgagttggagcaaattcgcccaacttgtgccctaccatattttcggtaacgtatacaggaataaatttatttccgttatgaactgcaactgtatggcctacgaaatcaggcgaaatcattgaagctctggcccaagtcttaacaacaattttcttgcccgattcattcatagcaagaactttcttctcaagcttaacgttaatatacggacctttttttaatgaacgactcatagtttactcaattaatcagattacttcttt

SEQ ID NO: 6608 - DNA, 4937 bp, Unknown
  gut microbiota DNA sequence
aataagcagggaagtaatacaagtgcacatgcaaaattaacaagagactgtggaaatcgccatgtaaaatacaattccatggacacacacatagctaatattagaaaatagatagctggctgttccttattaaatttagtaataagcatgttagaagaaatagtataggtctataaaataagactttatattatagagaaaatgataatacttcattagcaattctttcaatatcctcctttgccaaaccatagtacaaaggcaagcaaagtattcttttcgaaatatcctcggaaacaggcatttctacataaggaagtatctgtgtaaaggtattcactgaaggatagaaatagcgtcttggataaatgccttcagcattcaacttcttctcaacagagagaagcgttgcttccgaaggaaatatcactggaaaataactatagttacaagcctcattgatacgctgaaacttcaattcaggacattgagaaagtatctctttatacagcatatacttttcttgacgatcagccagggcagacggcagataacgcaaattggcaatgccgatagccgcatgaacttcggtcatttttccattagtaccatcatccacaacatccttacgatcatcaaaaccaaagaaacgcaaacgcttcaacttttcatgcaattcatcgtccaaggcaaagcaggcacctccctcagccgtattcaacatcttagtggcatgaaagctcgttgtggaaatatcaccgtactcaaatattgacctgcctttataattcacccccacagcatgcgcagcatcataaatcaccctcaagttatgcttcttagctatagcatcaatttgctcgacttcgcagggattaccgaaaacatgtacgggaagaattgcacaagtatgttcagtgagcttttcctcaatcttagacggatccatattcaatgtatcaggatcaatatcaacaaagacaggcgtacaaccctcccaaataatggagctgattgtagcgatgaaagtaaaaggagtagtaatgatctcgcctttaagccccaaggcacggatagccatatgaatggcaatagtaccattggtcactgaaacaatattacgcaagtgaagataatcagcaacttccttctcaaaacgttgtacaaggggaccgttatgcgtcataataccacgctcccaaataccctgcataagctgagtcacttcttccaacggtgccaaagtaggcatcgttacatagatacttttatttgccataacaatattcttttatttgcccgatataccgggactgattcaaattctgtatatattcacctgagaactcccctgtatccaaactgtgagcaatatgcgccagcatatttgagaaatgatcatcagcaggtaagagaatctcttcgcaacgtccatgcttttccaagattactttcggagtaaaaccggcaggagcagtgaacgcacgggtggtagtcaatttaccaagactgccccaaatttcatagccgcactgataataattatcaaaaccgaaagcaagctctgcaatgacaccttgaggactgtcaaggtacgccccaccatacaaatcaacctccatatcagaaggttggtataaagaagcggaacgcaaactaaaactataatcaggaagtataaactgcatagctttcaaggtataagctcccgcatcaagcaaagacccgccgccaagagatttcgaatagcggatattattccgatcctcaaaaggggggaagccgaaggaacagcggaaacaacggagatcacccaattcatgcctttccaaaagttcttttacccaaacatgctgggaatgaaaacgaaactgaaagttctcgatcagaagcaaatgtttgtcacaggcaagttcaacaagctcccgaacctcatcataagtacacgacagagatttctcactcatcacatgctttcctttttccaaagctttatggatccactcatagtgtaaacctgtcggaagcggaatatataccaattcgatatcctcattatccagcagctcttcatagctaccgtaagcaacacaatgataaggggcagctgcaagttgggctttgtgaaaatcacggctggcaatgccagccagttcaaagcgttcagatgatgaaaaggcgggaagaagggagcggatcgcaatatgggcacatccaagcacacccactttatactttttaatcatttggtatttaagataaataatttagagccgctatcaaactgcgggactgaatgttcagataattattgaaacgcaagaactgatagatttgtcctaaagtcatccagcgataacgttcagggagttcgagaggaaaagaatcatccacctcaacaagcatattacggttttgctcatgatagaagcggcccccttcttcagattgtaaagtatcgtaaagcacctgagatccggaagactcaagcacaaggtcaaggaaaggcggacgggcacttcgggaagaaggaatattacctgtcagacattgcactgtaggagccaattccataacatcaaagttaccgcattcaagttttgcctgtaccataaaatgataaactccatttatctttttgatgataaaagcacatatgccttgctgcatcggctgaatcaacggctggcaccacgaagagacctcacggttagatatggtaactttcacaccaaccactttaaagtattttccatcctcacgggatatttcaccggccaatacccgccaatctgtcattttccggagaggaaaaggatgtaccttcaaatcataacgggactttaaagaagacaaccaggaaagatgctcggatatcgtagaatgacagtgattcgttacggaagaaagaagcaagtccttaccaaaaacagacaaacgactcgtatcatctgcaagagataaatagtcgctgatttttaaaccggaaagaacggtacgggtatccatattgaccatattatcataacgcatcaactcttttatctgaccgagcgtcatccagcggaaatcatcatgctcctcaacatcctcctccacttttattattatattacggtttctcttacgaagaaaccttgctccctgttcggattgaagttggtcaagaattatctggtcagggcttgcatttacaaaataatcaaggtataggggttgtttccctttatgaatctgactataattactcttagtagcctgcaaggtaggagaaatctgcacacaatttacattcccgggttcgatctttgcttgcatcaaaaaataaaggacaccattaaattccttggtcagaatccccagatagcctacttccggttggttaattataggctgcgtccaactggaaagggagccatagtctgtctctacacgaatcccttcaatcgaaaaaaaacgaccggaactatgtcttaaagtaccatcttcatcctgagaccagtgatccagggaagaaaaaggaacaggagagattgagacatggattgaacgattacgattctcaatccaaagacgaatttcatccagcgaatgcaaagtaccctgaatggttaataaagaacgaattaccattgtactattttttcttgaattattactgatatattattttctatcccgaatcatgtttactttcgttttaacagggagatgccaagttgcttaagttcaaggtactccggtaactttattttctcgtagataaaaaatgccaataaaattcccaatactaactggatcggaagaaggagataaaccgaccaatccaacaaagagacacaccacataatgaaagctacggtaagggatgtaagaaatgtaggcaatatatctttcaattgatctatagtaggataatctatcaatcccgcagaataatagctattcaaaaaataagcaataaaagagattactacacttccccaaagcatatattcaataccgcaatatatacctatcataattggacctactgctattattttttttattatttccaattttaaaaataaatcagaacgtccttttacttgcaaaatattcaaattaatagcatgaagaggatacaacataccagcaaaacagattatttgtaaaaagtaaacagcaggaagccactttgcacctattaaaataagaatcaaaggctttgctacagctgcaagtcctaacatacatgcaaaacttatcagcatagtagtttttataaccttgcgataagcttcacgcaatcgttctgattcctcttgaattgaacttaatacaggatagctaacacgttggacaacagtagtcaagttgctggagaatattgtattaaactgttctgcacgtgtatattgtcctaatatggaagaagcataaaaacgaccaataatgatataataaatattcttataaatagtatttataagcccggataacagcagcttggatccaaaaccaaaaagctcattaaaactctttatcgaaaactcaaaattaggatgccatttacaaaaaatccataaaaataaagtattcaataattgccgggatagttgttgaccgaccaagctccatacccccattccggcaagcgccatacctataccaacaaatccactacttatagacgagattaatgaaactttagtttgtgttttaaaattaacattccgtacaaatatcgtacgaggtataatggacaatgcattaataataagaataaagcctattattcgcataacctccatcaatatgggttctttaaaaaaaacacttatagccggtgatgcaagaaacaaagaaatatataaaacaatactaactactatattaaaataaaaaacggtattatagtcaatacgatttatgtgtactttacgtatcagggc

SEQ ID NO: 6609 - DNA, 790 bp, Unknown
  gut microbiota DNA sequence
tcctccaaggaatggaccaattaccgccatcaggcagatgtgctcgctatctatcagcagctcagacaagccggatataccgacgaccgtatcattctcattgtcgaggatgacatagccgataatatatcaaatcccaacaagggagtcatacaggtgactatcgggggaaacaatgtatacgaaaatgtagagattgattatcgtatgtcatcgttgaatacaaaagatatacttgccattctcagtggcgaaaaaagcgaaaaactgcccacggtaatcgaatctactgagaacgacaacctgttcgttttctggagcggacacggtgtgccgggggccatgtgttgggatgaggaagcttacgccatgacaggcgataaactgtcttctgtttttgaggatatgaaccgcaaaaggcgttaccgtaaacttctcatgatggtggaggcttgtttttcgggcggtgtgatgaagcagtgcgagggcatccccgggatgctgttcgtcactgcggccaacggcgacgaaacatccaaggctgatgtcttcaactcagagatgaaagtgtggatgagcaaccgtttcacctccacctttatcgaacaaataaccgataacaaggaggtggctatgcgcgacctctattaccggctgttcatcaatactgtcggaagccatgttatggtgtataatgctgaaaactatggcaatctttattcagccaatatgtcagaatttataaatttcaaaaacaataaatcaaaatctgaactttcgcaagtgaata

SEQ ID NO: 6610 - DNA, 435 bp, Unknown
  gut microbiota DNA sequence
attagaagaaattatgaacgacgaaaatagacaagatggagaaagatgaattgacataccacgtgcctgtattgctaaaagagagcgttgacgggatgaatattcgtccggacggaacgtatgtagacgttacgtttggaggagcaggtcattcgcgcgagattctttcgcgactcggagaaggcggacggttgctgggatttgatcaggacgaagatgccgaacggaacattgtcaacgatactcatttcacctttgtacgcagtaatttccgttacttgcacaattttctgcgttatcacaacattgaacaggtagacgcaattcttgccgacctcggcgtctcctctcaccacttcgatgacagcgaacgtggtttctccttccgtttcgacggagacttggacatgcgcatgaataaacgggcgggactca

SEQ ID NO: 6611 - DNA, 375 bp, Unknown
  gut microbiota DNA sequence
tattccatgactggctggcacagagagggaagttgggaggacagcacaaagtccccagactcagcaatacacgtgaatacatagagacaatgctggcgttgaattccagccccaaaatatagagaaacttatcatatagttattacaggttttcttttttgcaaagattacttgcctgagacccgggtgtcgtgtagacggaatccgggtctcagcatggatgagacttgggttcgcacaagttattccggctgtcggatagttatcgggcttttactataatccctccccccagcagcaaatcatctttatagaatgcggcagcttgtcccggagcaatagcagtcaacggttcatgaagctgtatatgcaata

SEQ ID NO: 6612 - DNA, 338 bp, Unknown
  gut microbiota DNA sequence
cggcagcggctttgattgtgcaggaagccggtgggcgggttaccgatttttgcggtaacggacacttcatggacggccatcatattatagcgactaacggatatttgcattctgtatatcaacagcttattgcagaagtccctccattggatatgtgacgatattgtagccttcaattctctatgattatgaaacacacatttcttgttaaagaatggtttggggcttttctttccctcttattccctcgttgttgcgttgtctgcggcaggccattggcaaaaggggaagaatgtatttgtgctgtgtgcaatatggatttaccacgtaccgattat

SEQ ID NO: 6613 - DNA, 42659 bp, Unknown
  gut microbiota DNA sequence
gaaaacaagtaatgatgtgatccggtacaagtaatgttgtgggtgattacattgcttgttctcatccacaacaagcaatgtaatttcaggtaatgatcgaggcatgaaaaaacaagtaatatatatgtacgaatatcttttttatacaagaaaaatcatctctgattatcaatatattacaaacttccaatttcttgtcgacaagaagttgggagtttgtcgacaggaagttaacttcttgccaacaaactcctaacttcctataaaaggagaaataaccgattctccggtttccttacactgcatagacctcgtgattgacagaatgaatagcggattatctgaaacttccggagcctgcgttcaattatctgtatcggaaaggctgaacgcttttctttcatcctactcttttagcatctatatatcggtggtattggatatatagatactgcatgtccgatatatagatgcgacatgttcgatatatagatgctacgcatccggtgtatatagccaatattcagaatatgaattaaatttctattggttatgaattaattcaccacagagtttcacggagttctattcttttgatttcaaattgattaaactctgtgttactctgtggtgaaaactcattactataccattatgcacccactcattcttctactttcagcggcaggatgattgtaaagcgtgtgccctttccgggcgtagacgctacttcgatcttccccttgaaacgttcagcgattgtccggcagatggccagtcccagtcctgtaccttgtttgaaggcatctcctttgtaaaaacggtcaaagatatgttctatcacttctttggccatacctgttcccgtatcttccacaaatatctttacacaattggaagtggcaagccggtagcctatacagatatttccttcggaggtaaacttaatcgcattgttcaccagattgttgataacctggctcaggcgagtgggatcggtagcaatagtgatctcctgtccaggaagatccagcaacagttccacgcctttcttcatattcattctttgcgcactgcctatctcattcagtacctgatggagggagatgttgcagaagttgaactccatggtgttcgactctatcttggagaggtccaggatgtcggatatcaggaccatcaacagctggctgttcttttcaatcagagaggtaaattcgatgatgtcgtccttggtcaggtctgagtctccatgggccagcagggaggaaaaacctacgatggcattgagcggggtgcgtatttcgtggctcatattggcaaggaagatacttttcagttcatcactgtgccgggctttacgcagggcttcgttcaaacagtcttcggtatccttgtatttctgagtgctcatacagatgccgacaatacggtaaggggcttctttcagctgcccgacgtaggtggactgggcttcgaaccattcccaactgccgtcgtcgcggcggaggcggtattctacaggagcttcatatagattaccatccagctgcaaggttaaggcatcaaacaccgactgacggtcgtcgggatgtatcagataagcaaactcttcgggggtgagggtgtagtcgcgggtagggatacccaaatattcgaaatagcggggatcgataatcataagattacgttccaggtcgtacgaccactggaatatctgcgtacgactcagggcgatgttcagcaaacgtttctgggttctttcttccagcacattgcggtaatagagtacgattcttaccagccgctcttcttcatacacgcctatcaaggcaccttgtatcagaaaactgatgtgccgcttctgttcatagatgaaacagttagaagacaaggggatgatgcgctggcaaccttcgcgcagttcctgtaaataacgaggcaggacattctgcttatcctgcactacttccaacaaatcgaagacagacttaccgatgatgtccgtatccagttggagttcatcactcatctgcttgttcacgcgccagatgcggtcttcaaggtcgatcatgacaatgctgacgggccatacatcgaacaattgttcggcaatggcgttcactatccgtacttcttggggtatatcagggttcataaagggttatgtttatcgtgtagacggcaaaggtcgggcttaaacgggtaggcaacaaacaaaccggaagaaattaatattccattttggcacagatatattccgtcattcacacctttacatcttttaacgggacgaaaagggacagagagtcgaatttaacggttattcctgctgattataaatcaatatcattcaattttgcaagcctaaaagataagacatgagtataactaaattcaatataaatgccgacttcattgcatatcagcagatcacggcaagtgggctgagccatctgtcgggacgggcttacaagacggagggaggcattttcgccctttgcagcaagggttcgctgaagacaattattaatcataccgaatatcggattggggtgaatgagctgatagttgttcctcccgagactttcgtccagctactgaccgcatcggatgatgtggaaatacatgctgtcatgttctcgcagcgactgatccagaatgccggaatgggcaagaatatgatggataagtttcatatcatcggcaagcattatgttttctcgttgtcggaaatggtttcgcaactttactcggagatgtttacgtttctgtcgcacctttataaagaggttggggagaagttgagtgaggctgtgttgcagtcgttcctaagtctgatgttgcagggggtatccgaactttgtccggaacaggcgaaactgaaagagacgccaggcagcagacatttccatcagtaccggatttttgtccgaatggtacatgaggaatatgcccgtgagcatcaagtggtgtattatgccaagaagatgaatatgcaaccgtccgccctttgccggcttgtcaagaaggagtcgggacatacggcaatggagattatcaacaggacactcatcatggatgccaagacgcaactgcgcacggagaatacgcaggtgaaggatattgcgctgagtctggggttcaataatgccgccttcttcaataaattctttaagaagcatacaggggtgacgccgcaaatgtttcggaattcggtaagataacaggattacagaagaagaaggattgtttttgcattcccagcaagtgaagatatttatttcatcttgcgcagctttaccttacgaagcagacggcggacaggaatggcttttatttcaccatcaggtgtacccactatcacagtttcgttccgctgtgcttttttctcaagcatgcgttgctcggccagtgccaccccatagtgcaatttctcgcttaattccttccactcatcgtttgacataactttctatggttttaaagagttctatttcatacatccgtgtcggaagagtaggaccaccttcaaaatattcttagtaagaatttagagttgccggcattttcaccgtagcaactgcgacaaagataaagaaactcccccaaatccatgcagcacaagccataattctcgattcatccggagaataattggtatgcggacaacgcgaatggagcggacgaacgcgtaccaatctcccctccctttcgtgaaccttttatgttgcaaacgagttaattaagaagtactagagactttttacgaaaaatacaactacgtgcatttaataaaaatccctaagtttgcatcatgaaaaagttactgctgactctgctcactttcctgatagccgttaatgtggcttatccacaactcgccatccgccaccgtttagccactccccgacctgccgactcgctcgatatagactattactcccacaaaagggggcttcaggcgggcaccatggtcttcggtatcaatatgggagtctgggccttcgaccgttatatccgtaaggctgactttgcctacatcaacggacgtactatcaaggacaacctcaagcatggcttcgtgtgggacaatgacgccatgggcaccaatatgttcatgcacccctaccacggcagtctgtacttcaactctgcccggtccaacggatacaatttctggcagtccggactctttgctttcggcggcagcttcatgtgggagatgtttatggagaacgaatatccctctaccaacgacatcattgccacccctatcggtggtatggccctgggtgaagtgacttacagggtttccgacctcatcctcgacgaccggaaaaccggttggtcacgcttcggactggagtttgccggattcttagtgtcccctatgcgcggcttgacccgtattatcaacggagatgcctggaagcggcgttccacttcgggtaagcaattcggtgtacccgatgtaagtgtggatgtatctctgggtatacgtaccctggaactgaaagacgagattctggacaaaggtgtgggtatggcctccgaaatcaacatcgaatacggcgaccgcttcgatgcggaagataccaaaccttacgactatttctccatccaggcgaatctgaactggcagaaagatcaaccggttctgggacagataaacatcattggccgactggtagccaaagagttggtgaacaacaaaaagcactacctcagccttggactgtaccagcacttcgactactacgattcggacacgatatcagcagtatcggcaaaagtaccttataaattctgtacacccgcttccgtgggcggcggcctcatctacaaaagaaacctcaaacaaaactggggaatagacggttacgcctacctcaacgccatccttctgggaggtgccctcagcgactattatcaagtggacgaacgcatctacaacctggccagcggctacagcagcaagctcaactttaactttacctacaaggactgtcttgccatatccaccatctacgaagtctaccacatgttcacctggaaagggtatccccaagacatcaactgggacgaagtggagccgaagacgctcaatgcacagggcgaccgttcgagggccattctccatgcagtcggcctccggctggacctgaaattgcggaagcaactgtacctcaccggcacatttatgaactacacccgcgataccaaatacaggtatcacgccaatgtattttccaatacttcggaagggcgtattatgctgacttataaatattgatggaaaggcatcaccattgccttactcatatattttccattcccacaaccccgcatctccccgcagaatatgtaagcggagataacgtgcctcgccaatacccttagccacatggggagaccgtgcctgaagtttcttttcttcggcacacacctgccaatgcttgccatcgacagacttttccagtctccatgtatgcccttctgtgggcttggtgaaatagaactggcattcgccaacgttgcgcatctctttcaaatccaccgtaatgtacggactgctatccgtgacggcagccatccagcgagttccgttcgattcattgcccacgtgggcagcctgataggtatgtgtacgggtatatttcttcaccgcgaagggtcagccagattatcgggaatcagaggattataattgcggtttgctatcaaagcttccacaacggaagtatccacagcaaaagccgtcccgtgacggatgccacgagggaatgaaatcagatcagacacatcttcccaagtctcgccatgatccagtgaacggactgcaccgtaacagtggtcgcggtatttatcgaaataaatatagagcgtatcacccacaaacaagggggcaggtccttccgcccagtagtttccggtgatagaaggggaaactttagtagggaatcctttcgccagatttctggtacgggtaatgcggagattcttctccggaggattggagttttcattcttcaccaccataatcagctcctcgttcttcgggtctttcacgatggcagcatcaatgacgctgaaatcgggattgaaaaacatcttggtcttcgaaaaggtctggaaatctttcgtggttacgtagtacatgcgatggttcaaccctttctcactctcactggttgccacttctttatgacggccgggaatggtggttgcccagaagatataatatgtctgcgatggttcatcgtagaaaagttcgggcgcccagcaattgtgggcagtcggttcgtgcatcatgacgggaatggctcgctgctcgctccaatgaaccagatcgcgggaagaggcatagccgataatccggtcggtccaactggaagtccagaccatgtgaaaggtgccatcgggtgcctggcagatactcgggtcacgcatcagtttatctttacccacggcaggggtcaggtatgacttgccaccgttcagggcggtccagttcaggccatcgtaactataagccagatgcagtccgtctttgctgtcgttgatgaaataggaaaaaagataagccgttccattggcataagtggtcatcagggtgccgaaacacaaagtcaaccagataagtacagttttcatggtttattcaagattaatgatttcattgcctacaaagatatagcatccccggaacataccgaaacggaaaagactggagaaatgaaccgatacctgtaatattgtgtaaaattcagttgtccaatcagaagaattcctctacctttacaccggtacatcaaatattatagattatgaaaggagagcgtaacgtacaggtatatcaagtagggccttatctattcggtacttcctccaccattccacactggaaaacggaagagctgattccctccctgaaacctttcctgttatctttagatacatacaaaaagaaagaactcaaaatagcattctcacttgccgtccagccggagagtgaaatccaagaagaagaccatgctaaataccgctcactcgtcgagtttgaatgggaaggtgccacatgcaggatcagtgtgattccggatacggactcttatctcattaccatcctcgctcccaacgatccgaaagagtacacagcttatttcttctacggatttaccaaaggtgtcctgttcctgcacgaaacagaagcggatgcatttgtgctcaacaatatcctgatgatgatttatgctttcaatacggcttgttccgatactgtattaatgcacgcttccgtcataaagaaagatggaaagggatatctcttccaaggcaaaagcggaacgggaaaaagtacgcacagcgggttgtggctgaagcatatccccggctgtgaactgctgaacgatgataatcccatcgtgcatttcaaccgggaaacaggtgaagccacagtctacggttcgccctggagcggaaagacaccctgctacaagaatgactctgttcctgtaggggcatttgtacgattggaacaggctccgatgaatgagattcaacgagagagtccggcacgggccttcgcatcactattgccatcgtgctctaatctgaaggaagtgagagaattgaataatggtgtcatcgagacagtgaaatatcttgcggcccatactccggtgtattttctgaaatgcttgccggacagggaggcggcggagatttgttttaatacggtatagaaaggaagaaaaccagttgacgagttgacaagggaacaaggggctgcgcaatgctcctatgccgcatggaaccttgtccccttgtcaacttgttaactcgtcaactttccctcaaaaccgaaaaagaatgatagataacggacgaaaaagaatcatccccaacgaggtactgttacccgaagtagcacgcctcatcagcgaaggacataccgtaaccctgacggtcagaggaaatagtatgaacccgtttcttgtagaccgtcgcgaccgtattattttaggcccttttaccgatgatgatttacaaccgggcgttgccgtacttgccagagatacgaacggacatattatcttccaccgcatcatccaccgcaacggccaagagctaacattactgggagacggtaatatacgaataaccgaacagaccaacatagccaacgtcatgggagtaatgattgccgccatccgtaaagagaaagaatatccgtgtaatgaccgtgtctggcagcgctactctttttggtggatgaaactgacccctgtaaggcgatggctattggcaatattcagaagaagaaagatttttcatccgcagatgacgcgaataacgcaggattaaatactgcgtaacaaaaaatcagtgtcatccgcttcatttgcagatgagaaattatcacaataacaacccctaatacatacaaacaatgaaaattaagaacggatttactttacatcagattggtgacgaacacatcatcatgcacaacggtacaggaaacgtagatttcagcaatatcatcagcctgaaccctacggcaacccgcctttggcaacatgtggaaggaacagatttcaataccgacacccttaccgatttccttacggaaaactacgaagtagacgctgaaactgcaaagcgggatgcagagcaactgataaagaactggctggaagccggaatcatagaatagcatatgcgtcgtactttcctaaccttggtacgttccggattatggaacacccccgtcgacccaaccccgttcagtagcatgaacagtgccgactgggaagaaatataccagctggcacgtacccaagcccttctcgccattaccttcgacggagtgctcagtctgccggcagaactgcgcccaccccgaccgctctacctgcaatgggcagctaaagtagtacaaatcgagcagtctaacctccgcctgaatgaagaactcccggaagtttttatgccataccgggaagccggtctacaccctattctactgaaaggacaaggcatcgccactcactacataaacccattgcaccgtcaatgtggcgacatcgacgtctatatcggaaaggaaggacaacccatagccaacaatattttgctccgtcacggtgcagaggcagaaggagaagcatcggacaaacacgccagctattcatttcatggcgttcatatagaaaaccatcgtatcatcctgcggattaacaatccggcaggtaaccggtacttccagcgtctgatacaggaatggtacccacagcatgctgaaacaagagagatacacgaatatcccgtcagcctcccgcctgtaacattcaatgcgctgtatatcttcatgcatgcattcgtccatttcctgaacagcggcatcggccttcgccaagtttgcgactggacccgtctgttggcaacacgtcatgaagatattgacaaacttttgctggaaaagtatttccgcaaagtaggattgctacgtgccgcaaaagctttcggatatatcgccgtgcattatttgggtttgccggaagacaacctacccttctccgtcaaaggtatggaacgagcaggagaaatcttactggatgatatctttgctaccggaaacttcggtcagcatgacgcacgcatcaagccacgtcccaaaggttattgggccggaaaatggcacactttctgccgggcaaccaaacgctgcatgaagctgcgaaagtttgctcccaatgaggcgttatggtatccggtgacgctgataaagggaacagtaacaatacaaattaacaagctcgcagctcgtaactaactcattatgaagacagaacaaataaagtacatctgggaagtatctcacggacaacggggacgtattctcctctcctgcctcacaggtatcattggggtagcggtttctcttgcctttatttatgcttccaaggtcgtcatcgacattgccacaggtgccaccatcggaagcctgcccaatgccgctatccttactatcgctttgttaatcgcccaacttctgtgcggagccatcgacacctggctcagtgcccgtatgcaagtggaaactggaaacgcactgcgccaccgcctattctcccgtctattacaaagccgttggaacgaattggaacgcttccacaccggcgatatcgtaaaccgagtggaacaagataccgccgctatcgtgggggtactgaccagtacaattccggctttcatagttaccatcgttcagttggtagccgcattcgtattcttctgctttctcgatccgtccctgccttgggtagtggtaggcattctacctattttcctattgggcagccgcttctatatgaaacgaatgcgccgctacacccgtgaaatccggcagagcgacagccgtatccaatccgttatacaagaaagcctgcaacaccgaaccgtcatcaaaaccctggaacaaagcgaccggcatatcggaaaactggatgatctgcaagatgcactccgtagtcagatattcggtcgtacccgcttttcgctctctgcacgtatgctggtggcatttgcgttttccggcggctatcttacagcatttctttggggagcaatacgccttagcacaggcagtatcaccttcggaacaatgaccgccttcctgcaactggtaggaaaagtgcaacgacctgccctcgatctttcacgcctgctgccttcctttatcaatgccctcaccgccgtagagcgactgatggaactggaagaacttccccccgaagcaagtggaaccgcacaactgttcccccaaaccccggacttacaattgaaggatgtcacattcagttattcaacaggagaccgacctatattaaaacacttctcctgcaacttccccgccagaagctgcactgccgtattgggtgaaaccggtgccggaaaaactaccctgatccggttgcttctcgcactcgccactccgcaagaaggaagcatcaccctttcgcctgcaaacacagcgcagcccccactctcaactctcaactttcaactctcaactctcgaagtttcccctcaaacccgttccaacttcgtctatgtcccccagggaaacactcttttcagcggtaccattcacgacaacctgctaatgggtaaccctcatgccaccgaagccgaaatgctccaagctctccgtaccgcctgtgctgacttcgttctctctttaccggacggaatagataccaacctcaacgaacaaggtggcggcctcagcgaaggacaagcccagcgtatcgccatcgcccgcgccctcctccgtcccggacacatcctgctgctggacgaagctacttccgccctcgatcccgaaacggaacggcaactaataaaaaacctgcgcagagactgcacaggcaaaacattcatcttcatcacacaccatccggcagtagccgaggcttgcgaagcaactatacaactttaagcatccatcttgcattcatctcgccttcatcatttatacccctcatgtaaaagatggcatcttttgtagcgaaaggtggcatctaatacaacaaaagatggcatctttaacagcaaaagatgccaccttttgcatcccccctcgtaatgaaccggatcatatcaaagcatcaaacaggtgataagactatatgcttcagccgtccggtctctatcttcggtcagaaagacgcattgccatgaaattaagaaagggaaccatctcacgatgactccctttcattcctaattttaaatttgctttcgcaaagttctccagacttaaaatagcttggcaggatattcacccgcatccactaaagcctggattttatctacaacactttgacgatcctcaggataagtcacgccaaaccatttgcttgtagtatcgaggacctcgcatgtagcgacaccgtcctgaatcaatttatctaccatcaacggaatgaagaattcactcttcagattctccatattcttcggatcactcaagaagctcttgaagaaatcgcagctgtatgcgaagtaatcgggagtaaagccccagaaattcatacttaccggagtagtttcgggagtagccgtccattcgccattatcgtcaatgtatttcacttctccgtccatacgttgaatcttagtgcgttctacaacagaagtcagcagattgttggcatccgtaccgcaaagaccgcgagatacagtaccgctatcgctcagtgtattaccaatgcggaaacctaccattgaatatacattctttgaatcttcgggcagtgcagaaaggaatttacccattacctggaaagaatcgcgaccatagaagtcgtcgcagttgataacggcaaacggttcctgaattacatcagcacccatcattacggcgtggttggttccccaaggtttcgtacgaccttcggggcaagtgaagccttcgggcagatcgtcgatagactggaacaccaattcgcacgggatatgaccttcgtatttggaaataattttatcacgaaagtctttctcaaaatccttacggattacgaaaacgagcttaccaaatccggcgttaatggcgtcataaattgaatagtccataatagtttcgccattcggacccagtccgtccaattgcttcaagccaccgtaacggctgcccattccggctgccaataagaataaagttggtttcatacttagttattatttaaaaaggttagtgtatccttgttttgattacggggcaaaattacaaaaaataaagtcaagaaaggtagacaattggttcatattttagctctatcgtacaaaacccgccattagaacggataaccgatagcaaaatgccatgccataccatctttaaacttcggaatattataatatcccttcttacctgtatcatacggatcatgcagtgccactccccagtcaaaacggaaaacaaggaagtccaggtcgtaacgcagaccggcaccggtacccaaagcaacctgtttcgggaaattcttcaacgtcagctgtccatcaggacggtctttatccttacgcatcaaccaaacattacctgcatcgaggaagatagctccgtgcaggtcgccgagaatacggaagcggtattccacgtttgcttccatacggatatcgcccacgtggttgatataggaatactttttctctttatcgggtggatagccaccgggcccgatactgcgggcagaataggcacggatactgttggcgccaccaatatagaactgttcggtataaggcgcagtcgttgcatttccgtaggaccagattactcctcctgcaatacgggaagcaatcatctggttcttgtctatcctgtagtgatagcggaattccgaattcagcttcaagaattgtgcgaaaggtactcccagcaatttcttgtcttccttactgaaagactgtccgaatgccttataaatcaaagaggtcagattaccggcagatccgaatgtagtctgccaccagatgggattacgtacattgcgaagagaagcgttatcataggtgtaggtatattccatcttgggaataaactgattacggagactgatgtaaagagccgggttctgagcctgtatttcttcaaaagccgcagtcggattgcgcaacacattaaatgtcagttggaagggcgtgatactatgtttccgggtaggcacaggctgaaagtcatacgtgacgtttccaccgaaagcaagcagtttgtagtacttggcacggttcatctggtctatgtagacacggaaggtggtggaagccgggaagtcatattccttggtacccatccgggggaagacgatacgtgggaaggtaagtgcagaagataggcccaactcgtagctattcatcagcgagctgctgttcttacccgtctgccattcataagaaccgttcactttcacattccaggtttcaccaccaccgaagacgttgttcttcgttacggtgaaggcggcaccgggaccggtctggttattgctcttcatggtgacattaaagtccaattcggcatcatacggtttatccaacatggcacggatattcacatccagcgtatcggaaacgagtgccgtatcgcggggtgtgtactgcatctccagataacggaagatacccacacttgccagacgctcctggatacgggtttgccggtattggctatatagcttttccggacgacggcgcatacctcccttgtccagttcctggcgtttccgttggtaaccttggtagttcagccaacggtggagcatattgggacgtatcttcagtttatcgtaatagtgtatccagaaagtcttgtagtaaagactgtcattgggcatttgtccttgcggaccgtggaggtagaaattagttttacctacaaagaaagggcgttcggcgtccttcggcataccgggaacagggatcatgcgcaggctgacgtgcccaccgggaacgagagttgtatcggcctggtaagtcaggtagtcagggcgaaaataataataccccatattacgcagcaaaccgctgatgcgggtacgttcaccatcaagatcagtaacattgaactgttcacccggactgatcagggagcgccggcggccaaggttgataatctgcatcgtcgtactattgaatccccgataatatacggtatcaatgaaatacgggttacgcatatcgaccgtgtattgcaatttagctttcagactgtccttaggattaacgaaagtttgataacttaccgtgccattgaagtacccataatcatgcaggatattcgtcgctactttctgccggatgtccggattaacggaagatatgagcacgggggtggcggcaaagcgattgaatatccacttaccaaaaccttttttgtacttcgcaaaaccattatacacccacagtccgaatggaaaagggatgcggtattcggagctaccgagcagggagttattgggagctttggcaagggcggcttccacttcttccatagcagtctcgcctaccttggtatcagagcggttctctacaatcatcggcttctgaccggtgtagagcacttcgccttcaggcaggtgcttagtagtggagcaggctgccagaagcagggttgcaaggaggatgtatacgagtttcttcattttgattctttaaattgcgctattgttatttcttttacactattcgctcacaggttctactttcttctttctcttgaatatgaacagctcactcaggcggtccatcttacggcgaagcacaaggccgacacctgtctcggttatctcaccatcgagcacactttcatagtttttgttgtggaacacgcggacatagcgtgtaccgctattgtccaaacgatattccaaagaaatattatcgatgaatgattccacgtcattcgttgcattagcgccactggatacttttccaccgattacaatctgtatacgatcattgaagaaacgctgagagtagcggaaactatagtccgtctgtttatcacccgtttcagcagcggtacggtcttcaatgccaacactgagagaagcgttcttcagatttccggtcagcgcattaatctgactttgcagcacgctgttcagtgcggaacccatagttaagccaccaccttttccgctgttataaagatacatacctgtggcaagcatggtaatggcttgcttgcttcgttcatcggcactcattcctgccagttcgccctgtacggtagcatcatcgggagcactcagattaaagcttaaatcagggttctccaaacggttcttgatgctgatggaaacgtcgaagttcaccatgcgcgaaccgccgtcatcgccatcggatacagaagcgcggacacgttccgtagcagtcaggttgagtgaagggttcatcggattacccgtccagtccacataacttccattgacaaactggaactctttcaacgggataacgggcagggcatatttcatcataccacctatcaacgtatagcgaccggacaatgtgagatctccttgcggagtatattgcagattcaggtcacctccaccttccagctccacacgactactgcggtcggggctaagatcagcacgcaaacgtacggcatcatcgatgtgcacagacatcaacatgtccataccgccgagcgacatggtggggacctcagttgcctgcaccgaagtagtatccgtaaaggaagtgaacgtgacaagttcacccaaacggtcttctacagtcagaggagagtcagtcaacacataggtcacatctgtgttacccagcagattcatgtttccacgcatggtcagtccatccagcggaccacgtacagtggcatttaaatctacaaagattttgccgtaaatcatactttccttggtacggggagcatcaagcaaagtgtagttctgtgcacgcaggttcaacttcgccgtcggattttccatattgcggaagtctacgttcccgtctatcgtaaagggattccggctggtggtgtatatggcaaacttattaaagataagttgattattctctatcttcaacggacgattgtcaaaccagtaacgtgcacctgcctgacgggcatagacggacacactgtccaatgagaggtcaccgctcagtttaggcttctccatggcaccgctgatatagagtccgccgtcgatgtcaccggtaaaggcaactacctggtcgggcatgaaagcattggcaagcgagagtgggaaatgctcaaaagtagtgttgacttcaaccgaatcgcgcccgttcttctgggtcaagacggcatcagcggtcattacctcctgatctcccgaccggaaataggcattcagatagtgtgtacctttatcacccggaagccaagtggcacccaatccgatgttacctaccggctggcgttcgtaagtcagcttttccacaccggcctcagcggaaacttgcagtgaggttgcggtctgtatatagttggcttctgccgagaaaagtcccgtgatgcggggcatatatggcagaataccgctcagtttatccaggcggaaacgtatgagttccaaattgatattctgcaaggaaacggtgtcggaacggtcggactgcatgcggaagcaaagtccatcgtcgctgtccatatccacattggcataaacgcgcatattcttatgcaagtaaatccagtcgctgttatcaacaaagcggaacttctggaaagcaataataggctcggcaggtgtcaaacggaaggcaataccattacccctaccccggccctctatcaaaggacgggcattgatacccagatcgagcccggtatctcctttcgcatccacataattcaaggtcagttcggcatcttcattacggatttcacccgtcagtgtactgcggaagacaaactgcgggttctttggaccattaatgacaccaccctgcaacttcatgcgtgcagtatcttggctgatagcgaagaaaatagtatccagttgcagggagtccatacgcaaaccatgtatagcagtacgcccattgatacctcgtcggggggtagtgccgaaacgcaacacaaaatcatcaaaagaaatatccttagttgccaggaaataactgacagggttctgtttaccggctttcagttgcataccggctgaaggcagtgctttccgtaattctgcatgatcgagttgcttcaattctatctgcttggtaagaagcgtagaaaaggcagtaccttgttccagcaatttcttcagtgtgctgcgggcacggaactgaaagtcgagatcgcctgcatccatgctcatcttgatagagtcatggcgtgcttcggcaccgagagtgaaagcgaaaggatgcttcaacggcttgggagaaattcctaactcatgtaaaccgacattctccacattcatagccaccttgccatccaggtatttacgatcaaggcgcatatcggcatccgcctgcattttcagcagggcattgtcgctcgtcatgtgtacagtggctagagcggatttcaatccggctgtcaggtcaataccggaaatattccagtgtccgtattgtaattcgccgagagaagcttgtacagcagccacggtacggtggttggcaggatcgaatccttttcctttagcggcaaccttagccgaaagggtatagatagaatctttaggtaagaagtggtgtacttgcaaggcgtccacatgaaggtctgcctgataagcttcagtggcagtgttatagtgcgccaacaagttcaatagcccttcacgttctttcaacttaagcgtagcatcatacttaggtccatccatgccaagacgtgctgccaaatgcatactgtccggcactactatggagccatccggggtgacgcctgtcagtccggtaaggaaattcagattttgtgtccggatatcgaagtcaatgcttccgttgcgcgtcagactgtcggtaagattccaaatttcaccaccaccattcaaggtaaaagcacccggcagatcgatgttgaagcgggaaatctgcatctgcttaaagttaccttccgtaccggcacggatagtaagggggcggaaaggatatgcatccttgaatgtatcaggtaaatcacctgcaaagagcatcacatcctgcttgccgatgcgggcattgaaacgagcggagagtcgtccggaagtaggaatttccaccagttcccaataagtctgggcagtgaaatccatttcactgtgtggggtaagtaattttaaggaaggcacctgaatgactgtggaatcagcatatacccttcccgtcagtgaagtgacgctcaaaccggaacgctcgttcatggagaattcccggataacggcattgatattccgtccatgataaagcacggagtccaccccaatacgaatatcccgcaaggcaatgtgcgaagcatcaaatccgggagcaggtttcacaccggtgctatcagtagccgcaagactaccggtatctatcaggctattaatggcactgagcaattggctgcccgtgtcatagttcaccgtagtactgctcaattcaaatttcttcagaccgtacatctgtccgcccaagtcagcaaccgcatcatctacctctgcatcgcccagacgggcagcaagacgcatggaatccaacggcatttgcaaatcaacggaaacgtttttcagtgccaacttgtgcaaggctactttccaattaagggcggtagtctcagtgtccggttcggcagtggtagtatcattcatcacaacgagcatatgagtatcactcaattccacacgattgatgacggcatcctctttcttcaggtctatgccatggctttcaaggaagaaacgtcccaatacgccacgtatgcggatcccctctatcagatcggcagagttcaggaaaactccgttcacgattacctcatccacttctacttgtccacgtatcaacggccatgcctgcacgcgcacgttcaggctttccagggttagcaaagtatcaggagtttgtttcacggcaagagagtcaccgggagctgaggatatttgtttatctgcctgtataggctgaataacctgcacaccacgtaccaaaaggttcagcggaaagcggaggtcaatgcgttcaacagatatatccatacccgttgcctcggatgcgatggcagtagcttgcttccgtatcaggttctgtacgggagggatataaagcaataccatcaatattgcaaataatatgataggggtaagtagtatccacactacccattttaaccattttcttctcattaggacgtcaatcgatagtcagtgtttaaatcgttacaaagtaaacaaattccaacgacatttggttgatgcagaagacaaaaaggctatttattccactatccggtactttataccgcgagggtcattgccaatattcaacgcccgtctgaaaattacttcactttctcacgtacccactaacgacagtcagacagtgtcataccgtacatatgggtgaaggttttcaggcatgatcaagggcatgttcaagatcatgaaagagacactactcacaaaatttccctttgcacatatttttcaatatttatccttgctgtttatcaataaatcccctacctttgcttccatcaaatagatatgacaagtatgttccggcaatcaacagacaggctcacggtatggctattcgccctctgcctcctctttcctttcagtaaattgtcttctgcatggcgtaatacagccacgcaggataaggctttttcaatttcagctgtatcaaaagcatcttctgacagcataatgcctgaacgccttacgtttcccgattccgtggcacttgcagcacccgaagctgccggaaggagcgtttcttctcttgtagcttacttgaaacagcatcttagcacagacgaccaactggcacgcgccatctacacctgggtttcaagaaatattaaatacaatgtgtacataacctatacttctcgcaacgaggaagcggatgagacgaaagaaatacaaaaaatattatccgaacgcaaaggtatttgccaggattatgcgttactttttaaagcactggtgaaggaagcgggaatggatgcttatgttattgatggctataaccgcagggacggtgccttactgcccgacccacatgaatggtgcgcagccaaagtaagtgggaaatggtatatgtttgaccctacatggggcgccggatttgtggaaaactaccagttcattccttccccgaatcatcgtttctgcaagctgttaccggatacattactgaaaacacacatgcctttcgatccgatgttccagttccgcgaacgtccactgagctatgaagagtttgatacaggagttgtagatgaacaacgctcagtaccggtgttctattgggcggatacattggcgctatatgcacggcaggatacactggaaaggctggtaagtgtcagacagcgcatgttatcgaacggacgaagtaatgatttggtttattatatgctggaacttacgagtaacaacatccgcatcgccggctaccagaagattctgaatgcttacaatatggcaatggatttacagggaaaagctacggacgccatcaatgaattcgtccgttaccggaataaggcatttgagcccctgaaaccggatgcagaaattcaggcgatggtagatgtccctgaggaattgataaaccgggcagatagtgcgatcaatagcatccgcactgcaccggaaagatatagggaacctatcctgaaattacgggatcagataatggaagtggcaacaaccgtatataaacataaactttttctgaggcagtactttaagctaccggccaagcagaggaaagggatgtttaagcagacgaaataaaaaggaaggcttgttcaagtatatcttctatcaggtttagagcagcaagcgatttctcttttattttttcatcaaaaggtactccacgtgaggcttcaagctctttcaataaagtaacaagatcattggctcccaacagagtaaacaaaggaagcatcttatggcccatagcggcaatgccatctgtgtcttctgtttccaatgcctgtcgcaagcggtcaacattcaggcgtgtttctgtgacgaaactttccagtatggattttgccgcatccggatcatcaccggaaaaagcggtaagggcggaaaaattcaaggtagaagaaggggcggcatcaacagtagcaatatctgcttgcagcacaccaatctctgcaagcaattcattcaccgtaaacggcttatgcagacttccggcaaaaccatgttgcagaaactcctcacgcttcatatcactacgggcggtaacggcaatcaccggaattgtcttggcttgcgggatattcgaagcacgcagcagcctcagcaaatcgaaaccattcatggcaggcatttgcacatcggtcagcagcacatcgaaagtatcagtacggagggcttccaaaagttcatccagttgcaggcaggttacggaagtaataccactctgtgcaagcatggcggcagtgagagtaagctgaatgcggtcatcatcaatcaagagaatatgtaatgcgggtatctgagtttgtgagtcctcacttggttgttcattcaaggcggaagtatcattatccaatgccaccggatacagaggtacccgtaacgtgaatgtgctcccctttccgagtacgctatccacctcaatacgtccctccagcagttgcaccagcatacgaacaatggacagtcccagtccgaatccctcctctccctgtgctccgggcagacgggtgaattcctggaaaatacgctcacggtcaccaggatccatcccctttcccgtatcgataacagagagtttcaaatggttaccgggaaaaacggaatcgcctttcggcacaaaagaggcggtcagggtaatgccgccctctgaagtaaacttcactgcattagagagcaggttattgacaatctggcgtaagcgcaatggatcactgataaaagctcctttcagttccggatctatctcacacttcaaagacaatcctttggcagaagtcagtggttcgaaactgacatagatttcttccagcaagcgtgcgggatggaaagtaacacgatttatctcagctttattcaagtcgaggcgatggaagtcgagcaagtcggtaacgagcttcagcaggtgttccgaagaagttttcatgttgtcgagatagaagcgttgccttccgtcaacggtgagccgggagagcaagtcagcatatcccataatggaacccaagggagccttgaaatcgtgggtaatggcaagcatcaacttttcgcgggaggcaagcaactcttcggcaaaacgattggcttcttccaattgacgccgataacggttactacgggtgacatcccgccagatcatgacaagaaagataacggacagcacaacagccccggcagcaatacccgaaataatcgttgcagaacgatgccgaacagctttctgatactcagcctcttcgcgggcacgcatcagggtttcctgttcatatcctttcaaaagactgtcgatacgagcactcagtgcatgatcaagacgttgcaaagttcgcttacgacgctgcatcacactattggtagccctcttctgttgggcaacagtgcgcagcttcgcgtgcagggaatcaaccggattataagcatcgagtacagtatccgtagcaacttcaagggttgtttgcacctgaacagctgaatctttgcgtggtgggacgaagacttctcccaaacggcggaagaaacttttcttcttgggttgtgtcacaaccgtatcgcgacgggcaataacccggcgttgtacacgttgttgggtgataatagtatcctgttcggcaataatctgttccacttcacgggctgaaatcatgctgtcattggcttcgctcagtgtacgcagcaggcggacggtattagcatccttctctctcaaaagccctatcagactgtccgtacgcagaatatcactattatccgaactcataagattctccatttcccggtgcacgaagaacagggaataaagcaagactgccagcaggacagcataaccggcagctatcttcttcttggagacattattcatttatctttcgttttatagcggaaacgcaaccagagcataatacccgcactagtcagtccgaacgggaaggccatccatacaccgaccgtaccccagcccagcacgaaaccgcataagtatcctacaggcaaagatataacaaaataagaaataaatgcaatgaacatcatcggttttacgtcggcaataccacgcagggcattggcaaagctgatttgcagtccgtcaccaaactgataaaccaagaatggaaggaacaaagaagataccatggcagaaacctccacgctatccgtaaaccagcccccgacctgattgcgcaacagaaacacgatactcagaagcaccaccgccattgccaagatgagatgatagccggcatatgccgaacggcggacattcaccatatcgttctgccccttgaagttactgacgcgaacggcaatcgccgcccccatcccataaaacatcataaaggtgaactgagaaatagtgagcataatctgatgtgaagccaaagcaatagttcccagccaaccaaccataatcgtgctgagactgaatgaagccgtctccatgcccatctgcaaaccgacaggccacccaagtccattcaatttcctgaacatctgtttcgaccatcccaagcggaagaaccctactttatatctcaggaacctccgactacgaaaaacaatcaatgcaaaagcaataaccatgacgatgcgtgagaacagggtactgatacccgcaccgagcaatccccattccgggaaaccgaactttccgtaaatcagcacataattgccgacaatattcagcgcatttccaccaagaagcacccacatagcagtctgcgtttgagtaatgccatccgtaaattgcttaaagccattgaacagcatgacaaataccagggatgcaagtagaaccagaaaataaggttttatcaagggaatcagttcctcgggttgtcccatgtattccacacagaaatagacgacagtcataataagcgtcagcaacagtgctaccaacacattggcaagcagacttgagcgcaaagcttgtccagcctccatgaaacgacggttaccgtagaactcacccaccacaggcgtcagtccataagagaaaccggtactgaaaataatgcaaagtgtaaaaagattgttggtgaaagaagcggcagccaactcggccgtgctgtgatgtcccaccatcaaggtatcggcaaatccaagaacaatgactcccatttgaccgataacgatgggaagtcctaagtaaaagagggctttataatgccccttgtatgtagcaattaatctattcatttatctttctcataatataataccaccgagttttcctcacgaaaagtctcttgtgcaactgtcttcagacgttctgccgtcactgcgcgataccgttctacctcacggtctatatcctccgcttgcccggtcagttcgaaccatgccagatttgtagctacattcaggtaattgatattcccgaatatctgggtggattcaaacttattctttactttctccaattcctgttcttctatcgccacttgctgcaactcctgcaactctttacgtacagcggcctcagcctgttccagtgagactccggctgacggttttccactgatatgcagcaatcccgcatcacgcgttcccgaaatataagcatctataccggagaacaatttctgttcctgcaccaaccgacggttcaagcgactggagcgtccgttactaaggatatctgaaagaatatcaaaagcatagtaatcaggatgctcgcgactacacatatgaaaagccataaacagcgcatccaagggaacaggacgtttcactacctgtctgcgttcctgcgtctgtacgggttcctgcggcaattgtcgcacaggcacattcctgtggggaatcgggccgaaccatttttctgtcaatcgaacagcttcttcccatgatatatttccggtaacggcaagcacggcattattaggtgcataaaagcggtaaaagaatgatttcacttcctccagtgtagcttgttcgatgtgcgataaatccttcccgatggtaggccagcggtatggatgcacctcataagccaacggacggataagatgtcccacatctccgtaaggctggttcagacaacgctgtttgaactcctccatgaccacaccgcgctgcacttcaaggctttgttcactgaatgccagttccaacatacggtcggactccagccagaagccaatctctacattcgacttggggacggtgaggtaatagttcgtaatgtcattgttcgtccaagcattgttttcgccacctgccgactgcaaaggagcatcatagtcgggtatattcacagaaccgccaaacatcagatgttcaaacagatgggcaaagccggtatgttcgggatcttcgtcccgggcacctacatcatagacgatgttcagtgctaccatctgagtactgagatcctggtaatgcaccagtcgcagaccattagggagaatatgtttattgattttcataaaatagagattgtaacttatcggagaaaggaatttctttcttttcggttatgaattaattcaccacagagtaacacagagtttcacagagtttaatcaatttgaaatcaaaagaatagaactccgtgaaactctgtgttactctgtggtgagaacttattactataccgttttgaactaatttcaccaacagttagtccaatactaccacctttttgatcttcacatcctcttccgggcggtcgctacgatccgtttttacctgttgtatcttatctactatatccatgccttcgatcacttcgccgaacacagtatattcaccatccaagtgcggcgtaccacctaccgtagtataagccttcacctgttccggtgtaaagtggaattccggttgtttggcaacttccgcctcagcctgtgcaaacaagctatcctgcaagttcatcagaccatcctggtcattttccttacgcatcttatagatttccttcatgtgcttctgtgccaaagcattgaacacagtagtcagacgattctggttcatctggttctccatccccaacaacgtagtatcattatacactttacccgtcacaatgtagaactggcaacccgatgattccttcttcggattcacattgtcaccctgacgcgcagccgacaatgcacctttcttatggaaatacttcggataaacaaactcagccggaatagtataacctacatcacctgcacccagcatcttgcctttcggagcattctttgactcagggtcgcctgcctgtatcataaaatccttgatgacacggtggaacaatgtaccttcgtatgtaccctcttccgccagtttgatgaagttatcacgatgttgcggtgtctcattatacagtttcacgataatgtcacccgcagttgtttcaatcttcaatttagtttcctgatccatgtttctatctttcttttgtcccgattggcaggctgtaacgctgcaaatcagtatggttaataatacggtgaaattcctcttcataacgctttttatttaaattaagtttgcaaatatacgattttcagacaaaacggtttacctttgtgtcttaaaagagacaaaagataaggcaatgaaatccatactcatcgttgaagacgacattacttacggtatgatgctgaagacctggttaggcaaaaaaggctttcaggtagcttccgtcagcagtatcgcccgcgcccagaaacatttggaaacggaaggtgccgacttgattttgtccgacctgcgtctgcccgacaaggacggcatcgacttgttgaagtggttgggagagcaaggtctgtccattccactcatcatgatgacaagctatgctgatatacaatcggcggtgcaagccatgaaattaggtgccagtgactacgttgccaagcctgtaaatccggacgagcttctgaagaaaatcagtgaggctgtgaaacaacccgctgcttcccccaaacaaaccatcagttccggaaaaggagaaagtacccatcagaaaaatgcaggcggtgctccgtcttccgactatctggaaggagaaagtgatgctgccaagcaactttataattatgtaagactagttgcccccaccacaatgtcggtactgatcaatggtgccagcggaacgggtaaagagtatgtagcccaccgcatccatcaactcagcaagcgtgccggacagcctttcgtcgccatcgactgtggctccatccctaaagaacttgccgcatcggaattcttcggacacgtaaaaggttcattcaccggagcattgacagacaaaacaggagcctttgttgcagccaacggaggaaccatcttcctcgatgaaataggtaatctcagctacgaagtccagatacaactgctacgtgccttgcaggaacgaaaaatacgtccggtaggttccaataaagaaatcactgtagatgtgcgtttggtttccgctacgaatgaagatttggaacaagccatcgagaaaggaactttccgtcaggatctataccaccgtatcaatgagttcaccctgcgcatgcccgaacttaaggaccggagagaagacatcctcctctttgccaacttcttcctcgaccaagccaaccgagaactggacaaacagttgatcgggtttgacgatgcagcatccaaagcattgctggaataccattggccgggaaatctgcgacagatgaagaatgcggtacgacgcgccaccctattggcacaagaccaacttattacactgaaagaactaactgaattgcaacaaatcactcattcccatgtaggtttaccattgcgtaatgaagagacagaaaagcatcagattatcgaagcactgcggcaaacgggaaacaataaaagccgggcggcacaactactgggcatagaccgtaaaacattatacaataagctgaaactttacgaaatagagaattaagtaacgcttaaaaaataagttggtacataagaaagtgcgtacccattccctctaaattatcatttatgtaccaacttgttttttaagcgttacataaagtgggaaaactcaatgtattttaatgttttgcctatctttttcaaagtcgggtatgcagttcttgaattctctacgaaaactgcattgtctgttaattgtaaatataagcactcataatacttctataagttcgcattgaagaataaaatcatataacgtaattttacgtaacatgaagaacatattccacactgtctgcatagaagaataatactttttcaatgcttcatacaaatctctttgggtagatgtaatttcatatattgaaacttttccataccgaaatttagcagataaaatctcatattgctcctgcatcaattgatatgagcgtttggataaaaaatataatttcactccatgattataagaactcactttgtcaaataaatcatttgaataactagtttcagcttcctccaattctagcattgcattacgataattattttttgctatatgcattttattgcgatttattccccattgaaaaactggaatctgaaaattaatcataacgccttgactgtaattggggtttcgataagcatctgaaaagtgttctgcatattgattcagtccataactgacattaatattcgcattaaaacgattgcttaattttgcattaaacaatgtttgctttgcttctagctgtttagcttcctgtaacaatgcgaacggattatttttttttgcatatcttgtcgctatttcaaaatcaatggccaaaggcaatgaaaaattaggcatagttatctctacgttatctataatttctttttttcctaatagagcccaaagttgacgaagtgactgttgataatctttctgtgcagtttcatacacataatgattattattatcttgtaattcaacttgcctatattcaaattcagtaaaatgaccattatctaataaagctctgcttactattaataatgtatcactaatagctatatttctcaaagccaattttcgggttatatcagccaaaaagagatttaagaaagcgtccaatgcttttatttgtatttctgccatatccgaacaatattgcctttttgcattgagtgttttaatctgttctattttcttctgcttcttatatgtataataacctcctataagttgttgtgagtagtttagggataaaggaattgtattaaaactgtttcgacgagtggagaattctgtcaacacatttaaattggaactgacagaaaatactcctccggtaatacctattttctgctgaatagtaagtcccgtattacttgtgtttgagtaatcgttcacatatgaataactaccatcagttgagttttgcatcagccggagagaatggttgaaagaaactggatttatgttaatagtaatcagaggtagaaaaccttttaaatattttttatgagtcatcgatatgttatcataagtcagtcttatcttttccgccgaaggtgaatgaaaactccactcattcacaactttttctagagtgatctgtgtttgtgcctgtaatcctgttgtcttcaaagtcaacataaagataagacaaactttttttacaataattcttttcatactattcttttaatgaaacaagtgaataataatatccttttttctccattaattcatcatgtcttcctatttctgctatgtatccctggttcattactacgatctgatcggcatttcgtacagtactaagccgatgtgcgataattactacagttcgattgttaaacgcattattcaatgcttctacaatttttcgttcattgattacatccaaggagtttgttgcttcatctagaaataagaaatctggttttttatatagggccctcgctatcaataggcgctgtttttgtcctccactcaatccccgacctgtttcaccgatcattgtttcatatcctttaggcattgaattaatttcatcttctatctgtgcgatgcggcatacttcatgtaaacggtcatagttaatatgttcatcatcaagtattatattattcacaatcgtatcactaaataattttccatcttgcatcaccacaccgcatatttctcgccaatgtttcaaattaatgatggaaacattcatgcctcccatttttatctcaccatagcttggtttatataacctcaccaacagtttcaataaagtagatttgccacttccacttcctcctacaatagcggtaactttattctgaggtatttgcagatatatatttttaagtatcataggtgcatttactgaatattgaaaatgtacattttccaagatcatatcccgacatgcaggtattattgaggtgctgatagataacggggcttcttcatcttccaattgatgaatttcattcattctaagaaagctaatcttggcatattgtgctgaaataatgaaattgatgaattgaatcaagggaccatttaacataccgataataaactgtgttgaaatcataataccaaatgttatatctcccgtaattacagcactagcacagtaaaagactatagacatattttttatattttcaataaactgcgctcccatattttgggaatttgtcacattcaatactcgtttatttaccttataaagccgtgcttgaatttcttcccatttccatctccgatgtttttcgtaattatatattttgatatcctgaatagcagacactgtttccacccaataactttggtcttttgatatcaactcaaaatattcccaatctaatttcctacgaatactcaaaaacaataaaacccacagtacatataatattgaaccagccagaaaaatataaaagattattgcattatatataagtaatatgataccaaatattataaatgtaaatatggagaatattaatgaaagagagttattcatgataaaattacggatacgttcgtggtcacgggctctttgaagtatatctcccagcagtttattttcaaaaaatgtaaccggaagcttcattagcttaattaaatagtcagatataagggcaatgtttactcgagaagtaatatgtaggagaagccagtcgcgtattacattgaaaatcgttatgctcaataagatacagatatttcctatcaaaaccatatttataaaattaaggtcgaacgttttaataccgacatcaattactgcttttgaaataaatggtagtatcccttgaaacaaagtaactataaacattatgacgaagatagtcataaagctctttttgtatggaatgaagtagcgaaggatgttaataaaactatttttttctctttctttctgttgcttgttcttttggaagtctactgtcggctcaacagccaataatactcccttgttctcctttttcggataccatccgcgacggaactcttcatgtgtatattttatacgtcccttagctgggtcggatacccacatgtgtttcttgtcagcatgataaagtacaacaaaatggttctcattccaaaaaagaatagtgggaaaaggtacgctagtaataacttcctctattgtacatttaattgctaatgttcgaagtccaatattctcagcaccagtacttaagtcaagtaaagaaataccttgattagttatgccacatcgatcccgtaggtattgcaaagaataatatcgtccaaaatgtttggcgattatttttaaacttgcaggtccacagtcttgcgaatccatttggtattcaacaggaaaatgttttaatatcatctgaagtaaaagttttatttttctatttttgcttttagattgtcaaatagacgttcaattaatcttttagattttgtaataatttccacactacctatgctctcaaaatcaagcatcaagtctttcccaaaattagtctgtaatccctgtggaaaagaaatcatcactcgatatgcatttgtgtttgccccatccgctacttgcactttatgtgctaggcgggaaatagactgtacttctccctttatcagtccatactcatcatacggataattctcgactttcacattagcggtctgtcccactttaattttacccactccacgggcaggaattaagacttctccctgcattttatctcttgatgggataatggaaaataactcttgtcctatctgtacatatccgttttctcgccaaaagcctagaaattctaaatctccttctatcggggcatactgcaggtacttctctttccatattctgaccatattacacaattcattcttacgtgctagcagatctgtcaataacctatctccagtttcctgtttttccatctttaacagctgcaattccaattcattctgatagagttgagatttccgtgacatcttttcgctattgaatgattcgtagttgtctttttgtgaaagaaattccgtgtattggtgaagatatttttcttcgctaatagcttttgctttaacgagcatactatcttttatcgttctttcttggctaatgagtaatatttgtctcttcaacactgcctcttgtgacatgtttttgataatctttttgtctatgtctatctgtaaacgtaggttttggctctgtgctctataaatatccgacgctaaaaagcggcaatattgtctatgtgctatcatgaaagcagtgaatgcagaagaaatctctcctagtgttaatgcagtagaaacggataattcccgaatagaatcgatttcatatacagacagtaatgaatcaatctttaacacatctatataattggtgccgctttcaatatagccaattacttctccttctgtcaccttattattgttggctatcaacaaatgcatcttacctgaactattggcaaccagacgcaccggagcaaagcgagcggtaatggtaatttgtccgtctactgtatctgggtatttgatgataaatccaagtatgaagacgactcctatcagtacaccgactaaaatagctacccatatagctccacgggtaggcatacgatcaatgatggcttgaacctcttcactgcgattttgctccttgggtaggatttcttcactgtttttcattgtcaatcggtattatgctctctataattttacgcctttgtctggctttatagatgcggagagaatcaaaagatctttcttcttcgcttcttctactgtttttaaaataaataattccatcagcgcaagcatgcaaattggtatattcgtagtttctgttccagcgaggagcattccctatgctccgggtgcaataaacagaatcatccaatgtttgcacagatataaatatgctatcctgagcactttccattaaaacagattccaaagaataatcaggtaaagtatccaattggtaggcacaaatggaatctgtatattgtaaacttcttgtctgaatctctccactgcctacagtcaatgcgattaccgcatagtcatctttgaatttttctgacaatctactacccatagtttgcatataagggaaagttccttctgtttgttccttcttttgtgcatgaccataatgtgcataaataatggccttttcatcttttctcagcaatttgtctataaagtttcgagcattttcatataggtataaatctctatttaaacgaacgtgaaatatccttccgattgttcttgtatcattatgtgtacgaataatgccttttaatacatctactaataactcatattcatggtatcccatgagttctgttaactttttcttatcttgttctgccaaatctaaaacagactcatattcgattcggttgagttccgtcaaaataggataaaaaagatttctattcatgtcattatagaaagcatataaatagtcaaacattgcattgatttgattattataaaatccttctatcccaaggagatttacttttgttattgcggttttgttatactctctcagccatataaggaggttttctaaggagtgaagattcattagaatgccatcagtatcatgtatcaattccttgatggcagattctggcaatttcccatgaatatataaattcatttttaagccgttccccatatctgtttctaatagtaccaagcggcaattatcgtacaaaatgctgttttttattatcgaaaatacgttgtcgtttattgtactgcttccatgcacagtctcacctaaggcgataattcgcttatcctgaagccctgttttctgtaatatactcttgtccggttcatcaaatacattcatataagctaagtccaaaagtctatccggtcgttttataagaaatggattgtcacggtggatctgttcaatggtttgccctgctatgtgtacggttactctgtctaaatagactttagacggtctaaaatcaaacctatttttcattttactattgccaaccatgcctattgtaagatatctgacatcctttagtggtaacgagcatcgaacagtttgccactcatcgtcgttcggtacattggcggagtcggtacgtagaaattcttgttgagaattcatccctcttacctgtaaatagaccttgttcatttctattggcctgatatgtaagctgacaattgcggtatcatttgcatactctgcaggtattaagaaagtttggtacagattcagtagaatagggttattgttcccaaacgtaagaagagagtgctgcatctcctccggaagtatcataagaggatgctttccttgtattaactgggtagaatcaatcttgatgattggaatctgtgtagctttccattggaaatgcaagggttctgcaaagcgaaaatctaaattgaaaagatcttgctgacaatgggcggtgaggtagaaaatacaaaagaaaataactattattggttttgggtgaattggtctattcataatactagttttatttatagaagttaaatgtgcagcattcatattattgagccatggcatttaacttctataaaatgttccttaaatgttgtttaataattcccggttgcaccatatccactagtccaatgcgaatcatataatacttcaccagacatggcggaacgtattactaaacgaggaactgtattcccataattacctacaaatgcattactatcaaacagtacataaataggaccattatagtttaagtcttgaagacgagctattccttctagtgccaaattttccatatgacctcctaccatgccagtgccacttggcataaattcttccacaaatttgttccatgcactagatttttggtctcttgtatatgcagaagatgttgcaaaataattactgctgtcatatcctcctccaaatgtaaaggattgggctgatacataccccattccatcaacatatcctccagtccacgtaccggcattcatcatagcgtaagcttctgatatgctggtgcctcctatgtactttctctggtcttcagcatctagtaccgttccaacttgctttagttcatctaatgacattttgctaaattctaaatttgataacttcttcataatataaaaattaattagttaatgatttatttgagattaaatctttcaatattctattattgtaccatatttttaacattcctatgatggatgccatgtccgatacatttagttgctgactaataagtacacacatattgtgaaatccagtcttcataccgccaagtacatactttctacttatctcctttaaaagctgagaaacaatctccttttcttggtcatcaaacttgtattcccaatatgcgtccatcaaattcatctctatgtttattttctcaatagataattcttctaagttatcaaaaatggtaaccaattctgaagattgacaagtgcgtaacaaattcatacataaaaataaagctatggaacttctactatcttcagaagcatcatcatttagtaaagatgcaaataattgagattgtaactgtccgattacacataagtcctgtgtgtaaataagttctttgggaatagctaagtcatccttaattatactattgttaggataatgtgcccaaagctcaaacccataattcattgtgtcaactactgtagaaggataaacatctaccaaatggtgtagaaaagtagataccttatcttgtacatcttcgggatgaccagaagacgaagcaaacatcagtttgatattgtctccccggtctgacgaaagaaataacatatattgataaatatcccaatgttctttcatgtatgctataatattgggtaaaatacgatgccactcattggatgtataatatatggaaaagcagtgccaaggcaatccatttatttctatgcaacatttcttcataatatcatttatttaagctctataagcgtttcattatttaaatttttgtaaactatgcctcgaccatagccatcttgattcacaactctcctcttgttatctctttcgtttatctcaacgcaattctgcgactcggaaaggaaaagtaatacagttgaccaaagttctttgctttttacctcgtaaaaggatgccttttcacttaggcttgcccattgtatttctacccaatcattttctctttggatacgatttttactgtttaaaatgtattcattctgactattatattgtatagtttgattacgatagaaatgagggttatctcttaaaagggctttattacattttccatttttatacatcagcaaaacttctgttgtatatggatttaggtaagacaaatatattttttcaacgtgcattcccatatattcatgtgaaatgcgctcttcatgcgaatgatgaatggctgaataatattttccaattggaagcaacctttgctgtaaaccaactttttccaaacgattataaagatcaatatcttccaatccataaccggataatgtttcatcgtatccatttactgtgaaaaaatgttttcttcgtacgcatatacgaccaattacatctcgttctgaatactgaggtgtacagaaaaaagtttcatctccttggttaaaaatatctaagatataagaagcaaaaccttctcccaagaaattatcggcatccagattacatacaatatcgccagtggataatcgaaaagccatattccgactatgagttctgtggtagttcaatggttcttcggttctatagtaaaccaatattcctgtatctatgtaatattgcagttcttttacccactcttccaatccatcggtagagttatagtctaataaaacaaactccacccgtcctgggatactatttttctctatattctgcaccaatgtttgctcaagatgatgcctcctgttcatacaagtaatattaaaggatattttattttttatctgccctatggaaaatacctgtttattattactatcaaatatgttttttcggattgctaataacccgttattggcaatgatgtgtccattcttaatgttttcttgtgataagttgtaattgtgtcgatccatctctttccaagtattataaagagaattggtatatagaatattttcttcctttgtattataaatagctttattatattctgcatctttcattacaatatagtgacatccactgattttcagcctgttcattagatctacatcttgatatcctgtcggttcaaagttttcgtcataccctccaatagctgtaaaccattttttacatatcgatattctcccaaaagagccatcaaaagggtcgccggattcttggtgaagtaccaaattcattccatatttcaaaaattgacagatgacaaaccatccaccgttgtatcccgtatagttatcgcaatctagattaactaaaatgtcattattggcaagcaaatgagccgtgtttttggctatagatgcatgccaataacgcaattcttctgtatagtaatatttcagataaccagaacgtaattcttcttcaaattcacttttgatccattgctgtaaaccaggcgtggcaaaatctacaacaataaactctattttttcattgaatagaatgttatctctcaagttttgtgggagtgtttccttgatttgattcaaacgattcatgcaagtgatacaaaatgacaatttaggtatattcatacttatattattttattttattacatttattaacaattatcacattttctgctatggagatgtctaatattaccataatttaacttcatgaagaattctacatattgataatacgccactctttgcatgttgtgcattataatcagtatcttgaaacgagaatcattagtgatagtttatcgggtgtcctattaactaatagagcgtatacgacaatataaatctgatgtttctcatagcttattatatcggctaaatatagatggtatttgactataacgggcttaaaatctgatataaaacttctaaaatctatcagaatgtgtaaaaatgataaagaatctacttgggttgataatatttcgaccttatataggttttaaaataaacagttcgtccgccttatccgcgtagtccgcgtaccaattctcgccatactttcttatgtaccaacttattttttaagcgttacttatacacttcaagagcataattttctaaaaaacgttttcttgcctttctccctaattgtagtgcaagcgttttagaatccagcagttttataatttgccctgaaagcactttaatatccggactacgttttcttttaatacgccttattggagactttagaccgaaaacaccatcaataacaagtttgcttctgcaatgaatatttgcgatcataatactgagctatcatccgcaaacatgaggccccacaatccattgcatccaattgggaataatgtggaaaggtttttctcattcttacatactagttttattcccctttcaacaatgcttccagaattacattcaagaagaatccagtcactgaagtttgcactatctttccatcctgatctatcagaataccatgaggaatactagcaaaagcgtacaattctgcggctttagaattagccggtaatacaaactgcctccatggcatatccaccttatccattgcaatagtccaactcttattagtataatccatagatatacttagcacttccaggcctttatctttatatttctcgtatacttgctttatcttaggaatatccgctatgcacggaccgcaccatgaagcccagaaatcaataaaaaggaatttggaatgtccaacatattcagataaccactttcgttctccctcaagggttattaattcgatatctatgaatttctccagctgcatgtgtcttctttgctcttcttcgtctttctttttgcccaagacatatcctcagcggtcaaccaagggttgtgtttacactgtttctcaatataatcatagacacttacattagttttcctaactttttcatcacttctctttttaaaatcagcaattataaattacatttcaatacgcaaatctttaaagaatatcagatcttctattttatacacatcaggtaattcgtaaccattgattaggatggttggcgttgccataagttttgtctcttttttccattcctcatgcgtcctaaactcttgttctacagcaggtgcattaatatcatattgatatttattaaaaaaatcagttgtattatacttcccgccattaaaccataggtcataaatttcttccgaattttctattgtattattttggtaagcacttatcagaaacttattgctttgatccaaatccccaccaaacgaactgaaaatatattgaatacaagccttgtcttccaatttcttttgcaattctcgtaatcgtttgtgcattcttccacaaggttcacaatgaggattactaaacacactaataagtaaatccgcattaggattaccaaatataatttgcgatgtagatttactaaccggatacttcgcttgtttttttaataaagcgacaaaaacttcttcttgcattttcaagctttccagttcatatttagcccctctttctttattaaaatcagaaaaagcagacatagccagatggatgcataaaaaaggtatcgcataaatggctgcaacatatactatttcattcaggcgaattaccggcatgaatatatatccacaaacaacatccacaatcagcattcctataaacaaagcctgcaccaacaaacaaagaggacaccattgcttcactttcactttttgaaaccagatactccaaaagacataaggtatagtacacaaattcaacaaagctacatatactacatattgaggaataaaaagcaagataagcatattcgagataaaataacctaagccaatttcactccaactaattagtccccatagccttgcagccttggaatccaaaacattattacagtcactcttactaaacagagaacataatttatcagcatacctgctattaaagttcaattgtttctttgcaagcaaatgtcctatatatattccaacaatattcagcaaaaaaagtaaattagtgcctacactattggatacattctgccaataaaacaataaacatagcatcatgacagaacatcccaacactatttgtacccctgtatgccataaatctttcctcttattctctccataattaggttctccggagtttcgtcaggttccgctatcaatgcaataccatcccatactttgacaaattcattataggtcgatttaatatccactcctctccatatatagaatattttctcgtctgtctttccgtaaacatttacaaaatcatgatttatatgagcgatataaggaggcactaattctttaacagcctcatcctttgtctgggtacgaacacctttattagcaattccataatcattcaacatcatggataatcccaacatgctatatttatagggatgttcctcgtaatatttataagaaaagcctgtatatttaagtttggcattatctaaaaagacagtaaatatattagatttcatatttatttcaagccttcttttaacaaaaattcctctaaactttgagcatggagtctaactgctataatcgttccttctgaatctaatagtataccataaggtataccatatatttgataagctttcgctaaatccgaattggtgccattcacttctataagctgttcccaaggcattttcagttttttcaacgcacttttccatgccgctttattactatcaaatgaaattgccaagacatttaatcccttatccttatacttttcatagacctctttaatatgaggtatatctgcccgacaaggactgcaccaagatgcccaaaaatcaacaaaaagcaaacgtgattttccaacatattcggatatagatctttgtattccaagtgtatcttgtaatacgaaatcaaaatactgagaattagcagtttcttcttgtttcttcgtaaatgcagcctgtttatccaaaagttccttaaacttcttgatatcagcctgtgttaccaaagaattatttttttgtaaggcttctagttgttcatggagtttaaccaggttttcaagtggccaaatcgctgatttattatctgcaataaatcttcgccccactaaattcaatctgttttct

SEQ ID NO: 6614 - DNA, 29656 bp, Unknown
  gut microbiota DNA sequence
attatatatgaatttctgataatcgtcgtgcgctttatctctttcaacgtctatcgtatcactttttatcattaagtcataccatactccacaaagccgtgttacttcactattcaatgaattgcgcaaatcattaagaggtgttccggatgcaacaaaagcagtgtccatatatacacgaatatctccctcttccagaacaacttctactgattttatgtatggatatttcccaatagtaacaatggcgaactcgtcaacattagctttacccttaaaagagaatttacctttttgaacttttgcagagtcaatagaagtgatcaaagtatctccttgaaattggaacaatttgacatattttccattatagtcattatttaagattccgtttatatggtattttccttgtgaacataccaagataaaagggaaaagaagcatcgttaaaattattattcttttcattcgtttcctccctcctctttacgagtgcgaaacatgtaaaatggggttctatattctcccgctgttgtaaatacagcttcacgcactgtatcagcagtagtaacccattctatttcattccaatggtcaaacatatattttgcagtaataactttatcgtccaaaataaatatatatttagtagtatcaacaacattttcagagttatctgcataacatttcaccgaaaatacggcaaacagcaatatgacaaaaattgttttcattttatacatgcaattgtgttttataaagccgtatctttcttttctaaaagaaagacggctctaatttaaatgagaatatgcaaaatgctactacattaagagcagaagcacgatacaactttttttgtcataaaatccttttggggtgtacaagtttgagagatcaacgttgatgtcccatatgaagttccatatttaggaggacacactccattacatgtatatagactctcctcacacttttttttagcacttggatcgaattgtccacctaccacaaacttcatttcctgttcactcatttcactgaaattgttcagctttaattttcctaattttttcatgggttcataaattaatgaataataatttttctatatcagcaaatataagtcttaaaaccagacatccagcacatgcaaactacaaatatgcaattcggtcagtttttagatactattcggttacaacccattccacttccggcaacttgtaaacgaatctccatttacctttcagcgtatttctacatcttcttgaaactttgaattcatgatcagtaatcagccgtatccaatactcttctttccttttctgccatacagtcaaataatcaacatttacaatagttgattgattgcaaatacaaaagttaccaggaagaatatcaatcatttgtttaatagaaaattgcaacaaatggctctttactttctctttagtaacaataacaagatatggtctatccgtatagacacaagcaatatcctcaaatctaatcatttgcatataggaatatcgtataaccattatcccatcagagttagattgtagttctctaaatatttccataaaattacatttattttatcgtgtacatactccatgttttaagaaggctaagagcgtataaataacttttatccattaagcctaattgctctctaatattataggccaaaaccgtaaatccatctgcaattcccaatatagaatatataaactccctctctttttgccaaagataaaatgtcgtcatatcagataaaaactcgtctaccgggttactttcccaatagaagctaataagctccatttcttcttccacattttctgtacaatccggaacatgaagtgaatgaagataatcatggagagaaacaaatcgggaagatctgcataattgaacatacagatatagcgctacagacgtacgcccctcttcactgcaatcattcgccaatagacgtataatgagtaatgatgttaaattaaggaacgcgctatatggaatgcaatatacttgatatcgggaaatctcaaatgcatttctcactacggcattagcaggatgatgcgcccacaattcttttccataaaaagtaggtactaactcacaagacggatgattctccacaatcttcttcaaagcctgataaacagcctcctgcaagatcgctccatgtacggtataagaagagaatatcaacctaatatgttctcccctctcatacgacaagaaaaacatatattgatggatgtcaggattggacatcatataagtatgtagcaaaggtaaaattcttccccactcatcctgagcataaaatatggaaaagcaatacaaggttctattactctctcgaataaattctgtgttcataactactttaaaaatataggattatcgtaatcaaagttcttataggcaatgccttgaccaaagccattgggattgacagatagtccgccacactcatatctttcaatttcccaaaagttttgtgtttctgataaatatacgagtatttccgattgcaaatcaacattatccactctatagaaagaagacagacagccttcaatatcttcccactgtcccccttccggatttttgccaccgattattctattcttttcatccagaaaatattgattgatattctcgtaatgggacgagcggttgtagttacaataaatattatccttcaaaatggttttagaataactaccgtcttgatatcgtagcaatacttgtgtctgatacggatttatataaaataaatacatttctattatatgccttcccatatattcttgcgaaacacgctcttcatgagaatgatgaatcgctttgcagaatcgattttctaaaataaattcttgctctattccggatttccataaccggtaatacaattcaatatcctctaaaccgtatccgggaagcgcctcattatagccattaacagacaagaaatgtttgcgccataaacaaagacgcccaataacatctctctctgaataccttggagtataaaatactttttcatcagacatacagaaaagattcaatatgtatgcggcaaatccttcacctaaatagttgtcagcatccaaattacaaacaatatctcctgttgacaggcggaatgccatattccggctatgagttcgatgatagtaagtaggggtgatcgttttgtaatagttgaatatgcctgtatcaaacaattcaccttgttgctttacccatctctctaatccatcttttgaattataatccaaaagattaaattcaacctgctcagataagaaattatcgtgaatattctgttgcaatgtctgtttaatatgatgaaggcgattcatacaagtaatattgaaagagattttatgggcatatttcaaagaatcgacctcttttggcacatttccttctatatcaaaaatattctttctgataccgaagctccctccattagcgataagtttgccagcaagaatattagattgggaaatttttgcattatactcatccatttcatgccatgttttgaacgatgaatgagtaaatgcaattccttcttctttagtattcctgattgctctattatatttggaacctttcacttcgatacgtctgtaacctttcgccatcaatctattgattaaatctaaatcttgatagccagcaggtgctaaactttcattatatcctccaatggatagaaaatcattccgcttaattgatatacgtccaaatgaaccgtcaaaaccatcatcagaacattggtgcaaaaacataggtccatcattctttataaattgcaagataacaaaccaaccaccattacttcctgtataattatcacaatccagatttactaaaatatcattttgcgccaacatatgcgcagtattttttgctatagaagcatgccaataaaccatctcttctgtataaaagtactttagatatccagaccgtatttcatgtttaaagttatcagatatccatttacgaagtccgtccgtacttccgaaatctacgagcacaaattctactatttcttgcaatctgcgattatcctctagattttgaggaagagtctttttaatctgataaagtctattcttacaagtaatgcagaatgaaattttagggggctgagaattatcaatcataatagttttatagatgttttattataaatgcaaagtaatcaaatccaacacagaaaacggtttattctttatcataaaaggtttgttatctatcattatagagctattatccatctttacaggtttatatgctatcattctccacacccgtacatttccaaaatatcaaccgattcagaactcctctatttaataaataatggtatccaatttgcaaccttattatggtcttggtacggagcagagccccagtgtggaatttttccacaccccattccacactttccacacaattccacactgtgccacacttccccactcacttttcatcattaattatcaaccatttacctaaaattcatatcttctggcacgtgctttgcaactataatttacgtaagcgcaaagcttcctaaagcaaaaaggaaacctaaactttcaactataaaatatatttagtataattctaaaaaagcaaatgattatgaaaaagttagtattagtagcagccctgtttatgtttgtttgtggtggttctttcgtggcaaacgctcaggatccggtgaaaactcaacagcaacaaccggcaacggaaaaaactgaagagcctaaagccactgagcctgccaaggaagaacccaaagcagaagaaccgaaagctgaagagcccaaagctgaagctcctgccaacggtactcctgcaacggaaacacctgcacagcctgctgaataatagtaagcacactgacaacaaaagccgtcccctacttgtctattctgggggatggcttttgtcgttttcagacacaagaacatcatcttattataataatggatctaatcaacaagcacaaaatacctaaacataggtattgttcaaaagggaaatatagcggtactttgcaagtaataaattatatttcgaatttactatggagtctttataaaaacacacatgaaaacaaaatcattcatcataccctttttgctattccaagctcttctctttacaggaagcaatctgctatatgccatccctgcccggccgggagttatcaccgtaacccaaagtgacggtacccgcctcaaaatacgcatttatggagacgaatattaccattacactatatctgaagaaggctatacgctgacttccggatctgatggagattattattatgcaaccctttcacccaacgggcagttggcctctactggtgtcaaagcacgtccgatgggtaaattaagcaattccgaaaggcaacagttaggacaaggattcacacaaggacttcgccccctatctcccacagcccacaaacagcagatgatgcgcagtgcccagaataaaagcaactcttccaacacgcgaacaataaacggattcactccgccggaacgttttatagataatggatttgctaccacaggtaagcaaaaaggacttgtattattagccgaatttccggatgtgccttttactataggtagcaaaggacacttcgaagatatgctgaacagcaaaaattacagtgagaacggcgcaacaggcagtgcatggcaatactattatgacaacagtaacggacgtttcgacccggaatttgtagttgtaggtccttatacactgccacacgaacgtagctactacaccgccaatgatgacgaacttgcctacgaaatggtagtggacgtctgccggatggcctacgccaacggcattgactttggtccttattccgaagcaggcgtcatgcgtgacgtattcgtcttttactccggtggcagtgaagcggacggaagcgatcctgaaggtatttggcctcaccgctacagcgtagcatataagggcacttacactttcggaagtaaccggctcgctggttacgcctgtgccggagaactctccaagtacaaagatggaaacaacaaattcacttccatcggcacgttctgtcatgagttcggacacgttctgggatggcctgatctttatgatacgaattacaccaccaacgggcaggctgccggtcccggtacctattcgctgatggccagtggcagctacaacaacgacagccgtactccaccggcactgagcattctggaacgttggatgataggttgggcagagcctgaagctctgaatacctcaggggaattccgcctggctcccgtccatcaggataaaggttatctgataggaaccgatacggacaatgattatttcctgctggaataccggggtacgggcgacaatgtatgggatattccagattattacagttatcacgaaagccagggcacatcggggcttttagtctatcacatagattataccacaccctccaaatggctgacgtacaattcggtaaataccatagcaggccacgagtgcatgaaagtagtctgttcgtatcccaatgcgacaaatgctgtgtattactcccgttacagcttctttcccggcgtatacaaagtgaccagccttatgtccgctaaacaaaaagatttccgctcctggaaaggggggaacacaaaggtgaatatattggagatcgccacggttgatgactatatcttgctaactgtggatgatacttacttcggtatgtctgactatcatgtgcaagcataccaatacgatgcccttgtgacatggcaagacaacatcggaaagaaatggacagtaacctggaaaccgacaggaagtacagaggttgcaagttcgcaaacaactacatcaacagaatgtcatataaacggtttgcaacccggcaagcaatacgaagtcactatcctaaattccaacgaaatagagcatacactctcggttactacccaacggaaaggactctactacccacgcatcgagcagtcgattccagtcaacagttcggagaatcccatattgttccatctggcggactgcgaggatataaaggccgtaaaatggtatatagatggaaaggaaagtaaaaactacatcagactcgaaaccggagaacatagtatccaggcagaaatcacccgttcggacggcaacaaagagtatattatgcaatatatcactatccaataatagaaatacttatgaaaacattcaaatatatcctgctactgatcagcgtctctttactatacgcctgctcaaaagatgaaaatgacctttacaaagaagaacgtagcagcctgctatcttccacgcaaataggaatctaccagaacgggaaagcattattgctcttcgacaagcaggcacatcaatactattgcaatccctcacaaaagctctttcgcatacaggatgcgcaagggaagcaatacacggctcttcaactgaatgcccttccctcggggcaagaaaggacagacgggaaagtggaaggaaacatgggtatcaagctcgacgggataacacagttatatattctccaatcagatgaacagtttgtatggctatggtcggatgatatatgcatcggattcattttacccaacattggcctttcaggtttatagaaactgtacttttgaaatacctatatattgttatcattcacgttatttaaagaaaatataccgacttttagcgattgctgatcgtgcacagatccaataactttgcaactccaaaaagtgcataaatcaatgtcgcgtaaagtcatatacataatactaagttacctcttgttcttcactacctggtgttccgcacaatcattttacaaatttagcggacaaatacttgacgcccaggagaaagagccccttcctttcgccactatccgcatgaaatccgatgaaggcaaattctacggaagtacgagcgacgagaacggcaggttcaatatcacccatatagagagcggacactaccatatcacagtctcctatataggatatgagaaacaggaaagatccatcgacctgactaataacatgtcattgatattctcgttgaaaccgtcttccactgcattacgagaagtggtagtgacagcttctgagtcaaaaggaataaccagcgcctcgaaaatagaccgcacggcaatggaacatctgcaacctacaagtttctctgacttgctggcactattgccgggagggaagaccagcgatcccaagatgaacggcgccaaaaacattaccttgcgcgaggtaggcaccagcagttccaactacaatacttcttctttaggaaccaagttcatcattgatggtgctcccatcagtacagatgccaatatgcagcggttgctcactgaccccaacacgacgtttgacgcatataacgccgtgaatgccggcgtagacatgcgtaacatttccaccgataacatcgaaagcgtggaaatcatccgcggtattccttccgtggaatacaacgacctgaccagtggtgtagtcattatcaagcaaaagcagaaagccaccccggtggaggcacgcatcaaagcagatcaatacggtaaactgttttccataggtaaaggtgtggaatggaaagatcaaagaaccgttctgtcagcagatgcagggtttctcgactcgtacaatgatccgcgggaccgccttaacaatttcaagcgcatcaatgcatccgtacgcctcaacaaaaagtggctgcttggaaatgaacatcgcttgaactggaccgccggcatcagttattcaggtaatatagataatgtaaaaaccgacccggacatacaaacacaacaagaagacaattacaaatcgagctatcactccggccgatggaacagttcgttaaattggattgccccacaggacaaagcattcaaaggggtgacactggatctggctgccaacatgtcgtgggataagatagaacgaagtaagttcatccagttggatcgcgaccgcaccgtacccacccatatggaagaaggtgaatatgacgctgaaatactgccttataaatatactgctcacgtaactgtagatggaaggcctctaaatttatatgccaaggtaaaaacaaagttcgagttacaaacgtggaacgctacacaccgaatccaagtaggtgcttcatggacttatgccaaaaatctaggagacgggcaagtgtacgacctaagccgcccacttaacccgggcagttcttatacacgtccccgcaagtacagtgacattccggcgagcgagcaaattgcactattcgtggaagatcagataggtattcccataggtaagcatcacctggaagtccaggccggaataggtagcagcatgctgctgaacctgaacagccggtatgccctcagcggcaagccttattttgatccgcgcattaatgcccaatggagtttccctgcaataggcattggcaataacgacttgaatataaacgtttccggcggcttcggatggttgaccaaaacgcctacgttggcgcaattgtaccccaacaagttgtatatggacttcgtacaactgaattattggaacgccaatccggactataagcgcatgaatctgcgtacttacatcgtagatccggtgaactataacctgaaggcagcacgtaactttaaatgggaagtgcgcttgggcatggaatttcacaggaacgatttctccatcacttattttcgcgaacgcatgagttccggtttccgttcgatggcgaattattccccttattcttataaaaaatacgatgccagcggcatagacggttcagaactgacaggacctccctcactggaaggcatgccttactcagaggtaagcgtactgaacggatactcttacaccggaaacggcagtctgacgctgaaagaaggtatcgagttccagttcgcctcggaacgtttcaaaaaaataaattctaaactcaccattaacggtgcctggctacgtaccaactacgagaatagtctgcccatacagaaatctgtgtcgaaagttatcggcaatgtcgccttgagcgatatgtatataggtctttacgaatcggacgaccgttattcctacgaacagttcaacagcaacttcatagtagacacctggttggacaaattgggaataaaactttcggccaccgtagagtgcacttggttctacagcaagcaaactaaagagagaagcggtgtgcccatctcgtacatagatgccacaggaaccgtgtcgccatacacggatgcggacaagacggatacttataaacagcatctgacactgagctataatcaggaacagttcgaaaagagtaccgacccgttctacatgtatgtcaatttcaaggcaactaaagacttcggcaagaatctgtcaatagccctctttgccgaccgcattctggactatgtgcccgattataccaaaaaaggatacctcatcagaagaacagcagccagcccttacttcgggatggaacttaatataaaactttaatatgataacaaagaaaaagaaaatgaaaatgaaacattacctttacgtagcctgcatgtttattgcagccttggcattcaccgcctgtagtgacgatgatgacaacagtgtaaaactggccaatgtaacattgcatttcaacgcaccgtctgaattgcagagttacaaccctacaatcggtattcaggagctgaccctgaagaatatcaataccggagaaacaacttctgttgtgaaacccggcacccgtgcaactacatccaatgccagtatcacggtaagtgtacccgagggcttatataccatcagtatggaaggttccctaagttataagctgaatgatgaaatggtatacacaaaaatgcgcgcctaccaggaatctgtgaccttcaccgaagctactggcacatctcccctcgacgtaaccggttatgtatataactccagtgaagaaggaggcaatttcgttatcgccgaaattttcttcaccggtagcgttactccggaagagaaacaatataccggtgacaaatacttccgtatttacaacaactccggcgacacgctttgcgcagacggattgacaatcgccgaatcagccttcatgactacaagtaaatatgactacacacctgatatcatgaatgaggcattctccacaaaagccatttatcgtatcccgttaggcggaaagatcatggttcctcccggcgaatctttgctgttatgcgatataggcatggatcacacagttgccaacagtaactcattcgacttgacaaaggctgactttgaatggtacgatgtatcctcaaatccaagttttgaagacacggacactgaagttccgaacttggaaaagatatactgttatacagcaaccatctggggaccacataaccgtggctttacctcgtttgcactggcacgtttgggagatgacgaaaacaaccaactcagtaaggaggattatctgaaagactatgcttacacctacgaatataacatgattatcggtggtaacgtctatcctatgagcggtgacgcctacaagattcctaacaaatggattctggatgctgtgaatctcagtgtggaaagcgaatacgtatggaatgtaacatctcctgcactggatagaggctggacgtattgtggaaaggtaaatcaggacaagacgcgttatggcaaaagtgtacgccgcaaggtactttccggtaaaacattgcaggatacaaacgactccagcgtagacttcctgcctgaacagcctgccgatccgtattacaagtttcacgagtaatcacaatttctcactaacaagatgatcttacgatttatatcttcattcatcctcgttgtagcgaccgtatcctcctttgcacaaaagggggacacggtcttgattcagaaacgggcttatgagcgctcagcagtaaggcaaaatttcataataacgccttatctgaaccctgctcttaactattaccgctattccgactcatactcttcactttccatttcgggagactgggacaatgagagccgcgccctgaacgcacaggaaggtgacggctggggtggattcaaggtagcagccgactcatatgtccgcatgtcggatgcctcacgcatctggggcaacgcttactaccacaacggagagcgaaagaacgtacagtggaacgagagtgcagactacgagctcatctacccgtacgtaatggcagacaccataggaggagatataaaatcggagacctacttcttcgaaggcggatatgctgcttctcacggacgatggacatttggcggggaattctcataccgcgccctgcttgaatacagggatgtagacccgcgtccacgtaattccattgccgatttgcagggaaaagctggtgcttcttatcaattcaataaacgatatgccgtggctttatccgctgaagcccataagtacaaacaaaatggggatatcacatattataatgaactgggagtatcgaaaacgttccatctctccggcctgggaacaagctatacgcgtttcgacggtacccgcaatacggtgaggtatcagggccatatcttcggagcaggattagatttgctgccagtaaaaagtgatggaggctggacaagttcggtttcctaccagcacgctttctatgaaaagattctgcctggcgcaaacgatctcacgctgaacgagctggacgaggatcgctatcagggagaaatagcctggacttctgccactacccggaatcatagttggggaataaaggcaaatgctgaattccgtgaccggaaaggtacagaaattctttatggagatgctgtgaatagtatttatccgcagattgcaaccgctcaacaattcggaagcgaacgactctggagtaacttatcggctttttacgagcaggagcagactaaagtatggcgctggagcctgcaaccagccgtaggttatcactacaggaaagatacctataaaagtccttctaaaaaggtggaatacagtctgttcgatacttctttagctttcacttctacctggagatggaaacaggatatgctctttgtgcgtatttggggagcacatcaggaaaaattagatgcaaccctggatatcggacaagtgacacacccttatgcaatgaccatcctgcaacagaatttcgatatgcaaagttctggaaataccagttatggaatttcattacgctggtccaaaaatgtattcaaaaacatgctggctcacttagaagcgggttggcaacaagccagatataccaacagtgagaaaggaacctccctttgggtaaatatcggtttatctctctaaaaaaattactaactaattaataaacatcgcaatgaaaacaagagttcttttattcgcagccattgctgcaacaacattcacgttcgtggcctgtggcaacaagcaagctaaaactaatgaaacagccactgtagaacagtccggcgctatggaaatagacagcctgctcgccaatgcagaaacactggctgaccaagccgttaccatagaaggtgtatgtacgcacgcctgcaagcatggtgccacaaaaatattcctaatgggtagcgacgacacgcagatgattcgtgtggaagccggtaaattaggctctttcgacaccaaatgtgttaacagcattgtccgcgtaaacggcacgctgaaagaacaacgcgtggacgaagcctacctgcaacaatgggaagcccaactaaaagctgccaatgcggagaaacatggtgaaagcgaaggtggatgcagcagcgagaagaaagctcgtggtgaaaccgccaatacaccggaaaaacgtatcgccgacttccgcgcccagatagccaaaagacaagcagaaagcggaaaaccttatttgtcattctattatttggaagccacggattatgaaattcaataaggccggaatcactttacgcaagtggagccgtgtcattcatcgtgatctttcatttttcttttccggaatggtattgatttatgccatttccggaattgtcatgaatcaccggaacaccattaatccgaattattcagtggaaaggcaggaatatgccattactgaaatacttccggtgcagtctgacttcaagaaggaagatgtactgaaattgctggtaccgctaggcgaagagggcaattacaccaaacattactttccacaggaaaacctaatgaaggtatttttgaaaggtgggtccagtttagtggtagagttatccactcggcatgctgtttatgagaagctgacacgacgcccactactgagcgcgctcacaaagctgcattacaaccccggtagttggtggactcattttgccgacttatttgccgcagggctcattattatcaccgtctccggtataattatgataaaaggcccgaaaggattatgggaacggggaggcatagaattagcagcaggcattattatcccccttctttttctttttttataaccataacaacaaaaatcaatggagaacatcattgaatgtaataacctgacgcattattatggcaaacggttaatttacgagaacctcagtttcaccgtacccaaaggacgtattctgggactgttaggaaaaaatggtacaggaaaaaccactaccatcaatatattgagtggttatctcaaaccacgttccggccaatgtgccatcttcggtcaggatattcagactatggccccctctctccgccggaacataggtctgctcatcgaaggacacgtgcaatatcagttcatgactattcagcaaatagaaaaattctattcggctttttaccccaaacaatggaaaaaggaagcttactacgaattaatgaacaaactgaaagtggcgccgaaacagcgtatttcgagaatgtcctgcggacaacgctcgcaggtagctttaggactaatcctggcgcagaatccggaactactggtactggatgatttttctctgggcttagacccgggataccgccgtctgtttgtggactacctgcgcgactatgcccgttccgaaaacaaaacagtattcttgacttcacacatcatacaggatatggaacgtcttatagacgactgcatcatcatggattatggaaaaatactgattcaacagcccataaaagaattgctggacaacgtacgccgatatacatgcacggttcccgaaggatataaattgccagaaacagacgttttctaccatccgtccgtgatacgcaatacgctggaaacttactcattcctgcaacagccggaagcggaaactcatctgaaatcgatgcaaacaccctacagcaacctcaaatgcgagactgtaaatctggaagacgccttcatcggcctaactggaaaatactaaattcacctaaaaagatattgaagataaaatgaatgctatattttttaaagaatggatcaagacacgctggtacctgctgcttgcctgcattgtaactctaggctttgcaggatattcgatgttacgcatcaaccgggtagtggaactgaaaggagctgcccatgtctgggaagtcatgctttcacgtgatgctgtgtttgtgaacctgctggaatatgtgcctctgctagtcggtattcttcttgcactagtgcagttcattcccgagatgtaccataagtgtctgaaactgaccctgcatttaccttatccgcaactaaaaatgattaacctcatgcttctttacggtttgctgacattagtaatatgctttgctaccaattatatcctaatgtttgtgtatctacagggtatactcgctcctgaactatattcacgcatactactgacagctcttccgtggtatatagccggaatatgcgcctatctgctcattgcctgggtatgtctggaacctacctggaaacgcagagtactcaacctcgtgataagcgttctgctactccgggtattcttcctttcatccgatccggaagcttacaacggtttccttccatggttgacgatttatagtctgctgacaatcagcttttcttggctttctgttctacgcttcaaagccggtaagcaggattaaaatgatgtacatatattaataaagaaagaaaaatgaaacgttttagtataatattcctctgtattacactagtgttgctgctcctgtggcagttaccctggtgttacaccttttttgcagctaaaccttcacgcacgcctttttccatgtacagttgcgttataggtgatttcttgtctatggggtatgaagaaagcgtcggactgatacgccgggatcagtcgggcaataattacactcaagagcagacagacagcattctgcccttattctacgtgcgccagttaatggccgatgaacgctttccagacagtctaatgggggttcccgtaagtccgcgtcaagtacaaatcacgaactttaacttccgtgtttctgctgcggatatcaacgccccttccgttcccctctaccctttactggaaagtatgtcaggaagagtagacctgaagatgccggatgacgtattccgcatcaccccccatggaattgaatttatcgtaatggaaaataacactatagatcaggagaaaagcaaagtcttcacggaagttttaaagaaaaaagagtttcgctttccggcacagtatgtagcaggtaatcctagcacccgcaaagagtatgatgaagggtacctgatactggatgccgaaggaaaactgtttcatatgaagcaaacccaaggacgtccttatgtacgtgctattcccctgcctgaaggattaaacgccaaatatctatttattacagagtttcaggaccgcaagacgttaggatatataacggacgtgaacaacaacttctacgtactgaagaataaaacctatgaagtaataaagaccggccttccttcttataatccggaaacagataatttttccattttcggtaatatgtttgactggaccgtatgcgtcactacggatacagcagaagagtattatgcactggatgcggatgattattcactcatcaagtctgtcagcttccctacgtcaagcaatggaatgtcaggacttcgtttcacatcttataaagataaattcgtaaaaccacgttttttctgataagagaataaagttatgaatagaaatgcatcaaaaggctaaatagtcttttgacgcatttctattttatggtaagctctttcttatatcatctgaaagccttgccagagattcgtcggtggtacaggtgcctccacttcaatcatttctttagataccggatgcacaaaactgatatgccgtgcatgcaggcaaatacttccatccggattggaacgggcaaagccatacttcaaatctcccttgataggacatcccatttttgccaactggcatcgtatctgatgatgtcgcccagtcttcaggtctacttccagcagaaagtaattatccgacttacctatcaaccgatagtgcaggatagcctttttactcttcggcacttccttatcataagcataactcttattctgcttctcattgcgcaccagatagttcaccaattctccttccggctccttcggggcattctttacgatagcccagtaagtcttcctcacctcactggttttgaacatttcattgaggcgggacaacgccttgctggtcttggcaaatacaacaagaccgcttacggggcggtccagccggtgggtaacaccgatgaagacattaccgggtttctgatatttctccttcagatactgctttacggtttccgaaagcggcgtatcccccgtcttgtctccctgaacgatctcggaagcggtcttgttgactataatgatatgattgtcctcgtatacgacagtcatacgctttcttacatattcataccaccatctacctgaatcacctgtcctgatacataagaagacatatcagaagctaggaaggtagcaatgtttgccacgtcttcgggagtaccgccgcgacgcaaaggaatcttctttgcccattcagctcttacctcgtcagacaatgcagcagtcatatcggtcaggataaaacccggagcgatagcgttggcacggataccgcgagaacctaattcctgtgcaatagatttagccagagcgatcataccagctttggaagctgcgtagttggcttgtccggcattaccgtgaacacctactacagaagccatattgataatgctaccagctttctggcgcatcataatcggagtacaagcatgaacgaaattgaaagcggatttcaagttaacgttgataaccatatcccattgttgctcgctcatacgcatcatcagaccgtcacgggtgatacctgcattgtttaccaaaatatcgatgcggccaaagtctgcatgaatagcttctaccaccttggcagtatcttcaaaattagcagcatttgaagcataacctttagctttcacgcccattgcttcaatttcttttgccgtattctctgcattttcatcaatcaccaggtcagtgaatgcgatatttgctccttcagaagcgaactttaatgcgatagccttaccgataccgcgtgcagcaccagttacaatggctgtttttccatctaataatcccatacttttttaattattgattaaagttattcttttctacgcagtgccccgaacacgatgttctcaacgtattgtccacgtgtttcatccgtcagtttagcacctatatgcccacgtatgtaaggcacttcaatacctttcacactataatgcaccaattcggcagtcatgtcgatatcgtcaacctgaaacacccctttctccacgccttcacgaagcacatccttgaaaagctgtatttctttggcatcaaaacgtttgcgcaccttctctacccgccatatatcacggaaaaaggtagcacggagtgttccgttccggtacactacctctttcacggcatccaggcgggtataaatcatttcgatgatcttctgatcgggcgagatgtctttctctactacccgcttcattatatccgaaaggatgtccagctccgattcgacaacagccatatagatatcttccttacttttaaaataggtataaagcgttcttctaccttttttagaagcaagagcgatatcgttcattgtggtattctcaacccccatcttcgcaaatagctgacgggctacatccactaatttagcttttgtcttcgatacggccatattaataattgcacattgcttaataatttgagcaaaagtaaaacatttctgcataccacacaagaaaacgcacattttattaacatttggtcacagggagaggataaaaaaagtatatctgttataacactacttatcaataagttagtccgtttattacattttttagcaaaaataatatggcttttatttgtttgttccataaaaagccgtacctttgcacccgttaaacatcgcggagtggagcagttggtagctcgttgggctcataacccaaaggtcattcgttcgagtcggatctccgcaactaaataaaaaagaccgtttttcaacggtcttttttcgtatcctgacaatacctattgttatttcacaactaccgttgcagcttctttcagtttaatatccagtgaagcaccttccgattgaggcatccaaactacctgacgacattcacctttctccaaagtacatctttgatcaccatgagcatacagatactccgtatcaacatggaaagaacttgcgttcacgttccaactacgtatcccgttcagatgcagatgcaaattatccgctttaccggtattaaacaaccacgcaccattctggactgttaaagctctaaagttgcagtcgtttatggtagcataatcttgtaccatcaaagacaatgaatcacgggccaaaccttcaacagtcattttctgggcttcaagactggtctgcaagaactggacatgatccggcaaagctataatcatctcctcggaacgtaaattaagccaatacaagtcctgatatttcttttcaagcttatcattaggaaaatcaaatacgatacgtaacgtatctccaactgaattcatcgtcataaattcatccataccggaagcataagtgaaagatccttgtccagcttcaccagaagtaattttcaaaggaagctctccaaatgccggcattcttattcccttttcttcgccctcacccgtagcgatgatatttctaaccgccaccatctgtataactctgcactgcggtaattgaacagtcttcttttctcctttaatatccaggaaaatattatcccaacctgtaacttgcgtagaggcgtagaatatgccagcgcacaccacaaccaatccggtaagcaacattccaaatattatataagttgttcgtttcataatcttcttctttatttttgtttcttactaaattcccgatacatagccgacatgtcttctgccgaaataccgagggtatacatctgcttgaagaaataatctacttcttctttgagaaaatactctttacgcaatgaaaggattaacgcacgagcaccggaagcgacgaaataaccgataccacgtttgttatagataacttcctgcgattgtagataatcgtacgagcgcatcaccgtattagcgttcacctctaccacagctgcatattctctgacggatggtatgcgctcctcttcccgatattgcccgagaagcacttcgtcacaaatgcgatctgctatttgaagatagatggctttactttctttaaaattcatacttaccagcggttaatgatttcagactctttgaaacggaaataggcaactatccagttaaagacagccattgcgaaaaagacggctgttgacagatgcatcatagcttcatccgacatcgtttgatgtactccataaccaccacgtccttcaaacaagattttcgctaatagcgaccctattgctacataaactatgatgataacaatgacagctgagaatgtcttaacaaatgaatttcttggccagatactgctacccaatacaaatatagactgagcaaaaaagtatccgcttaatgccatcagaagaccatcccaagtttggagacctgtccaatagtatccggaattccccaaataggaaagcggagcggaagcaataacacctttcaattccgggtaacttaccatgtagatcatcacacgtgtccagtcagccaatttaaaagcaatcaggaacacaatgagaaaaccgaaagtaaatactaaccagcgagagagaaacttctcaaacatcgttgcaggtgtcatcaacactgctattcggttggttttagtcttcatccgttccataacgaacgaagcactcagtaaacccataataaccatagcccaaagaaaaatagtcaattcaaagtaccagataggatcttgctccacccctctgtcaatcattccttgaggataattgtaccgaaaatatccgttccatacgaaagcaattgccattataccgtacatcattacgaagcggagcaaatttgccttccaactctccaccatttctttgcgacataagttcacaaaacggggcgcactaaaaaaggtatcgcgtatcattgttcattctgtttagggtgaaacattccttttatcttctcagggtccgtaagcgcggcaccgaacaacaattcaagattgatctccgactcttcatcatccgtattcggcaacatcaggaaattgccctgtatggaaggaagcgtgtaaatcgctgcttctgccaattcgcggtcatcgctttcaacgaaaagaaacttactacagatgttggcagtggatgcgtcaagcaaaacattactgttatccataatcaccacatgatccagtatcttatcaatatcccgcacctggtgggtagagataataatggtcctgtcgtccgacatgcccgaagctataaatttacggaactggctcttacccggaatatcaagaccattggtcggttcgtccataatcagcagtgaggtgtgggtagctaatgcaaagctcataaagactttcttcttctgccccatagacaaggcccccaaatcaatatcctgctccatttcgaagtaatgcaggtatttcaccatgtcttccttactgaaacggggatagaactgactattcagctccacgtaactgactaaagatataggaggtaattcaaattcttcgggaaccaggaacatatcctgtagtgtgattggcaaccgacggcgtacatcggtatcatgatacattattttcccactcttaggagtaagcaaaccgctcatcagataaagcagtgtagatttgccggcaccgttctttcccagtaacccgtataccctacctctctctaacgagagcgaaaaatcgtgcaggacttcttttttaccccgacgataactgaacgaaatgttttctacctgtagcatacttatatgtttttataggtggcaaggaaacaagatacaaggagaaggccttgtcaactagtatctgataccttgttaatttcaatattagtgtattagtttattagtacaccacaaaggtagagaatctttttaataatccaagcgtttacggaaaaaaacataaaaaaaggaggagctaagaatcactctccactcctcccgacacgacaaacaactaaaattgttgctatttgatgccttccaacgcctttttggcagtagcattggtggggtctatagccagaattttattccagaactctttcgaagtaggatagtcgctctttaacagatagtagtagcccagataactgtagcactctatcaacgcagagttatacttcggttcatttttactcagtagcatgtccattaccttttcgtaataaggtttcgccagcccgtcagtagtttcggggtccatggcagaattggtccgggcacgccacatttctcccagataactgtcgggagcttgttcggaaacaagggtgaacacagagtcagcagactgcaatgccagtttacggtcggcaggctgcacggcgagcgaatccgaagatgtgccctgtccgtaataaagacgtcctaactggaataatgtttcaggagtcttcttttctttggctaatgcatcgtaatatttgcggtaagcagcaatagcctctgcataattattgttcatttcatgggcatcggatatctcacgccacaagtccacttgtgtatcatctttatccaatgctttgccatattctataatagctttatcatatttcttcaatgcactcagtaaagcgccataatagcggtaatctaaataagaatagtctgcacggtccgaagcattgaagaaagcatcggcagccttctcggcatcttcatagcgtttcaggtccgtattgttatacatgacaaggcggttgaaagcagcgtggcgtgcattcttctgcaaacctttctgtgcaacctgcaatgatttctcgaaatcatgattcaagaatagggcaaaagcatatttcagcatatcatcttccgtagcaagaggcgtgtcgatgaatttcgcatacatctcggcagctttgccaaaacggttgccggaataatatacctcagccagttccctgtcagcttccagacagttcggatctacagctttgagctgctccaacttttcaatggcctgtgtagggctggcagacttataagcctgcgcatacttcaggtaggcttccttgcaattcggatcgaaatagatggcttgctcataaagttggcaagcttgtccaatattcttttgtgcaagggcaatatcaccctccaatacagacactttgggatctttgttattggctttctttgccatagccagatattcctgagcttcggtgatctttccggcgtccagataaacatgggctacggaagtcacaagatccacattctttttattcttccctttcagtaactccccagcctcctcagaagcttgcgcgggattggactgaatcaagttttttactttatctaccccagcctgccattcgggtacaggcgtttgtgcggaaagtgtgccggccaacagcaacgctcccatactaagaactaacatcgttttcataatagcactcattttagttatttatcttttatattcaccacccgtacctgttgggtagcgggtactaatcccgactttaaaataatccgctgtccccggtcggaagcaaggaaggaggcaaatccccacggaagcgcgctccgcggatcgtttaacagggcatagatgctgcgtgccaacggataatcaccgtaaaacaaatatgcctgatagggtttgaaactgttttccggcgtcgccttgtcggctgcgctgacggacatcacacgtacttctttgctgaaggagagccctgtgctgtcattacggtcgctcagccaattcacgccgataataccgatagcatcaggagtctttgacacaaaatcgatgacctctctgttggttttcaatgctttcacctggtccgataacggagcacccttacaaatggaatccaccgcaaaccgcacggtactggagtttttattgtcaaataccaggcggatatccttcagccgggatgccggataaatttccttccattgtgtaacctttcccgtcaggatgctgcgaatttcgttcacggtgatcaacgtatcaggattctccctgttcgtaatcaacgctagcccatccgtagcaatctttatctcctgcgggaagaacttccggctattgaaagagttcatctcctccggtgtcagtctgcgactggttatagccaatcgcagactgtccttgagcaatagattgacggcttctacttccgtcacataacggggcacaattcctgccagaggaaacagtccttcaaatacatccacctcctcctgtacgataggctggaaactttcgtccgcagcaattgctatcacacccgaagtgtacgtatccgtcagcccgtccttaggcttactttggcaggcagacactgcaagcagcatcactgccaaactcaaaagttgaagttgtttcaccgttttcatgacacacacattattattgtaacctaaacactaccggaattgtatacttcaccgatacagctttaccattctgtttaccgggaatccacttaggcatggacataatcacacggacagcttctttgtctaggtaagggtctacacctctcagcacattcacatcacgtacacgaccatccgcacctactacaaactggcaagtcacacgtccctgcgttccgttttcctgggcaatagtcggatacttcatattcttgctgatgaactgcatcatctcagcctgtccaccagggaactgaggcatttgttctaccatatcgaaaaccttttcaggttccggttcagcttgggtaaccacttgtttcagatcggcaatatccttaccatgttcttcgtcgttacctttcacgtcagcgatagaaatagccacttttgtttctgtcagttcctgctggctcttaatctcatcctcatctctcacttcctcgtctttcttgatgacgggagccgtgaatttgatagaactcttcagtgcaggaggcgggggagcaacgggctccactcttttcatttcttcctgtttaatttccggttcttccaattgagacaaggtagtcacctcagtcatcacttccttctgcttcggcgtagccatctttatcaaagtagggatactgaaccctatcaatgcaatgacaatcaccagtatcacagcaatattatgacgcttcggagatttctctcttaactgataggcgccgtatgccttattcttgccactgaatatcaggtcacaccattccgaagaacttaaatctactttagccatattcttacttttttaggtgttacacattattcggcaagattctgcgacaattcacctttgctatcgtagttctttatcaagaactcatcggcttcagcgatgtccgtaatcacatacttacctatattacatatctgcatttcatcgagtgcatcaatcagattcttgtacgaagcatcatcagtggctttgataatcacggtcggagtatcctttccgctcttaatttcacccaatttcttcgtaaactcttcttctgatatcttaagattcagtttctgctgtttcagttcgttcacttcatttacagcagctctattacgttgcaaaagcattgctctcagaccatccgccttataggttgtttccttcagcgagctataatctttatagttgggctctccatcgtaataatacaatttatcgtcacctcccaacagcaatgtgatagcctgtgatgccttcactttagactgctgctcttcagtaacattcttatcattgctcggcatgcttatctccatagtctgaggtttgctcagtgaagtacaaagcataaagaaggtaatcagcaacatgttcatgtccaccatcggtgtaaagtccaccctgacggtcattttcttttgcttattttttccgccttttttcttattgccgctttcttgtatttcagccataatatttcctttctgttagtcttcagaagtagtcttcagagaagtaatcaggttataccggttctctctgaggtcctgaagtgagttcatcacattcttgattacggaataaggagtattggcatccgccttgatggcgatacgtaaatctttgttcgtggcacgggcattgcgcacccaggctttgaactgattatcgatactgtcggtaggtatcccctcattctttaacacagcgtcttgctgatcctgcggcaaatcgaggtacttcttcatactcttcattggcaccccgaaagtagacgccaatgagaatttcttagtttcctccggagtgaaagtcactccatattcttgccccattgcttccagcacctcgcgcaagtcagactgtttgtccagactcataaatacttttccctccggatcgaccaatatttgcaggatattcgtttccgggatcttaatctcggatacggaccccggagtggtaacctgtaccggctctttcttcacgaacgtagacgtcagcatgaagaaagtcagcagcaatacagtcacgtcactcatcgcggtcatgtcgatgaacgtacttttcttttttattttcgctctacccataattgtagtattttaaaagggttcgaccgatttatttatgcgtagctgcaaatgtctgcacgatagagaaaccaacctcatcaaggctgtaagttaacttatcaatcttattggtataatagttataagagataacggccaatgcaccggttaagataccgaaggcagtattaatcaaagcctcggaaataccttgtgacaatgccatagagtcagcagaacctccggcagccagagcggcaaacgaacggatcataccgataaccgtaccgagcaatcccatcaatgtacccagagtagtgatagtaccgataataggcaggttctgttccatcatcggcagctccaaagcagtagcttcttccaactctttctggatggcaagcaacttctggtctttagcaagagtcgtgtcattctccatttcagcatacttcttcagagtagcatttactacattggctacagagccacgttgattgtcacaaagttcctgagccttcttcatatcaccggcagccaaagcagctttgatgttagcaacgaatttagccaatgaacctttaccgaaagcagcaccaatagcgatgtagcgttcaatactcagtgcaataacggtcagcaagagagtctgaataaccggaacgatgaatccacctttgtagatagtaccgaggaagttccctggcagcggatggttgttcgggtcattgttcatgaagttagaggggtttcccaacacaaagtgaaaaataagcacggcaacgataaagcaaattacgattacccaaccggcggacttgatgcctttaaaagaggcagatttcttttgaatagtttccatgatgaaaaatttaaatgggtttgtattaaaattgatttttaaaaattagacgtatggatataatcctccccttcacagcatgaacatgccgctaacgcccgtataacccaacccaagcatagggttgtaaaaggtcacctactttcagccatatttcgggaaagaagtaaagggaaaaaagggggaaaactaaataaaaaggaagtttaaatcacaatccgccgcaaagtgtagatgtagtattcactactgaaggatgtgtaatgcggatctttatctgaataatatagtttagactggtcatgtaccaacaaattgtggtgagaagaaatcatcaaaaggcctctcattacagacgctgtttcaacagctctgcggaaacgataaggattaaaagaatatctttcagagataggtttgcttccaagttcagcatccgtagtccacataaacttggagtttgtaaataagttgcttcttgtattattagcgacattatccgaagaagcattctttaatgatgatgaagaagcactcacctcacaagtagatgcagctttttcaaccatccccgtaaagttgacggctctgctaccaagactacacgtcaccataagtagcacaaataccaaaaatgtctttacagttgttctcatgtcgctttcaattctatagtaacaacagcgaatggctgttttttgttttataaaaatcgaattttcttttaataaaaaaaataatgttcagtaaataaaggaattatagtaccttttaatacgaagtaaaggtacgaataaagcactaaatacgaaagcaaaaatatgatataatttcctggttttaagtagttttaatcattcgtttattacttaggggatactatattacattgataatacaacagtatacattttatcataaatatgcaattataatgtaaagagtaggattactttaagaggagaattaagatagaagagaataaactggggaggatattgaactgaaagaagacgtgtatcgggaaggggatataaacgtaaaagcaaagggatattatacctataaacacaaaaagcctccatatcatttcgatatggaggcttctctctaaaaaacggcaactacctactctcccactttacgcagtaccatcggcgtgatcaggcttaacttctctgttcggaatgggaagaggtggaaccctgatgctatagtcacctaaataagttagacacgatgtaaaaagtaaagcgttaaaactgaacgtatatatccgccatacaaggcaaagaccaaaagtgaacgggcaattagtaatgctcggctatgatgttaccacctgt

SEQ ID NO: 6615 - DNA, 429 bp, Unknown
  gut microbiota DNA sequence
gcaaagactttaaactgaacgtatatacctgccatacaaggcaaagaccaaaagtgaacgggcaattagtaatgctcggctatgatgttaccacctgtacacctgcatcctatcaacgttgtagtcttcaacgaccctaagaaatctaatcttgtggctggcttcgtacttagatgctttcagcacttatccaatcccgacttagatacccagcaatgcacctggcggcacaactggtaaaccagaggtcagtccaacacggtcctctcgtactagtgtcagagccacgcaaatttcatacgcccacgatagatagagaccgaactgtctcacgacgttctgaacccagctcgcgtgccactttaatgggcgaacagcccaacccttgggaccttctccagccccaggatgtgacgagccgacatcgag

SEQ ID NO: 6616 - DNA, 4184 bp, Unknown
  gut microbiota DNA sequence
gaaaagatcggttacaattatcgtatgagtaatatttgtgcgggtatcggtcgtggtcagatgactgtgctggatgagcatattgcgcatcaccgccatgtacatgctctttacgagaaggcttttgaaggtgtggacggtataacgttgaaatctaatcctgatgatcgtttcaacgctaattactggctgtctactattctgatagatcctatgaagaccggtactacctatgatgaggtccgttgtaaactggatgaacagggaattgagacccgtcccttgtggaaacctatgcatttgcagcctgtctatgcaactaatccttgttatgtgaatggtgtttctgaacgtttgtttaatatgggtttatgtattcctgccggtccttgggtgacggatgaagatgtggtttatattgtagaacagataaaaggatgttgcaaaaagtagttgtggaatcttgcggattgaataaatagtggtatctttgtagtagaaaggagaacaagatatgacaacgaatttaacaatagagttagacaataacttattggaaagccttaaccaatacgctaaaagtagaggaagaactgtatctgaaatattagagggacagttgcgcaaattggtgcagattcaatcaaagagaaaaacaactccggtttcttctaaactacgcggagttgtaaagttgcctaaggattttgactataaaaaagagatggaagaaagaatctgatgaagcactattttgtagatactaatgttgttattgacatgttagcagatcgcgaaggatatgcggatgctgcttgtgaactctttgatgctgcaggaagaggagaggtgcatttgtctatctgtgctctttcttattcgactatttattatattctacgtaaatatgcggggaaagaaaatgcgatttcaagtttgcgtgatttgactgactatgtctctattttgccagttgatgcagaggttataagaaaagcattgtattctgaattttctgattatgaagatgctatacagcattatgctgcgttacaagatgcttcagttgaaggtataataacacggaatattaaagattataggtattcagatattccagtgctgttgccaacagaattccataagtaatatcaaagtttgttggactaataaagcaagtgagccgctatccggaaatcattcggatggtggctttttttgtttgtgggcagatttccgtttttctttgctacatttcgttttacgaaaaataagagtttgaaagtacttctcataatctcactctgtgaggataccagagtaggattattcaatccttaatgatgaagttcgttatggtttcctgaattttttagtaccatactataccaaaagaccatcttttaatgatctggctcattgttacttataacttttctcagaaaaactgctctcactgccctttttccttcttttattagagatttaatcctcacctttgcattatcgttgatcagcgaagtgaattaaaacagaatttaaatctctaaatgaaaaaagtagaatgagtgtaatttttagaacggtggagagaccgtctgaccctcgggttgagaattctcccaaaaagtatttcccgcaattagtaactttaggacaaagtgtgaatctggcatttattgcccaaaagatgcaggatcgttcatcgctgtctatcggtgatatcagaagtgtagtacagaattttgtagagaaattgaaagaacagttgctggaaggtaagacggtgaatattgccgggttgggcgtatttatgctggctgccaagtcgaaaggatcggataaggcggaggatattacagccaagagcgtggatagtgtccgtatctgctttcaagccaataaggagttgaagataaccaagactgctacccgtgccggtgaaaagttggatctggtcagcttggacgattatctgaagggcctatcgaatgttcctacgggaggtggttcggatagtggttcgggaggtgactcgggcgacggaggactggatgagaaccctctcggttaacgaaaactaataattaaagctaaagaagatctttatgaagaaaacgagttggaatatgatattaaaagtgattattgccgtaattactgccattgcaggtgtaattggagtacaggcaatgacgcaagtataagggctgtttaaaataagccgggagtgcaaaacaaatgtactcccggctattttttttagtagactggaaagctacttttcaatccatttcactatttcctccgataatggattggtacttgaaccataggaagctacccatttcccgttttcatcaatcaggaatttatggaaattccaaccgacttttgcgtcttgcacaccgttttcgctcttctgggttaaccatttatacaaaggagcaatgtcttttccctttacagagattttagccatcataggaaaggttactccataattcaatgtacaaaattctttgatttcctcgttactgcccggctcctgacttaggaaattattagcaggaaagccgattattacaaaattatcctttccatacttctcatataactcttcgagcttagcgtattgcggagtaaatccacatttggaagcgacattaactaccagcacttttttgcctttaaaggtggaaagtgatatatcttctccatcaatggtcttgactgtaaagtcgtagaaactcttttgctgtgcctgagcagctattgccatcattgccataaaaatacttataataattgttttcatctttatattctgtttatctataaaaacaaaatggagacttaaatagtttatcattgaaataaaaaaaacactacctttgcgccccggtaaaagattagttttttgtaggtaaaataggtatgaagaagagtcttatcgcattagcattcggcaccttgggattagggattgccgaatttgtcatgatgggcatcttgcccgatgtggctaaagatttaggtctcagtattcctgttgcgggacattttatttccgcatacgctttgggagtttgtgtaggtgcacctgtattgatcttagctcgtaagcatccattaaaacatatcttattggcattggttactttgatgatggtaggaaatacctgtgcggcactggcacctaactactgggtgttattgctggcacgctttatctccggacttcctcatggtgcatatttcggagtggcctctattgtggcggaaaagttggctgataaaggaaaaggttccgaggctgtatcgataatgatagcagggatgaccatagccaatctgttcggagttccactgggcacttctttgagtaattccatttcctggcgtgtcactttcttattggtaggttgctggggtgtgattatactttattatatctggcgttgggtgcctcatgtggaagggttgaaagatactggatttaaggggcaattccgattcctgaaaacaccggctccctggctgattttgggtgcaacggctttaggaaacggaggtgttttctgctggtatagttatatcaatccgttgctgacggaggtgtccggatttactgcggaaagcattaccgcgctgatggtattggcgggctttggtatggtggtaggtaatctggttagcggacggctttccgaccgttatactcccgggaaagtggggactactgtgcaggctatgatctgtattgtattgctgttgatattcttcctgtctccttatccgtggttatctgcattgttgatgtgtctgtgtacggccggtctgtttgcggtttccagtccggaacaggtgctgataatccgtgtggcaaaagggggagagatgctgggagcagcctgtgtgcaggtagcattcaatctcggaaatgctattggagcctatgtgggaggattagccattagtggtggataccgttatccggcactggctggagtgcctttcgctatggtaggttttatcctgtttctgaccttctacaagaaatatcaggcgaaatattaaaacatttcaatatcttttcgtatttttgtccgcaagtattaactaaacgaaacgaattatgaaaactttaaatgttggaaaaatactttttttactgatgattg

SEQ ID NO: 6617 - DNA, 301 bp, Unknown
  gut microbiota DNA sequence
acataaaatgagtttccgtctcccatacctcaagaccgcccaagctctccaaagcatgacgtaaacgagccgtctcctgcaaataaacagaaatattcaagggattaggcacatcgtaagccagcagatagattccggcctcaatggctaactgattgacagaccaaggcatacgatgagtacgcaaacgactgagcaagccttcgtcagcagttatatatcccagtcgtaaacccggaacagcatagcgtttcgtcatggaatgaagcagcaggacattcggaaagttgactgcttcatc

SEQ ID NO: 6618 - DNA, 3905 bp, Unknown
  gut microbiota DNA sequence
ctatatcttttcccaaagggttcatatacattgggaaaggctccttatatggaagcaagtgtgggcgttgagaatatctttaagttccttcgcgttgattatgtctggcgattaaactatcgcaaccatccggacattcagacaaaaggaatacgttgtacaatgagactatcattctaattctgtcatagcaacatctgccatatactaaaaatgaccgcttatgagcgatcatttttagtatatgcaatctgtttttatcttagtcttaatctgtcacctacttccggtatatattcatcatctttccgattcatcttatacaggttcttcaaccgtataccatatttttgtgaaatggtatgcatggaatcaccatctttcacaatgtaaactgtatgtggtttagaggctttctttttcttacttttcaaatagataatatcacccgcttccaatgtataatccttatgcaaatcattatacttcaccagtttcttccaactgatatcgaattccttacccaggaaacggaaagtatcgccatcacgagctacaacataagctatgtcattagctatatatacctgatgcggattagccagccagggtttcttcttcaattccttctcccaattacgggcttcacgcttactcatgccacgactgtcatacttataaaggtcataatcctctatgattgttatcagtcgattagcataagagggatcagttgcatatccggctttcttcagaccacgtgcccaacctttataatctgtaactttcagatcaaacaggaaagcgtaacgcgcgccccttttcagaaaagcggagtgatcttcataagaatccctgggattgctgtatgcacgaaaacattcattgcgggcatcatcatcatgacgcaccgtacgtccacgccagttactaccgcatttaatgccgaaatgattattacttttgcgtgccagtgcactctgtccggcaccactttcaagaagcccttgtgccagggtaatactggcaggtatcttgtgttccttcatttgctgtacggcaagcggagcatacttctctatatattccacgtaacgggtattccggcgctgtgcctgggcggcaacggtacaaaccagaagtgccaggattgcagtgagtctgatagcgttaattctattcatatcagtaaaagttgaggtacaaaaatcttaaaaagaattggaattaccaatctcttttctaactttgtaacattaattacaatatacatcactgccttatgaaagatttgaccttacaaattgacattaaaatatacgattataatgaattaagtgatgctgaccgccaactgatggatgccgcacgcgaagctacccaacgcagttatgccccctactcgcacttctccgtgggcgccgctgcacgtttggcaaatggtacagttgtcacaggtaccaatcaagaaaacgcagcttatccatcgggactttgtgccgaacgtactaccttgttttatgcaaactcccaatatcccgatcaggcagtagaaacacttgccattgctgcacgcaatgaacgggattttttggatgatccgattccaccctgtggtgcatgccgtcaagtgatgcttgaaacagaaaaacgcttcaaacaaccgatgcgcattttactcttcgggaaaaagggtatttacgaaatgaagagtgtaggcgctttgctgcctttatcatttgacgcgtcttctatggaataatacttccaaaacttatttccctatccatttactgaccatcctacgtaactcgagtggcgaaacaggtttggtcaaaaagtcattgcagcccacattgagtgccaatgccctatcatcgtcataagcaaatgccgtaagtgcaatgatgggcacctgagcaccaccttcccttaacataacgactgtatctatcccgttcatacccggcatcttcatatccataaaaatgagatcaggagcttgagtattgaaaaggtctatagcttcattgccgtcatgtgctctcagcagacggtaatcctttctgagaagcgcctcgatcaacaagtagttactatctatatcctcggccactagaattagaggtttatagttccttgaaacgatctttataacttgctctccaccctttgttacaacatccgaatccaatgaggcatcgagtgtatacggatgtgtaaaccagaaacacgaaccttctccttcacgggagtttactccaatctgtcctcccatccgttctactaaactctgacatatagacaaaccaagaccggcaccctgtgaaaaagagtcgagttttacaaaacgactgaaaatctcatgctgctgttcagcaggaatacctttaccggtatccgttacacagaaatgcaacagaccgtcatcttccaatctataggaaagagtgaccgatcccttggttgtaaattttaaagcgttggttatgaagttagaaagcacctgcatgattcgattcttatcggcatcaaccattatctgcggtgaactttcgtcaaaacgtaaccccaccgcctcctcatgttttttatgcgaacaggtggaaatgacttcgcggcaaagtcgggccacatccactcttgttataataagctctactgtaccggcctctattttagaaatatccaaaatatcagaaataagattaagcagcagttcgttgttctcctctaccagagacatgtatgattcacgctcatcatcatcagcttcggcaagcaggcttgaaaagcccacgatagcattcaaaggagtgcgtatttcatggctcatgttcgcaaggaatgctgattttagtctatccgactcttccgctttttcctttgccaaaatcagctccagttctacctgcttacgagtagtaatatcagtggccaattccatgattgcccatcgtccgtcgagccattttattgccatactctggatggtataccaacgttcggtaattggattatagtcttcccagaaatgaacacctgtaaatttgcgatcagcatcgagcaactgtggtttcgggcaatgcgcacacaatccattcaatcctgcattcagcattttccagcattctgcatttcccgaaacctgtccggcttcttccctgaaaggcttatttgcaaaaagcaccttctgtgtatcataatcacaaacaaagatatttgcattgatattatccaacaccttttgcatggttcgctgagacaattgcagggaagtttctacttgccagcgtttcgtagcggtagatacaatttgcgatatttggctcattagttccacatctttttcgtcccactgcttattccagcaaaagttaaatgacaggaagccgaaatgcacccctaactgcgacaaaggaaaaacagcaatagcttttacaccttgaatttcaagcatctgagtaataaagggatcaagtgaataaatatcagacgtacagatgatatggttttcttcgagcatatcgaaccaaggctttcccgcttcaatagtcatactccgcaagtaatctatagccggttcaataccatcgttacaccattcattggtgcatccgtacgtaattccgtcaaggtggttttcccatgttgccaaacgatcaacgccggtataacgaccgatttctgcaagtgccatattcatggctgtaggtatgtccggttccagttgtaatatttgcaatacttttatgaataatgcctgccgccggttggttgcttccagattttcttgaatggcaatcaggtctttagatttttcttcgaccatttgttcgagccggttacggtactgttccagttccatgccgactccttcttgttcggaatcagtagatttcata

SEQ ID NO: 6619 - DNA, 344 bp, Unknown
  gut microbiota DNA sequence
ttcgtgggcgcttatgtgatgcgccataccagtgaaccggtttcggtggctttttatcagcttttcatatacattggtatcatcactacctcatttgtgaatggtttcttgttgcgacatgtgagtgtgaagattctgtatgcaggagggatattagttagtggattgtcgatgtttgccatgatgttggtaaagtcattaggctttgtggaattgagtatagccggatttgtacttggagctgcatcgggcttcttctggaccaatcgctatctgctgactctgaataacacgacagatgatagtcgtaactacttcttcgggctggagtcttttttcttttc

SEQ ID NO: 6620 - DNA, 618 bp, Unknown
  gut microbiota DNA sequence
ccgaagataattcttcggaatactataccgtacaggaagccatgaagaaatataatctttccagagactctgtttatggcattctgcaatttcacgaaatcaaacgtgagaagaaagggcgtttcgtcaggttcctgaaagtggaatttgatcatgtaatgggcgtcagaaaataagcctaagtctgaatttaggcagatcagaaaatgattctaaaaatgagcattgtctgcgtcaagtcattacggacatttgcagcaaatcaagtataaactaataataattgtaaccatgttagaatgtaaaacagtaacattgagaacacgtcctttgaaaaacgggatgctttcttactatctggattattatccaggctatcgtgaccaggaaacaatgaagaccatccgccacgaaggattgaacatttatatttatgccaatcctaagaatgaacgtgaacgcaacttcaatgcaactatgtcggaaaaagcggaagccatccgatgccgacgctttgaatctatcgttaatgacaggtatgatttttttgacaggcacaaactcaaagcggattttctggaatactaccgcaggcagcttcgtaagcatgaccaaaag

SEQ ID NO: 6621 - DNA, 346 bp, Unknown
  gut microbiota DNA sequence
aacaggcacaaactcaaagcggattttctggaatactaccgcaggcagcttcgtaagcatgaccaaaagtgggaatttgtgtaccaccatttctacaacttcgttcatggcaaatgtacttttgaagaaattgatattgacctttgcaataagtttcgtgagtatctgctaaatgccaagcaactcaggcgtgacggtcgcatttcaaaaaactctgcttccggctattggtcaacattcaggggacttttgaaaatcctttatcgcaatcggctaatcaagaccaatatcaatgactttttggataaaatcgaaacagaagatactccaaaagattatctaagtg

SEQ ID NO: 6622 - DNA, 667 bp, Unknown
  gut microbiota DNA sequence
acctgttgatcgacggtatcacggtgcatagccgtgcttactggaataacgacgggatggatattgtcgactgtaacggcgcattgatccaaaactgttatgtggatgcgacagacgatgcgatctgtctgaaatcccatagtgccgatgccatttgccagaatatcgaggtccgcaacaatacggcttgttcaagtgcaagcggtatcaagttcggaacggcttcgactggtggcttcaagaacataaagatcatcaacaatactatattcgacacgttccgttcggctataacgatccaggcggttgatggcggactggttgagaatatagtggtggacagccttcgttccatcaataccggaaatcctatctatttggtcgtgggagaacgtcgtgagggacgtcgcagccggatggacaacgtgcatatctcgaatgtttatgccgaagtcccggcaacgaaaccggatgcaggatatgactacgaagggccgacggaagataatccgcgtaatgtctcgccttccggcattgtcggcttgcaagataacaagattacgaatgtctctatcgagaatgtcgagatcgtctatccgggcggtggtaatccgttgtatgctaaagttggattggacgaactggataaagtaccggaaatgccgaa

SEQ ID NO: 6623 - DNA, 173 bp, Unknown
  gut microbiota DNA sequence
cctttcaaacttatgttctgcaacatccttatcaatcagccatttacgaaattgtttcaaaaaagtttcgaaaaaaagacagatatgtttggagtgaatagatatatcggctacttttgcacccgctaaccaagagacggtcagccttgaaattgacattctgacagaaacgg

SEQ ID NO: 6624 - DNA, 159 bp, Unknown
  gut microbiota DNA sequence
ggatgtacaagtcttgcttcaatcaatcttcctgaaagtataacaatgatcggaagtcgtgcttttgaaggatgttcaaatcttacttcaatagatataccaaatagtgtaacagagattgaaaacgatgcttttgcttattgtacaagtcttacttcc

SEQ ID NO: 6625 - DNA, 431 bp, Unknown
  gut microbiota DNA sequence
tattccatttttagtcacacttttgtaatatgcatatagcaaaaacgggcgtttctaaagaaaaacgaggagaaagtgcattattttatgttttaaaacatatttatcgtgaacaattcgtatctttgcagcgttaataagataaaagaaaagatgtaaaacccgctttccgaaacgcggaaagcacaaaaagatgacaattatgaaaaagaatgcaaatgaaatttttatgttacagtaccgtattaaacgctatcaagcaatgggaaacggaactatgtgccaggctttgaatggcaaacttcaaaaactgctcgcaaagcaggctaccatgtaaaataacacctttaaataaaatgaatgggggttgtgtcaaaacgttggcacaacctttttctataatttatagtcctgttatcttttcttttgtc

SEQ ID NO: 6626 - DNA, 137 bp, Unknown
  gut microbiota DNA sequence
aagcccacatactgctgttcccaattcaatgcccatccgcccacgatatcaccattgggcgccgtaagacagagatgcaaggtggcacaggctgccagaaaaacaaggatggacaaggcaaccttgttgaacttacg

SEQ ID NO: 6627 - DNA, 546 bp, Unknown
  gut microbiota DNA sequence
gtgtataaactctctgtattcaggcagccaagaggattttcttgtaatgttttgtgttaccgcttttaattgatttactttgtaacctctgtaacggttacggggggtacaaaatttatataactatgaggttctatgatcgtacgaatgaattagctgagttacagcgtaataaataaactgtcatttaatgaccactcccgcttgacggtagtgaccggtaggagacgtatcggtaagacaaaccttatcatgtgatctatagaagactcacctactgtatatttatttgtaggtcgtaagaatgaggcgactctttgcgctgagtttattcctgtcatcgctcagtccctggagacttttgtccctaatgaaattcgcactttccggtcattgtttcagtatttgatggaattgtctgtgggcagggaatttaatcttgttattgatgaatttcaagaattctacaatattaatgaatctgtttatagtgatatgcagaatctttgggatcaatatcgtaggaagtcccgtatgaatctgatt

SEQ ID NO: 6628 - DNA, 180 bp, Unknown
  gut microbiota DNA sequence
caggacgctcggtttattaaaagtcttcaaattacctatatatataagttacttgacggttctttttttatacccagatgccgcgctttaattattaattttaattattaatttgcgaagcacctgctcttgtactacttgtattgtttatgtaaattcttcaaagatcgcttcttttta

SEQ ID NO: 6629 - DNA, 2917 bp, Unknown
  gut microbiota DNA sequence
agagaggagatgacccggagcaaactatagagccgcttgcattggaaagtctgataaggattttctgaataaattgaaaatggtagaagaagaacttgatgaaactgcatattggttggagttgataatggaacttgaacttgtgaaacccgaattgctgcaagatttgcatcatgaaaataaggaactggttagcataattgtaaagtctataatcactatgcgcaataagcagaatatagaaataaagtaataaagtaataataacagatgtctctgtataatgtccgcatggttaaattgtacattgtacattgtaaattgtaaatcataagatggctaagtttgataaaatagcagtattgaataagatcggttctaccggaatggtgcccgtcttctatcataaagatgcagaagttgcaaaaaaagtagtgaaagcgtgttatgaaggtggtgttcgtgccttcgaatttactaaccgtggtgactttgctcacgaagtgtttgcagaagttgtgaaatttgcagcgaaagaatgtccggagatggctatgggcgtaggttctatcgttgatccagctacggctgctctttacttgcaattgggtgctaatttcgttgtaggcccgttgttcaaccctgaaatcgctaaaatttgtaaccgtcgcctggttgcttatactccgggatgcggaagcgtttcagaagtgggcttcgcacaagaggcaggatgcgatctttgcaagatcttcccgggtgatgtgctcggtgcaaaactggtaaaaggcttgttggctccgatgccatggtctaagctgatggtgaccggtggggtagaacctactcaggaaaacctgacttcctggatcaaagccggtgtgttctgtgtgggtatgggatctaaactcttcccgaatgataaagttgctgcggaagactggacttatgtaacagaaaaatgtaaagaagctctggcttatatcgcagaagctagaaaataagatatttcattttgtttaaaggtgtttaaaggggacaaccattggagttggcagatcgtgccactccagtggtttgttttttatatcttgtactgatgtatgtcccatcgcttcattatgatgcaaaggaagaaacttatgtgggcggactcttttgggatggccgctctccttcattgaaacatcaggcaggtgagccttttctatgcgtcctattatcctgaattggtatacatttatggtgaaacgtccgatattgattcaatttatgctcatataacagatgctctagctgcttatcggtagtccgaggaagtaaactccttttcttctaaatatgatgattggatgcagggtaaagctatttttactgaggcagagttgcacgggatgaatttgtttgaaaataagggcatgtgtgctgaatgtcatatattgaataaagatgaatatgccagacgtgttcttttcacagatcatacttatgataatcttggcattcctcgtaatcctgggaatcctcactttcatgtgcctgccgattattttcttttgacttcggatagtgtagatctgggattaggtgctattgtgaataaggaagaagaaaacggtaaatttcgcgtacctactttgcgtaacattgctttgactgctccttatggacataatggctatttccaaactcttgaagagattgtgcatttttataatgtacgtgatgtaagcgatgagtttcctccggctgagtatcctgctacggtcaatcgtgacgagttaggcaatcttggtttaaccccgaaagaggaagctgatcttattgcatttatgaaaacgttaacagatgattttaaatccgtccagaagtagtttatactgtgaataatggcggataagtttaaaataatgttataaaacatacttttttttgtgctactgtttgcgcacacgggaaatcttcctatctttgtaccgcagttgggaaactgctcatgattttgacttttaaataaattagttttgtagttttcaataaaggaattagttaggtaaaaagattcgttaatagttttttcataggctaaaatttggatttagaaattaggtaattaggtatataaaggtaaaagagaaagtttgtttttataggtaattagaagtttgatttttgggtaaaaagaagattgatttttaggtaacaatgatgcagtttaaaaagaaaagcctctatggcttttcttacagaggcgagaggttcgtgagagcttgctcgtttttttgttatatacttctctttctataacttttgttcggtttttatttcttttttgtatctttgttgcaattgtattcaaatgaatactttaaagcaaagctaggcaagtatggaagaaataagcagtcaagatatacgttggaaacagcgttttcagaattacgagaaggcattcaaacgtttatctcgtgccatagaagttgtaaaatccgctcctgatgatgatttgttgcaatccgggctcgttcagacctatgagtacacatttgaactggcatggaaaacattgaaggattatctcacgttagaaggttttgaggtgcgttcccccgtgaaacgattcgtcaaggcttccagagtggatatatcatgaatggagaagattggttgcaggcattggccgaccgtaatctggccactcatatttatgatgatgaaattattattcgggtactgaatgatatctttgagcgttatttttttctgcttcaagacttttatgtttcttttaaagaaaaagcagatgaataagattctgtggcaacaatatggattgagtgaaataaacgggaagcgaatcattgatgttctttctcgtttttcagaggtgcaagaagctgttttattcagtgctatg

SEQ ID NO: 6630 - DNA, 335 bp, Unknown
  gut microbiota DNA sequence
aaaacttcgaacgcatcgccgtggtctgtggtgcctggcatgtgcccgccctcgaaaatatgcctaaagtaaaagaggataacgaactgctgaaaggactgcccaaaataaaaatagaatgtacctggattccctggacatacgaccggcttgctttccgcagcggatacggagccggtatagaatctccgggctggtatcattatctttggcatcatccgcaggacgacggtaccctctggatcagccaggctgcttcccttttccgtaagaagaatatggatatctccgtagcccacgtcatcgaaactgtgcgtctggcacaggtgacggct

SEQ ID NO: 6631 - DNA, 401 bp, Unknown
  gut microbiota DNA sequence
gaagatattgcacggggaaagcaaacacaggtcagtctgtattgcgatatgagcggattgctttattacaaatctctgctgaacaccaataccagcgtgtcactggatatgaatgcagatatcaaaatgcaacgtgccggcaataccaccaaccgccaggatgagattaccgcctatccgataaaatatgaagatgttaccttattcaaccccgcaaacggttttgcggctttcctgatacctgcggtattgatactgattattcagcaaaccttactgctgggtatcggactttctgccggaacagcccgcgaacagaatcgtttcaaagatttggttcctatcaaccgccactacaacggcacattacgtatcgtactgggtaaaggcttaagttattt

SEQ ID NO: 6632 - DNA, 197 bp, Unknown
  gut microbiota DNA sequence
gggaaaagtactgggagaaccttaaagctgaggattggaagtgtaaagctaaggtttgagaacctaaagctgaggtttagcgttgcagagctgaggtttagcgaggtaaggttgagattcatttttgcggagttgaggtatggttttgtaatggtggggttggtacacttggtacagaggttcaccgttccctttgc

SEQ ID NO: 6633 - DNA, 21684 bp, Unknown
  gut microbiota DNA sequence
aggactataaattatagaaaaaggttgtgccaacgttttgacacaaccccttttttttcaattaatctatttatatatccttttttaatgtggaagcgttaaaaagctgttgaacccttcttttttggtaaaaagcctcttctattaatgtctttttaaggagaatattaacagtataggcatacttttgtctcatagaattttaaaactcgagtttaataaatatgaaaaatgcacaactatgcgtaaagtgcccttcacctgatgtaatcctcttacatgtgatgaggaataatcgctgaagttaatttttaaatttaataaattattaattatggaaagacacaagttacttaatcaaatgaaaggtaggtatagacttccaccggaaatctataagaggtcatttcagttgaatactgaaagaatattctggaaacaatcaaattctatatttatttaataacttctatttaattattatgaataagcaatttatcaaagtgctcctgtgcggagcaatggttctgtcaacgggaacctttatatcatgtaataatgatgatgatattgatgatcttaaatcaagagtatcagtggtagaaacggctattggcgatttgaaagctgatttagacaaggctttgaagactggtgcaagtattgtagaagtcaagttggacgagaaaactggtatttatacgttgtcgttgagtgatggacaaaaaattgtgataaaaccgggtggaggtaatatttccgttacaatgactgatacggaagccatcatcaatgtaaatggtacggaatataaactcccattgggttctgctgtcaactctttaatctatagccccgaaacaatagatggtattgtagagattggcaatactggcgcaattgtaaaattcctgccaagaccagctctaacaagtatagaaggtgcagaatttacgattgctgagtctcatgtgttaactcgtgctgctgatggcgagcaatttaaggttaatggtgcggcaagtctggatggtggtttcattgtagttcccattaaggcgttgggtgaagcggaagctggaaagatgtatgctgtatctctgcaaatgaagttcagaggaacggtcatcggttcaaattacttcaatgtgaaagtggctgatgatttttcggctgtagccgaagatctaggtggtgttaccatcaaggctgattacgccccgagagatttagccgacggtttcaaggaaatgactataaacggtcttgacctgttgggaactttgaatttcaataatctattctcagaacttcctgataaggctgaattcatagttgccagcagtagtaaacaaccgggtggaaaagcacaggagaaagtggatatgcttaaggagagtttaaaatccgatggtacttggaaattcagtacaaggccgggaaccagcttcaatgataatgaagagcgtccgggattcttggtgaatgtggttgctgacgacgtagtgaaagctaagatttatgtggttattgttgatgaactggctgatgtggatttcacagcaaacgggttggtcggtaactacgaagcagagtggggtggtacagaaaaagctcaaccactgggggcaggaaagctgaacttcccgagggctctttctaaatatgagacggatatccctaccattcataatggagcagatggattctttcctaattggctgaagtatagtataaaaatgggtgatgaagagttgattttcaataatggatcaacgttggaaatgggggatcttgccaaaaagtatgcggaaggttgtcgtggcatttattatttcttccgtggctttgctgtctatgttccggcttctttgggtactgatggaaaatatacagatgtcaacggcaagacttatgatgctggtgaaggttatggctatgacggctggatgggacaatataatgaatacatcaatgatccggtaggtttctataacaatataaaggaatggggcttcggtgacttcacaatggatgaaaagaccggtgacttcaatttccctgaaagctatacaggttatgggctccgcattgctttcgatgctggttatgaatatgcttacggtgtgaaaccgctccatgcagcaggtgcagatcagttaggcatgctctttatcaaccgtcgtgtggctccggaaggtgcaacaatgccggctcccaagccttaagattcctctaagtaaactttaagaggtggtacccctgtacaagcgacgggtacacctcttatcactaaaaaatgaagatttctttaatgaacagaaaatctaagcatgaaacattataattctaataaaataaaaagaagtgcatttttttcatggaaaacgatgatgattgcacttctatgcctcctgacggcattgcctatgtcggctcagaaccggatggttcagggaaccgtcattgataatacgggcgagccggttatcggagcaaacatacgggtgagcggtactacccgaggaacaatcactgatatagacggtgtgttcaagatagaagcctctgccaaagataaactgacaattacctttatcggttatctggatgttgtagtctcggcagctaataccgtattgaaagtcactttgcaggaagatagcaagacactggaagaagtagtagttgtaggttacggtacgcagaagaaagcgactttgacaggtgcagtctcagctgttaataataaggaaattgccgtgactaagaatgagaatgtggtgaatatgctttccggaaaaatacccggtgtgcgtattacacagaaaagttcacaacccggtgaattcgataatgccattgatatccgtggcttgggtgagccgttgatcgtggttgatggtattcctcgtgacaagggctatttctcacgtatggatgccaatgaaatagaatcggtatctgtattgaaagatgcttctgcttccatttatggtattcgtgctgccaatggcgttatattggtaacatccaagcatggtggagaaagcagtgatggtaagtttgatattactttttctgccaactatggctggcaacagtttctatatatgcctgaaacagcttctgcagccaaccatatgttgttgatcaacgagaagtcttataatgactttggcactaactatccccgtcgtacctcgccgaaatatacatggcagcagatgatggaatatagttccaagaacaatagaggtaccaactgggccgacgaactgtttgataataatgtaccgcaacaacaatataacattagtgtggatggtggttcgaagaggataagctatttctttaatttgggctatatgaagcaggaaggctcctacaagagcggttcgttgaactatgaccgctggaacttccgcagtaacgtggatgctaagatcactgacagattgaaggctaccgtgcagttgagcggctatatggacgagaagaatcaaccgtttactgacatgtggacggtctacaagaaggcatggactttgcggcctacttcacaggcttggctgaatggggatcatgatttgcccagttacgactcggaactttctgacaatgataatccggtggctactaccgacagtcgtttcaccggttaccgcagagagaagcgtacaaacttcaatggttcgctgacattggcgtatgatattcccggtgtgaaaggcttacaggctaaagctttctatagctatgattacaattcatcgaacaatacggaatataaacgcgcctatcaattgtatgaaatggtaggtggagagatgaagacttatgaccgtaatgctgacagttatctacgtcggggaactgatcccagccatggtaccgtaatgcagctctctttgaattatgccaataagttcggcgatcacaatgtggggggcttgatattgtttgaagagcagtataatgagtgggataatttctacggacaagcgattatgaagttggatggggaatatctgatatatggtgagaaaagtaatcagattgtaggtgcaggtcttgcgggcgataaggttcgtcaggctttggtaggtagattcaattatgactataaaggtcgttatatgttggatttctcttttcgctatgatggttcttccagtttcccgaaaaactctcgttggggattctttcctgctgtatctgcaggctggcgtgtcagcgaagaggcctttatgaaagagtgggtaccattcctcagtaacttgaagattcgtgcttcttacggtgaaatgggtgatgatggtagcgccaatacctatccacagactgctgtagcttatgaacttaatcccagcaaattgggctatgtttataatggggttctgatttccggtgtttcggcaacatctatccctaatccggatttgacatggtatacagctaagacttataaccttggcgtagactttgacctttggaaccagaaactgagtggtacgtttgaagtatttaagcgtaaacgtgatggattgttggctacttcttctgcacagatccctggcattgtaggcgcttcccttccgcaagagaataaggaaagtgatgaaacctttggttgggaaatcagcttagggcaccgcaacagagtggcaggagttacttattgggtaaacggacaaatcagtgcgaccaagaatcgttgggattatcattccgatagtcaagcttccaattctatggataactggtatcgcagagatgtttccggtcgtaataaggatatttggtttacttatgaggaaggtggacgtttcggcagttacgatgatatccgttatcatggtacaacaggtgcgaattacggtcaaggtaccttgccaggtgactactattacaaggactggaatggtgacggtattatagacgattcggatagacatccgatggctaccttcaacttgccggtattcaactacggtatcacactgggggctgcttggaaaggtatcgatctttctatgaactggcaaggttcagctggtgtatacagttcctatagtgaagtttttactgaggtaggaccattcaacggtgctgctgtactgaatatttacgaagatcgctggcatacggagaaaccgacggacgatccgtggaatccgaatactaagtgggtatccggtctctatccggctaccggacatagttttaatacgggtagcacgggcattaagaatacttcatatattcgtttgaaaactttggaagtgggctataccttgcctaagacatggttggctaaggcaggtattaaagatcttcgcgtttatttcaatgcttacaatcttttgacttttaccggactggataatatagatccggagcgtccgggagaaaagggcggtgcgaacgaagatcccaataaaaagagtgtcttgttctacaattacccggtaaaccgtacattcaatattggtgcaacaattaaattctaatacgagaggatagaacatgaaaaagatcaaatatatatttgtagcagcagcattaggcctgacgatgtcatcttgttatgatttggacttggaacccaaaggtctgatctatgaaaatgtgttgatgaaatccgaaagtggtctgcagaaatactgggccatggttttccaggacctgccgattgaagacttcaactttgcgatgaatggtgaacacaatggcttcggcacagtctgtgcggctggttggcacgaagcgaatcagtggggtgcgcagaaagcgagtcctgcatccgcagctatggaggctaccggacgtaccacttcctatggtgacggttggggatattggccttacgaccgcatccgtgacattaataatttcatggagcaatttccgaattacaaggaatactataatgaagaaacatacgaaaatctttatgctgaggcctttttcttgcgggctttttactactttggactggtgaagcgctatggaggtgtgcccattgtggacaaggtacttgatccgaaagcaccgcttgctgaattgcaattgcctcgtagcacagagtatgattgttggatgtttattcacaatgatctggaatatgccatgaatcatatgtctactgccaagggagatgccagtcgtcccaaccgctatgcagcggcagcgttaatgagccgcgctatgctctatgcggcttctgctgcaaaatatggcagttatggcaaaataacaggaccagccgtggatgcaggacttatgggtgttgctcccgaaaaggctaaggaattttatcaatatgcctatgacgcctgcaagtttgtcaaggagggtggttatgcgctgaacgacggtagtgacaaggaaactgcctatgccgagcagttctttaaagacaatactccagaggatatctttatcaaacagtatggtgattacatagccttgaaggataatcagggtactatgctgtttcacagttgggattcaatgattctacctaagggcagtaacttgagtatcagtgctccgggttgcaccatacagcccgcatgggagctgattcgtatgttcgagatacctgccgtgaccgacgaggaaggcaagcctgttcgctttgacaatgtggaggacctctggaactcgggcgagatggagcctcgtgcccgcgctatcttcttcttctcgggtatgactgagaaaggttcgggtaccaaattcgattttcaggctggtgtatacaaaagctatcccggaacggcggctgacggaactacggaaaccggtggcagcacgaatgactatacgaacgcctatcgcgtgacggcacagaatgtggaagcaagtcagatgtatcaggatatcggtgatcagaagaacgtaaaagtagccggtccgcatggttgtttcagaggtacgggtgatgaaggatactcctacatgggggcattgattcgtaaatatacgaaccctaactcaaaccttgctattagaggtggtctttttggaagttcgcagtcatggaaggtattccgctacggtgaagttttactgaactgggcagaggccgcttatgaattgggtttggaaaccggtgatgataagttgaaggcggaagcatttacttacgttaatgaagtccgtgcgcgtgcaggcgctactcttcatcagatggtcaataatccggaagatctgggtatggagaaatacggattcccggtagatgagaacttgcagtacattcgtgatgagcgtgcacgtgaactttgctttgagaatctgcgcatctatgacctgcgtcgttggagagtggctgatattgactttatggatggtaaacaaccgcatacgttgctcccttactacgtacttaatgagaataagtggattttcttgaatgaagtgccggttgtagcccgtaaggctacgttcgataagaaatggtactatgaacagattccgggtggagaaatcggcaagaatccgaatcttatacgtaatgatggttattaatactaaattgtatatggatatgaaaaagttgaaatatagtctgttgtttggagtattaactctatttgtgacttcctgtatggaagtggacaattttgatgaacccgacgctcacttcactggacgtattatagataaaactacgggggagaatatcctggccgatcagggtgcaggacgggtgaagatctgggagaaaagcttcagtcttaatcccggttctcaaacgattcctgtgaagcaggatggcactttcaacaatacgaaactgtttaaaggcacgtatgacgtggttcccgaaggcgcctggtggcctgccgatactattcgtataggtattggtaaaaaggctgttcatgacttcgaagtaactccttatctgaaactgattgatctgaagacggaactggtggatgactcactggctatctcctgccgtctggatgttcctcctattacagcgggacttccccgaattctggatatacgtcctttcttgagccttaatcagttctgtggcgaaggcaattgcattagttactataatgatatgggtagtgatgacgagaaaccttatgctaagaactatattgccaaggtaagaagtacttgggagaaactggaaaaactggaagatggtaagagcaagatcttctctttcaaggtggatgtgaagcccggttatacttactttgttcgtgtgggtgccagggttgacgatactttccaaaagtgcaactatacggaaatagtgaaagttgaaattcctcaaaagtaaatacaacagaaacgtaattagattggtatgatggtgcagctgggagaggaggcatacagcttcttttcccggttctatttaactgaacaacaataaataaagctatgatgaatttgaaaaagatatattatttagtgctctgtgctctcgtggcatgcactacagcctcttgcaaagatagtaatgatgattatattccgcctgctttagagcccgaaaagcctgaggtacctgttgaacctgaagacccgcgtgcggatgtccccattcatgtagatggagagccttacaccacttacaaagggttgctgatgaccggttatcaagggtggtttggtacaccgggcgatggctgtagccatgcgaatcataagaatacggagtggtatcactatcgtgaaaacgatatgttcaaacccggtgtactgcgtaacagcattgacctctggccggatatgagtgagtatgaaatcaagtatgatacagaattcaaatatcctgatggaacgacggcgcaggtgtatagtgcttatgacaagtctactgtgatgctgcatttcaagtggatgcaggagtatggcattgacggtgcatttatgcagcgttttgtaggcgaagtgattgataatcccgacggtaaggatcacttcgataaggtattggcaagtgctatggatggttccgaccaatatcagcgtgctattgcggtgatgtatgaccttggcggttataatcctgcgcgttttgagaaagtcgttgctgatgcccaggcaatctatgatacttatgcctccaaacggaaatattatctgcacgagaatggcaaaccgctaattgctctttggggggtaggtttcaatcctgctgaacgtggttacagcaatgaggatatccagaagttgtctgacaagctgaaagaagtggggtacagtatcatgctgggtgtatctacttactggcgtgccggcggaggtgatacctatactcccggaagagctagcttgcatgctctcatcaagagtgtagatgtaattatgccctggtatgtaggtcgtttcaatgatatcaatagttataacacgggtggtagtgacggtggatttgccaacatggtcggtaaggatatagaatggtgtaagaaatgcaatgagtctggagaaagcaaagtacagtatgcacctcattgctatccgggtgcttcggatttgaatatgcatccttactatgaacggggatcccgcgaaagaggtaagttcttctggactcaactccataactgcattcgcagaggttgtacgatgttgtatattgctatgttcgatgaaatagatgaaggtacagctatttataaggtacttagaaagagtgatgtgcccagtaatgcggccgacgtggaatactatgtggtttataacccgaagaatgaaaagatttcttattcagacatgaacggcatcggaagaagcactgagaatactgttttcatggcgaagaataaagtaacagctcctactgatggttggtgcaaatcagaaaaagaattgggtatcacttttgaaggtatcgatgatgatctggaaactgactattatctgtggctcaccggacaggccggtaaaatgttgcgcaagcagattgctcttcaggaaacacagccgaagcgttaaatagaatcgataatatgatttaacaggaaatatacgtatgaaaactttttttatcaccttggctgccttgtcgctcacattgatgagttgtaacagccaaaagcaaaaaacggttactttagggccgaatccttttattactcacatgtatactgccgacccttcggcccatgtatgggaggacggacgcttgtatgtgtacgcttcgcatgacattgatccgccacgtgggtgcgatttgatggaccgctatcatgtattctctacggatgatatggtaaattggacagatcatggtgaaattctgaactcttcacaggtgccttggggacgtaaagacggtggattcatgtgggcgcccgattgtgcatataagaacggtacttattacttctattttccgcatccgagtggtgatgactggaataatacctggaaagtcggtgtagctaccagcaagtatcccgccaaagactttgaagtgcagggatatattaaaggattgggtaatgcttttgcaatgattgacccttgtgtgtttgtagatgatgacgggcaggcttacttctattatggcggtggcggtcgttgtgcggcagccaaactgaaagataatatgatggaaatagctgaacctttgagagacatggaaggactgaaagattttcatgaagctacctgggtacataagaaagacggtgtttactatatgtcgtatgctgacaaccactcggataatggaaaaggtgccaaccgcttgaattatgcaacaagtgactctccgatggggccgtggaaatatcagggcatttatctggaaccgacaggttgcgatacaagccatggatctatagctgaatataaaggtgaatggtatgctttctatcataactgctctatttcaggacagggaaaccttcgatcggtctgtgtagacaagctgtattataactcggatggaacaatacaggtggtaaaacagacacgaggacagaaataattattaaaaagagacttatttagccatttattcaattttaatcggctattaagtcttttttaatcgaaagggaaagctttaggtcttacatttgccttcacgaataaatataaactaaaactgttatattatgaaaattacacattgcctggcttctgtagctttagtttccatgttgggcgcttgtagtggagtacaaaatcaagtaactgccgtgaaaggtccggttgactatgtaaatccttacatgggaaatatcagtcacttgctggtgcctactttcccgactattcatctgccgaatagtatgcttcgtgtttatcccgaacgggcggactatacaacagatcagttgaacggtcttcctttgattgtaaccagccatcgtggaagttcagctttcaacctgagtccgtatcagggagagaatcttcgtccggttgtagcttatagctatgatgatgaaaagttgaaaccttattattatgaggtgatcctcgatgacgaggaaattaaagtgaagtatgcaccctctcatcagtcggctctttatcagatagattatagtcagcaggataaacctgtatacatgatgattaattcacgaaacggtgccatcaaagcaggtgacggatttgtgagcggttaccagcaattggagaataatacgcgtgtgtacttgtatatagaatcggatattgctcctatagaaacgggtattctggctgatggtaaaatagatgcaggcacgaaggaagctgaaggtcgcaatgcctgtgctgttttgcactttgccgacggaacgaaaacggtaaatctgcgctatggtatttcgtttataagtgaggaacaggctaaagagaatctgcaacgtgaattgccggactataatctacaggctttggcagaaaagggacgccaaatctgggataaagcattgagcgatattcaagtagaaggtggcagtgatacagataagcaaattctttatacgtcactctatcgcatattcgaacgccccgtttgtatcagtgagggcggtcgttatttcagtgcgtttgacggaaaggtgcacgaggataatggcgaacctttctatacggacgactggatttgggatacctatcgcgcagctcatcccctgcgtctcctgattgacgaaggtacggaaaagaatgtgattgactcttatctgcgtatggctgaacaaatgggtaatatgtggatgcctaccttccctgaaattacaggtgactcccgccgtatgaattccaatcatgccgtagcaacagtagctgatgcggccgctaaaggcttacaattcgatttggctaaggcctatgaagcttgccgtaaaggaattgaagaaaaaacattggctccgtggtcgggtgctgccgccggttggattgatgatttctataagaagaacggatatatccctgcacttcaggaaggagaaaaagaaacagatccgaatgtacatcatttcgaaaagcgtcagccgattgcagttacactgggaacagcatacgaccaatggtgcctgtcgcgtatagccgatatgttgggaaagaaagaagatgctgctcactatctgcaatgtgctcataattatcgtaacgtgtataatgcagaaacagctttcttccatccgaaggataagaatggtaagtggatcgaaccattcgattatcgtttctccggaggtatgggtgcccgtgaatattatggtgagaataatggttggatttatcgttgggatgttcctcacaatgtagccgatctgattgatttgatgggtggtaaccaacagtttatagcaaatctggatcagactttccgtgaaccgctgggacgtggcaaatatgctttctatgcacagataccggatcatacgggaaatgtgggacaattctcaatggccaatgaaccttctttgcatattccttatctgtataactatgcaggtcagccttggaagacacagaaacgtatccgtcagttgctgaagacttggttccgtaacgacctgatgggggtaccgggagatgaagacggtggcggtatgtcggcatttgttgtattctcttctttaggtttctatccggttacaccgggattcccggcttataatatcggtagtcctttgtttgctaaggctaaggtgatgttgagcaacggaaaggtatttgaaatagaagcacaaggtgcgtcggatgaaaataaatacatccaatctgcaacattgaacggaaaagaatggaataagccttggtttagtcatgacgacataaaagaaggtgggaaattggtattggtgatgggtagcagacccaataaggcatggggtagcgcaggtgatgcagtgcccccatccgcagaaaaacaataaggtataagtcaataggaaaaaaccatgaaaacacttaaaaagattgtatttacaggattattagctctaatagcctgtgccggagtggcacaggctcaagagctatataaggatgagaaagcaccgatgcatgagcgcatcatggatttattatcacgcttgacggttgaagaaaaaatcagcctgttgcgtgccacctctccgggaatttcccgtctggatattcctaagtattaccacggtaacgaggcacttcacggagtggttcgaccgggacgctttaccgttttcccgcaagctatcggactggcggcaacctggaatccggagctgcaattgcaggtagctacggttatttctgatgaggcccgtgcccgttggaatgaattggatcagggacgggagcagaaaagccagttcagtgatttgctgaccttctggtctcccacagtgaatatggcgcgtgacccacgttggggacgtactccggaaacttacggagaagacccctatttaagtggtatcatgggtactgcttttgtgaaaggtttgcaaggcgatgatgaccgttatctgaagattgtgtcgactcccaagcattttgcagccaataatgaagaacataatcgctttgtatgtaatccacagatttcagaaaaacagttacgtgaatattaccttccggcttttgaagcgtgcgtgaaggatggtaaatcagcttccatcatgtcagcatacaatgcgctgaatgatgtgccttgtaccttgaacgcctggttattgacgaaagtacttcgtaaggactggggatttaaaggatatgtggtttccgattgcggtggaccttctttgttagtgaatgcgcataaatatgtaaagactaaagaagcagccgctgctttatccataaaagcaggtttggatctggaatgtggagatgatgtatatgaccagcctttgctgagtgcataccgtcaatatatggttacggatgcggacatcgactccgcagcctatcgtgtgttgagagcgcgtatggaattaggcttgttcgatagtggagaacagaatccttatacgaaaatatctcctgctgtgataggatcggcagaacatcaggaagtggctttgaatgctgcacgtgagtgtattgtattactcaagaatcaaaagaaaatgttgccgcttaacgccaggaaggtaaaatccatagcagtggtaggcatcaatgcgggtagcagtgagtttggtgattatagcggattgccggtaatcgctccgatctctgtattgcaaggtattaaagacagggtaggcgatgatgtaaaagtggtatacgccccatggaagtctgctgtagacggaatggaacttatacagggtgccagttttccggaaggattgaaggccgagtattttgacaataccaagttgcagggaactccgaaagtgcgtaaagaagaatggatcaactttgagcctgccaaccaggcaccggatcccttcttgcctaaatctcctttgtctgtccgttggaccggaaaattgcgtcctacggttaccggacaatatacacttagtttcacatcggatgacggttgtcgcctgagcattgacggtaagatgctgattgatgcgtggccgggacatgctgtccggactgataccgctactatttatctggaagccggaaaagattatcagttgaaggctgaatattatgataaccgtgactatgctattgccaaactgcaatggcgtgttccacaggtaggaaaagtgacgcgactggatttgtacggcgaagccggaaaggcggtgcgtgagtgtgagacagtggttgccgtattgggcattaataagtcaatagaacgtgaagggcaagacagatatgatattcagcttccggcggaccaacaagagttcttgcaggaaatctacaaggtaaatccgaatatcgtagttgtattggtagcaggtagctcattggctatcaactggatggatgagcatattccagccatcgtgaatgcttggtatcctggtgaaagcggaggtaaagctgtagcggaagtcttgtttggtgattataatccgggtggccgtctgccgttgacctattacagaagtctggatgaactccctccgtttgatgattatgatataactaagggacgtacttataaatacttcaaaggggatgttctgtatcctttcggttatggtttaagttataccacgttcaagtattccaacctgcaagtggcagatggtgaagaggagataaatgtttctttccaactgaagaattcaggtaaatatgcaggtgatgaggttgctcaagtatacgtgaagttgcctgaacgggatgaaataatgcctatcaaagagctgaaaggttttgagcgtgtcacattgaagagtggtgaaaacaagaaggtgactttgaaattgcgtaaagatctgttgcgttattgggatgaggcgaaagataagtttgtctgtccttccggtgattatacgatcatggtaggtgcttcttctgctgatattcgtttacagaaagtggtttcggtattgcagaaatgacagaaacagtgctattaattactaatataaaacacattacttatgaaaaagcatttttatcctatttttgcattattcctggtgggagttatgttctcttgtcagtcgcctaaaagcaattcgacgaaagaagaagcggcgggaattgacagtatggctcccaatccatttatcacgcacatgtacaccgccgatccttcggcacatgtatgggcggacggacgtttgtatgtatatgcttcgcatgatatagatcctccgcgtggttgcgatttgatggatcgttatcatgtgttctctacggatgatatggtgaattggacagatcatggtgaaattctgaattcgtcacaagtgccctgggggcgcaaagaaggtggatttatgtgggctcccgactgtgcttacaaggatggtacgtactatttctacttcccgcatcccagtgatacgaagtggaatgatagttggaagatcggtgtagctaccagcaaagaaccggctgctaactttactgtgcaggggtatatcgaaggaatggacccgttgatcgacccttgtgtatttgtggatgatgacggtcaggcttatatctataacggtggcggccagatttgtaaaggtggcaaactgaaagataatatggtggaactggatggagaaatgaaggaaatggaaggtctggaagacttccacgaagctacatggattcataaatataatggaaaatactatctctcttattccgataatcacgatgaaaactggaatgacggtgtgaaaggtgacaaccgtatgcgctatgctatcagtgataatccgctcggtccctggaaatctatgggtatctatatggagcctaccgacagctataccaatcacggttctatcgtagaatataaaggtcagtggtttgcattctaccacaacagtgctttatctaatcatgactggttgcgctctatttgtgtagacaaactttactacaatgaagacggaactatccagatggtgaaacaaagaaaataagatagcttatgaggttaataagtctgattttactgttcctgctaagtggaactgtttcagcgcagaaggtcgagtggtatactaccactcagacttctccgtgggtgaaacagaaggtgaagccggaacgtacaactaccggagcagagattgtgcttgacccggctcaacgcttacaattgattacgggtataggtggctgcttcaatgaaatgggttgggatgcgctgaatgccttgtcggctgaagatcgtgaagctgttcttcaagctatctttggcaaagatggagcttgcttcgactattgtcgtcttccgatgggagctaatgactttgccatgagtttttactcttcggcggatgttgcaggagactttaatctggtgaatttcaatatcgaccgtgacaggtatattctgattccttatattaaagctgcccgtcagataaatcctgacttgcgcatttgggcttctccctggtgtcctccgccttggatgaagacgaataatcattatgcttctgcggttcgtccgtccggagagaaagacgtgaatggattgctaccgcgtgaagctatagcagaattcagtaccggtttccggatggaagaggggtatctgaaaacgtatgccgattactttgcgcgttttattaaagcttatgaagccgaaggattaccgctggaatgtatccatgttcagaatgagccttgttccaaccaggtttttcccagttgtaaatggcgcacggaagatctgactttcttcctggggcattatctggggccgactttcgagcgggagaatatcaaaactgatatttattttggaactatcaatacatccaatccggattatgtgcgcactgctttgcgggataaacaggcagctaagtacattaagggtgttggtttccagtgggatggtaagaaggctatcccaactatccatcgtgaatatcctaatctgaacctgatgcaaactgagactgaatgtggcaacggagcaaactcatgggattatgctgaatatacgtggaacctgatgaagcattatttcagtaatggtatcaattcctatcactattggaatatgattcttcctactccgggcattagtccctggggatggaatcagaattctatggtgtccattgacaagaagcaacaaaccgtaaagtataatccggaattttatctgatgaagcatttagggcattttgtacagacaggcgcttataggctggaaacaccgtcggataagaatatgcttgctttcgttaatccggatggtacaatcactgccatcgttgcaaatgtgactgataatgaggaaacaatgtgtgtaaaagtgagggaacagagggtaacgcttacgttgcctccccactcattccatactgtaagttggaagttatagtggcagtactggtatctcagcttgaaactgagagtttcgcggcatgaaacaaacagtttcaagcaatgaaactgatagtttcacggcatgaaacaaacggtttcaagtaatgaaactgacagtttcacggcatgaaataaaaagaaggtgcattaagagtaatcctgatgcaccttctttccttttctttattactctatgtagagataatcgtagtgtactactggtttcttgccatgctttcccattgcttccctggcctgtgtggaatcacagtttgccttacccacaccgatgggcttacctccgaagtctacaatccgcacaatgtcatccttttcaaattcgccgatgacgtcgatgatgcctacaggtagaatgctgactgccttatccgaaaaaagcaattcggtagcacagtaattgatgtgtaactcgcctttggcaaacccctcgctgtgtgcaatccatttctttacactggatacaggttcaggagaaggagtgaagcgggtacatagcgtactttcagggtgttgaatcaaatcgacaaggatattgtcccgcttaccattggcaatgataactgtgataccttcatcagctactttacgggcaatattggttttagttagcattccgccacggccgaagctggacttggaggtctgaatgtatgaagaaaggtcttttccctgaccgatttcacggatcacttcagaagctggatcagcaggagaaccgttgtaaattccgtcaatattactgagaataatcaaagcctgtgcgtccatcatggaggctatcaggccggacaactcatcattatccgtaaacatcagttcgcttacagaaatcgtatcgttttcattgacgatgggaatcactccattctctaacatcaccgtcatgcagttcttttgattgagatagtgtctgcgggtagcaaaattctctttcatagtcagcacttgaccaacaggaataccatgttcgcgaaagagttcgtaataacggttgattagtttggcttggcctacggcagagaaaagctggcgctgatctacactgtccaacttcttggcggagtgcacttcgctacgtccggaagctacggctccggacgacacaagtatgacttctactcctgtcttatgcagttcagctatctgatcgaccaaagcggacatgcgtgttacgtccagagtaccgtcacggcgtgtcaggacattgctgcctacctttacagctattctcgaaaattgttgttccatgtgttgtatatcgttcttatgtggtttctggaggaaagtgaaaggattattcttcgtcttttcctttatcacgttcacggattatctccatggcatcttcatatgtttcctcgctgacgagaatggttacatccggtgctatataaggtgcgatggtgctcataagtccatctttgataatagttgctataccattgttttcgagtaaacccttaacaagttctgcttcccacggtgatcctttgaacacttcaactgtgcggctatagtctgttgatttcataatggtaagaattaatagatttatatattacaaatataacaagtatttcggagaaaagatttgttttatccttaaatgtttggcaattataactctattcgctgcacagttaccgcttcattcagaaaggtagatgccgattcggtgaacttctcttctgcttccgtagtgtagtaggtgcaatttccgccttttgtacatttggcatccatttccgggtgacgctgtaaataatctttcagactagttgctactaattccccttgtgctacggtggtaatgcccttgggcatatgcttctctattttaggtaacagtattggataatgggtacatccgagaatgaccgtatcgatttgttcatcttttgacagaagttcgttgatatatttgcgtacaaaataatcagttccgtctccttccgcctcattgttttctacgagggatacccataacggacaggcttcaccctccacctggatatccggaaaaagtttatgtatttccagcggataggattccgactttatggttcccgcagtagccagaattcctacatggcgactatgggtaatattcccgatacattccacagtaggacggatgacgcccagtacgcgacgtgcaggatccatttcgggaagatcgttcatttgtatgctgcgtaatgccttggcggacgccgtattgcatgccaggataacgagatggcatcccatttcgaacaatcgggtgacagcttgcaatgtgaactcatacacgatttcgaaagaacgtgtaccatagggtgaacgtgcattgtctcccaaatagatgtaatcgtactggggcaaggcttcccgtatcttgctcaggatagtcagtccgccatatccggagtcgaatacaccgatagggccggggatagtgggtaatttttgcttcataacagaaatactttgtacacaatgcaaagataatgcaaatcgaatgcagaactttcatgcttgcatgaaaaaagttatgctgaggtaccgcttatcttatttaaagatagaaaaaggcgtgaactgtttgcagtccacgcctttttctatctttaaataagatatgtctttacttaattcccagttgggttttaactttagaagtaacatctacactctctgcacctacataaggtattggtgtgcgagccaaatcaaagatatagattgcgccttctgctttgcctacagcctggatggcatcatccaattttttatagatgggagccaatgcatcttgctgtgctttctgcatgctttgatatgcttcctgttggaattcttcttgtctttgagccatctcttgcaattctttctggcgtctttctgctatatttctcggcagagagtcagcttgctgttggaattcttgcactttcttgttgaattctgattgagtgcgttccatttcttgagaatacttctttgacatagcttccagatcagcttgtgccttagtatattccggcataacaacaataacctcctgagagttcatgtgagcaaatttttgtgccatcgctcccaaaggaagagcgaacagtaccacgagtagtgcgatttttttaagcataatgtttattgtttattttaataattagtcgttgaataaatgcaaatatagtgcaaactgaacgcaaaacaaaataagcttgcttatttttaatgctgaggtgcggctat

SEQ ID NO: 6634 - DNA, 11781 bp, Unknown
  gut microbiota DNA sequence
tcctttctgctccgatatttctttaaccgcattataaatttcatcctgaataggttgcatcagactttcacgtttcttgaataattctccttcaggaccaaaataagtgcggcgaagttcagcggcttctttctccttagcgacaatcgcttcctctttctttcccttttgttcttctgaaagaaagacggcttccgattgatagttcttgtataaggttttggcttcctcggcaactttctctacttcactctgccatttcttggaaacctggttcaactgttcgttagcacgttcgtaagccggaatgttcttcaggatatactccatatcgatcaaggcaaacttttgtgcgctggctgtcatacctacggcaaacagcaagatcattaataaaacagactttctcataacgtttggtttttgtgatacaattagaattcttgtcctaagataaagtggaattgactgccaccgtaatctgaggaaccacgtattttatcgaaaccataagcccagtcaatacccatcataccgatcatcggcaggaagatacgaacaccgacacctgcggaacgtttcaattcgaatggattgaaattcttcacatcatgccatgcattaccggcttctacaaaacctaacgcataaatactggtacttgtttccagcatcagcggatatcttaactcaagtccgagacgggtataagcataaccttcgtaaccgtaaggagtcaatgaactgttttcataaccacgaagggcaatactttccgttgcgtagctggagtaaccggtcataccgtcaccacctacatcgaatgtttcgaacggagacttcttatacttgttgtagtgtcccagcaaaccgaattcaacacggcccatcaataccggagtacgtttaactgctaccgggtccatcaacgggatgtacaccttggatttgaatttccatttgtgatattcaatccatttgtgcatcttgttcatgtcgtcctggctggtagtactgtacttgctgtagtcagttccatcaaacagtgagtacggcggagttaactgtactgacaatgagaactctgaaccggaacggggatagatcggattgtcaatagaactacgagacaatgtcaggttgatactaaggttgttacacttaccgtttgtaacggggaagtactgccagtcgctcaggatatagcgttggtaagataactcagcagtaaactggaagtagtcatccggccatttcaaacgtttaccgaacatagctgctacaccgaacatcttgatagacttgtcggggtcgtaatagttctcatagctgttgtagttaccgtagttatacataccataaccgtacataccactatacatactgttgtagtagctattcatatatgccgagttgtagtagcggctactgatatctgtctgtacggaatagaaggccgacagagagaatgcgttcggacgtttaccaccgaaccatgggtcatagaatgaaatgctataagattggtaatacttggcattagtctgtccgctgacggtcaaggtctggccatcaccctgcggcaggataccacggtagttctcacccggatgcaacaagttggccagcgagaagttagtgaacttcaaactcaacttaccgatgataccggtttgtccccaaccggcagagaattccacctggtcgttagctttggataccagatcgtaacctatatctacagttccgtcttccggtcttggctgaatatccggtttgatttgttccgggtcaaagtgtcccatctgctggatttcacgcatagaacgcatcaggtcttcacggctgaacaggtcacccggacgggtacggagttcacggcgtactacgttttcgtacaaacggtcgttaccattgatgctgatcttattaatggtagcctgacggccttcgtaaatacgcatttccaggtcgatggagtctcctacgatatttacttctacgggttcgaggctgtagaacaaatagccgttgttatagtagaggttaccgatagcatcttcgtctgacatggtacgttcttccagtaatttctggttgtatacatcacctttcttcatgcgaagcataaagttcaactgttcggaaggatacaaggtgttacctacccacgttacattacgcagataatatttttctccttcatcaatcttcatgaagatgtctacggtgcggtcatcgtacggtttgatgctatcttctacgatcatagcatcgcgatagcctaattcgttgtacttatcgatgatcaactgcttgtctgcctcgaagttttcttccacgaacttcttggtacggaacagattgagcaatttattcttttcgttggtcttcttcatgatgcgtttcaacttcttagttgcaatcgcttcattgccaacgatggtgatttcgtgtacttttaccttctcctttttgtcgatgtcgatatccacgatcacctggttatcgttggatacatcgtctttctgcgagatgataacttctgcattcttaaagcctttatcatcaaagtagcgcttaatcaaagttttggcgcggtcaatgacattcggggtcacctgtccgcccttaatcataccgatccggctttctatatcctcgcgctctgacttcttcacgccgtgatagcggatatcggatacacgcggacgctgagtcagatgaatcgtaagccagaccttatcgccttctatcttatctgcggtgatttgaacattggagaacagaccatgcttccagtaacgcttacaagcctgagtgacttcgtcacccggtatggtaatcgtttgtcctacagacaaaccggatagtccgatcagtacatagtcctcatagttcttaactccttctactttaatttctgcaatttcatacttcttgggtgttcccgaatagagaataaccggttttgctgcatcattatcggtgccattggcatcttgagccgcacttgtcagtacacaaccgaagaggcagataaacgctgtgagtatagagaaaatacgatagtgcatttatgtttttgattaaatatgtttgagtttaactgatttgttcactggttttgccgaatctgcgttcccgtctctggtagtcgcaaatggctttacaaagttcctcttcccgaaaatcgggccaataggtttcacaaaaataaagttccgaatacgcgcattgccaaagaaggtaattactcagacggatttctccaccggtgcgtatcagcaagtcggggtcaggcatgaagtgggtagtcaggtgctttgacattaaatcgcagtcgatctgttcgggcgtcaattctcctttctgcaccaaagcggcaatttgccggctggcttctgtgatttcccaacgtgaagagtagctgagtgcaagtaccaggcacatacctgtattcttagaagtattttctacgcaattgtataaacgtgtctgtacatttgcgggtaacttttctatatctccgatgatccggaaactgatgttattcttcatgaacgtgtcctcttcgatggagtcgaaaagaaggctcatcaaggctgccacttcatctgtcgggcgattccagttttcggttgagaacgtatatagggtcagatatctgatgcccagtctggctgcctcttcggctattacatggacggtttctgcaccgacctgatgtccgtagctgcgctcgtgtccgcgctgcttcgcccatcgtccgttgccatccatgataatcgccacatgctggggtatccggctcaaatcaatttgttctttatattgcatcttttttagttgttacattccttacatcttgggaagagatcgtaggtgacgaaaaagacggtaaatgcataactgtctttattcttccaaccttttccttttatctggtatgggtcttccagttgcaaaccttcccgttgagtaacatccaactggtcgctaaggctgaaccgcatcgtaaactcgcatcctatattgatgcgtggggttgctttgaattttattcccactcctatggggatgttcatcgtaaagaccgtttttacaggctttggtgcaaacgtaaaacccaatccacctaatatataaggtgtaaatcgacggtcaccccggtacgtattaccgataccatatcccaaaaagttatattcaaactgtgctcccaaatcgattatagtccgtttgaaagtggcatactctccattcggatacacatttttgaaatctctcgtgtcaccggaaatcctgccggctgtcaggttgccttttattgccatgtgtggattcagtaaataccgggctataaaacctcccgctatacctgtgtctttaaacggggtgctgctatttgcatctcccatataaaaacttcctccaatgactcctcccatctcccaagtatattcttcctgtgccatggcacaacagaatgggaacatgagcaggcaaaatactatctttatatttcttgtaatagtcataccgttttcttgttactccttaactatataaggaaacggaaatttgactattttattattgttgcttgaatcccagtttgtttagacgtccacgccaaacagaaccgtcattccacgcgatccaaatataatggttcttatcaatagccaaagaataatctcccttaccttcgaataaacttttatattcaattgtatcttcgtcgtcttcatcttctcctggaatgataactttttcagatgcatatctgaatttatcagcagattcattccaggcaatgcctgcaagggaagaatagatggttttaaactctccacccatcatgtggaattggcttccataatacatgattgctggattcttcatagctgggcaagaaaagtctgtcggggtactcatatcggcccaaacaagcccgtcctttgagaaccaaggtgttgtagcttcaaccgtttcttcaacattgcctactactactgtttgtttgatgccacttgcattcgtgaatacagtagaatatatttcttttaaagggaaatcagagggaacttcttcgccttctttccaagttgtttctccggcgctttttgcacagaagaaattctttccatcttttgcaaagataccggtaagcatatttttacttcctgttacctcatctgcaggaatacctgctaagaatgttaccatgtacattccctgcatatccatttcttcccaatttgtaccattatcggagtagaatgcttttccattctctgctgtagtatataatcggttgtcgaaattaatgatagaagttaatttagcgtctgaaggaagaccgctgattgtaatcaggtttccccattggatactggcaggatttgatacggaagtgcgatatgctgttgtcgtagaggtgtagactaataaatcttcattcaaaacaacagatctttgcttaccggaagccggagaagccggaagtgatggcatttctctccaaatcagtgagtccggatcctgtgtgtgaacatttaccttgatagtatattcgcgggtagtgattccgtcggctgcatgtacttttagtttgatcggttctctcaggtcaactgagtcgttcatgttgaatacagtatcattcagaccagaagttacccatcctgttactgtcagtgtgtcgattaagatacgttttatgatggaatcagcacccataggaagcgagtctacattataaatttctcttttcaactggtcaatcgtaaacttataatatacgccttttgttatagtatcaataccaaaggcacgtatcgtcgcgtcggaactatattcataattttcatctgagtcaagacacgaacttatggcaattgacataagaagaaaactcagtattacggataaaaactttattctcattttctaaagatagtgtttatttacaagttgcaaaaataggaacatttttttctataatcagcatcccggggaagttttatataaaattatagataatacccctgtttttctcgataaaaaagcatcaaaatgaggtaattcggactatttcgttgctgtataatgccgtatacttctgccgaaagattgctcactggcataactaattttatcgttcatttcaggagctttaacaccggatatcagtgatctggggctttcttcaacatatgcttcatcccaaagccccacatcgatgaaagattgtagtaaggtgcttccgccctccaccaacagagattgaataccacgctcatacaatatctgcatgatctgaggcaatatgtcctgttggaaatctatcgggagatattccacgttgggcagagcgtcatgaaagtgttcggtaaagacgagtgtcagtacacttccgtcaaacaaatgaagggtaggagacagattctgtttccggtcgatgacgagacgtatgggagagcgcccataccagttgcgtacatttaaagatggattgtccagtttagcagtacgtgtgcctacaagaatggcagaatgttccgctctctttttatgtaccagcatggaggttaagggagtggatagaatcacaggattaccctcggtccggcataagtcaataaacccgtctgcggattctgcccatttcagtgtgatatatgggcggtgcaaggtgtgaaaggttatgaatcttttgattaggtgtcgacattcgtcttccagtactcctacgattacttctcgtccggcatctttcagcttctgtatgccccgtccggcaaccttggaaaaagggtcctggcagccgatgacgatacgggggatttgtttttcaataatcaaatctgcacaggggggagttttcccgtgatgagagcagggctccagacttacatagatggtggaacgctttagtaatgaggtctcttttacggaacgaatagcattgacttcagcgtgtgcttttccgcaacgtacatgatagccctcaccgatgattttcccgtcgcatacgattaccgcacctaccatcgggttgggagcggcgttgcaaagtccgttttgcgccaattgtatacagcggcgcatgtatttttcttcttctatgtgtgccatttttctatgataattcttacttttgcaccccaaaatggattcttcgcagtaggatatggacggagatcggtctgaccgggaagccgaacaggtgaagaatccgctaaatatccattatgaacattaccgcctcttatattcgccggaaattgcagggccgttatgatccccgcgaagccggaaacctgtcccggattatctgttgcgagatattggggcagcaaactgtggattattatctgggcaaagatataattttatctgtaaaagaggaacaggaattggaaagcattcttgcccgtttacataattttgaaccgatacaatatattttaggggaagcccgcttcttgggaagaacttttcgcgtgactccgggtgtactcattccccgtccggaaaccgaggaactggtagagatgatgttgaaagaactttctcccgtttctcgtgttttagacgttgggacaggtagcggttgtatcgccatttctttggcgaaagaattaccggagtcgcaagtcaccgcttgggatgtatcgggagaagctttatctattgctgctgctaatagtaaggctttgcaggcatctgtacggttcgaacagcgcgatgtgttaacttatgaaccttgtgtggcggactgttatgatgtaattgtgagcaatccgccttatgttactgaagcagagaaacaggagatggaacataatgtgctggactgggagccttcgttggcattgtttgtgcccgatacagatcctttgcgtttttatcgccgcatagccgtgctgggacttgagatgcttacgtccggtggaaaactttattttgaaattaaccgtgcttttggaaaggatactgtagcgatgttgtgtgaaacaggatatcgcgcggtcagactccaaaaggacatatctcataatgatcgatttgtaatagccgaaaaatgacgaatattactgaaacagaggcgctgaataaagtagctgcctattgctctacagcggaacattgccgtgctgagatttctgaaaaactacagcgttggggattgccctatgatgtcattgaccgcattctcaagcggctggtagatgaaaaatatattgatgaagagcgcttctgtcgcgcctttgtaaatgataaatatcgctttgccaaatggggaaaagtgaaaattgcccaagcactgcaactgaagaaaatttcttataatacatgccggcagttcttgaatgaaatagatgaagaagaatacttgtctattttagatagtttgctgactgcaaaaaggaaaagtatacatgcggagaatgagtatgaactgaatggaaaattgatgcgttttgccctgagtcggggttttgaaatgaaagatattcgtcattgtatacaactttctgacgaaaatgacgactttgagtgaaaaatctctttattcttttttttattctcgttctgtttctgtatttttgtgccatatttactataaatagctaatttagttatgagaactttagaaaaactattcgcagagaagttgctgaagataaaagcgattaaactacaaccggcaaatccctttacatgggcttccggatggaaatctcccttttactgtgataaccgcaaaacactttcttatccttctttgcgtaattttgtaaagattgagattacccgtttgatattggaacgtttcgggcaggtggatgcaattgccggcgtagcaacaggcgctatccctcagggagctttggttgccgatgcgctgaatttgccgtttgtgtatgtacgttctaccccgaaagaccatggattggaaaacctgatcgaaggagagcttcgcccgggtatgaaagttgtggtggttgaagatttgatttctacaggtggaagtagcttgaaggccgtagaagctattcgtcgcgacggatgtgaagtaatcggtatggttgcagcttatacctatggtttcccggttgcagaaaaagcattcaaggatgccaaagttcctttggtgacgctgacgaattatgaagcggttctggatgttgcacttcgtacgggttacatcgaagaagatgatattgcaacgctgaacgaatggcgtaaggaccctgcacattgggatgctggaaagtaacggcggtttatactataaaataattaatatgataaaagggccattcggatagtttctgtccggatagttctttttttgtcttttaaagagaatcaaaatatgacaaaatttgaaagtagtgtaaaaactatacctgcctcacaggaggctgtttatgagaaactttctgatttgaataatctggagaagtttaaagacagcttgccggaggataaagttaagaatttgagctttgactcggagagtatgatgatagaagtagctcctgtgggtaaaatagcgctgagcatagtagaaaaagaaccgtgcaagtgtattaagtttgccacaactacttcaccactgcccttcaatttgtggatacagattgttccggtaacagaaacagaatgtaaactgaaattgaccattggcttggaactgaatcctttcatgaaaggtatggttcagaaacctttgcaagaagggttggaaaagatggcggatatgctgtcgataataccttattaatcactaactgttaatcactaaataaatggctcagaaactttgggagaaatccgttcaagtaaataaggatatagaacgcttcacggtgggacgtgatcgcgagatggacctttatctggctaaacatgatgtggtaggttctatggctcacatcaccatgctcgaaagtattggtctgctgacgaaggaagagctggctcttttgcttgaagaactgaaaaatatctatgcggctgccgagaaaggggagtttgtgatagaagaaggagtggaggatgtacactcgcaggtggaattgatgctgacgcgtaaattgggtgatataggcaagaagatacatagtggtcgttcgcgcaacgatcaggtgttgctcgatctgaaacttttcacgcgtgcgcagattaaggagattgctgaagctgtggaacaactgtttcatgtgctgatatgccagagtgagcgttttaaagatgtgctgatgccgggttatactcatttgcagatagctatgccgtcttctttcggattgtggtttggtgcttatgccgagagtctggtggatgatatgctctttttgcaggcagcattcaagatgtgtaatcgtaatcctttgggttcggctgccgggtatggttcttcattcccattgaatcgtacgatgacaacacgtttgttgggctttgactctttaaactataatgttgtttatgcccagatggggcgtggcaagatggaacgtaatgtagcttttgctttggcgagtattgccggaactatctccaaactggcttttgatgcttgtatgttcaacagtcagaacttcggtttcgtgaagctgcctgatgattgcacgacaggttccagcattatgccccataagaagaacccggatgtctttgaactgacgcgtgccaaatgcaataaactgcaatcattgccacaacagattatgatgattgccaataatttgccgtccggctatttccgggatttgcagattattaaggaagtctttttgcctgctttccaagagttgaaagactgtttgcagatgactacctatatcatgaatgaaataaaggtgaacgaacatatcctcgacgatgacaaatacctgcttattttcagtgtggaagaagtgaaccgcttggcacgtgaaggtatgcctttccgggatgcttataagaaagtgggattggacattgaagccggaaacttctcacacagcaagcaagtgcatcacacacatgagggaagtatcggtaatctctgtaacgatgaaatctcggcgctgatgcaggaagtggtagatggtttcaattttcatggaatggaagtagctgaaaaagctttgcttggtcgataaatacgatattgtatgcggaaactctgtatagtcataggaatgctttggttgtgtgtcaccagttgtggtgattcctacgaatcgagcattccttccgttacctttaatttttcatgtagcctttcacagtctccttattataagattacgactcccggtcagtttctgaagatagagaagaatgtaaatggactgccggtgggctatgcgggattgattatcgggcagagtgttttctcagaggggaatacttatgttgcttatgatgcagcttgtccggtggaggctagtcgtaatgtttcggtggaggtcagggaagatggattggggacggcagaatgtcctaaatgccatacccaatataatttgagtagtggcggatttcctacgggggaaggtacagagtatctgaaacattataaagtcaccgtgtccggcacttctttgcaagtgaggaactaataaaactgtaatattttccatgtaaaaaatttggctgtaacggggaaactccttatctttgcacccgttctacaaaaaagacctgcggaaatagctcagttggtagagcataaccttgccaaggttagggtcgcgagttcgagtctcgttt

SEQ ID NO: 6635 - DNA, 467 bp, Unknown
  gut microbiota DNA sequence
tcctttataggatgctcgaatggtggaatggtagacacgaaggacttaaaatcctttggccattgcggctgtgcgggttcaagtcccgcttcgagtactgtttaaagctccataaatcaatgatttatggagctttttgttttcctgcattttctaaagaagaactggatcaacgtaaaaacctgagggcttttcttttttaagcatacaacatcgtcagtctatataaaaagaatgccttatcttttacccctctgaactgtgccctgaacgctttgagtttagcattgaatgattccgccgctgcattggttgccctccttttcaaagaaattgataatattcagatagtgggtctgaatggatcgtgccactcttccgaaagcaagaaatccggagttatctacctcatcataccatcttgcaagtctcgtcaaggctacatccttaaacttacactgatgata

SEQ ID NO: 6636 - DNA, 360 bp, Unknown
  gut microbiota DNA sequence
aggccaaataaaaaaggtacccaacgcaatgtggatacctttatatgattcatttacataaaccggaaaatgactcgtccggtttgtggaccatttacccatttcggttgtgaagagggaccacacaaatcggtggagtttactttattacgtaccggaggaatcacgttcaggacagagattccgctttcgggaagagtataaagcaaacggtcgcggccatcacgaggctgatatactccgatatatgcgtcgggagtttcgtttgtcaggctgatagtgccttctttcgtttggatattcatccaggaaacatcaccaaagtatcctttgaattcgggatatgtgaaagtctcaccc

SEQ ID NO: 6637 - DNA, 368 bp, Unknown
  gut microbiota DNA sequence
gatattgtggctcttttctttgcaggaaattaggcagcttctccgtaagttcccgcattttgcgtaaaccggagccacgtttctccatatagtccaactgtgtgaacatatctgcaatgacagggttgcggcgcatggacggcactttgtatatgtcacggtcttgaatctgtgtaccgtcaagcattgcacccggtgatactagttctactcggtcatcataaatgtcgatatgtacttcaccgcccatcacggtgtaatcccgatggataaggtggtttaccaatccttcaaagatggcgcggtctgaatagtccggtaggtttagacgatagttaggcatcttcacccaaccactcatggtatag

SEQ ID NO: 6638 - DNA, 631 bp, Unknown
  gut microbiota DNA sequence
tgatcgctgtcaccatgcagggactgaaaggagaaaatgaaaatgactgataaaatagaaaagactgccctgaacacatctgttggcgcagatgagaggcagtcaattcaaaaaaccactgacagtattatacccacttccaatccgaaaatcaatgatcccagtgaaaattccgaagaaagctttgaggaaatgtgccgaagaatgcagcggctcaccgatccccgttatctgcataccattaccctaacagagctttttcaaacaagttataccagcagacctcccattatcgaagggctgctctatgctggggcatatattcttgcaggggcacccaaaatcggtaagtcctttatggtggctcaaatcgcctaccatgttagtaccggacaggatttgtggggatataaagtccatcagggaacagttctctaccttgcgctggaagatgattttcagcgtatccagagccgtatgtttatgatgtacggtgtcgaggatacccccaaccttcactttgccactactgccggaaagattggaaatggactggatgaacaactggaaaactttatacgagaacactctgacaccaatctcattattattgataccatgcagaagattc

SEQ ID NO: 6639 - DNA, 319 bp, Unknown
  gut microbiota DNA sequence
aacgttcacacttgtacaagcgcaggctctcgcagccgcaaatgttcaattacaataattagaacgaccgtcctttaaatatattcgactcggacaatggaacgagtttaccatccagcgttagtctattcgagttgaaattaggatttactgtggcagatacattgttgcggccatgagtgagcctgatggaaacttgtgctgagattcctacacctgtcacactaaaattgcaagttacattcccttttttgtcggtggtggtttttacttcacctacagtgccatccactgtaacacctccaattccattaggacc

SEQ ID NO: 6640 - DNA, 315 bp, Unknown
  gut microbiota DNA sequence
actacgtcctcttttgaatgtcacacgatccgcttccaatacaaactttctctcctttatggcttgtactgcatcagtgtatgctcgttcttcttctattttctcccgagctttttctgcatcacgttgtgctttacgttcagcacgacgactttcacttttactttcctgtgcatagattgttgtagatgcacctatgaaaaccaacatcaataatacgataatctttttcataacttcttctttcttttgttagaataaacaatcaaaaaatgaaaaggatgcatgtgacctatattaatattatatgaatta

SEQ ID NO: 6641 - DNA, 137 bp, Unknown
  gut microbiota DNA sequence
ttgttgatttgcagcttggctgatgtcaatgtatattcaccggctgcaagggcaaacttactacctgctgctgcgtcctgaatagcagtcacccagtcatctgtcggagtgagttggatagcgtcacgtaaatccaa

SEQ ID NO: 6642 - DNA, 771 bp, Unknown
  gut microbiota DNA sequence
tccatattgggagccatatccaaggttatctcacgtacttgatagcgacgacggcgggaaagtctgagtaagacagaacttaccgtacagacatctgtgccttttattatggcgataatactgcctttgccaccatgggcagccttgttggtgagtatggtatagagctcaccacgcgaaagggcaacctcatcaatacagacgtaagcaccgatattcttttcaaaaagcagccaatcctgtgcatgagcaagctgatcccagtgaagataactactcagatgattgcggtattgacgctccagaagagctccgtcaataccatacagagtgcccaataacttacagctaaccggataactatcaatatagctcttttaaaaaagacgcaaaatcctgcgtcatacgggtaccttcagcgaccatacgccagttacggctgatgtactcattactcttctttaaaatccagcgacgacgacggatattcaggaaaagtttctttccccgaagaaggaagtcttgaacaaccacaggagcatagaatcctttgctttcggtttcttggctggaatattgctcaggaacgacattcttttcttcaagataaataacaacctcactagaggtttcctgcacatctacaagatcaaagtaatctaaagttccttcaggaagcagaaggcgataaccattggaatccatactaaataaatttgaagacaaagatactaatttttaaatttccccctcaggtttttacgttgatcc

SEQ ID NO: 6643 - DNA, 33859 bp, Unknown
  gut microbiota DNA sequence
cttgagaaaatcatatatgtatattttataatgtattaagtatggtattattagatttggagatgaagaaatataatttgggtatatggagattatttttagtattactggttatatctaattttatagcttgtaaggagtctaaacatcagcgtttggctcgtacggtgttagaatgggaaaataagcagattcggtatccatcaaatatgctattgactaatttgaatggagatagcacggcttttgataaaacgggatataaatatactataatgatgtatgtcgattctataggatgcatgagttgtaagcttcaattgaaggaatggaaactatttgttgagaaaatgaatatagaaaatcccaatactgtatgtatacttttagtctttcattcttctaataaacgtaacattaggcatcttttgaaaaagaatgcatttaactatcctgtcttttttgatattcaagatagcttgaatttattaaatcattttccaattgatgactcatttcgaagttttttattagatagagataataaagttgtaatcataggtaatcctattcataatcctaatataaaaaagctttatgaaaagattatctgtagtaagagtttagattataatgaaaagagagcacaaacgcaagttcagtttgatcaaagtgttgttaatctgggaaactttaagagaaaaaataagcaggaattgacttttgtgttgaagaatttaggccataatctgttgagtgtagaagatgttgtgccttcttgtgactgtctagatgtgagatttactcatgaatccacaaatccaggtgatacttggatgttaaatgttatatatgaggctgatgctccaggtgcttttgagaaaacaattgctgtttattgtaatgttcctaattcaccacttcatttacggataatggggtatgtagaatagaataaaatatattcataataaatttgtgtaaacaatgaaccgcatatcaaattatatagcatttatttctcttttttttgtaattgtttcctgcaatagtcacttgaatggtgtctctcaaggtgttaattatgcattaaaaaaatcaggaaacaactgtaatgagttggaaaaggtactgttatattatcagaatgattcattaagatatgaagccgcctgttttttgattgaaaatatggtagggcatttttctaatcaaggatcggcaacggatttctataaacagaagttgagaatgcggttaaaaccttttagtcgtgatttcttggatagtctttggaaagaaacttctgtgagaaattcagatgaagactttgtgaagtcttatgatcttgaagtgattgaaagttcttatcttattgaagacatagacagggcatttcaggtttgggagactgccccttggtacaaagaggtaagctttgaaatgttttgccggtacattctgccttaccgggttagtgacgaacagttggttgagcactggcgggatagtctgatacaagactatgccggatgcattcgtggtgtaacagatatgaaacaggcttttgccttacttgcaagggctgtagataaagaactccgttcggcttcatcaaaatgtccgtatttactggatgttctgacaatgcgagatgcaagattctcccgttgtgagcagcgttgcatagtaacaggaaacgttatgagggcgttggggattccgatagcttatgattgtgttgaaagatgggctaactatagtaaaaatgggcattcttggattgtgctgatgggaacagacggaaaaacatatactttgtatgagggagattccataccccgtccggccacgtggattgattcctcatttttcaaaccgttggctctgccggattcgaattattcatatcgggtagattctctgaaacgggctgcaaaagtctatcgacagaattatttcagagaagaagatcgagattattcggtgatggatgtctcggcagagtatggcttgacggacagtgttgtaattcaggttaatagtacggcggaatatgcggaactttgtactttcaaaaccggtgaagactggaagactatcgtgagaagtaaaatccgtaaggggaattgtgtcttccgtaatcttggagcttctatcgtttacttacctgttgtggtgaaaaaggataagaccgaagtgctggatgctcctttcatattacgaaaaggaggagctgtgaagaaacttattccctcgaaacaaaagcggacgatgcggctgaaccgcaaatacatactgttgacaaattggacaaaccggtggtatgaactgattggcgggcgttttgaagcgagtaatgatagtgatttccgtaatgctgatctgctgcatacaatttgcgattttccggtttattgtaatgaagtaaaattgcaaaccacgaaatcttaccgctatgttcgctacgtttcttctaaagtttctaagagcgcattggcggagcttgctttcttttgtaatgagaaagagataaaagggagagctatgggggaaggcttgagtcctccttcgcaaaaacgtgcttttgatcatgacttaatgtcgatagctgatcctcaacaaaaggattattgggtaggtcttgacttggagcaaccatgtcgtttggataaattggtatactatccgcgcaatgatgataactttattgtaaccggtgaggtgtacgaactattctattgtgataagggcgactggcattcattgggaataatgacggctgaaagtggagagttggtttatgagaatgttcccggcaatgccttgtatttactcaaaaacaggacgaaaggtaaagaggaacgcatcttcacttacgaaaatgacagacaggtatggtggtagatgtaaagaagttgattggcaaatgctgtaacagaatcgtaaatattgcttttggcgtctgtattgccattattgtatttttgatgttacagttgttctttgtaacttcttttaaaattccttccgattctatggagccggttctgcaagatggagactatattctggtggataagtgttcaagaggagcgaggctgttcaatgtggctgcatcgttggaaggagagaaagttgacatttatcgtgtgccgggttggagaaaatttaagaggaatgatgtgttggtatttaattatccttattccaaacggaaggatagtataggtttggatgcgatgatatattatgtgaagcgttgcgtggcactgccgggagatacattggaaatcaaggatgctcattaccacgtacgtaactgtacgcaaccgttgggaaatgtagaagggcaggatttcttgcaaagcgtacttgagtcgggaaaagcaaaggagtggagaattgctgtgagaagttaccctaaaagtaaattgcttgattggaatataggagaattcggacctttctatatccctgccaaaggaagtatgataaaaatgacacctttgactaaagtgctttacagaaatgtgatagagtgggaacaggacaaaaagttgatggtacgtgaagatacggttttattgggtgacagtatcatatatcagtatcagttccgtgagaactattattttgtttcgggtgataaaatagaaaattcattggattcccgttactggggattgttgccggagccttttattgtgggcagggcttggcgtatctggaagtcaatagacagaagtacggatgcagtgagatgggacagagcttttaagaaaataaaatgaggtgtatacgaacaatattggcagttggtttgaaagggatggcttgtcttattttgctatctctagtgtgtgtggagaatccggaacttccttccggagaagttattgggcaatggcttgcttttgataaaagggtattggtggcggcaggttgcatactgcttgcggtatgggtggataagaaaggtggggagtttcctgatattgtgtcgtgggcgttaatcttttgggggagtatggaagctgtccggggaatatgtcaactctatggtttttcagattccggacattcattatatgccatgacaggatctttctttaaccctggtccttattcgggatatttggcgatggtgcttcccgtttgcttacaccaatatttaattggcgatgggaagatggatcgtgtatttgcaggtggggtgggtttgcttatactttgtgtcttgccggctggaatgagtcgctcggcttggttggcgggaggcgtttcctgcttgtgggtatatgcttgttatgcagattggggaattaaactgaaaaaagcatggcagcaatacagaaggttggttgttgtatcggcatttgggggagtgtgtgcgttggtactggctggttggctaatgtttgtactgaaacctgattctgcctgtgggcggctgtttatgtggaaaattgcatgtcgggctgtggcggagcaacctttgctggggtatggcatgggaggttttgcggctgcttatggcaatgcgcaagaagcttatttcgcgacaggggattatgaattatgggaagaacgtgtagcaggtagccctgaatatgcctttaatgagtatttacagactgcggtagagctggggggacctttgacgctctgcctgttggcggttgtattgttctgcctgtatataggaatcaagaacaagcgtttcggtatctgtggcgctgtattctccttaatgatcttttcattttcttcctatccgctgcaattgccagtgtttgtggtgacggcagtatgtttacttttagcttgcattctgagaaattaccgttgggagtggatgggattggtgatattggcagggggaattggagcaactcgtctaaagaatgatttatgtatggagcaagcatgcaggaattggatgaatgcacggatattttataacgctgctgcgtatggttcggtagaaaaagaatatcgattactttatcctttactcaagaaatgcgctgcatttttgtttgagtatggtcatatcttgcataaacaacagaaaccggaagagtctatccgtattctgatggaggctatgaaatatagtagtgatccgatgatactgaatattataggcaaaaatcaccaacaaacgggagattatctggcggcggaaagatggttgatacgatcaacttatcgtctgccgggacggatttacccctattatctgctggcaaagttgtatgctgaaccggattttaggcagccggataaattggaagagatgaaacagattgttcttacaaaagccccgaagatttattcaacagttatagaagaaatgcgtagagaggtgaagaaaataaagtaaaatggcaataattatgaatagcatgaacaagcaagttcagaaaaatacaattcagtctcagaacgaatggaatgcatgtttattgtttagaaacaaacagctgacgaaagaagtaaaggaacttcgttctgtatcggcggctatggattgttctgcttcgcaactacaggcaatgtctcagttgttgaggctgcacacaactccggcttacggtattataaggagtgaacgggaatggcagaatctctttgccttgcttgatatgctttacgggagtggcttcttggcagacttgggagagcgtcagcttaccgctcaggaattaaaactgtgctatttagtgcgtgcccacctgaataataaagcgattgcactacttttcaatgttactacttcatcggtagtaaaagccaagcaacgactgaaacggaagctggctttgttaccgtcagatagcttcgataactatatacagcactattgatagcactatactgaataaaaatgatgctttcttttccgtaattagaaaaaagtctctatcttgccgccgcaataaaaagcaaatatgaactatggaaagacaaaagattcatcgggaatacctcttgaatgcaacttctaaaagcattctttggtccgcgataagtacccccaccggtttggagggctggtttgcagacagggtacagtcggacgataagattgtcaccttcttctggggaaagacggaacatcgtgacgcagagattatcgctgtgcgggctttctcttttattcgcttccgttggctggatgatgaatatgagcgggaatattttgaattaaagatgacaaacaatgaactgacaaacgacttcgtgctagaagttacagatttcgctgtggtggatgaagtgaaagatttgtgcgagttatgggactctcaggtagatactctgcggagaacgtgcggtttttagttaactttgatataaaaattttccacactcccttttttatgctaattttgtgtcttcattgcatgaaacgagtaaaatgctgcgcataaaaaagttagatatatttatattgaagagcttctgtatgctctttatgggcacttttttcatttgccttttcattttcatgatgcagttcctctggaagtacgttgatgaaatggtgggaaaaggattagaaatgagtgtccttgcacaatttttcttttattccgcccttacattggtgccggcttcattaccgttggctattctgttggcggcacttattacttttggtaattttggtgaacgttttgagctgctggccatgaaggcggcaggtatctcactacttaagattatgcgcccgttgattgtgtttatcattttcatctgtggcgtttctttttatttccaaaatgtaataggaccgaaggcacagactaagctctggacattgctaatttccatgaagcagaaatctccggaattggatataccggaaggagttttctatgatgagattgatggctataacctttatgtaaaacataagaaccgtaaaacgggtatgctttacgatgtgctgatttataattttgaaaaagggtttgagaatgcgcagattatcaagtcagattccggaagactggaaatgacggctgataaacagcatttgtatttgcatctttatagtggtgagcagtttgaaaatctgaaatcacagaatatgaatcagaagaatgtgccttatcgccgggaagcatttcgggagaagcatgctattattgagttcaattccgattttaatatggtggatgccggcatcatgagcaatcagtctaacagcaaggatatggcgatgctgcaagcgggcattgactccatgagggtgcagaatgacagtgtaggacgtgtctatttcaaggaagcgatgaatggcacttacaagatttctgctgacttgaagaaagctgatacactgaagatagagcaggcacatttgggagaatacaatgtggacagtcttttcaatgtggctaccttgtcacagaagcagaagatcatttctactgccgtgaaccgtgcagagagtgcagggagcgattggagtgtcaagagttatagtatgtcacagacagataccagccttcgtcgtcacatgacgtcctggcatgagaaattaacactttcggtggcatgccttattttcttttttatcggtgctccgttgggtggaattatccgtaaaggcggtttaggtatgccggttgtggtatccgttcttatttttattatttactacattattaataatacgggctataaaatggcacgtgatggacagtgggttgtctggatgggtatgtggaccagtacagctatcttggctccattgggtgcattccttacttataagtccaataatgactccgtggtattgaatgccgatgcctatgtgagttggtttaagaagatcgtcggtatacgcagtgtgcgccatctattccgtaaagaggtgattatacacgatcctgattatactcatttgcctgccgatttgcaggcactgtctgctgattgtcgtgcgtatgctgaaaggaaagcgttgaagcgtgctcccaactatttcaagttgtggatggcagactcaatcgatgaagaaatagaagatataaatgagcgtcttgagaaattagtagaagagatgtccaatactaaatctgttcatttgctgaatgcattgaataactatcctattatcccggttcacgctcacctgcgtcctttccgtaattattggctgaatatggcctgtggattgttggtgccgataggattgttcttctactttcgcatctgggcattccgtatccggttgaataaggatatggagcggattatcaagactaatgaagacattcaaaagataatagaaactaatctgaaataacctaaataaataaaggagaatacagaatggaaaaagtgaaattaaatacaatagaagaggcgattgaagacttcaaggccggtaactttgtgattgtagtggatgatgaagaccgtgaaaacgagggcgacttgattatcgctgcggagaaaataactcctgagaaggtaaactttatgctgaagcatgcacgtggtgtgctttgtgcgccggttactgtgtcacgctgtaaagaattagatttgcctcatcaggtcagtgacaatacttccgtattgggcaccccttttacggtgactatcgataaactggaaggttgtactaccggcgtttctgctgccgaccgtgccgctaccattcaggcgcttgctgatccggcttctactccggcaaccttcggacgtccgggacacatcaaccccttgtatgctcaggaaaaaggcgtattacgtcgtgccgggcatacagaagctacgattgatatggcccgtatggcaggtctttatcctgcgggtgcacttatggaaatcatgaatgaagatggatcaatggctcgtctgcctgaattgcgtaagatggctgacgaatttaacctgaagttgatttctattcgtgacatgattgcctatcgtctgaaacaagaatccattgtggaagaaggggtagaagtagatatgcctaccgaacacggacatttccgattgatccctttccgtcagaaatctaacggtctggagcacgtggctctgttcagaggtacgtgggaacaagatgaaccgattctggtacgtgtgcattcctcttgtgccacaggagatatattcggctccaagcgttgcgactgcggcgaacaactgcataaggctatggaaatgattaataaagccggtaaaggagtagttgtttatctgaaccaggaagggcgtggtattggtttgatggagaagatgaaagcgtataagttgcaggaagacggactggatacggtggatgccaacatctgtctgggacacctggctgatgaacgtgattatggtgtaggtgctcagattctgcgtgaattgggtgtacacaaaatgagactgatgacaaataatcctgtgaagcgtgtggggttggaggcttatggattggagattacagagattgttcctattgaaacaaccccgaatcagtacaatgaacgttatctgcgtacaaagaaggaacgcatgggacatacattacattttaataagtaatttgctgttttgttttctaatatcaaagaaaataacttaatttgcagccaaatttatgcaataaccataaaatagatagaaaaatgaatcaattatcagatcgtttgaacagtttgtcgccctcggcgacgctggctatgtcgcaaaagagcgccgagttgaaggcacaaggcgttgacgtaattaacctgagtgtgggagagcctgactttaatactcctgaccacatcaaagaggctgcgaaaaaagcgatagacgacaacttctctcgctattctcctgttccgggatatccggctttgcgtaatgcaatcgtggagaaactgaaaaaggaaaacggtctggaatatacagccgcacaaatttcatgtgccaatggtgctaaacaatcggtttgtaatgcagtattggtgttagtgaacccaggtgatgaagtgattgtgcctgctccttactgggtaagttatccggaaatggtgaagttggctgagggtacgccggtgattgttaccgcaggtatcgaacaggatttcaagattactcctgcacagttggaagcagctatcactccgaagactaaagcattgattctttgctcaccttctaatccgaccggttcagtttactctcaggaggaattgaaaggtttggctgacgtgttggcaaaacacccgcaagttattgttattgctgacgaaatttacgagcatatcaattatattggcaagcaccagagcattgctcagttccccgaaatgaaagatcgtacggtaatcgtaaatggtgtatctaaagcatatgccatgactgggtggcgtattggcttcattgccgggccggaatggcttgtaaaagcttgtaataagctgcaaggtcaatatacttcaggcccttgttctgtatctcaaaaggctgctgaagctgcttacactggaacacaggctcctgttgaagaaatgcgtaaggctttcgaacgtcgtcgcgatttaattgtgaagttggcaaaagaagttccgggatttgaagtaaacgtgccgcagggtgctttctacctgttcccgaaatgtgattctttctttggaaaatctgccggtgaccgtaagattgaagattcggatgatttggcaatgtacttgttggaagtagctcatgtcgcttgtgtgggtggtgcttcattcggtgcacctgaatgtatccgtatgagttatgcgaccagcgatgagaatattgtggaggctatccgtcgtattaaggaagcattggctgaactgaaataaatgatagtatataaaaatgagaaagcccggtttcataattgaaaccgggcttttctttttttgagtgttgttattattctgccgggtgaattgcttcagacggacaaacatcagcacaagtaccacaatctgtgcaagtttcagggtcgatagcgtagatatcaccttctgagatagctcctaccggacattcgtcaatacaagtaccacaagcaacacaactgtcattaattacgtaagccattttctttagattttaaattattagtactaattagttcggcaaaaataatggttttcttgattagttgttatcaaacctgtttaaattcccttaatttgtaccttgtctaaataatagtggggagaaaactgaaggaaaatgcaataaaatgtcactttcagcgttttaaggatgtgaagcgcatttgtctgataatccttactttactccttgcttttggtgcttcggcacagaagcggaaggtgcagaaccgtccgtatatcgatcaacggaggtggcactatggttttttggcaggtattcatgtgcaggactataaattggtgaataccggatatgtgacggaagatggtcagagctggtttgccgatgtgcctgaatattctcccggatttacggtcggagtattgggcgaactttatttgaatcagtttctttccttgcgtctcgtcccgacattacatttcggggataagaaagtagtattccgcgagcaagccagtggtgaagaacattcgcagtcgatgaaatccgcctatctttctgtaccggtagatttgaagttttctgctgaacgttttaataattaccgtccttatctggtggcaggtattgctcctacgtatgatttcagtgtgaagaagcagggggccttattggtaaagcctttcgattgttatgtagaagtagggttggggtgtgatttttatctgccttatttcaagttaatcccggaactgaagttctgtttcggactggcaaatcttattaagaaagaccgtaaagatcttacggatcaatcattattgaagttcacgcagtcagtcgacaaaattacttcccgaatgattgtactcactttttattttgaataagattcatcacagagtagcaatactaaaagtgatgggatagccatcctcggcactttcacttaccataaagctaccaccaaaatgttcaaataacaattgattgatttttagccgtatggaaacttgctgggaggcaaatgcaggatcaactaacgggctgtttatgatacggaatatcagtaactgattttcttcgtctttgctcagttgcatcttcacttcacgatcggtatcgttgggtacaggataaatcagcatactcaatacagcttggttgaagcggttggcgtccattctaagcatctggtgttccacatcactttccagttcggcatgtatatgtccgttactgtctctccgggccatatatataaggtcgttgcatatttcccgcacttcgcaatcctgtatctggaatttcatcattttagcttccaggcgtgagaggtcgagtacgtcgttcaccagttgaatcaaatcagtagaatttgcctgaataatttcagaatactccagtttttctttatcatccaatcccatatcagtagagagcaactgtgaaaaacctaccacattattcaatggaatacggatattgtaactcatgtttgcaaggaagcggctctttacttcattcgcttcctcagctatttcactcagacgggccatttctttctcgtctttctgcaatctttttctgctgaagtacatgtggataacgaaagcgatcagtgccagcagggcaatcccaataacgatcaatacaaaataatgtatcttttcttgttgctgttctcgtttcagcaccagtttatccatattgtacaagctctgtatttgctccatttgcgcgttagacaaccctcggtatagagagtccttatcacgcattactttcttgtagatgttgatagcaacctccggatgccccatatccactagaatatctgctttcatagccatatatagtatggcatccgggaaagacatctgaagtgtcagggtaatggcattatccaatgactccaaggctttttcgtattcttttcgggcacgataatattctgcataagcttgcagacgggatactctgtacggcaggaaggtgttaggggtatcatattcatctgctttttgcaggtgttcccaggctttcttggggtttcccgtgcggacatagtaaagggcgtattgagtttccattcccatatatagggctgagtatgcattcttgagtgtcggtgtggcggttattaagtcttgtatcgctactttcatctgttccagcgaagcatacattttttcattattatgcaggaatgaataagccagcacagccttcgacaacagatttattttatccataggtctgtcttgcggactcattaggtggaatgcttcttccaaggcctttgctccatcttcgtaacgtagtgtggcaatgtagctggtcatgaggcatagacaggcttcccgcataccattgctgtcattcagttttttagctttatcatacatgatgttcgcttcatggatggcaagttctatctgttggttgattgtatacatttcaatctgtaacttcttggctttgaagtaatcattgtaataattatgcttctctgccagaacttccattctgttcatccactgcgttacgcgtttcagatccagtttattgaaaaagtagatgatatgctcataggtggcaagactctgataacggaggttgttttgctccgtagcctctttcagcaatttattctcataatagaggaataccggtgtctgctggtccaggcgggcgatgtcatgcagtacatccaggcgcatagagtcgtgcggcgcagtgacgtaaatgcgcaataggctgtctttaacggcgctattttgggcattggcggtgaataaaattccagtgcctaatgccagtgctataatcagacgctttatcatgcgcgaccctcctttttttgtgtgccttttgtctggcgtatggggtgtgtaaataagaaacgggaaccttcgtcatagtccggatcaatccatatcctgcctcctatatgctctataattagctggcagatagacaatccgagtccgcttccttgtgcgttctcatccaacttttcgaaacgttgaaatatatgagcttgtttttctttcgggataccacaaccggtgtctgtaacggagaatagagccatgtcatccgattctttttccagtttcagtgtgatggcaccttctgttgtgaacttagttgcatttatcagcaggtttatcaatacttgctgtaaccgagaatcatctgtttctattttcaattcttccagtgaggttacaaacagcagttccgcctgtgtttgttttactttgcccactgtgtcagtaacatttctacaggtagctactgcatcatgttctccaatggagaactgcatcttaccgaattccaggctcgacaggtcaatcacatcatttatcagcttcaatagaagttcagagttctgttgaataatctcagtacattgtagtcgggtggcgtcatccaacccttcttcggtcagcagtgcagaaaaaccggataaagcattgaggggagtacgtatctcatggctcatattcgacaagaatacactttttgcgcgcgttgcactctctgcgttccaccgggactgttccagatttttcttggatagtgccactttctttttctgttttctttgccatacggctaacatggagatgaaagccaataatccaagtccgatgaagatggatgcaagtacaattctattttcctgtgctttattccccagttccagttcatctatctgataggttgctttcaatgcatttatctggcggatgtaacttttcgaagcgagggtgtcagtaacggtatataactcctgatatatccggcaagcctcatcaaagcgccccagtaatttatacaaatatatcttttcggcagaaatcgagcgatactccagggaacgtttgttgccggaaaccagttcgagcagtttattgtaaagggcaagtgcttcgtctgctttttgcttgtcatgatcatctgctgccaatgcacggtagcaggctgctgtataatagtcgatggagaacccatgagccggttcgtgagtatggttttggtatatggaatctgccttttgcagataccggagcgcagtttgctgatctcccgaggaaatatagtaagtagcattttctatgagtatgggaatggcgagcggatgttcgggctgctgttccagaagttggttcaggggatttacatacgtcatggcctcttccaatcggttcatctgttgcaaaagagtggagattttcaccaggagtcgataagtttgcggattattcggggataagtggtgcaaggcatccagataggaacttaacgccttatcctgtatgtaagaggcagtatatgcctgaccgatggcttgattggcaagagcaataccgaagttggagttcatatctttggcactttcgtacatataccgtgcccggtctactgccagactgaggtcgcctcgcatgatatatgcactaacttgccataacagtaaggtgaaataggattcttctgtccggggaaatttcagagtaggtgccagttgatttgtccaggagataatgctgtctatcggtgtgttggcatcgtaaggaatttctctgctgataagtgattgcaatgcagacaagtgttcattgtctgtacgagtagcgtatgttctcgtcgcaaaggaaaagagcaaaatagtagccactgccgatataatagcaatctttctcaaagtagaagatattttatttagattattcgcaaatgtagtgataaaactaaaaaaacaaaattatttgctgaataaataatgcaatcttttacttataattatcaatatagttccaaaccaaactcatctttcagttgtagcagtgcattgttcttttgggccatcagttgaaatttctctacacgactgtaagcacgtaccttttcggtgggggcactgacacggacggtcatggtggctttactgttttttaggcgtttacgtaagtaaccttgcaaggtaggaatcagatcggtaaactccttggctgcaatgtcattttctacaacaacttcgaaagtggtcgcatccagcatggtcaggcggattacttgcatacgtttggcaagagcagtctgctcctgtggtaagcggccggcatattcctgccaatagtagttcacgtccttttcgttgaagatgaaatcttcctcgggttgtgcattctgctgaacggtggaaacagtacgtttctgttgctcttcgtctactcgcggatgcttaatggaaacacccagaccggacattttcatgactggtattttcttttcctcttttccttgcgccatcaatacggcagtaggagtgggacgcatggtcgtctgcgagctaaaagcttgctgaacttccggcgagagagaggcagcctgagctgcgggggcttgttgtacaggtcggggctgtgccggagcagcggttgtagcctgctgttggggcatagcatttgcggcctttggctgctgagcggcggcaggctgcgagaatatgggtttgatagattgtttagggccacgcccatcgcctgcatcgtccccctcggcggtaagctgggctacttgaatcagagtcagttccaccagcaagcgcttatttttgctggcacggtaattcagatcacaatcgttgcagagcttcatagcccggtaaaggaagggcaacggacacttctgtgcctgagactggtaacgttcgcgaatactggcacctacttcgagtaatgccaatgtggcggggtctttgcttaccaataggtcgcggaagtgagaagacagtcctgttacaaaatgactggcatcgaatcctttattcagcacatcattcaggagcagcaaagcatcgctgacctggtttgccagaaaatgatctgtcagtcggaaataatattcgtagtccagtacattcaagttctcgattacgctcttatagctgatgtgtccgccggtaaagctgaccacttggtcgaagatagacaaggcatcacgcataccaccgtcagctttcagggcaatcacattcagtgcttccggttcggcggtaattccttcctttgaagctacgtatgccagatgggcaacggtgtcttctacaccgatacggttaaaatcatagatttggcagcgggaaaggatggttggcaaaatcttatgcttctccgtagtagccagaatgaagatggcgtggcgtggcggttcttccagtgttttcaggaaagcattgaaagccgaggcagacaacatgtgtacctcatcgatgatatataccttatatttacctatctggggcggaatgcgtacctgctctaccaactggcgaatatcgtctacggagttgttggacgcggcatccagttcatgaatattgtatgaacgctgttcgttgaatgccgtacatgattcgcattggttacacgcttctccatcagccgtaggagtcatgcagttgatggttttggcgaaaatacgggcgcaagtggtttttcccacgccgcgcggaccgcagaacaggtaagcatgtgccagtttgccggtggcaatggcattcttcagcgtagtggtcagggcacgttgtcccactaccgactcaaaggtggtagggcggtattttcgtgccgatacgatatagttttccatgatttgggatattcttgtccgttacaatttgtgcaaatgtacacaaaaaaaaggaatttctcagttattcctcttatctttgtaggcgaagaatctctcccgggcttctttaattattaattttttcattctttaatttgtttatcaatggataaattagcgacactttgggcctttgtttgcaggcgtaaatacctgattacgcttgtggtgtttgtggttattgtcggttttctggacgagaacagcattgtgcgccgcatgggctatgcgaatgaaatcagccgtttgaataatgagatagagaaataccgggcagaatatgaagagaacacagagcggttgaacgaactagctgtggactccggtgccatcgaacgcatagcgcgtgagaagtacctgatgaagaaaccgaatgaggatatttacgtatttgaagaagacatcgaaaaatgaaatccctgatacctgctttgtttactgtaggcgctttgatggtgctgtttggtgctgccgtctatattaccggttgggagcctgctccctatgtttatacgattggtgccactatggtagcgttggcacagatcaattcaccttccaagagcaatagagccaatgtgaagcgtcttcgtcgccaacaaatatttggtgcgttgctgctggtacttacgggtgcatttatgttctttactcatggaaacgaatggattgtatgtctgacggttgctgccatactggagttgtacacggctatccgtattccacaggaagaggcgaaagaataacgctaaaacgtaaatcctatcccgatatagtatcctaacttctttgactgattggaatagttgagttccgcttcgataggtcctatgatactattgtagcagtaccctatactgccgcccgccaatccgtgtgtatttgttccgccaaacagattttctatcttgttggctgtccgtccataactgccccgaactacgatatactgattcttgtaagttcttgccctgactcccaacattcctgtcaagatggcatccggactcatttcgatgtgattgatacctgtgaaagggatctgttgtttcatataccgtcccggcacattaccgcccacgaagttagatatggctaatgactgcgtattcttcccaactatccttccatacaccgatggcatgatggtgaatacccggtttggtgagaaatatccgctccaatgagtttggaatacggacacgggactgttcgaaccatacgttaccatgttatctgtatagagtctgtacgctgcttcccattcgattccttgagtagagaatcgctgattattcagactattgtacatgatactcgcctgataactgagcaaagctttgtcactggatcttgtaatggaaacgtccggtcccgagggccagtcatggtaattgaatttctcgaagtggattcccgccttgacaagcattttataccagctcttcgtgaatccgacccaagccatgtgatgcacgtaggtcagattcatcagtcgcttaccttcttcgtaaagattaaaatcattgtatcctatctgatatcctgtatttatatcccagcttttttgtggtgagtaagtatattcaagccttccaaaggtacgctttcctaaccgggtagtgaggcttaactgcgatttcttctgtgctccgaaataacccctcgcattcaataacaatactgccagttcttcattatcaaaccgtcctccaatatttatagtattgactggtttttcatggggagtgatttgtgctacggaaggtatcgtatccagcatagcccgtgttggtattttgaacggtccgggatattccgcccggtaattcgtacggatacctatttcttttttcagtgcaatcagcttgtcccagtctttcatggcggcttctttacctctgcgcatcagggtatccagtgcctcgtggttgaaacttgccgctgaataaccgtctacatctacttgaatatggatgttgctgtccttcacatttttcctgtaactctcttctcccaccagattcagaatttgcccgagtacattcgacatgcttgtcagctcatccgctttcatcaatggattttgtacatcgactccgataataatttccgctcccatttgccgggcaatgtctacgggataattatccgtcagtccgccgtccaccaataccatgccattgagataaacaggggcgaatactcccggaatggacatactggcgcgcatggcagttgccagaataccgttgtggaaaacgactttactgccattcacgatgttgtccgatacacaggcgaatggaataggcatccggttgaaagaaatggagtcgtgatatcccactgtcagttcggagagtaaccgggagatatttcttccttttataattccggcatcggatacatgtgccgatttccctgcaattggtacagacagcaggtattgttcttctcttaacttctcgctcaacagtgtggtttccggatcaagagcatcggaaagcagatatttccagtcctgtgcattgacaatgctgtccagttgttgcggggtgtaaccaatggagtataggccgcccacgatggcgcccatactggtacccactacgtagtctatcggaataccggcttcctctatcactttcagtgctccaatgtgcgctactcctttagcgccgccgccactcaatactattcccactttcttacggttctgtgctccgatcgtacaggcagaaaacaatactataattaataaagacaaagatttatagttcatacttaagcttttcttgtttttctgataaataacaaataagaaaggatttttctcacttagtaaagagttaattctcactaaggagagaaaaggaagcatataaagataaaaaggaaaatgtgaacataaacagtcgatatatggatagccttcctataccataagctactaactttgcccctatatttcaaatgactgatatgaaaaggttactattcattttttccttcttttgcctgtcggttactgacgtaggcgcccaaaacaccctgacgttagaagattgtctcaaattgggtatagagaacaacctgactttgcaaagtaagcgtaacgagatacaaaaaggaaagtacggcatttcagaaaaccgggcgaaactgctgccacagatcaatggctttgccaactacaatgacaatttcgatccacctgtatccgtcaccgacgggtcttcctacggtacgccctacaatgttacccacaccttgcaatacagtgccaacgccgggcttcaactgcagatgcctctctacaaccagactctttataccaccatttccatagcccggacgatggatgaaatgaaccgtctgacgtatgagaaagcccgggaggatctcatcctgcaaatctgcaagatgtactatctggcgcaggccactgccgagcagcttgtgctggtaaaagccaatatcgctcgtttagaagaattgaaggacatcacgctggcattcttcgacaacggtatggtgatggaagtcgatgtgaagcgagttaacatcaatctggaaaacctgaaagtgcaatatgacaatgcgcaagccatgatggaacagcagctgaacctgctgaagtatattattgactaccctgccggtgaggcgattgccttgacgccggtggataccgaaaaaaaaattcctgtggctctgaccgggctttcggaaaacctgtacgaactgcaattgctgcaatcgcaaaggctactggccgaacaacagaagaaaatgatagattacggttacctcccttcactcagcctgacggggagttggatgttttccgcctacactgacaaggcttatcattggttccattccggggcctccgggcggtggtatcgttcctatggtctggggctgtccttgcgtctccccatcttcgatggtctggacaagcgatacaaaacgagaaaggctcttgtcgacatcgaaaacatccgcctggcacaggagaatacacggaaaagcctgcaaacccaatacctgaatgccacgaacgacctgatgaacaaccagcgtaatttcaagaaacaaaaggacaattatctgctggccgaagatgtatataccgtcaccatggagcgttaccgtgagggcatcacctcgatgaccgaattgctgcaagacgaaatgcggatgagtgaagcgcagaataactacatcagtgcacactacaattaccggattacaaaccttatgttgttgaaaatgacagggcaaatagaattattagtaaaataaaccgttaatcaatatgagcatggaagcaactgaaaataagtgtgcacccagcacacatcagaagaaagcaaagaaactgaagaagttacgccgttggcagattaccgtcagtttgctggcgatagcagtcatggggtggggagtgatacaagtggtctgcctcttcctgaactacaaacggactgaagtcagcaacgatgcacagatagaacagtacatttctcctgtcaacctgcgtgcatcgggatacatcagtaagatttacttcaccgaacatcagcgggtgcacaaaggcgacacgctgcttgtgctggacgaccgcgagtacaaaatccgggtactggaagccgaagccgccctgaaagacgcccaggcaggtgctacggtgatgggtgccacactgcaaaccacgcagactacggcatccgtttacgatgcttctatcgctgaaatagaaatccgcctggccaaactggagaaagaccgccaacgctacgagaacctggtgaatcggaaagccgccacacccatacagttggaacaaatagaaaccgagtataaagccacctataagaaactggaagccgtgaaacgccagcaaaaggcggcactctccggagtgaacgaggtgtcctatcgtcgggaaagcaccgaagcagccatacaaagaacgactgcggcgcttgaaatggcgcggctgaacctttcgtacaccgtagtcatagccccctgtgacggaaagttgggacgccggacactggaagaagggcagttcattacggccgggcagaccatcacttacattttgcccgacacacagaagtggattgtagccaactataaagagacgcagatagaaaaactgtgcgtagggcaagaggtaacaatcaccgtagatgctatcagtaaaaaggagttcacgggaaagattaccgccatttccggagccaccggatccaaatattcgctggtgcctaccgataattcggccggaaacttcgtgaagatacagcaacgcataccggtacgcatcgacttcacccatctgtcagccgaagacaacgaaagacttgcggcaggcatgatggcagttgtgaaagctaaactctgagcctatgccctcgtatcctaagaactatcctttctacaactgggtgcccaagccgctgggtatcctcatcatgttgttgctattcatcccaattctcacagtagggggcgtttattccgtcaacagcaccgagatgatgagtggactgggcatcatatccgagcatatacaattcaccaactttgtcacttccatcgggatggcggcttttgctccttttctttaccggctgatgtgcattcgacgggagaagatgatgtgcctggtaggattttcgctcatgtatgtcttcagttatatttgcgccaagacggacagcatttttttgctggcgctttgcagtctgctgatgggctttctgcggatggtgctgatgatggttaacctgttcacccttatcaggtatgcggccggtatggaggccacccgtaacatcactccggggctggaacccgaggatgacaaaggctgggacaaactcgacatagagcggtgcgtcagtcagccaggtatctacctgttctttatgattttggggcaattgggtacatcgcttaccgcttggctggcttttgagtacgaatggcaatatgtgtactatttcatgatgggggtggtgttgctctccatcctgattatcttcatcacgatgccctatcataagttcactacccgtcgctttcccatcaacttccgccagttcggcaatgtggtcgcatttagcgtcaccctggtgtgtatcacctatgtgctagtttatggtaaggtgctcgattggtacaatgatcgctccatccgtactgtcagcttcgtggctatcattttcggttgcgtattcttctatctagagaaaggtcggaattcgcactatatgttactggatgtcctccggttgcgtaccattcgcttgggggtgttgctttaccttctgctgatgatattcaattcgagcgccatgtttgtcaatgtgtttacggggattggcatgaaactcgacaattaccagaatgctacgttgggcaactggtgcatggcgggttatgcaattggggccctctcttccatgttcttgggttccaaaggcgtgcatttcaaatatctgtttgcggcgggtttcctgtttctgggcctgtcagcggtcttcatgtactttgaggtgcagagtgccggactatacgaacggatgaaatatccggtcattatccgcaccaccggtatgatgtttctctatgctctgaccgctgcctatgccacacaacggatgccctacaagtacctctccacttggatctgcgtgatgcttaccgtgcgcatggtgctgggtcccagcataggaggagccatttactcaaacgtgttacaggagcgccaacagcattacattgtccgctatgcgcaaaatgtagatatgctgcatcccgaagcctccgcctcgtttatccagaccatgcaaggaatgcagtatcagggaaaaagcaagcaagaggcacttaacatggctgccctatccacaaaagggcgtattcaggtacaagccacgctgtctgctgtaaaagagatggctggctggactatatacggttgtctgttttgcatgatatttgtacttattattccatatcctaaacgaaaattgttaacttagcgcagtctatttaaataccccgtaatttgctatagtatggatactcagcaagaacgtttgctccatcttgaccatgctctgttgagtggagagaatatttgcagttccgaagggatgcttcgcagtttcccttcctctttcaaaaccccattctgtataaatggggtgggcgtggtagtctgtcgtcagggtagtttcttattctccctgaatcagaaactcttttccgctaaggcgggcgaaacacttttcatccctgaagattcgcagcttcaggtgcttcaggaatcggaagatatggaactcttcattttggtctatcagatagggccgatacgggacatcattggcaattcagtggtatccatgtatttgtattctcatcttgctacggaaccctgttatgtatggaacactggtgaagaagaggaagtgctgaagtacatgtccttgttggacagtactctgcatgtagaagagaatacctttaattattatgagcagaagctacttttactggctttgacgtatcggctttgttcggtctacaatcgcaagctcatcaccgaaagagcttctgtggggcgcaagcatgatatctttatccgcctaatccagttgatagagcagcattacaaagagcagcgcggtgtggagttctatgccgataaactttgcctgtcgcccaaatacctgtccgtgttgtccaaatccatctgtgggtatacggtgcaggaattggttttcaaggccattattcgcaaaagtatttcgctgctcaagaatacgcaacagaccgtgcaggaaatatccaactacttcaacttcccgaatgcctcttatttcggcactttcttcaggaaacaaacaggaatgtctccgcagcaattccgtcactcctcttttgtgctccgatagcgaatgggggatgtccccaggtgtccttttacatatttcccgaagaaagattgattcgggaagttgaattcttccgcaatctctttgatagacttgtccgaatgttttagccggtatttgatgtgctctatcgcagtctcatttatcaaatccagaggagcccttccgcatgcttgtttgatgacctttgaaaagtgtttgggcgtatagcaaagtgcatcggcaaagtaagtcactgaacgatgcataccattgtctttcgacaacagttccatgaacttccgtaaaatatggtcagcctgtttgatgccctctttcgatagtttggctttctccgaatcggcgatttctttgttgaggtaacccatcatctcgcaaaagatggcggcaaacagatgctgcaccaccgctttatgataacaatggggttcatcgttaattttcgccaggattaactctccatagtgtttaaaaatgctgttgtcattttccctgttaatagatttcaccggattgttgtggatatggatggcagtgtcccacgtatctttttctactttgaggatacgttgcaggaatcgggtggaaaatcctgcaagccttactttatatttaggactcatcattgtatgcccgataatggtgttgggaaggccgagcagtaagtcgcccggctgtagctggtaggtccggttgttgatatccagttgtatgcacccttctatacaaacggcaataaggaaacactccaatctgacaacctcattactataaggtattccatccagactgttgactatcgcaaagtcatcatctatatagtcaagaatatgctgactgttcttaaagtcttctatggttacggtcttaatgttctctttttccatattatttcatttttctttttgcaaagttggtaaattatggggaaaacaggatgtcctattatcctttaatattgttctatatgatgcttattgataattagttagctttaaaagtgacgaataacgaaaatgggacattcttgggggaaaattgatcactatggctttgttcctttctcctacatttgtcccagttttaataaaaagacaattagagtaagtatgattacagtgaacaaaaaatggttacggctgatagggattgtcggttgtacagtgtggatggcatcttgcaaacaggcaacggatgcgggagtgaaaccttcttttgcaataatggaagtaaaagcggcggataaagaactttccacttcgtattcggccactatccgtgggcggcaggatattgatatctatccgcaagtatcgggtactatcgaaaaactttgtgtgactgaaggacagacggtgcgccgtggacagttgcttttcgttatcgatcagattccctacagagctgcgctcaagactgccgttgccaatgtggaagctgcacgtgctgcaatggcgactgccgaactcacctacaacagcaataaagagttgtatgcacagaaagtagtttcagagttcagtctgaaaacagctgagaacacctatctcactgccaaagcacagctgacgcaggccgaagcccaggaagtgaacgcacgcaacaatctttcctatactgaggtgaaaagtcccagtgacggagtagtgggggcattaccctatcgcgtgggtgcattggtaggtgccaacctgccgtatccgttgactacggtcagtgacaattcggacatgtatgtctatttttccatgactgagaatcagttacttgcccttacacgccagtatggtagcatggatgaagccctgaagaacatgccggaagtggaactgatactgaatgataattcggtatacaataagaaaggtgtcatagaatccattagtggagttattgaccgtcagacgggtactgtaatggcacgtgtggtatttcctaacgaatcacgcctgcttcatagcggagcatccggtacggtagtggtgcccagcatctataaggattgcattgccattccgcagggagccactgtgcagatgcaggacaaagttgtggtatataaagtagtggacggcaaagcagtctctacactgatcactgtagccggaattaacgatgggcgcgaatatgtggtgctcagcggattacaatccggtgatgaaattatatcggaaggtgccggattagtgcgtgagggcacacaagtaaaataagaagggagacaaattatgaaaggaaatgtatttataaagcggccggtgatggctatctccatctccgtgctgattctggccatagggcttatttcgctccttacgctgccggtagagcagtatccggacattgcacctcccacagtatatgtaagtgctcagtatacgggcgctgatgccgaggcagtaatgaacagcgtcatcatgccgttggaagagagtattaatggtgtggagaatatgatgtatatcacttccacggcatctaactccggcctcgctattatacaggtttactttaagcaaggtacagaccctgatatggcggcagtgaatgtgcagaaccgtgtagctaaggcacagggtttgctgccggccgaggtaaccaaaatcggtgtaagcacgcagaagcgtcagaccagcttcctccagattggtgctttggtctgcaacgacgggcgttatgatcagacgttccttgccaattatctggacatcaatgtactgcctcaaatcaaacgcgtagagggagtaggagatgtaatggaattgggagatacatacagtatgcgtatctggctgaaaccggaacggatggcgcaatatgccctggttccttcggatattactgccgtgctgggtgagcagaacattgaagctcctaccggttcgctgggtgagagttcgaagaatgtcttccagtttaccatgaagtatcgcggacgattgaagagtgtggaggaattccagaataccgtaatccgttcgcagagcgacggttctgtactccgcctgaaggatgtagccgatgtacaattgggtacgatgacttatagcttccgcagtgagatggatagcaaaccggctgttctttacatggtattccagacggcaggctccaatgcaaccgctgtgaataaggaaattactgcccagatgaaacagatggaaaagagtctgccggagggaacagagttcgtcacgatgatgagttccaacgacttccttttcgcttctatccacaatgtggtagaaacattaatcatcgctattattctggttattctggtggtgtatttcttcttgcaggacttaaagagtacgctcattccgtccatatccatcatagtgtcgctggtgggtacgtttgcctgtctggtggctgcgggattcagtctgaatatcctgacactgtttgcactggtgcttgccattggtacggtggtggacgatgccattgtggtggtggaagcggtgcagtccaaatttgatgccggatacaaatctccttatcttgccactaaagatgcgatgggtgatgtgacgatggctattatctcctgtacctgtgtatttatggcagtgtttattcctgtaacatttatgggaggaacttccggtgtattctatacacagttcggtatcacgatggcaactgccgtaggtatttccatgatttcggctttgacgctatgcccggctttgtgtgctatcatgatgcgtccgtcggacgggaccaagagtgccaagagtattaacggacgggtacgcgcagcttacaatgcctcgttcaacgctgtgctgggtaaatataagaaaggtgtgatgttcttcatccgtcatcgctggatggtgtgggcttcgttgatagccgctatcgcattgttagtttatctgatgagtactaccaaaacgggacttgttcctcaggaagatcagggtgtcatcatggtgaacgtcagtatctcaccgggaagcacacttgatgaaacaacgaaggtaatggataaattggaagatatcctccgggatacgcccgaaatagaacattatgcccgcgtagcaggctatggacttatatccggtcagggaacttcttacggtacaatcattgtgcgcttgaaggactggagcgaacgaaaaggaaaggatcatagttcggatgctgtggttgcccgcctcaatggacagttttatgctattaaggaagcgcagatattcagtttccagcctgctatgattccggggtatggtatgggtaactccctcgaactgaaccttcaggacaagacgggtggcgatatggaaacattctaccagtcggtaatgcagttcctcggcgcactgaatcagcgtccggaagtagctatggcttacacggcatatgccatcaatttcccgcaggtatcggtagaagtggatgcggctaaatgtaagcgtgccggtatttctccgggagcagtgctcgatgcattgggcagctattgcggtggtgcgtacatatctaactataaccagttcggtaaagtgtatcgtgtgatgatgcaggcttcgcctgaataccgcctggatgagcaatctctggacaatatgtttgtacggaatggtacggaaatggctccggtaagtcagtttgtaacattgaagaaagtgttgggaccggaaacaaccaatcgtttcaatctgtatagctctatttctgccaatgtaaatcctgccgaaggttactcttccggtgaagtgcagaaggtgattgaagaggtggcagaacagactttgcctacgggctacggatatgaatatggtggtatggcacgtgaagaagcaagtagtggtggtgcacagactattttcatctatgccatttgtatattccttatctatctgattctggcatgtctttacgaaagtttttttgtaccgtttgccgttattttctccgtaccgttcggattgatgggatcattcctgtttgccaagttgctcgggctggagaataacatttacctgcaaacaggtgtgattatgttgattggtttgctggccaagacggctatcctgattacggaatacgccatagagcgtcgtcgtaaaggaatgggcatcgtggaatctgcctattctgccgcacaggttcgcttgcgtcctatcctgatgacggtgctgacaatgattttcggtatgcttccgttgatgttctcctccggtgcaggtgccaatggtaacagttcgttgggtacgggcgttgtgggtggtatgcttgtcggtaccctggcattgctcttcgttgttcccgtcttctacattatctttgaattcttacaggagaaaatccgtccgccgatggaggaagaagcagacgtacaagtgttgcttgagaaggagaagagtgaagctgaacggaataataaataaatgaaagaaaagatgatgtatcaaggtgacatattttgggtagagcagttgatagcatattgcattgctgctattctatggtgcattattgataaaatcaattctaggaaacatattaaagatactgaagaatgaaaaagcaaatcatcacattagctgtcactggcctgctgctgagcagttgtggcatctatactaaatacgaacccgttacttccatccccgaccagctttatggcggggaagtagtgagcgaagacaccgccagtctgggtaatatggattggcgggaactcttcaccgatccttatctgcaatccctcattgaagtgggattgcagaccaatactgattatcagtctgcccagcttcgtgtagaggaagcacaggcaacactgatgtctgccaaacttgctttcctgcctgcctttgctcttgctccgcagggaactgtgagcagcttcgatacgcaaaaggcaacgcaaacttattcgttgcccgtcactgccagttgggagttggacgtcttcggccgtatgcgcaatgccaagaaacagtcgcaagctctttatgctcaaagtgaggattatcgtcaggctgtccgtacccaactgatagccgggatagccaatacctattatacgctgctgatgctcgacgaacaacttgccatttcccggcaaacggaagaagcgtggaaagaaaccgtggcgtctactcgtgccttgatgaatgccggaatggcgaatgaatcggccgtatcgcagatggaggcgacgtactatcaggtacagggctccgtgctcgacttgaggaagcaaatcaaccaggcagagaacagtcttgctcttctgttggctgaaacaccccgtcattatgaacgtggtagtctggcacagcagcagttccccaccgacttttcggtaggtattccggtgcagatgctttccggtcgtcccgatgtccgcagtgccgagcgttcactcgaagcagcgttttatggtaccaataaggcccgttcggctttctatccctccattactttaagtggaagtgccggctggacgaactctgccggagtgatgatactcaatccgggcaagtttctggcatctgctgtaggatcgctgacgcaaccgctcttcaaccgcggacaggtagttgcccagtatcgcattgcccgtgcacagcaggaagaagccgcacttggcttccagcaaaccttgctcaatgcaggcagcgaggtgaacgatgctttaacggcttatcagaccagtcagggcaagaaacttctgttggataaacaggttgcttctttacaaaccgccctgagaagtacttcattgctgatggagcatggcaataccacttatctggaagtactcacagcccggcagacattgcttagcgcacaattgtcgcagactgctaatcattttaccgaaatacaaagcttaattaacctattccaagcgttgggaggcggacagaattaaaactgtatcatactctctttctgttactttacttctatgaaaggagagctgcccggaaggtgttccgtggcagctcttttcttcattttctaaggctatatacgcagtgaaatcttctttttgccactcatccggtaaagaaagtttgtaatggctatcctttttcatttcttttcgatttccgttttgtcttgttcatctggatagtatggagttaaccagtaatttagtagacgtattctatctgacatgcagaggtatctgcatactaatgggaatagtagtgggacatcgggatgagtctaaatgatttctgcttctgtacttcctgtgaattccataacatagcctttcatcaaagtataatccgcaggtagccgaaaagttattcagcaacgcgctgaaaaccggacacaacgaggtgcatataagtaccgccatccatctggtcgaactgtgcggcgtaaaagaaaagatcaagccgaaattccatcggacgttggtacacttggtacagaggttcaccgttccctttgcttcacacacacgcgcgtaatatataaggtgtacactcaagaggaaaatgtggcaaatgacagtaatccgctgtcatgggcggagcttttacgtttcgcctcaccgacgaacagaagaaggaattcaaggcctatgggatctcgccattacctccgcttccacttggctgaagcactttcagaaatacggtctgttggaaagcgtagccgtaaatggaacttatacaaagtcggataagcggtgaggaatgattagtggtggggacagagtggtggggattcacaccttattatacgcgcacgtgtgtgtgaagcaaagggaacggtgaacctctgtaccaagtgtaccaaccccaccattacaaaaccatacctcaactccgcaaaaatgaatctcaaccttacctcgctaaacctcagctctgcaacgctaaacctcagctttaggttctcaaaccttagctttacacttccaatcctcagctttaaggttctcccagtacttttccctgcctctgtctacgcgcacattgcgcgcacgcatatataataatgtactcccttccagctcctttcatacttcctttcaaacttatgttctacaacatccttatcaatcagccatttacgaaattgtttcaaaaaagttt

SEQ ID NO: 6644 - DNA, 236 bp, Unknown
  gut microbiota DNA sequence
gtatcatcaatctttactacttgattctggtaatatcctacattcttcttgaacatccaattccattgcagtcccttatccatcacatcacaataattgtaatactcatggtttccgggcacaaggagcacttgccgataatttacagatgctcatttccaaaaattactcaaaggtgcaaccttgtttttcaaatagaatatatctccggcaagaaccagaacatcgccagttac

SEQ ID NO: 6645 - DNA, 137 bp, Unknown
  gut microbiota DNA sequence
gccaccccattctgttgtacgccctgcacgtaaggaaccaccatacgggaagccaggtacgggtcttcgcccatgtactcaaagttacgtccgttcagcggagtacgataaatattaacaccgggtcccagaagaac

SEQ ID NO: 6646 - DNA, 1054 bp, Unknown
  gut microbiota DNA sequence
atatttgacgaaggaagataactggaatgaacagatgcgtacttcccttgtcagtgttttggaagaaagtatggaggaacgtggaaaagaagatgtgtatatagtatcgcattcctataacagaagagattttaagggtgatagtgcgaagatagttacaatagatgtaggggaaggttctaaagaatatattgtacctgcctataagcattataataatataacggagaatcctacagagagacttttcgacagtgtaatattggaagaacaacctttagcggcagattctttgaatatgctgtgggatagtcttttggttaaaaacggtatctctggtactggcaatatacgtgtttcagtcactgatttatcggagaatatatctatgacttatgcaaaagatactcgttatctgcctctatcagatagtttgttctcttattatataggctatcgctgtgaagtcgaagtgacggcttttgcatcgccttttagttattggcgtagtgtgactttatgggactggatggaaattttctttcttttgttgtccgttgtgtttttcttctggatttggactgtttataacagatgttctgttgatgcttgcgaacataataatttcggaagcgtagctgctgaggaagaagagtcggtggttgtcttgaaagaaacagtgtcccgtatctatcaactgggagatgatgttttgtttgattcgacagatagactattgaagaagggaaatcaggtaaagagtttattgccacaggtttccgctttattgcttgggcttttagaggctgacgggcattgtatgtctatatcggatatttgcctgctgctatggccggatggcagtggacgttctgaacgggtacacacagttgtggggcggctccgctcttctttggctgaaatgtcagcgcaaatatcagttatcagcggaaattcaaagtatcagttgaaaatagcccattccatcgaagaaaagacacctttgaataatgtcttgcagaattagtgaaaatctaacataatcttacaaaac

SEQ ID NO: 6647 - DNA, 24342 bp, Unknown
  gut microbiota DNA sequence
aataaattacaattcctggtggcaccacttcaaagaaaagcaaaagacagtaaaatcctgatttctagacgaaatcaggattttttgttttccccagacatgcaaaaaaacgacaagaatagggtcagtccgaaaatcctgtaggcaggctatgttaataaacgaaagtaagctatcttttgctaaacctgcttgaaggtgggtacagcgcagtattatgcactaccatcttgatatggttatcgcttcgagctatcgcgttcaggaacatacgtcctactacagtggaacataataacctgccgtataaaacagcttagtctaaaggaaggaaacgcttggtctgcccgggaaaacgacttataagttctataaagagaaaaacagacagaatcaaggcatccattccacaatacctgtcaccggatgctgccttctccagttctcaaactctgcatacgtccgcactccgtcccgaaggacagcctgataatattccactcccatgcaatattccgtatccggcgtttcatatttcaaacgcagaatcgctttcctcgtctcctcagtcaggactgccttaatccgttcagccatcttttcaaaataaccgtcataacgggagtgcttcaatatatgaatcatatccatcttccaggcaccgttctccgggtcttcataccagacatgccactcaatacatgcttcttccgtatccaaaagattgttataagttatccgcttgacaaacgggttttccgccagcttcgccatcgccatgaagctgccggccggagtcagaggagaagaataaatatggaaatccacatcccggttcttcactaataatcccatattcaatgaacccaccaaattaatctctgccccgacagacttccaaatattcataacatcggtcttgcgtatcacttcccatgcttcccgctgattcttttcggctaattccaatatatgctccataaatcttttcttgtttttgaaaatgcaaaaataaagaaaaaccgtcacatagaggcaggaaatgtgatcctattctcctatacggcaaatcggtttaacctacatatttttttagaaatagaaaacaaaacaatatatggtaggtattattctaaaaaacttttttttatcttctcacagcaaacaattcagcttccaccgtccaatgctcaccgtctgtgcgcaccaaacgttgccaatgaaaagaagtctgtgttatttcggagaatacccaacgcagattgtcattatttaccaccgtctggacaattctgtctttctcccatctagcctccaattgggtggctcctcccaattccgtatataaaatatcccaagccaacgtatccggattatacatccgcaccgttgtcccataagcagcatccggttgataattagtcaaacgctccttacgtgaaggacagataaaaacgtcttgaatagccgttccttccaatatccactgaaaaatccactcccctttgatatgcctctcttcagcagttccataacaatcaatccattcaaaatcccattctcccacgaaatgcccgaaaaggttgtgctcggcaggcacaatattacttttgtttttgctgaccaaagctttgataaattctttcatactctctattatatatgaaaacaaatatagaataattccttatcattacccattaaaaagtaaacttttcccttgccatgaacaaattatttatatatttgtcggcattactaattatatatcatttaagtcacaaaacatgaaaaagctatcattcattattacatttgtatttctgtccatcctgttcgtacaggcccaacaggctaaatacgttttctatttcattggcgacgggatgggtgttaaccaagtattaggtacagaaatgtatcgctccgaactaaaaggagagattggtatcaccccactgcttttcacacaatttccctttgctactgttgccaccacattctctgccaccaatggcgtaaccgactcagcagctgccgggacagcacttgccacaggcaataaaaccaagaacggaacattaggaatgaagaaagacttggagactaaaataaacagtgtggcggcatgggcaaaagacaaaggatgccgggtaggtatcagcacaagtgtcagtgtagaccatgctactccggccgctttctatgcacatcaagcacagagaagcagttattataatgtaggtcttgatctgattaaggccaattacgacttctatgccggctccgacttccttgatcctaccaataaaaaaggaggcgatggaagctcggaaagtctatataccctggtagataaagcaggatacagcgtggcacgcggttataaagactatcaaaagaaagccaagaaatcagacaaaatgattctgctgcaaccatcttctgccaccgatgtcagtgctattccatacgctatagaccgtaagaaaggtgacatgaccttagccgaaataacccgtgccggtatcaatttcctgtccaaagatctttccaaaggtttcttcctgatggttgaaggtggaaaaatagactgggcttgccatagcaatgatgcggcaaccgcattcaatgaagtggttgacctggacgatgccatcaaagtagcttacgaattctacgaacaacatcccgacgagacactgatagtggtgacagccgatcatgaaaccggtggcatcgtattgggcaaaggcccctacacactcaatcttcaggctttgaaatcacaaaaagtcagcgaaagcgactatacccgaatcattaataatttaagaaaaaaatataagaaccaggtatcttgggaagtaatcaaacaatcactgaaagataatttcggtttttgggatagcatccaattaaatgaaaaacaggaagcgcgattaaagaaagtatatgatgaatcgttcggtggtcagaaagtagatttacagaagagcgaatatcagcaggacgaacctttggcctctgaagccaaaaagattttgaatgatattgcccttgtaggctggaccagcggcggacactccggcggctatgttcccgtatttgccatcggtgcaggtgcagagttatttcaaggccggatagacaataccgaaattccggtgaaaatagcagaagcagcaggctatccgaattaatcgaaagtaagatagtgcgataatcgttttaagtctttctcggtaaactcttcataaagggataactgagaaaggctttttaatttatccttctttctccgaaactcaataataacccgagcctgataatagttaatataaggatgtgcacgcagtctgtctaaccctgctttattggcatttatccgatgaattggaccattttctactttaaaccaacgctgcatatcagaagtaatccatttgagttcctgtaattgacctacatcatagaatcctcccaactgattccgataggcaacaatagcccgtgcaattccaatccctattcccggaattttcttcagttccgtagtatccgcccggttcaaatcaatcaaggtcccttcgggatatttataaaaagccaacgtatcacgcttctctacttccgcataacgcaaagtatcagatttcttctgaaatgattcggatatataaatataaggttccaaaatatgaaactgctcttccgtcattccataaatacgtgaaaaagcttccgcagtggcaaactttccacctgcctgcctatactttattatattgtgagcaataaaaggaggcaacccaagttgtaagaactcgatggaatcggttaaattaggttcgaacggtgctaatatcaccttcctttttacaacctctttctttttgaatgaggcattccttttatgctcgattgtctgaataccggctaggaaccgttccatttcttcaaatgattcctgaccggtttctttactcgattcttctatcagataaggagaaaccagccaaactccgattatcgtaacaatcattccaagcaagaaaactatagccttgcgttctcctttagagaaatagaaaaaatctttccacattattgcactaaatcaagcccaattcattgatgaaaatcaaggcaataccaatgggtgcaatgaatctcagaataaatatatagacattaaagaaacccgctttcaaagtaccttcattggtcaactcagcataagagaccgaacgcttcaaataccagccgacaaatatacataccaacattccacccaacggaagcataattttggcagtaacaaaatctagtaaatcaaagaaacctttgtcaaacagcgtatatttctgcatcacacccaatgacaaggatgaaagtgctccaatcaatatacatccgaaagttaccatcttggccgcacgcccacgagtaaaagcaaactcctcatgcaaaaaagctgtaaccacctcatgcaaagagatagtggatgtcagtgctgccaaagccaataacacatagaacaatacagaaaaaacatacgccaggaaaggtatcccgctaaatgcttgctggaagacattaggcagagtaataaatatcaaagaaggaccggcatcgggctgaatgccaaccgaaaatgccgcagggaaaataatgacacctgccaatactgcaacaaatgtgtcgatgactcctacactcaacgccgtattccccaactttgtctcttttccaaaataagaggcataagtggagagacatcccatccccaagctcagggagaaaaaggcttgtcccatggcacccaaaaatacatcaccagtcactttactaaaatccggctttaacaggaactctaatcccttttccgcatttggcaaagataatgaacacactgcaagcaggataataagaataaaaagtaccggcatcaaaatcttagaggatttctcaatgccatctttcaccccttttacaataacaaaatgggtaagcaatagaaagaccaccaaccaaatcaacggacgaaccggatcctgagagaaagcttcaaaagccagaataaaatcatccggtcttttgttcgcaaattcattcgcacctgcttccaaaatatattccagtgtccatcccgccacaacagaataatatcccaaaattagaaatcccgccaatactcctaaataacctaaccatttccaatgagtacccggtgctaaaacggaatatgctttacccgtactcgcctttgaatggcgtcctactgtaaactcggccatcataatcggcatgcctaatacaaggacacacgccaaatatattaaaatgaacgccgcgccgccatgatttcccgtttcgtaagggaaacgccatatattacccagccctactgccgaaccggcagccgccagtatcgctcctatcttactcccgaaatttactctttcgcttttttgcataaaaaactatcaatttattataattcgaaacctattggggtgcaaaagtataaaattaatcgtacttttgcgatgaataactaaaattttaaagtatgctatattattttagaagatatccgctatccttggtaattatggctgttatcttttacttatcttttttcactcctccgaaaagtaatttggaagagattcccaacatagacaagttagttcatgtctgtatgtatggagggctttgcagcattttgtggttcgaatatttaagaacccacagaatgataaactggagccatattctatggggaggtatccttgcaccgatagccatgagtggatgcatagagctgatgcaaacttatctcacgaccaatagaagcggagactggcttgattttttagctaatagcacaggagtattgttagctgttgtgttcggatattatgtgatccgcccgtttttgtggcgtaagttctaaaaagaaacgccggcgattcttcacgaacagccgacgtaatgataaaagtcaaagttatataataaagatagagagtcaacttaacgaaaatccttcaattcattctgtaatctttgacgtgtaaagaaaatgcggctctttacggttcctaatggtaatcccagcttctctgcaatttctctatacttgaagcctgatacatacatggcaaaggggacgcgatagtcttttggcaaagcattgactacacggtgaatttcttttaaatcataagcaccttcggtagaatcaaatccactttcttgcgaaaagttcaagtgaaacagattgtctgtctggtcaacaaaagtctgatcacgtacggtcttacggtaattattaataaatatattgcgcatgatggtatacatccatcctttaaaatttgtatcgggagtaaatttctcctcattatctaatgctttcaatgatgtttcctgcaacaggtcatttgcttcttctctatcagctgtcagtttaaatgcgaaacggaataattccgattgaacattcagtaaatgctgtgtaaagtcgactgtcttcataccattttatttttaagttgttattttttctgtttttaatttctgttgcaatattaacgacttcttgtaaaagagataacagaaaaactaacaacaaaaggggcaaaaactgccaagtaacagtttttaccccctaatataacagttaacaggtggttgagaattaacttttatgcacctccctgaccgccaccggtactaccggaaccgcttccgccacctttcaaatcatcattattgatactacgagctgcttttttcacctgcgcttttagctcaccaaatctccaactgatattaatgccataatagcggttgggggatttactcttgctccacgaaataaaagtagaagtcgtagtagaattatcataagtattatatttactaaagatattagacgcattcatagagaccgtcaggcgtttctctttcaagaaagaacgactcaggctaaatccatagtaagtataagatgaaccctttccttgtaatgaaatataaggagtgcctccaccgccatacacactaaaacgaatatcccacggtaatgtctgttgtgcattaccaaagaagttaccttgataaccatggttacgagctgtgaactcttcattatcactcttataatcagagtaagagccactggcattgatagagattcttgtcttagagcccggattccagttcatccacaacgaaagacgtgtgcggtttgtatgaccaatattgccataggtattattctgtacaccgttctccataaatgaataacgctcaataccattatttacaaacgaatagttcaaacttaagttcatattaaacttttgtgagaaagaactgtaagtcattcccactgaatgagacttctcactatccaagtcaggattaccatagctgatgcttgtcggattacttgtatctctaaacggattcaaataccaaatactcggacgactgattcgcatgttataatttgcacgaatggttttggtaggtgcaagctgataagtaaagctggccgaaggaactaaatcatcgaagttactgtcgaagtttctgtcaggcatatacttatattccacatccataatagtatgttcgaaacgtacacccgccttaccgccaaacttacccaatttcaactgataatcggcataagcagccaagatatcttgatcttgattaaatttgctggtcaaatcattatccggctgatagatattattgtcatcggctttaaaatacttactgtcactctgatttctacgtaaaatgtacttaacaccggcatctatctgatgttgcttggtgattggattggtatagtcaagctggaaagtatgttcatcagtacgagcatcattgtcataatgctgatccctcaaataatccatgctgtaaggataatccttcacttcttcatattctgtataagcctcactattatcgggagaaccgttataacgatatgagaaagtcagaaattcgccttttttcttaaaagaacgctgatagtcgaaattaaatcccacactggcccattccgattcattacggctcaacgtattataactgtaagcatgttctttttgggcgttcagcatgttcgtgcttccatagccattgttcttaaactttcctccaaacatattcatagaaaaagtaataagattcagagtatcaatttcataactaccctccatactgccatattggaaattgcctttatgcttggaagagctttccgaactcaaatacttataatcatccgaagtgaaatcttcgcgaccacttgaactataagaacgcggactggtattatgattataagcataatttccggtaacagtaaatttaccgatctgaactgttccatatccgctggcattataaccgcgattgctgacaccaccattcaaagtgactgtataaccttccattccgccaccggtagtaatgatgttcaagataccaccgacaccttccgcatcatattttgcacccgggtcagtaataacttcaatagacttcacagagttggccggcaagctcttcaacacttcagtgggattgttactcatcatattattcggcttcccgtttacatgcactttaaagttgctgcttccgtttacctgaattttatcttccccgtctacggttaccaaaggtaccttacggagcatttcgagagtagaattcgtttttgaatccgggtcatcttcaatgctgtaagtaaccttatcaatttctgctttcacaagtggcttctgagcgaccacttccactcctttcagcatttcggttgcttctgccatttgaatatgacctaagtccgctaccttctttgtatcagatacagtgaattctttctgtacggtccgcttgccgacagaagaaaaactaatcagataagtgcccggagaaacgagacgttcactaaactttccattcgtgtctgtcacagccagttttaccggtttggccggattactcttcaacgaaatacgaatggttgaataaggttctccttcatttgataaagaatctactaaaactccttttactgagaactgcccttgaggacttttttgagcgtttgcattaaatgtcacactaacaaagagcatgataaagatgcatagaatgttgtctttcatatattaaaaaagtgtttgtttggtgcaaatataggcaaactataatatgtagttacttttattacgttaaataaactataatgtttcccatctgcaaaatggagttttcataagggatgagttataataacgaacatctccggttacctcctgtccgatgaaatggggcttttcatatgattcatcctcatatttcaattctacttccgcaacaacaaggccctcattatcaccataaaattcatctatctcaaatgtatgctttccgctttttaccagataacgagtcttgtctatcacacccggttcacacaatttcatcaattcttccgcttcttgcagagatatttctttctcccattcataacgactcataccggatgcattagaagccccttttatagtaagataccccttatcgccccggatacgaacacgcaccgtacgtccgcgggcactacaaatgtatccttgtacaatacgactttgcgaatatgcctcctgcttataactatcatcgacaaccaaaaattttcgttctatttcctgtgccatcttatttccttattaatataacaaaaaagtcccgcacggattttccggcaggacttcagttatttcttgcggttttatccatagacagcataccctaccatagtgatcagagccagtactatcaaagcgataaatatgccttttactattttgtttgctttctcctcttcgcgcttgctatgattagctttcttattctttcccataaatattttattttaagattaaactttctcttttgtgaccttcaaaagtacaaagtttccgggagaaaacaaataaattacttactttttacgcattctccgaacccgagaattccatgagatacgctttaataaagtcgtcaatctttccatccatcacgccatttacgtccgatgtctggtagttcgtgcgatgatctttcacacgacggtcgtcaaatacataacttctgatttgcgacccccattctatcttcttctttccggcttctaccttggcctgttcttccatgcgatgctgcagctccttgtcataaaggatagagcgcaactggcgcattgcattttccttattcttcggctggtcacgagtctcggtattttcaatcaagatttcttcttcttctcctgtataaggatctttatactgataacgcaaacgtacaccggattctaccttatttacgttctgtccgccggctccaccgcttcggaatgtatcccaactcatacgtgccggttcaatatttacctcaatactgtcgtcaaccaacggagttacgaatacagaagcaaaagacgtcatacgttttccctgagcattataaggagaaacacgtaccaaacgatgcacaccattctcaccctttaaataaccataagcaaaactgccttcaatgttcatagtcacagctttgataccggcctcgtcaccttcctgaagattggcgatgctcagtttataaccgtttgtttcggcccaacgcatatacatacgcatcaacatggatgcccagtcctgactttcggtacctccggctcccgaattgattttcagcacacaatccatttggtcggcttcctgacgaagcatatttttcaactccaaagattctacagcagtgagcgctttggaataagcgacatccacttcttcctcggtcaccaagtcatctttaaagaaatcaaaagacaattccaattcgtctgacaaagtctttacctcacgatatccgtcaatccatttctgaatctcttttactttcttcatctgtgcctcagctttcttggcatcatcccaaaatccgggcgcttgtgtacgaagctgttcttcttccacctgaacaagtttattctcaatgtccaagtatctttcgagggcagcggtacgttcttttacgtctttcagttgctctattgttatcattttgaggaatttttcttttaagttgcaaagatataacaatttaggcactgattacatggatttcactgtttttaatgaaagaacaatgcattccgtacaatccgtgcctaaaatacaaatgaatcaaattctttattcttcgtacatcttttctatttcggcagcataattcttattcaacacattgcgctttatcttcaacgtattagtcagttcaccgcgttccatactgaaaggatggggcaataaggtaaaacgtttaatctgctcataatgtgcgaattgctgttgaagcgtatcaattcgttccttaaataaatcgataatctgttggtcctgcaacagctcttccatagaagcatacttgatgcctttcttttcggcgtactcttttaccaatttatattccggaatgattaaagccgaaacaaacttacgctcatccgcaataatggaaatctgatcgatatatcggtccaccaccaacttagcttcgatagcttgaggagcaatatatttcccatttgaagttttaaacaaatccttaatacgctcagtaaggaataaatgtccgtccttgatataaccggcgtcacccgtatgaaaccatccgtcttcagtaaaggcagcctttgttgccgcttctttcttataatacccatgcgtaatgccgacaccgcgaagcaatatctcattgttttcgccaatcttcacttccacatgcggcataatacgccctacagagcctaccacatgatcaaagtcattttcgcaagacacggttgcagttgactctgtcaatccatatcccgccaccatattaatacctaccgacaatataaattcctgaacagcaggtgggatggcagctccggcagtcggaaagaagcgaccattctcaataccgatggtcttcttcagcaagctataaatagtcttctcataaaatttgtatttcatgtgaagcaaggccggaggcgtaagtcccttgcatacatattctatattatgctcacgacctactttcaatgcatccagcatcagttttttcttcagtccggtcgtttcattgattttctcctgaactccggaatacactttctcccaaaaacgagggacactgcacatggctgtcggacgaatctccttgatggtcttctgaatatccaccggacgcaaattgatagccaactggcaacccatagaaatacaccaataactccaggcacgctcaaacacatgggtaaaaggcaggaaattcatcactacttcttggtcacccaattgcgggaaacgctcattgtgtgccttgatagctccttcataacaagaatgatgtaacattacccccttgctgtcgcccgtcgttccactggtataaaggatattggcaatatccccattacccgattcggcaatgcgcttgtccacttccgcctgatgttgacgagctttgcccaacttcaggaattcgtcaaagtaaatcgaagaggtatcacgcttatcgcgctttacatccttatcaaaaataataatctgcttcaattgtgtgccaagcgacatcacccggaaggcaacatcatactgtaactgttcaccaacaaaaaggtaatggatatccgcatcccccagcatataaagcacttgggcctccgagcttgtggcataaaaaggaatagtcactgcacgaataccaaaagcgccaaaatccacataaaggcattcgggcttattttgagaaaagacaccaatattttcttgtacacctacacctaactcaagaagtgcattggaagtcgttgttaccgtttcggcaaattgtttccatgagaccggaacccaagtttcagtatcataatcacgatatttcagggctacacggtcgccatatttctcagcctgacgctgaatcaggacagataattgggaattgctcattataaattattttaaatacgtggcaaagttatcgtttaatttggaattatccatcataaacaggcattaattttcccgaccaatcaaagagttacaagaatcccaactttaaaattagttgcatacataacttaattatcactacttctaagcatactttaccgggcaaaaatcgtatctttgccgcacaataattataaaatcgatatgattgacttagcatattacacttcagaagcaaccacgttgctgaattcgctaataggcatcccttcgctgagcagggaagaggaagctgctgccgattttcttcaaaactatattgaagagaccggtattatgacaggtcgttcgggaaacaacatttggtgcatcagccctatgtttgacttgaacaaacctactatcttgctcaattcgcacatcgatactgtaaagcctgtgaacggctggcgtaaacaccccttcactccgaaggctgagaacggaaaaatttacggactgggcagtaatgatgcgtgtgccagtgtagtatctttatttcaagtttaccgccatttatctaccaccgaacaggcttataaccttatctttttggcttcatgcgaagaagaagtgtcaggcaagaacggtattgaaagtgttttgccccagcttccacccattgcattgggtattgtaggagaaccaacagagatgcaacctgccatagcagagaaaggtttgatggtggtcgatgtgacagctcacggaaaagcggggcatgcagcacgcaatgaaggtgacaacgctatatataaagtattggaggatatccggtggtttcgtgactatcgttttccaaaggagtctcctttattgggaccggtcaaaatgagtgttacccaaatcaatgccggaacccaacacaatgtcattcccgatatctgtacgtttgttgtagacatccgcagtaatgaatgttattccaacgaagaattatttaatgaaatcagcactcacatcaagagtgaagccaaagcgcgttcgttccgtctgaattcatcccacattgatgccggacatccgtttgtcagacgtgctattcagttgggccgtgttccatttggctcgcctaccttgtccgatcaggctttaatgaaattcccatcggtaaaaatgggaccgggcaaatcctcacgttctcacacggccgatgaatatattatggtatcggaaatagaagaagccatcgggctgtatatagaattgttggacgggctggtgatataattaatatgataggaaaggcgtgccaaagtaacaacacgataacaaaatcggctttgacacgctataccatcagaacatatcatttcattttcagaaaagcaaaaaaaacagttgatacagtaagtaaataacccaaacagctaaagccacaagcagcaacaataaataattattctttatccatttcttcaaattaatcatcaagtatttaaaaccattggcttccactttagcaacgtatgcccgatactcgcgctgtatttcgctatatttttgcttccaatcagataaggcactttccacttctgccaacttcatttgcatattctttacccgtactttctcgtcactcaactgttcctgcaacaaaaacttttctttcatcagctcttccatccacagttgttctgccttcaatcgtttttcttgcaaccatagttctacttcccgttgttttttttgctccagctcctcttgctgcctaactttctttatttgttctatcttttgcagttgctcattttcaaagtcatgcaatctgatttgcaaaattttaaccgtatccctctcctttgacaattcataccgaagctttgtacttaactttgtcaacctcattacttcagcactttcacattccttgtgcctcaacttgggatcacatttcgcccgttgcctcacctccccatttctcagcctggcacacacttccctcatattccgattcagtttctccagctttgtcacattatcccgctgtttttctataaaattaaagctctttttgcaaacacggtcaacagtattcttgtatatcttcaatgtagtctgaagtgtatgagaatattttgaagcaatcaaatccagccgttctcccatactgagcgacaaaaagataccgcgttcttcctcatttctgataaacagggaaaaagcctgcacaaatgcccgatagacacggaataaaatcctttgttgcacttcaaaagcaacgtgggtttcattacaagccctcaattctacctccagcattctgtcagtatcacgcagctgagcaatgatttcctttttatcttctatctctttatgcaaatccagataggaaataaacgaatcctcgtctatcagttttacctttctcccaatttgggacgaagtaacaactttccgtacaatcaaattacaaatataattttcatctatttgatatttctcggatatatgctttataggtacccagtgactcatagtattacatatcatttttataaatcccatatcaattcttcttaagagacagaagctgatgaacaaagctatgcattttttaatgcaaaaacaatcttttatcaagaaaattgtttaatattttaataatcggggtatccgatagaaatatgaattatttatcaagagagaaaagtaaatgttttcaaaagaccaaagagttttaaaaaaagactttgagattttaaaagaagaccttgaagttttcagaaaagaccaaggtctttcgagacgagaatggaaacaacattctcctccgtcagaaaagttgatgcgatgtgctttcacacataacagatacttaaatctcctattcatgggatttttgtgtgaaagcaattcctgcttaccacaagccggggaacttatcttcccaaccaaagctcggggttcagcttcgctgtctctttacgcagctggaaatgaagaaccgaattacctgaactatcagtatgaatagtgccaagtatagttttcgtacttactttacttcctttggacacagctacagaagagagattgcaataaaccgatatatagttaccatggcgcaccaaaatattattcaagccattgtattggaatatagccgaaacttctccatcaaaaattgcacgtgcctttgcacccggtttgcctttgatatcaattcccttattatccaacttcacattacgcagtccgtccacagcatactgtccgtaatgactcacaatgacatacggtcccgtgacaggcatcggcaatattccgcggttacgctcaaaattgcctgacaaccggtgatcttcattattcaaattgaatttttccaccggtgccaccttctttcccgaagttttaacacccgattttgaagtagaggcagtttccccactgctctttttattcgcttcgactgcttttgccgcagcagccttgcgtgcagcagcttcggcagcggccttacggcgcgcttcctcttcagcacgcttacgggctttttctatttcaatctctatcaaccgatctatctgtgcattcagttgttgtgcagaacgttttttcttggaaatttcattctgtattcctttctgcttcttcttaagattagccaaaagtgtctgacggtctttttcctgaatttcaagcttggctttttctgtttctccttgctttaaaagattctcttttgctttgcgggtttgttccagttctttcttcttcgacactacctgacgttgcttacgctctatctcaagtccctgaagacgctgatagttggcatactcctgcacataacgcatacgacgatacgtttggctcaggttttcagcagaaaaaataaacatcagtttctcctgcacagacttattgcggtacatatactgcacagatgcctcgtatttcttctttttctccttcaggtcccgctgcaaggcggtcaactggcgttgcaaagttgttatttcctttgccagtgtattcacatccgtttcgatggtatggatatatcttctacgctcttctatctgcccggtgagcagagccagattttccaattggcttttcacatcctttttggtagattgcaacagagtctccgactcagcaatctgctgatgcaattctttccgtttgttttccagctccctaatcttccgggtgctctgtgccgacagtgcactcagaaaacaacaggcgatacacagtaggaagatacgtttcatttcttaatgagctgtttgagcaaatcttgcaattcaactttatcatatttcttgggcacatcggtatgggtttcccaatcactgccggtagacagacgggaaaagtcaaaagtggccgtgacgggcttcttgcctccttcaaaggaaacaaacatgtgactcgggaactgttttttctccaacggacggaacttatcatacttccaacgcaatccgtaagaagtgcctgccagtccgatatggctttctttcagcaacccttcatcggctgtggtgcggaagcgataagcaaacttctttccgttcttcacctcaagcacggcatgctcgttttcgggatgaacggtgaatgccgaaatatcgcgagcagataatgttgtcttaccgggaaggaagatttcgttcagaaacaatgcctgcagggagtgaaagtccaaatctgcctttgccaaccccttaagctctgcaaacgatacctgcacgtaacgcttgttcaggcggtccatcaccaatatcccatcgggagagatttcggcgcgcgccacttcgatgccgataaacggagctgtaagagacaattgtatcacttcatcacgcttcatgcggatagtgccgcttattttggtagctccctttccgttcaggtcgacagccattgacatctttgccgtcaaagcatcccatgccggcgcacggttgagaacctcagtcatatactccgtttccgacaaattaccgatagacacgctctttttcatgctcttggtagaagaacaggaagaaacgaatgccagcaatacggctccgaacaaataaatatagatacgcttcatcattctgcaaagtatttcttttgtgcaatcttcttctttaataatttcaattccttctcgtcacgcggttcactgccttctagaggcggttcattggcaagcttctcggcttgtcgccaatactccaatgccttttccttttcgccgctcatataataaatatctccgcaatgttccaccaccaccgaactcttgtcaccctcgttctgcatggcctgatcaatataaatacgggcttcagcatactttcctttttcaaaaagtatccacgcatatgtgtcgagataagttccgtttgtcggctcagccttgacagtgcgataactcatttcctccgctttatccaagtgctcgcgttctaccgacagataataagcataattattgagagcaccgatattatcctctttataaaccaaagccgaatcataagcagcgtatgcctcgacattcattttcttgatatgatacaaatctcccataatggcatagaaatctgatacgatattcttatcgcttttctcatttacctggttcacccctttcttaaaaacttcgagtgcctcgtcaggctgatctttctgatgataggcaagtcccagataataatagaattccaatgtttcgggagtatactccaatgccggagtacaaagtgctatcacctcatccatatcttgctcgcgaatggcgaaactcagaagttgcaggcgggcaggaatgttttcgggatcaatctcaagcaccttatgaagcacaggaacggattccttgtccatcttcttggtcagcagatattgagctgccaacatagcgatgtccgcattctcctgttttctttcgagcatggaattaaacaaaccggctatcttgatactatccttgtcggtttgttccgaacgaaggatgagctgacgcatgatgttcatcttagtattgctctccaccctgtcgttcaacagtatagagtccaactgagcctgatacagactgtcttctcccttcttctcgtaataagtagccatagacagcatggcaggagcatatcccggttcttctttcaacaccttctggaagatggaatacgcctcttcttcctttccgttgttcatataaacatctcccaagatagtgagatagcgcatatcgtatggatattctttcgcaagattctcgatttcggtaaacgcttgttcgtcgttgtccatcgccaaatacatgcggaacttctccatactgatagcctcggactttccatcacgttcctccaggcggttcagtgtattgattacctgctgatagtctttggtacggttataaaggtccaccaacgacatcaatggttccaatcgttttgggaaatggcttaccatgtcttcataaacatagattgcttttgccgcctcccctttattctgataataagcagcaagtgtctgattataccaataattattcgggtcggccgccactgcctccttcaaagccctttcacccttgtcaggctgattgaggaacatataaaatttagctatctcatataaagtcgccgccccctgcggataaatgtccaagcaatggctatacatttcaaaagcggcgtcaaggtcacctttttccttcatgcggagtgcttccaggaaaaaataatcgtatttacgtcgctgttcgggtgtcagcgggtctttctgctcttctgccggcgttttttgggaagaagacgccttccgcatggttccgcacgacatgagcagagccacaaggcaaagccacaatagcggcaaatatcttttagttgtttgtctgttattcattattctattctagtttttaccggtatgtccaaagcccccggcaccacgttcagtttcatccaagacttccacttcctgccattcggcctgttcatgacgggcaatgaccatctgtgcaattcgctctccgtcttctatcgtaaattcctccgccgaaaagttaatcaggataatacaaatctctccccgataatcggcatcgatagtaccgggagaatttaatacaccaatacctttcttgagagccaagccgctgcgtgggcggatttgtgcctcaaaccccttgggaagggcaatatacaatcctgtcggaacaagacagcgctgcaaaggttttaatacaatcggttcgtccaaattagcgcggatatccattcccgccgattgcccggtagcatattggggaagctgatgctttgatttattgattacctgtactttcattttcaaaattaacttatctaataagatgcaaatctacacaattcaatggatttatctaagcgtttacagttttttaaacggagattttatacttttgcaaacatataaaccccgaattatgaactggaaacaattaatatcaaataaacgcttcggactggaagagctgcacgaagcacggaaagacgaccgctccgagtttcaacgcgactatgaccggctgattttctctgcccctttccgtcgtttgcaaaacaaaacgcaggtatttccattgccgggaagcatattcgtgcacaaccgcctgacgcacagtctggaagtgtcgtgtgtagggcgctctttgggaaatgatgtggccagccggctattgcagaaacatcctgaactggcagactctcatatatcagaaataggctctatcgtatcggcagcttgtctggcacatgatttagggaaccctcctttcggacattccggagagaaagccatctcaacttacttctcggaagggaaaggaatagccttgaaagaagagctttcatcgatagaatgggatgatttgatacactttgaaggaaatgccaatgctttccggctcttgacgcatcagtttgaaggaagacgtaaaggtggattcgtgatgacttattccaccctggcctctattgtaaagtatcctttttcttcacgtctggcaggaaaaaaatcaaagttcggcttctttctgagcgaagaagcagatttccaaaaaatagctaccgagttgggaatcacccggctgagccaagaaggagaaccattgagatacgcccgtcatccgctggtttatctggtagaagcagcagacgatatctgttatcaaatgatggatatagaagacgctcacaagctgaagttactgacccatgccgagacaaaagagttatatagtttattcttcgatgacaaaagaaagcagcgaatagaagagatttgccggattgtaacggatgttaatgaacagattgcctatcttcgttcttcagtcatcggagcattgataaaagaatgcacccgggtattcgtagagcatgaagaagaaatcctttcaggagagtttgaagggtcactcatcaaacatatcggttctcctttaaaagaggcataccagcattgttcggagattgcttttcataagatttaccgttcgagtgatgtgctggatatagaacttgccggtttccgggtaatcagcacgctgatcgacttgatgatcaatgcagtgcgtacgccagaaaaagcttattcacagctacttatcaatcgtatgtcaagccaatataatgtgaatgcacctaccttgtatgaaaaaatacaggctgtactcgattatatatccggaatgaccgacgtgtacgcgctcgacctttaccgcaaaataaaaggcaacagtcttccggctgtatagaagcctattgcaattgcttagccacggccgtggttaagcctgctcacccgggtggttaaagttagtcacggccgtggttaaacttaaccacagccgtgactaacgaatatcttactttcatcgacaaaagaaacaaaaaacaagagcatgaaggcataagtatgtgcaacttattatatcatcaactgtttctgagtggttttaatgtatcggagaaaaacgacacaggttatccctaaaagacattcgggcaagtttacacctgcccgaatacttcaactgccttccggcaattacctgtccggcctcacggcctctctatgtatatacaattacttatttcgttaaaacaggatgcgcccccgaggttatcttcaatgattccggatgctgtttcacaaaagattcaatatgacgcacacgcttctcttccaatatttcattgacagcaatcaaaatacctgtttcttcaacatcaccaaatccataattaatagcagtaccaaacatgcgcatcgtcggagataaactcatatatgcatttaccaatggggggatattatagcccaacttacgcacctcagtattaagcaccttataatcctccttgaaagattcataacaaaacaagttcttcaatagttccgggtccgtttcaatttccaacgatttcatcggagtaatcagtttatccttatcgccaaaatgcttattgaggaagtaaagaatcatatcacgtccctgacggtgataactgggatacattgtcatcttgccaaagaaatacttcacattcggtttgataaccgtcaaggctcccaagccatcccataaattatcaagagcaaacaaaccttttgaacctgcacgtgtcgactgatactccagcgtcacaaacgaacgtccgagttcgacggtataaggcaggtattctttcaagaatgtttcggagaaattaaacatatgggctgttgccaaaagtggttttccatgttcatcaaattgagcctcatcgcctaacagataacgatagccacccaatatttcttcagcttccggattccataccaccaactgcttatagggattctccataatgtcatactcatcaatatccattgactttcctgtacctcctcccgcagcacggaaagcaatctcacgcagacgaccgatttccttcattacattgggggaatcctgataggttatgacataaatctcattatgacttttattagtaaatctaaggcgcttatcctctgttaattccgcctttaggatttctttgttaattggtgcaataatctcttccatatatatttctctctcctttgtctgttatagtttatagacaacgtcctttacaaactgcgcccattgcgcaggagttttagacttatcaaaagtttgccagggaataggtttaccaatggtcaaggtaaaagttttatgtcgatttttcaacatttcatcagccaaataaagcatagcaatattaaacttaatacctacaaatttacataagttggccaaattatagaaaaaatccgagttccgtccttcaaaatgcagaggtactacatcgcgttgcgtctccacgcttttggttacgaaagtctttttccattccaaatctcttatcacaccattctgacgacgcgaacagagtccggcgggaaacataatgatatgattatcagaagaaaaacccgcttctaccattttaggaaaatctctggactgagaaccggttttattgattggaatacacaacggcgccaagccgtgcaggttcatcaacaaatcattaaccaagtaacggacattaccgccatagtgcttcccaagaatatatcctaaagcaacaccatcttgtcctcccagcggatgattactcacaaaagtgcacttaccctctttaggcaagttttccagacctttaatttccactttagcatccagaaactccatacaagcttccaaaaattcaactccgactttatctttggagtcatgcagaaagacgttcaactcatcctgatgcacaatacgcttcaagtatgaagtaacaaagcggggaatgtatttggatttcttccctgctttcgtctttaaaatcttatctatgtcaattaaaaatatagagtcgtcagccattttataaatgtcttttcattgcaaaagtaacttatctttttttatattggcaatttatgacagaaaaatgaacccttctctaaaaaaattaagagtttttgtgtctgaggcaatacaaagcgcactatttttgcgcagtttaaaaacgaatgtgcaattattcaacctccttttttcacttctcacacaaaccggatttcactcctttttataagaaaattattaaaattaaacttcctgtttaccaagtgtata

SEQ ID NO: 6648 - DNA, 31827 bp, Unknown
  gut microbiota DNA sequence
tattttgtgatatggaaaaaataaaaaggataagcactaccggggtggtgtgatgaaggggctgtccaaaaagtggatggccccttttgttattgtttatcctacatcggctctccatgatatctgtagaacgtcgggaactcttaagtcattttcccggtcgggttaaggttttcctttctttagactaagccattttataaggtcggttattacgtcccattacagcggaacatacgtcccattacagcaggacgtacgtcccactgtggcaggacgtatgtcccattgcggtagaacgtaataattcacggattaaaatgccttagctgtcggtaaggaacagcttaacctttctatgtttctgccctgtgcttatttactttgtttctatcctgattactgattctcattttttatccttatctttgcaatgtaaactaaaaatagacgaacatgaaaaagattattagtgtatttatggtagctgtatgtttgatgatggctgctcctgttcaagctcagttacacttcggtgtgaagggtggtttgaacctgtcaaaagcaagcttttcaaaggatgccttgaaaggtgataaccagaccggttggtttattggtcctatggctgagttcacattgcctattatcggggtgggagctgacatcgctgctttgtattcacaaacagatttggctgccaaaggatatgatacagatgctaaactgaaaacgtttgaaattcctgtgaatttgaaatggtcatttggattgggaagtatgtttggggcttatattgctgccggcccgcagtttggctttaatatcggtaataaaaaaggctttatggattatgagttgaagaagaataatacaactttcaatgtaggtgcgggtgtgaagttgattcgtcatatacagataggcgtaaattataactttgctttaagtcatacggctactatcgagaccacgaatgaagaagtcattaagattaagaacaatacctggcaagtatcacttgcgtatctgttctaagcaagttcatttaataaaagataaaaaggaggcattctttactgagtgtctccttttttgtaattttgcggtatgaaaaaatatgtagatgtcatagtgccgttgcctattgccggtcagtacacttattcgcttccggcagaaatggaagagaaagtacagatagggtgtagggttgtagtaccgtttggacggaagaaattctatacggctattgtcaccaatgtgcattatgcagctcccgaaggttatgagacaaaggatatagaagaggtgcttgactcaactcctgtattgctgcctaaacagtttgaattttgggagtggctggcttcttattatctctgtacattgggagatgtttataaggctgccattccgtccggcatgaagttggaaagtgagactttggtggtgtataacccggactttgaagcatcggcttcgcttcccgaaaaggaacagaaaatattagacttgttgagtaatgacacagaacaatgtgtcacccaactggaaaaggcaagcgggatgaaaaatattcttccggtcattaagtcattgcttgacaaggaagctatttacgtgaaggaggaattaaagcgtaattataaaccccgtacggaagcgcgtgtaaaattggcagactccggtatggatgaagcccggttacagcaacttttcaatgatttgggacgtgctcccaaacaattggcactgttgatgaaatatatagagctttccggttgggtatcgcgtgaaactaccttaaaggaagtcactaagaaaactttattggagaaggccggtggttctgccgccgttcttaacgggctggtagaaaaaggagtgtttgaaatctattatcaggaaatagggcgtctggataaaggtatgctgaagacaacggatatcaatccgctgaacccggcacagcaacaggcctatcagtctgttctccaatgtttcagagaaaagaatgtctgtctgctgcacggagtaacttccagcggcaagaccgaaatatatattcatcttattcaagaggtgctgaaagcgggcaaacaagtgctctatctattgccggagattgctttgactactcagataaccgaacgcctgaagcgggtattcggccatcgtctcggcatttaccattctaagtttccggatgccgaacgtgtggaaatctggcagaagcagttgggagacgaagaatatgatgtgatattgggggttcgttcttccatttttcttcctttcaagaacttgggattggtaatcgtagatgaagagcatgaaaatacatataagcaacaagacccggctccccgttatcatgcccgcaattcgtctattatgctggcatcgatgtttggtgctaaagttcttttaggtacagccactccctgtgtggagagttatttcaatgcgatatcgggtaaatacggatttgtagaattgaaggaacgctatcaagatattcagcttcctcatatcgaattggtggatattaaagaacttgctcatcaaaaaaggatgcagggacctttttctcctcgcttggtcaaagaaattaaagaggcattggaacgtaaagagcaggtgattttgtttcaaaatcgtcgtggctttgctccgatgatagaatgtcatacttgcggctgggttccgaagtgtaagaattgtgatgtgagccttacttatcataagggattaaaccaactgacctgtcattattgcggatatacgtatcaggtaccccgttcgtgccctgcctgtggtagtgtggaactgatgaatcgggggttcggaacggaacgtattgaagatgatattaaactgatttttcccgaagcgagagttgcccggatggatttggatactactcgaacccgaacggcatacgagaagataatcgctgattttgaacagggtaagacagatatattgattggtacgcagatggtttcaaagggattggactttgaccatgtcagcgtggtaggtatactgaatgccgatacgatgttgaactacccggacttccgcagccatgagcgtgctttccagctgatggcacaggtggcgggacgtgccggaagaaagaacaggcaagggttggtgattttgcagacaaagtctcctgacttgccggtgattcgccaggtgatatcgaatgattatgaacaactttattatgaccagtcggcagaacggcagatattcaagtatccgccttattaccgtctcatttatgtttatctgaaacatcggaaagaagatgtgcttgatatggcggcggatgcaatggctgcacaacttcgttccggtttgggaagtcgtgtgttgggaccggataaaccaccggtagcccgtattcaaaccttatttattaaaaagattatggttaaagtggaacagaccgcttcgatagcgaaagtgcgcgattatttgcttgccgtgcaacgtgcaattattgaagacgagcgttttcgttccctattagtatattatgatgtagatccacagtaattatgaaaatagaattagatgtgcatacccataccattgccagcgggcatgcattcagtactttacaggagatggcacaggctgctgccggcaagggtttgaaattgttgggaataacggagcattctcccggtgttccgggaagctgtaatcccatttattttagaaatctgcatgttgttccccgacagatgtacggcatcgaattgttattgggggcagagattaacattcttgacggggagggaaatcttgatatggatgagaactgtatgagaatgttggatattcgtattgccggtattcattctttatgctatagttatggcacggtagacgaaaatacgcatgggatggtgaaggcagtcagtaatccttttattcatattatcagtcaccccggagatggtacggccgaattaaatttcgagcctattgtattggcggcaaaagaacatcataccctgttggagataaataacagttctttaaaaccaacacgcaataagccgaatgcccgggagaacaacctttctatcctgcggctgtgtaaacgatatgaggtgccggtgattctgggaagcgatgcacatatttcatttgatattgcccgatatgattatttgtatgacttgttgcaacttaccgagttcccggagtcactgattatgaaccgtgatgtgaaatcgtttaaagaatatctttgtttgtagaactatatgaagaaaatactttttgtttgcctcggcaatatttgccgttcctcttccgcagaagaagttatgcgtactttaattagaaaagaaggtctggagagagaaatagaagttgattctgccggtatcttgagttatcatcaaggagaactgcctgatagccgtatgcgtatgcatgcttctcgtcggggatacaatctgactcatcgttcccgtcctgtctgtacagatgatttttatcactttgatatgattatcggtatggacgaccgtaatatagaggatttgatagaacgggcgcctgatttggaaacagagaagaaaatccgccggatgacagactattgtcgggtgaagatggtggattatgtacccgatccttattatggaggggcgcaaggtttcgagaatgtattggatattctggaagacgcttgcgccggactgcttgaaagtattcgtgctatttcttcaactcaggataactgattcgagtgtgatacatcgttttcagtttttccttaaacagcgctttcactaaggcgatatctttgaaagtgataggacattctttgaaaaatccttctgcaacttgcgcgtcgatgattttgtctactaaagttcctatactttcttctgtatattcgggcaggcttcgtgaagcagcttctacggagtcggccatcattaggatggcttgctccttggtgaatgggttgggacccggataacggaatttttcggcatccacttcttcgtcagggtgctcatttttataggaaatgtagaagtacttagtcagtcctcttccatggtgcgtgctgataaagtctttaatgactttaggcagattatgtttctcggcaagctttaagccatctgtgatatggctgatgataacttgcgcactttgttcatagttgaggcttttatgcggatttactcccgactggttctcggtgaagaaggcggggtttaccattttacctatatcatggtaaagtgctcctgtacgaaccaactggctttttgcaccgattttattggctgcttctgctgccagattagccatctgaagggagtgttggaaagtgcccggagctatttccgacatctcgcgtagtaagctgttgttgatattggaaagctctaccagcgtaacattggaagtaaagccgaaagtcttttccaaaataaacagcagcggataagcaaacagcagtagaatgccatttatcataaagtagatatacatacgtgtattcagcttggtcaaatcatcttcgtgaatcagctcaaaagcaaaatacaacaatgcataactggcaaaaactaccaaagccgttcgcagaagttgcgagcgttgtgataattcgcgtaagctatagatagataccatgcccgccaccacctgcaagagaataaactcatgagggaaacgcaatgtgatggaacagagcaggatgatggtgacgtgagccatgaatgccgttcgcgagtcaagaaagatacgcactataatcggtatcatcgcaaaaggaacgatataaatactggatagactttgcgataccatgacggaggcgataaccggaaatagcactatcagtgcgaaaagcaaacttaaactgcctttgcgctcataataatcggcacggaacaaatccaaatagaccatgaagcaaaacaggaagatgccgacatagagtatttgtccggccagtgtcagccgtttctcttgtaaagaatcactgcgcttttcccattcttttcgtaaagactctaatatattgtaggtctgttcgtttacaatttctccgcggtctataattttttgaccgtttaagacaaaaccgtttgcataggaaatattggatagcaggtctttctgtgctgcttcagatttggcttcgtcataaataagatttggagtaatataattatttaagttgcactgctgcaaaaccttcttcttgtaatgggtggtatcggcgttcagcaggtattcataagcatcttttacagtatataactgaccgaccggccgacttgtggccgtattctgttctaccgttcgtatggcagtgatgctgtcctcttccattcgggtgaggtcattaccggcaataattccatttctatacatctctttcagcatgcgctctatgtatcttatataatctgtgccgggcaaggaatggcgaagtgttttgttgtagtcttctctcagtctctcaatcatctctttttccgcattcttttctatatggaaatagggctggtaagtagcaagaatactatcctgctctttttgcacctgcatgtcatttttataaatggggaaatcgaacgatgcttgtaatagtccgtacttccatggtttgttgatgtcaaattgatagttaaatttgccttcattgggcaaaaaataaactataactgacactgtggcaatgaaaatgaggcttttatacagcaaatctttatatgaaaaccgtttaccggtctttaaacttttcataatcgtatatttttgcgcgcaaaatacgaaaaaatcgggaaatttagattaattttgcggcgtattttatataaaacaacaatgtcagaaagaaaagtaagagttcgttttgctccgagtccaacgggagcgttgcatattggtggtgtgcgcactgctttgtataactacctgtttgctcgtcagcacggtggagatttaattttccgtatagaagataccgattcaaatcgttttgttccgggagcggaagaatacattatcgaatcgttcaagtggttggggattacgtttgatgaaggcgtaagttttggtggtaatttcggtccgtatcgtcagtctgaacgtcgcgatatttataaaaaatatgtgcaagtcttgttggataacgacaaagcttatattgcttttgatactcctgaagagttggatgcgaaacgtaaggagattcctaactttcagtatgatgcttcaacccgtatgaccatgcgcaactctttgacaatgtcgaaagaagaagttgatgcattggtagcagaaggaaaacagtatgtggtacgttttaagatagaacctaatgaagatgttcatgtacatgatattattcgtggtgaagtggtgataaattcgtccattcttgatgataaagtattatataaatctgcagacgagttgcctacttatcatttggcaaatatcgtggatgatcatttaatggaagtctctcatgttattcgtggagaggaatggttgccttctgctcctttacatgtattgttatatcgtgctttcggttgggaagatacgatgcctgaattcgctcacctgccgttattgttgaagccggatggaaatggaaagctgagtaagcgtgacggtgaccgtcttggtttccccgtattcccattggaatggcatgatcctaaaaccggagaagtatcatccggatatcgcgagtcgggatatttgcctgaagctgttatcaatttccttgctttgttgggatggaatccgggtaatgaccaagaaatcatgtcattggatgaattggtgcaattgtttaacttaagccattgcagtaaggccggtgcaaaatttgattttgaaaaaggaaagtggtttaatcacgaatatatattgaagaaagacaatgctgaaatagcggctttgtttatgcctgtcctgaaagaaaacggcatagaggctcctatggataaggtgataacagtggtgggattgatgaaagaccgcgttagtttcattaaagatttgtggggaacctgcaagttcttctttgtcgctccgatggagtacgatgagaagactaccaagaaacgctggaaagaagactctcccgagcgtatgttggagcttgccgatgtattggaagcattggatgatttctcattggagaatcaggaaaaggtagtaatgaaatggatagaagataaaggttatcatttgggcaatatcatgaatgccttccgtttgacattggtaggcgagggcaaagggccgcacatgtttgatatttctgctgttttaggaaaagaagaaacattgagacgcattcgccgggctgtggaagtgctcaagtaataccgtgaatcatgatttataatctagtcatctatatttatctattcggggttaagctggctgcattgttcagctccaagcctgccaagatggtgaaaggtcatcgggaggtatttgatatcctgcgtgacaagattgaccggaatgcccgttatatctggtttcatgcagcatctttgggcgagtttgaacaaggacgtccattaattgagcgtattcgtaaggagcaccctgagtatagaatattgcagacttttttttctccttcagggtatgaagtgagaaaaaactatcaaggggctgatattgtgtgttatctgccctttgatacacctcgtaatgtgaggcgttttatcgagatggtgaatccctgtatggtattctttataaagtatgaattttggcagaattatttgaatacactttataagaaaggtattccggtttatagtgtttcgtctatattccgcccgaatcagatttttttccgttggtatggtaaggattaccgtaaagtgctgaagactttttcacatttatttgtgcagaatgaagtctctgaaaaactgttggcaagtatcggtgttactgatgtaacgattgtaggtgatactcgttttgatcgggtattggatatttgcactgttgccaaggatctccctttggtaaaagcatttaaaggaaattcgaagacttttgttgccggtagttcgtggggacctgatgaagatatttttatcaggtactttaatgaacaccccgaaatgaagttggtcatagcccctcatgtggtgagtgacagccatttgaaagaaatcatggagaaggtaaagcgtccttgtgtccgttatacagaggcaacagcagaaaatgtatcgaaagccgattgcctgattattgattgttatgggttgctttcatccatttaccgttatggggaaatttcgtatatcggtggaggatttggagttggtattcataatgtgcttgaggcagctgtgtacggcattccggttatttttggtccgaacaataagaaattccgtgaggctcaacatcttttagaaaagaagggtgggtttgaaatcaatgattatgaggaatttaaacgtttgatggatagattcctgactgataacagctatttgcagcaggcgggaaatgcagccggagattatgtgaagaataattccggagccttggagaagattatgaaagcaattcggttgtaatctagtttaaggtataataataagagccgtttgtgagataagtattatctttcaggcggctttctcttatttaattcctatctttgcgttcaataattattttatgagcattaatgacgatatattgttattgaaactcattcaaagcggtaatgagcaagcgtttaagtatttatttgatacttattttgcatcgttatgtcgttttgcgcatgtctatgtatcagatacccaagatgctgaagagcttatattagagcttttcgttcatatttgggaacatagaaatgaaataaatattactctttcgtttaaagcatacctttttcaggcagcccgcaaccggtgcttaaattatctgcgtgacaatcgttcaatgcttcgtcttgaagaagtggaagaggaaataagagatgaagatatctcggctcttgaaatggaggaattgcaacatcttattatggaggctatttgtgcattacccgataaatgtcgggaggtttttcaatatagtcggcatgaaaacctctcaaatagagaaatagcagaaaaaatgcaaatctcaataaaaacggtagaagctcagataactaaagctttaaagttaataaagaacttcttggacgaaaaatatatctatcttttttaaaaaaaactcttttttgaataagggttatttcattttgatgtgtcatacggttgtaaaaagctaaaaagacatacgaaatgaaaaaagaaataccctggaatctaattattcaaaagctgaaacacgatattacagctgaagaagaacacgacttgaccgtgtggttggctgaggataaccatagggtaatttttgaggagttacaaactttgtggcaaaaggtgcaggaaaatgctattaattacactcccgatacaaattattattggaaagaattatcgaaacgaatgaagactacagaggtaaaagctgaaccttctgttcataagactcgttctgtatctttcaaacgctatgctgctgttgcttctgtttttttgcttatagctctctcttgtacattatatataggtataaatttgggtcgcccggaatcgggcactcagatttataccaacttgagtggtaagtcaaaagtttatttgtcagatggtactcaagtgtgtttgcataccaatacttctctttccttaaatactgactttaatgataattcacgtttggtcaatcttttgggtgaagcatattttgatattaagcatgataaagatcatcctttcgtagtggagactgaaggtatgaaagtggttgtacatggaacaaagtttaatgtaacttcgcatcctgactctgctaatacatatgtggggctcgtggaaggctctgtatcattggagacatctaaagagcatcgtcttatgcaaccgggtgaaatggcaacatttaataagctgaacaatgctctgtcaattgaaagaggagatgttcactttatgagttcgtgggctaatgataagattatattcaaaggaaaacctttaggatacatttgtcggtttctttctaagtggtatagtgtgaagattaatctgtctccatctttgtctgataaatatatttatagttttactttacgtcatgaaacattagaggaaattgtacgtattatggcacgcttgaatccgttagaatacaatttcgatgaacataatgtgttaaccataaaagaaatatctagtactaacccttaaaaatataatgcctatgaaacattgatgatataaaaaaggccatctcaaaaatcattttgagacagcctctcttctacgtgagttaaattaattattaaccggaggaatgaataaagaatttggtcgttctgggcatttattccccactagttaactttataatctacaaaaatatgaatttaaagaaatattctgcatttattttaatgcttttttgtacaacctttctaatggctcaaacagaaaagcgtttttccctttctttctcaaatattcctctatcagaggctatgccgaaagtagagaaagccagtggctatacatttttttataatcccactgaagtcaatattaaggttaaagttagcctttccgtacagaatgaaactgttcgtaaggctatggataaaatgttgaatccggttggaatcggttttgagataacaaattctcaaatcgtattgtttcctaacaataagaagaatacagaaacacaaggtagtaaggtgacagttaaaggaaaagttgtcgatgctacaggtgagccgataattggagcaaatgttgtagaaaaaggtacagttaatggtgtaattacagatattgatggtaattatcaattgagtgtttctaaaggtgcaagtattttagtctcttatattggctatgttccacagactataaaggcaggaactaaaactgaagtttgtttggtggaagattctaaaacgctggatgaagtagttgtagttggttttggtactcagaaaaaggtaaatttaactggtgctgtagcttctgtttccagtgaagctcttgcaaataaaccagttgcaaatattggtcaggctttgcaaggcgtacttcctaatttgaacgtttcagcaacaagcgcttcccctggggctgttccttcttttaatgttcgtgggggtacttcaatgagccaggattcaaatggcaaatggcaggttgatgaaggtagccctttgattttggttgatggtatacaaatggatgctacttatcttaacatgttgaatcctaatgatattgagagcatttctttattgaaggatgcagcttcagctgccatttatggtgctcgcgctacatatggtgtaatgttggttaccactaagtcaggtcaaaaagaacaaagacctacagttacttataattttagtatgcagtggaatactccatcacatcgccctgatattatggatgcttatacattgcaattggccgagaatgaacgtacagaatggactggtaactctgtctcggattggagtatgcagctgttggaagccaagaaaaaatggatggaaaatcctacagcagaaaatgcttggatttatcagcagggaagtacatcaaaattctcatgggtctcaagcatgaatccgtttgaagaagttgtaagagactggacaccattgcaaaaacatacagctagcattagtggcggaacagcaaaaagccgctattatttgtctttgggatatcagcatcaagagggaatgtataaaataaatacagataagcaaaatcgttttaatggattgatgagtattgattcagaaatcaccaagtggtttaaagtcaatgccaagattagttataatgtctctaatttggatgaaccatacataaacccacaaaaagggtccttatggtctgctatgatgggagaaccggaacgtaatgtgtgtgcaccggtaaaaactgccgcaacagacccgctaggagagatgtggactgataatattataggttggttagcttatggagctacgaaagaaaccaaacgtactaatgcggtgttcagcatcaatcctactataactttgatggatggtttgagcttgaagggtgagttctcttatcgtccgaatgaatactattacaaagaagtggttccaactcgtgagtatgtagtagataattggacatctacagtgaagactcataccgatccttctagtattttagaacaagtaacccattctgattattatactattaatgcttatgctaattttgataaaacatttggaaaacattatgtgggtgctgtagcaggttttaatcaggagtggtatacttatcgttacacaggagcgaaagctcagggtattttgactcctaatatcccagtgataaatgctactactggcaatcaatatgcttatgatagtgcagaacattgggctattcgtggagcttttgctcgtgttaactatatttttaatgatcgttatctgtttgagttcaatggtcgctatgatggtacctcacgtttccgcaaagaagaccgttttaaatttttcccttccttctccgcaggttggagagtttctgaagaatcatttataaaaaataatcttacttggctggataatttgaagttaagagcttcatggggatctttgggtaatcagaatgtttctaattatgtatatattcccgagtatggtagtgtaggttttgtaaattgggatatggggggaagccgtccaatgggaatttctccttcgggactgatttctccaaatttgacttgggaaacagcgactactattgacttcggtattgatgtggctttattggggaatcgtttagattttacttttgattggtattctcgtcgaaccaaagatattttaatggcaggtgataaatatcctagtgtcttaggagcatcggcacctaaaaagaattcaggtatattgcgtacgaatggatgggaattgagcctgaaatggaaggaccgtttggctaatgggataaattatgatgtaagttttgtattgtctgactatataacaaaggtagttcgctttgatggtaatcctaataaattactttcttctttatatgcaggtaaaacaatgggtgagatttggggatataacagtttaggtattttgcaagaagatgattttataacagatgaaaatggaaaacaaatattacaaggtgcttcacagtcagatctaggttctacatggtatccgggagatcttcgttttgaagattatggtggaaaagaaggtgatgatgaacacagaagtagtgtaggtgcagatggtaaagtttctacaggacagaatactatttataatccaggtgaccgtaaagttattggtaacagtactccgcgtttccgttttggcttaaatggtaatgtttcatggaaaaatatatctcttggtattttctttcagggagttgctaagcgtgatgtttgtataacagatcgtgctttatggggaggaaataatacttccggaaaccgtgacacttataataattcatggcgtcctgaccgtaccaatgcgaaatatcatatgtatggtagaactcagaattcaagcattgcacatacaggaaatttgtacaatgctgcatatattcgtttaaaaactttgtctttgggctatagcttacctaagtcatgggttactaaagtaggaatgaatagtgttactttgaatctttctggttataatttatttgagatttcaggtgtgcctgatgtttttgatccggaatcgatttcttcatcttacccgatgatgcgttctgtatcagtgggtgcacagattaatttctaatttaaaaaataaaagattatgaaaatgaaaaaatatatattggcgttgggattagtctccatgcttataggatgtaatgatgattttatggaacgttatcctttggataatgtaacagatgaaaatttctggaagacagaaagcgatttgaaactttatttaaataaactctatcctgcttatataaaagggcatggtgatggatggtcacaagataaatatattactccgcttccggttacaggaagtcccttggcttatggtgatttttattcagataactgtgtacgtacaggtagtgaaccaaaagaattggcaggactaaataaaattcctacaggagcaggaagtggtggatggagttggacaaatttacgaacgattaatttctttttacaacgttatcaacgtagtgaacttcctgcctacaaattggaacaatatgcaggtgaggcttacttttttaaagctcttgattattataaaaaagtattatttttcggtgatgtgccttggttgacacgcgacttaaatgtagattcagaagaattgtatgctccacgtaattcacgtgcagaggttatggattctttgttaatgtgtattaataagtctgttgctggtttgcctcaaaaagggaaagaagaaagtggtcgtttaaataaagatatggctaatttcttgaaagctcgtatttgtttgtttgaaggtacttatcgtaaatatcataaagaactgaatttggatggaactaagttcttacaggaatgtgtgacagcttgtaaggaactgctgggcaaatattctttatatacagataattcaggagaatcttattggaagatgtttacagcctatgatttttcaaataataaagaagttattttaggccgtacttatattgaaaatgaatttggacatgcttttcagcgttattatgatcaaaataatagtaatcgtcaatcaatgggagcaactagaggatttattgatgaatatttgtgtattgatggaagacctatttatgtaggtggttctgaaggtaattatgaggaaaatccaaattttgaaggttatggtatgtggagagagttggaaaatcgtgaccctcgtttgacgcaaactatttgtcgtcctggagaacatgttactatttatgaaggtggtattgtttctttggacgaaaatggtattaattatccgaagattaattataacacaaatggttctactgtaactggatatcgtgttattaaacattggatgggtgacatggaagagcaagaccgtactaccaatggtatccaggctgctattgagttccgttatggtgagttgctattaatgtatgctgaggctaaatatgaactggaaggaactttgtcacaagcagatgttgatatgacaattaatgctttacgtgaacgagccgggtttgattttgtaaaatatccaacctcaaaattggtggtaggacaagaaccggcagacccacgtttggataaaatctatgcagagaaattggactatccggttagtccgctgctgcgcgaaatccgtcgtgaacgtcgtgtggaattggctatggaaaatcatcgttatgaagacctgatgcgttggaaggcaggtaagcttctgaccgtgcctttgcgtggtatgcggatgactgatgaaatgctggaattatatagtggaaaatatgagcagaaggatccaagtaagccgggagctgaacgttttagtgcaactaaagccactgtagataaagatatatttttagatgaagatggatttattatctgttatccgaagagtccttataaatatacaataaaaggaaccctgccatgggaagactatcgttatttatggcctattcctcgagaagaaataaccatgaatccacagcttgagcaaaatccgggttgggaagaggcagagaatgataaataaattcattaaactttttatcgtaaaaagatgccttgtacctcttacagggcatcttttttaatcatttttctttttaaggacaatatgtgtaggtaatggcaacaaaaatagtaagtcatattcgtttgcctttgttacttttgcatagtcttcatagacaatcttaattataattcctttatttattgaacatgaaaaacaaattcttaaagactttcatcttattctcattattggcagcaggagcatctgctcagcacagccataaattattacctgccgaacaggaaattcctttgaactatggtgccgatcgtttgggtaaacgttatgacgcggatatgcagaaatttcgggacaaccgtttgggcgcttttatccattgggggctttatgccattcccggtggtgaatggaacgggaaagtctatccgggtgctgcggaatggctcaagtcatgggcaaaagttccatcgggcgagtggctggagttgatgaaacagtggaatccgacgaagtttgatgccaggaagtgggcaaagatggccaaggagatgggagttcgttatgtgaagatcaccaccaagcaccatgaaggcttttgcctctggcctagtaagtatacagaaaacacagtggccaataccccatacaagaaagaccttttgggggaaatggtaaaggcgtataacgatgagggcattgacgtacatttctatttctctgtgatggactggagccacccggactggcgttatgatgtgaagacgcccgaggacagcgctgctttcagccgttttctgacgtttacggataatcagctgaaggaacttgcaaccctttatccgacggtaaaggacttctggtttgacggcacctgggatgccagcatcaagaagaacggttggtggacggcccatgtggagcgtatgctgaaggagatgcttccgggcgtgaccatcaacagccgtttgcgtgccgatgactacgggaaacgtcattttgacagcaacggtcatttgatgggagattatgaatccggttacgaacgccgtttgcccgacccggtgaaggacttgaaagtgacccgctgggactgggaagcctgtatgacggtacccgaaaaccaatggggataccataaagactggtctctcagttatgtcaagactccggtggaggtgctcgaacgtatcgttcatgccgtgtccatgggtggcaatatggttgtcaacttcggtcctcaggcggatggggatttccgttcggaagaaaaggaactggctaaatccatcggtgcttggatgaagaagaatggccaatgcatttatggttgcgactatgccggttgggagaaacagccttggggatattacacccgcaaggggtcggatgtttacatggttgtctttaattgtccttattcaaagcatctgacggtgaagacaccgaagggcacccgggtagtgaaagccacattgctgaatggaaaatcggtgaaggtggttgagacggcacggaatgagtataatgtggatatgcctgcacaggaacccggcgaaccgtttgtcatcaaactgcagataaaagaagcagccggtgtcgtggataaatatcgtgatgctttaacctgatgaaaaagatgaattatatgtataagttgtgggggacagcacttgccgtgctgttctccgtttccgtttcctcccagattccttttactaaggtggaaacgaagaatatgatgcgtaaagtggcggattggcagatagcccatcccaataccggccatgaacatgatgacgtgtcatggacccacgccgtcctttatgcgggaatggctgactgggccgaactgagtgaaaaggaagacggttatgatttctattaccgctggctgcttcgtataggcagccgcaaccagtatcagcttgggtcatggatgtatcatgccgattttatcgcagtggcgcaggtgtacctcgatttatataataaatacggtcaggaaagaatgatctggcacacgctggcccgtaccgattgggtgatcgggcatcctgcaaaagggaatttggagctggactatagccgtatcgagagcctggaccgttggtcatggtgtgacgccctgttcatggcccctccggtgtatgccaagctttatgcgatgaccggtgataagaaatatgttgattttctaaatcgtgagtaccgggccacatacgatttcctgttcgataaggaagagcatctcttctaccgcgattcccgctattttaataaaaaagaagccaacggcaagaaagtgttttggggccgtggcaatggctgggtattgggcggactgagtgaaatcttgcaggccttgcctgcaaaggacaagcaccgccgtttctatgaggacctgtttgtcactttgtctgcgcgcgtggccgagttgcagagcaaggacggctactggcatgccagcctgctcgaccccgaatcttatccttctcccgaaaccagtgcgaccggtttcattgtttatgcactggcatacggcataaacgagggcttgttggataaggataagtttactcccgttgtggtgaaaggctggcaggctatgcttgatgctgtctctgcggaaggtaagctgggctatgtgcagcccatcggggccgatcctcgcaaagtgacccgcgagatgacagaggtgtacggcgtaggcgctttcctgctggccgggaaccagatttataagatggcacaatgattgaattctcaaagtttaaacgaatatttttgtatagatgaataaattagtaagtctgttgcttgccggtctgtttgtttgcggtagtggcgtcgcccgcgatgtcacctctttcaacacgggctggcaattcaagaaaggccctttttcagccgatgcgatgaaggcggcttcccaatgggagggtaaatgggaaacagtggaaatcccgcatacatggaatgcccgggatatgcaggttcggtataataatttctatgaaggggtgggctactacaagaaaaactttttctgtcccggagacttgaaagacaagcgtgtgtttttgcgttttgaaggggtaggggcctgttcggaagtgtatgtaaacggcaggttggcagggacgcacaagggcggctattcagcttttgtggttgaaatcggcccttcgctgaaacccggctcggataatgaaatcgtggtgaaggccgacaaccagtcccgtcccgacgtcattccggtgaaccatgtcctgtttggcgtttatggaggcatctatcgtccggtgtggctggtcgtgaccggcaagagcagcatcgtcgttaatgattgtgcttcctccggcgtttatatcactcagaagaatgtatcgaagcgttcggccgacattgccgtaaaagtcaaattggataacgccgcgttgcatcctgttcccgtggttctcgaaaacacgatttacactcaggaaggcaggaaggttgcttcccaaaaacagaatatcgagttgactccccacggcatacaggcttgtgtggctaacttcaagctgaaccatccccatttgtggcaggggcgggaagacccttatctttataaggtggtttcgcgcctgatgcaggatgggcaggtgattgacgaagtggtccagcctttgggggtccgtaagtatgagattatagccggtaaaggtttttatctgaacggagagaaatatccgatgtatggagtctgccgtcaccaggactggtggggcctgggaagtgccttgaagaatgagaaccacgacttcgacctgtcacagatcatggatgtgggtgccaccaccgtccgttttgcccattatcagcagtcggattacttgtattcccgttgcgactccctggggctgattgtctgggccgagattccttttgtgaaccgtgtcaccggttatgaggcagagaatgcgcaaagtcagcttcgcgaattgatccgtcagaatttcaatcatccttccatctacgtatgggggttgcacaatgaggtatatcatcctcacgaatatacatcgcagttgactgccgctcttcatgaccttgccaagacggaagatcccgaccgctatacggtttcggtgaatggttacggacacatggaacatccggtgaacctgaatgccgatattcagggtatgaaccggtacttcggatggtacgaaaagaaaattcaggatattgatgcatgggtggaaggcctggaagagaaatatccgtacgagaaactgatgctgagcgaatatggcgccgatgccaatatttatcatcaaactgaatatctgggacagtcccttaactggaccaagccttattatcctgagactttccaaacaaagactcacgaatatcagtggagtgtaatagccaggcatccttatatcattgcttcctatttatggaatatgtttgattttgctacgcccatggctgaccgtgggggcatccccggacgtaacatgaaaggcctgatgactttcgaccgtaagacgaggaaggattcctacttctggtataaggcgaattggagtaaggagcctgtcctgcacctgacccaacggcgcaatgtggatcgtgaaaagcaggaaacttcggtaacggtctactccaatatcggcatgccgaaggtctttctgaacggtcgggagctgcaaggcgtccgtaaaggctataccgatgtgcactatgttttcgaccatgtaatgctgggtgacggaaagaataggctgaaggctgttgtgtcccgcgatggcaaagagtatacggatgaaatagaatggaactattccggcgagaagaacagaggtacggaagcctacgagaacaagaacgagcatttcggcctgtagagtgagtgtcgttttaaactgctttcacacgaattggaatgtaatgtattgtctgccagctgtttattgtgaaaggcgagcgttatatgtgtgaaagcagatttcacaaacttcagtcgggcagagacttgtgacaactttctttcaaaaaaacactttcaccttttccgaaaagaccttggaattttcggaaaagaaggaagtgttttttaaaaagacttccttctttttgggaactttttacttgaatcgtgaagtatctaccgcttcatgttttttttctttgtaacttccgaacttatagctgaaagtcagcataatatgacgggaatagctattattgtgcatatccatatactgtcctcggtttctcaatttgatatctatatttccttgcatcgaattgaatatatcatcagcttttagcactaaaccggctttttgattggcagagttccaacgtattccggcattgacagcccatacatgactcagtgcatagcttccctgaatggagggactcagatagaggccggtcaactccatacggatatcgggatgattaaagagagtgacattgttttgcagtatccctaggcaggtccatttgctgtggttaaaagaaatatcgaaaaaattgtcacatttggcttgatgatattcggcttgaagagtagcgcgtccctctgctcgattgcctattttgaatgggatgatagctgttgctgagaagctctgctgataatcccaattcaatgttttataaatcaaggccagccgttcggtactttgataggccagttggtcgaacctgtggagttcatggtcgtaggccatgctgaaaatatatttattcttcaggatataattcaggttgagcgaataatctgttgatggcttcagcatcggattaccctgaacttcttcgtagccactgatatatccggtgctttcgcttaaatcccagtaatcgggataagtcttgtccgaagtaaacgagagttgcaggatatgtgcgggctctaccacataagtcactgctgctgttggataaatcgaccaggcatgataattgctcatcttataatactctccggttacggaagcattgaatgaaaaccgttctcccatgcttttgctgaatccggcgtataggtcacaggtgtattccttgtaacggttgtccgtatttagttggtccatgccggtagtgccggcagggtgataaaactgggtgttgtggtcgttgacataggtcaatgaagctccgtagctcagcgtgcccatattgtttatggcatgctcccggtccatgtatattttccagcggtctatgttttggccgctcgtgatttggaaacggctggtgttttcttctctgttcttattagtaaaatcctgattgctttccgaccggtaagaagtatagttcactccggctttcagtccggcaggcgacgcatagtctagtgccagattatgcatttgcttgttagctttggtgcgattgtcagatgtggcaaagtttccatcagaaactgtatgacctctttggtcgggagtaaaggcacttgtataggccagactgatgttactttctttattggtcttatattcggcccctacgcgaatatggtgcgtcattcctttattgtcaatgattccttgttggcggatatcatatatcttgttgttcagggtatggcgggaataggtgttcgtcttttgtctgtgccggcggtattgagtgttatacagaaggtctatattccatttcggatgggtatataacaggttgagaccaccctgtgcaccattcttgtagtcgtgcaggtatccggcttttacttctcctttcagtccgctttctccggtacggtatcctttcagaatcagattgatggctgctcctctgacatggtattgaggaggagcgctatacatcacttcggctttttccacacgcgaggccggtgtgtttttcaacagattgatcagttgctcatagctcatcgtagttggtttaccgtttaggataatgctgagtccgggtgttcctgccagtgaaagattaccgttgatttcctgcacaccgggaagttgttgcagactttcgtaggcattgttcaccaccttatgttcgatcagtcgtgacaaatcataagagagttttccttcttctaccttcacaagcggttgctctccttttatcaccacttcgtccagtgtatagtctttgcctgacaggacaatcgtgcctgtatcactacccgttccttcttgttggcgggtggtgtatagaatgtgttggaatatcaaccgatattgtgccggttgccggttgaaccggaagcatccggtactgtctgtgatgagggcatctacaaaagtggagtcgatgctctgcaatattaccgtggctccatcaatgggatgtgcttcggcgtctgttactttcccgctgatagtttgtgctgtggctgttcctgccaaagagattagaaataataatgtgccgataataatttgctttttcatattcgttggtttttaatattttctttaactttgacgaaacaaaagtagagctactttttttcatacgtggttaatggtaggttaatatgaatttgaaggaagtaatgatatgaaaattaagcatatacgatggatggcaattgttggtttgctggctattttcggcttgcaatatgtttggcttgtcaatacctataagctagcgaaagagagcattcagtttaggagcaatgaagttttcaaagatgcttctatgcaagaactcttccatcgcatggaggagctgaaagcggagttgaaaaagaaatatgcagttcaagataccattgtaggggtgaaagtggagctggataatgatcatgatgttgctgaaagcgggattttgaatgataatgccaatcaatggctgatgtctaatatgtatgtttctatccaggaagctgtggtaaagaaatatgaagtatctgtttctttggcagatttggattctatctatcgggcgaacctgcttatggaaggtattgatgcagaggtggtttgttgtattactgattcttcgggaaatattctcaagagctcccgagcgttatggatgagggggaatgatatgctgaagactcggttatatcccactaattgcaagcgtacggaaaatctgcaggcttttattgttaatccttattgggttatctttcagaaaatgaccttgctattgattgccactgtgataatgatgatattgattatcggttgtattgtctatcagattcgtatcattgcccgtcaaaataaaatagctaagatccgcgaagatttttcttatgcgctgattcacgatatgaaaacacctatcagcagtattttgatggggattcaaatattagagaccggtaagttggatactcgtcctgaaaagcgtgccaagctttttcatattttgaaagatgaaagtgaacatctgttagcgttgacagagaaggttttgacactttcgaaattggaaaatcatcaactgaatctttttcgcgaaatgctttcgttacgtagtatgttggatgacttgattgaaaagttttctgctaaggcggacaagccggtacatttcagtttagctcttgaagcggaaacggttgtggcggatggtgagtttctgaaggaagcaatcagcaatctgattgataatgctattaagtattcgggggcttcagttgctattactatctcttctttctgtaaaccggatggcgcggttgtcatcaaggtaaaagataatggttttggtattcctttgaaagatcaaagtcgtatattcgaaaagtatgagcgtgcatcggctacagaacgcagtcggaaaggcggagcatctggtttcggattgggattgaactatgtattccgtgttgccgaggctcatggcggaacggtggaagtagagagtattgaaggagagtatagcgaattttctctttctctgcctcaaaaagagtttttggacagtgtggaagaaaagtgataatggatttggagcaaataggaaaaaaataggagatgaagttatggtaaagttgttgttggtagaggatgacgctaatctttgctacattatccgtggtggtctggaagatatgataggaggttatgaagtgacgactgctgcggatggggaggaggggttgaaaatatggaaagagcaacatcctgatgtgattgtttcggatattgaaatgcctgtaatggacggttatgagatggtgaaacgtattcgcgaactggatggggatatacctattttatttacttcggggcgtgtctcacccaaagatgtggtaaaaggttatgaactgggtgtgaataattatatcaagaaaccttttctggctgaagagttggatgcgcatatcggggcacttctgaaattgaaacagggggtaagtgccaaaaatgagagtgaaacgtatagaataggtgagagctatgtgttcgatgctgctcatgcgatattgagatatctggtttcgggagtggagaagacgctgacagaacgtgaagctggtctgctgaaaatgctttgcgtcaagatgggagaagtggtgaagcgagaggttattctttctactttttgggagaaagaggatgattattttgcatcacgcagtttggatgtttttgtcacacggcttcgtaaattgttgattgaagatgaaaaagtgcagataaagactttaaagggagtaggaatcagtttggtttgtttaccgtagggggaggattggaatccccctccctataggtgaataaaaatattatcggtagatttttagaacttgtaggctaccccgatattgaatacgccttggtcaaaatcactgataatttgatatttgatttcgaagtttatcatccattgtgagttaaggtcgaattctgcaccggctcctaaattagctccaaacttacctttatttccacttaagtccattccatcgatttcacctaaatcccagtgccaattagtgtaggtcaatccgaagagagggtaaagacgtgcaccgcttgcaacaggaaagagatagtgagcattaacgttgaagtcgaacatatcaaccccgtcatttttgaagaaataatctacggaaggttccagcctgagtgcatcaagaatgttgtattggtatttaacgccgatacctacactttcgatttcagtcccataacctaaatgaaagccaaatgcttgtttgccttgttgagcatgagcaccgcatacaaataataccagcatgcaggcaagaataaataattttttcataatcaataaattagaaattaataattagtttgtttttgggttattatttatttgtctcatttatttcttcatctttaaaccaagaagcatacatcagataaccgtttgcaatcttttcattcagttcccgactttgttcgggcggaatttttttgatgaacttggcgggaacacctgcccaaagacttcccggttcgatgatggtattgctcaagactagggctccggcagctacaatagctccttcacctactatggcgtggtcaagtacggttgctcccatacctatcagcgcaccgtctttgatggttgcaccgtgaatggtaacgttatgtcccacagatacattgttgccgatttcgactaccgatttctgataaagagtatgtagtacgcttccgtcttggatattaacacggttaccgatacggatggcattaacatcgccacgcagtacagcattaaaccagatactgcaatcgtgtcccattataacatcgccaatgatggtggcgttatcggccaaatagcagttttctccaatttgaggtgtaaatcctcttaccgattttataagtgccataattctttcttaacgttttaaaggtgaggtcttttcttttaaccactcctgctcttctttattcaatagaggacttagccggctatataccattttatggtattcattgaaccagttgatttcttcgtcggtcaacatatcggtcacaatggcttctttgtcgatgggacagagagtaagcggttcgaatttcatgaaagagccgaattcactctccatggcaggcactatcagcaacgtgttttcggtgcggataccgtgacggccggctttgtaaatgcccggttcgttggttaccgtcatacccggacggagagtagtgggcgtatggttcatcctgatttggtgaggcccttcgtgtacacagaggaaatgaccgacaccatgccctgtaccgtgaaaatagttgatacccgctttccacatggcttgacgcgctaaaacatcaagctgtgttccgcaggttccttcaggaaatacagcgttctgcaattgaaggaagcctttcagtaccaatgtataatctgttttctcttcatcactgagaggaccgagcacaatagtacgcgtaatatcggttgttccatccggatattgtgcgccactgtccagcagtaacataccttcgggtttcaaaggaatatctgtttcgggagttgcttcgtaatgaacgatagctgcatgttctttatatccggcaatcgtatcaaagctgattcctttaaaattcgcttgttcggcacgcaattcatatagtttccggtcgacactcagctcggattcatttccggcaggaactgcctctttcagccacttcagaaatttaaccatagctatgccgtcgcgttccatggcatggcgaaaaccgtttatttcagtttcgtttttcacggctttcagaaggctgacgggagaaggaatttccattatcttatgtccggtgtcaataccgtggctgctcggatagccggcagcattaaaaagtttcatattgagggttggagatacctgaatgttctgacgtacatttttgatgtcgctctctatcttattataggatttaatggtaactccgttctcttccaaataggttttgacttcaggagaaagtttttcttctattatatataaggtagcttccttttgagttatatgcatataactaatgaatacggggttacaatgcacatcgcttcctctcaggttcagtgtccatgcaatctcatccaaggcggatagtaagatactttggcagttatttttgtgtatctcctctctgatgagttctattttctttcgacaggaaagtccggcatatttttcttctaatatgaatacaggttcggatggcaacgcgggtcgatcctcccatatttcgtcaaaagggtcggtaacacttttcacttggattcctttgggagaacaagcctcataaagagattctttaaaatcgattccgtttacccatccgtccattccgatgatgtctccttctttaagttctttaaaaagccattcggcaatagaaggagtttctggcatacgttctttaaataaagttatgtctgtaccctccagttgctcggcagcttgcagaaaataacgggaatccgtccataagcctgcctttttcatagtgatgaccgctgtacctgccgatccggtgaaaccggtcagccatttgcgggcttcccaatgcgaggcaacatactcactattatgaggatcggtggtggggagtataaatgcttgtataccattcccttgcatgaacttacgcaaagccgctactctttgtttaatttccaatttcattgtattgtggtttataataacttaaactcaatgacaaagatacaatttctatgttatttaagataaatatttgcggaaagttttgtaaataaagaaagtatgtgtaattttgcgccgcaatttgactatagaaaaaattagtaacaacataatttaattattaaaaacaatgattgtagtaccagtaaaagaaggcgaaaacattgaaaaagcgctgaaaaaattcaaaagaaaatttgaaaaaacaggtgttgtaaaagaactgagagctagacagcagtttgacaaaccgtctgtaatcaacagacttaagaaagaacgtgctgtatacgtgcagaagcttcagcaggttgaagaataattaattcttgcactttctttgaataattgaattctttttcatatattcgttgctgaattaatgaagcgacgtttcttatgttaatagagccttttttggattatcttcggttggagaaaaactgttctgagaaaacgattgttagctatggaacggatttgaccaaatttgaagagttctttaagagtgttgacgaggagatcgattttactacggtggatgcagatgtaatccgtttgtgggtggtaagcctgatggatggtggatatacttctacttcggtaaatagaaaactgagttctctccgttcattttatcgttatctcttgcggaagaagatagtagcggtggatccgacatttaaagtagtcggacctaagaaaaagaaacctctgccggtctttgtgaaggaagaagatatgaatcggttgttggatgaaattccttgtggaaaggggtttgccggttgtctggataaaatgataatcgaaatgttttatgctacaggtatgagactttcggaattgatcgggttggatgatgcggatattgacttctcggcttctctcattaaggtgacaggaaagagaaataagcaaagactgattccttttggtgatgaactgaggctgtcgttgcttaattatattaaggtaaggaatgaagctgtacctgatagggaaaaagctttttttgtcaagcaggacgggaagagactgtatcctatgaaggtgtataatttagtgaaacggaacctgtcaaaagttgtaacgcttaagaaaagaagtccgcatgtgttgaggcatagtttcgctacttcgatgctgaataatcaggcggagttgggggctgtgaaagagcttttgggacatgaaagcctgacaacaacggaaatctatacgcatacaacttttgaagaacttaaaaaagtgtatgaacaagctcatccaagagcgtaaaaaaggaggtaattatggaagtaagaattcaagctattcatttcgatgcgtctgaaaaacttcaggactttatccagaagaagacggctaagttagaaaagtattgcgacgatataaacaaagtggaggtgtcattaaaagtagtaaagccggaaaccgctatgaataaagaggctggaattaaagttttggccatgaatggagagttttttgcggagaaggtgagcgatacattcgaagaagcgatagatgtgtgtatagatgcactgtctaagcaattgacaaaaacaaaagaaaaactacgcggtaaataaaaaaaatcgctaaaagtttttgagaattaaaataaatatctaactttgcagccgcttaaccctttgaagggtaagagctgcaaagttttagaaataagcctctttagctcagttggccagagcacgtgatttgtaatctcggggtcgttggttcgaatccgacaagaggctcaaaaaaagatgataaaagcatctgttgatctttgaagaaaagttgggcaaataccagagtggccaaatggggcagactgtaaatctgctggcttacgccttcggtggttcgaatccatctttgcccacgctttggttaagactaaagtttttggaattgcggaagtagctcagttgatagagcattagccttccaagctgagggtcgcgggtttgagccccgtcttccgctcttttttgctgttatagctcagtggtagagcacttccttggtaaggaagaggtcacgagttcaagtctcgttaacagctctttgataacgtaattgctgattattaatcaaataaataacaagtaaagctatggctaaagagaaatttgaacgttcgaaaccgcacgttaacattggtactatc

SEQ ID NO: 6649 - DNA, 104846 bp, Unknown
  gut microbiota DNA sequence
ataaatgaagttataattgtttcacaaaagtataaaaaaacaattatccagtagaacattttcgatagttattataaattcagttcaccaatatcaataacccataaaaaagtactccccgcgaatcacttcgcaaggagtacttttcaactaataactaacttgtggtttacgtaatttctatatgactaacttatgatgcaaagataaacgttccggccaactcccgcaatcgcttcatttaggtattttgccaccatttactccctattaataggtatcattcatcataagttcatctttacttcgcttagttctaccaatttatttacaatagcataaatagtcaggccggcaggagaatgtatttgtagcttgcgcgctatgttgcgacgatgggtaatgaccgtatgaatagacagaaagagtttctctgctgtctccttattggtcatgccacgcactacacaacaaattatttctttttctctttgacttaatgtttcttgttcattctcattgtcatcttctgccccaatgtgcatcaaatcaactaatttcttatttaaggtttcaatgtcatcatataatccgactgtttcatcatatccttttagcaaattactatctgtcattgaacaaagcaacgacacacatttaataaccgtttgaggatatgtagctttaaattcgtcgacattgaaccatcctccaaaccccggattcacaatcaacacctcgggccgatgtccttgcatacaattatgcagcccttccatcgaagtaatttccacaggctgaaccggaatatcgggcaatcgcttcaaaactgatatcagtccgctacgcacaatgactgaagtctcagccactgccacatgtatagggtctgtccgtttcattttacctccttttctaaccgaagaacggcgggtacaaacaaataatcctccacacggcaatgtgatgccaaatcctgctcgcagctaaaaatatcaaacaatactgcattcagtaaataatcgttcccaccggcgggataatacttgataatgatattttttaattctttcaatttagcgtctatctgatcatgccgacgtgcaaattgtgagatacggaaaccgctctctctattgcctgcaaccagattctccacataagtaaacacattcatatcttcataatccatgtgtttgcgtacctctgccacatacgcatcaaagaatttcaatataaggaaagcaacttcattttgcaccgaacaatcaatggcctctatcagtttgcggcgtatggtgggtaattgaaaatcaagaaaatagtgatgtgcctgctttaagtagttcatcaaagcatgaatagaaagatcttgcacttcgtcagccatacggttattctcttctgtgataaaattcaccacagccagaaatgtcttgcaatccactccgtttgcccggcatacttcctgcacagtctgatcgccaaagcctaacgagagatcgaaacggctcatcacctgcaacaaagtataattaccgcatatcaggtcactcattttatctgttggcacataattatttgtcttatacatagttatctgtatttgtttctcttaacggctgcaaatttacggaaaagaacaaaagcttgcaatccccattattaggtattttatacggagaacagcagcctcatctcataaacgagggaagactgagccgtttcttactgtcagcctagtccttttaaacggaagattattacagtctccgacagtggaccgtacagtctgccacggtggactgtacagtccgttaccgtagactgtatagtccattgccgtagactgtagtaatccgccttacagacaggcataaccgaaaagatgaaaacgcttagtccggctaatgaaacgacttagggagttcaaaacgtatgcagagtttgaaaaccggaggagacaacatccgatgaaaggtgttgtgccgtcacttgttatttttgggaatttaacatattccttgccagtgcttccaaaaacaaaaaaagagctgctccggcataaccggaacaactcttcactatataataagatatcaattaatatacttcaactttagcagcaatcgctttacacttgtcacgaagtgcatccaagtcacttccattcggagcatagcataccacaactcccatgcggcggttaacctttgtataaggtttaccgaaaatacgcaaataagtattggtttccttgcatacttcctcttcgccacgataacgcggctgctctttgccggcaatcggtgacaaaataacagcactggcacctatacgttcctgagtaatttcaggaataggcaaacccaatacagcgcgtaaatgaagttcaaattcattcaaattttgagttcctgccaatgtcaccataccggtatcatgcggacgtggagataattcagagaaatatacaccattgtcatgactcaaaaagaattcaacaccccatattccggcaccggtcaatgcttcagtaactttagcagccatgcgctgtgcttcttccagatgctcaggagcaatatgagcgggttggaagctttcgcgataatcaccgcccttttgcacatgaccgataggaggacagaacagtgtaggaccatttttctgagtaacagtcaacaaagtgatttcactgtcaaatttaataaattcttcgataatcagctccttaatgtcaccacgactaccttcacaaccatagtgccatgcctgttccagctcttccgcactcttcaccaatgactggcctttacccgatgaagacatcaacggtttgaccacacaaggaaaacctatttcttcggcagcctctttcaattcttccaaagacttggcataaaaatacttggcagtctttaatccgagttccttagcggccaaatcacgtatggccttacgattcatggtataattcacagctttcgcactaggtactacctgaatgccttccttctccaaatgataaagcctttcagtacgaatagcctcgatttcaggaacaataatatcaggcttatgcttagccacaactgcatccaatgcatcaccgtccagcatactgaatacttcaaactcgtctgctacttgcatcgcaggtgcccctgcatacgaatcacaagctactacatactgtcctttacgtttcgctgcaatgacgaattcttttcccagttcgccggagcccagcaataaaatcttctttgtcataactatctatctctttattttgaatttcccgtaaacagcaagcagagaggagtgtgtcagaacccaaccgcctgtccaatcgtcagctgcaggggcaggatttgcctgcccgaagacacaaagcaaactgttttcgggcgaacggacatcgtccctacgaatcaaacgacagcattatccacgttttgacacacccccttccgcttgcaaagataatgtatttttaaactactgatatatcaaacagccaataaatggtgtatttgaaagaaaaaaccgaagccggcagacaaagctataaaccacagcacgataaagataatccgggtaacagtagacatgggttgccaaccaccgaaatgacgcatcaggatatgtatcaatccgatgataggaataccaataaccaatatgccggaaacagccaagccgatagtaactgtaggagatgctccggcagcattccaatccactgccggcaacacttcgtaaagaacagccggtgtagcagcaatcaatccggttgccaccattaacatggcgaagcataccacaaatatcacaaagactataggagcgcagcagatagccaaaacaatcaatataaatttgattaatgcacctgccacaccgacaattccctcacctatccgctgcaacgcactgtgaggcttgcccgaatgaacgtattcatttactttctcaaagttatctgtaaccgtccttcctatattctctacattgattttcgctccacgcattgccaatttttcaggtacggttcgagccaaaggaatgacaatccaggcgataatatatgctatgacaaaacctttcagagagattcccaatatcaagaagattattcgtacccatgtgggatcccaaccaaagtaagcagccaaaccggatgccacacctcccaatactttattgtccgaatcacggaacaaccggcgaggtccttttgctgtctgcgaataagtgcttccatccttcgatgtttcccctccaccgtcagcctcatcacccaagtcttcgggcttacccatctgagcaatgatttcctctacatcttctatcgtaatcacctgtttcccatctcttaaacggtcagtaaacagttcagagatacgcaattccatatcatgcactatttcttccgctccttcttcgcggcaaaaatgtatccgcaagttacttaaataagtatccagcaatttatatgcatcttcatctatatgataaacggtgccacctaaatttacagtcagagtctttttcattgtatcctgtttttaattgtttcttaaatggtttactgtatccgaaagctcatcccacgcattttccaatccgctgagaaaagtttctccttgtggcgtaagccgataatatttacgcggaggcccctgagtcgattccacccattcgtaagaaagcagctcatcgtttttcaaccgggtaagcaacggataaagcgttccctctaccacgatgagccgggcttctttcaatttcagaataatatccgaagcatagaacggctccttgtgcaacagcaataggatgcaatattcaagcattcctttgcgcatctgagattttacattatcaacattcatatcctatagtactttgtttgacacaaatatatgtattatataagtaccttgtattacatagtacttttattttgcgtattttaactgaaaaatcaaagaaaaggaaaaggaagaaacaagattaggaaggaaagacttatatttgctcctcgttaaacctataaaagtacaaagagtatgtttacgatacggaaagcaactacagaagatattccattgattcacaaaatggcgcaggaagtatttcctgctacctacgcagacattctttcccccgaccaacttgactacatgatggaatggatgtattccattacaaacctacataaacagatggaagaagaaggtcatatttactatattgcctttaaaggagacatacctgccggctacgtttccattcaacccgaaggagaagatttattccatctgcagaagatttatgtactcccttcttttcaaggcaaacatttgggaaagttattgttcgagcaggctgtaaaagcaattaaggagattcatcccacaccgtgcgaaatgcacctgaatgtaaaccgtaataataaagcgctccgattttacgaatacatggggatgaagaaagtagacgaaggagattttgctatcggcaacggatattatatgaatgattatataatgggactcactatctgagtccctcatttcactactttacgcttcatatcacggatgatatctttatcttccggacttacccgaaaagattcggttattttttggagcgctttgttgtaagtgaagtcatccaaacgattttctttcagcaacagcatcgtttcttttggaaatttcacataacagacagaaagtgcccaagccactgccatcttcacataatacccttcgtggtcgatacgattcatccattgcaatacgttctgtatatagtccgcatcaatgtaatgcgccatcgccataacgaccccgaaacgaatttcatattctttatccgactgtatccatccttccagaaactgccatacacgctccttattcctgtcaacaaaccgttgcttacccgcaaagtcaaaggtatcacatacagaccagctattgataagggatacgaacccagaaaccaatgaaagatattcttccacatcttttattttcaggcatccaatcaccatgccttgaagcatgcgttcttccatataaaaagtatcggccgattgcagataagcctgccaatcatccttggctatttgacccgccaattgccgaagggccgggacacggacacccaatacattttcaatgccaggatggagggactcggtaaactttttattaccttctcccgctaatcgcaacaaattctcttttatggttaacccgttgatacaatattcattcatcataacgatttattcagattataacaaacttccttccagccttaataaaaattcctttttgtccactccggccgcatatcctaccatttttccgtccgtacctatcacacgatgacagggaaccactatcaataatggatttctgttattggccatacctacggcgcgcacagctttagggttgccaatggctacagcaatctgtttatagctgcgtgtctctccataaggaatatcacggagaacctgccacacctgcttttgaaaatcagtccccttaagcgacaaaggtaaatcaaaaactttacgtttgccatccaggtattcaacgaattgcttatacgtcctccgaatcaattccgactcacgtttctcacctttattctcggaataacgtcccacattgatggcaataacagcatcgttctcctcacaaatggtgagaagtcccaatacggtttgatactgataataattcataatgatttacctttatataaatgcaaaattattcatcccaaaccaaataagccgaaatcagccaatggttcagtttatccccatctacttcctgagcttcgggaatactaatcttaaaagtatgtttgccggctttcaaatcgccaagcatcacttcttccggtactacatccgaacccgggcaccagttggagcgcgataaatccgatgagcccaatggttcttctatttctttttcttcataaccattcttacctatataagaggaaagccgcttaatcagccacactcctgtccccggattgaaacgacggaaagaggcacaatcatcccgccatggaataaaatcgagcacattctcgccatctaccgaaacaatattgcgtttcttcacaaattcatctccaccgctatgaccgccatgaccggttacaatatatttcaaacggacattctttgcatgacgaggcagttcaaaatccattgccacatctttacgggcaaatatatcgggataagtctgaccgatataataaacagtgtttatcaaaggctgtacatggcgcttgggtaacgcatcgcaacttatcttactctcttttacctcgatatccagaccgacaacatatccttcggctgtccatgtatcaataaagataccgatataggcttccttctccaaagcaggataaaggtcggtaatgtcttgttcccaaaccacattctccgcccattcggaaatataaaccggcttgcgtttggctcctatctcattgtcttttttactataaaagcctactccaaacggagtcataaagcgcatcagctctaacgtaggcacatagtccttacccggaacaatgccaatcatattttcatatttcagactgtctaccggcggaaaagctgcctttccttgcgcaatgctcatcaagttgacaaacgactctttgggcaatgcaaaacaagaaccggacttatcccaacgatcgccattggaagccaaagtaagacgaagtttcacacgtacattccgcttataatcaggcaaagatatctttttaagaataatacgcccattcaccaaacggataacgccatctgcacttgccggagtgtaattggcaaatgaatccggacggaaacagatgttcgttttatcaaagatttgaatttgggtgtctcccaaggcaggcaactccttatgcttagccgcattagccggcataataaaagaggtaaccaatgcaagagacgcaataaaagtcagtagattatttcttctcatatagctgtatcaggttgattaatattatccattccaaatagggagtgtgccagaatgttgataatgctatcatttgccaataggggcgagatttgctcgcccgaaaacagtctgctctgtgtattcggacaggcaaaccctgcccctacagttaacgatttggcaggttggtttagttttgacacgctcccttacctaccaggcatcattataccggaaacttactccgaatcatcaacagtttattgatgttgttcgcgcaataagtcattcaccgtcttcaccggattaaaagtacccaaaggaacctctacaaagacagtactccaatcactcattgcaccattccaaagtcccggaagctccaatgctttcaagtccttgccatttttcgacttatacgaaatgaatccggttgccttatctacataattcaccaaatcaaatttacggcctttatagtcacgtacggcacaaaccaaatctaccggattaaagtgagtacccttttcaaacatggctttcttttcagcatcattcatatcaatctgagaactttccaaaatctgcaaagatactgttccgtcggggttatatgcaaggaacggacctccaccgggttctcccacattcttcaccataccgcaaacacgcattggtctattcagtttcttacgcaaatagataaccagctccgcatcttccaaatctttaatctcattattgcgacagcataacttctgctgaacgaaacgaatgatttcttccaattgttcatgattatatttgccgccatccaacaattccaaatattcaaacgcttgcttttgaagagtcaccaataccccggcaatcaatttcttgtaagcaacggtttcgtccttcaagcggtcgggcaccacattatcaatattcttaataaatacaatatccgcatccaagtcgttcaagttttcaatcaaagcaccgtgaccaccgggacggaacagcaacttaccgttatcacggaacggcttgttctccatatcagctgctattgtatcggtactcggtttctgctccgagaacgaaacgttaaattccaccccgtatttttgagcataagttgctaccttttcatccaccaaccgtttaaacagttcacgatgctcggtagaaaccgtgaaatgcacgtttacttttccggtctttccggctgcatacagggctccttccaccaaatgttcttccaatggagtacgtacaccatcggcataacgatgaaatttcaacaaacctttcggcaaagcaccatagttcagtccgacagcttccaacaagtttgctaccaccggcttataattcttttcagcaatcaatgcatcaatattcttgccggtattgtccaaacaagcggcattcaagtcattataaaaagcgaaaccatgaatatggtcgaaaaacttcttttcaaaatctgttttgggagcctcataatccgcacccaggaattcaaacaaattcttaaacatgcgactggctgccccggatgccggtacaaacttcacaattgttttttcaccctgtttatatgtatcccatgcttccagatattctttcatttcactctctgcaggagccataattcccttatcgatagaagcggcagcgtccagtttcaagaaagggaagcctttttcaaagcaagccaattgttcaattatctgttgctctgaaataccttttttcgctaataaatctttatcttccggtgttaacataagtatatgaatttaaatggtttaattacccgttatctattttaattattcattaatgcccaaaaatacaaaaaaatgccgtaaagccatccaaaaaagaaagaaaaaaactacctttacgccgaaagaaaagatttcacgtgttatggaagaaaaaacgtttttcacagccaaagagcgtgaacaactgttcactctttacaaacggttactccatctatcgggagacaccttacaaaaaaacgactgtcgcaagctcaaaacgcatcttatcaaggcagttgccgaaggtagtatgccacgaaataactttggaatgaaccccatcatcaaagatatgcaaaccgctgtcattgttgcagaagaaatcggaatgaagcgagcttctatcttgggaatcatgttacatgaatcggtaaaaaaccatttgtgcagtctggcatccgtacaggcagaatatggagaagatgtggcaggaatcattcgcggactggttaaaatcaatgagttatatgccaagagtccaactatcgaatcagagaatttccgcaatttgcttctttcttttgccgaagacatgcgcgttatcctgattatgattgccgatcgcgtcaacctgatgcgccaaatcaaggactcggagaacgaggaagcccgccagcaggtttccaatgaagcggcctacctttatgcgccacttgcacacaagttggggttatacaaattaaagtccgaattggaagacttgtcgctaaaatacacagaacatgatgtttattatcatataaaagataagctgaatgccacaaaagcatcacgagacaaatatatcgccgcctttatcgagccgattcagaagaaactggaacaagccggactaaagtttcacatgaaaggacgcactaaatccatccactccatctatcaaaagatgaagaagcagaaatgtcctttcgaaggggtatatgatttatttgccatccgcatcatcatcgactctcctatcgaaaaagaaaaacaagaatgctggcaagtgtattctatcgtaaccgatatgtatatgcccaaccctaaacggttgcgtgactggctttctgttcccaaaagtaacggatacgaatccttgcataccactgttatgggacctgaagggaaatgggtagaagtacagatacggacagaacgcatggacgatattgccgaaagaggacttgccgcccattggcgttacaaaggagtgaaaggcgaaaccggattggacgaatggctgacaacgatccgtgaaacattggaaaacgcagacagtgacctggacgtgatggaccaattcaagctggaactctatgaagatgaagtatttgtctttactccgaaaggtgacttatataaactcgcaaagggagctaccgtgctcgactttgcctttaccatccatagcaagttgggatgcaaatgcattggtgccaaagtaaacggcaaaaatgcacagctacgacaaattctgaatagtggagatcaagtggaaatcatgacatccaatactcagactcccaaacgagactggttgaatattgtgaccacctcaaaggcacgtaccaaaatacgtcaggcattaaaggaaatcgaggcccggcaagtacagtttgccaaagaaaccattgagcgcaagttcaaaaaccgcaaactggaatatgatgaagcaaccatgatgcgcctcatcaagaaactgggttataaaacagttacagaattctatcaggatattgccgacgaaaagttggacgccaataatatactggataagtatgtggagatgaaaaagaaagaaacggaagcacagcaagatatcacctatcgcagtgccgaaacatatagtattcaaactcctgccgatgacaaaacgttcaaagatgacgtattggtgatagaccaaaacctaaaaggactggattttaaactagccaaatgttgtaatccgatttacggagatgatgtttttggtttcgttactatcaacggaggcattaaaattcaccgtaccgactgccccaatgccaaagagatgagagcacgttttgcttatcgtatagtaaaagcgcgatgggcaggcaagagtcagggcaaacaatatccgataaccctgcgcatcgtcggccacgacgacataggtattgtaaccaatattacctccattattaataaagagaacagcatcactttacgttctatcagcatcaactcacacgacggattattttcgggcatgatgacagtaatggtggatgatacctccaaattggaattattggtaaagaaaataaagactgtaaaaggagtcaaacaagtcaatcgaggctgacaaacgtgtttgtataacgaatctaaaacaatggacgaattacagaaaagaataaaaagttttgcctatgcctttacaggcataggcagtttcctgcgtaaagaacataacgcttggattcattgcatagccattataatcgtaaccataaccggatttatcattggcatcagtcgaatggaatgggttgcggtacttctgtgtttcggactggtattagccgccgaagcttttaatacagccatcgaacgattggttaatctggtatctcccgattatcatcccatagccggagatgtaaaagatatagctgccggagccgttttgatatgtgccgttacagcggcgcttgtgggagcaataatcttcatcccctatttttaaaggtgttaattaaacatttatttcactaacttttttctaccttttatatagaaatcactaaattagcagcgattattttaataataaaaattatgaagaagattttagtttcaactctattgttggttatcagtttagtttcttatgcagcaatacaaagtggagaggcagaaattacttttgaaaacacatcacataatttcggtacattctctgaatcaagtccgaaagtaacatgtacattcaaatttaaaaatacaggagatggtccattggttatccatcaggcaattgcatcatgtggatgtactgttcctcagtatcccaaggaacctattaaaccgggagagagtggacaaatcacagtcatttacaatggtgccggcaaatttccgggacactttaagaaatccatcactatccgcagtaatgggaaaaatgaaatgacacgtctttatatagaaggtgatatgcttcccaaagatgcaaaacaataagagacttccctttcaagaactccctaaacagctctcaaaagttatttagggagttcttttttatcggtgcaccttataatataagaaaaaaaggacatttttcctaaataataagacactctttattccctaaaaatgacgtactttgcaacaaaatcaaaaaaatgagaaaaggaaacttattattacttctcttaatagtgtgctttacttcatgcgaaatgcttgaatctcacccttatgatgcacatattacaggcgaacgaggtataaacgcaaaaaactgtgagcgtatagaagaagctatgaaaggcaagaaaacttttcgttttgctatgattagcgacacgcagcgatggtatgacgagacagaaaaagtggtagagaaaatcaatgaacgcggagatatcgactttgttcttcatggtggagaccaatcagacttcggtgctacaaaagaatttctttggatgcgtgatattatgaaaggattccaaatgccttttgtctgtgttttgggaaaccacgattgcctcggcacgggagaagatgtctataaagcaatctacggcaatcccaactttgcctttacagccggaaatgttcgtttcatctgcctcaataccaatgcaatggaatatgactattcacaacctgtacccgattttggattcatggaagatgaattgaccaaccttcccgaaggtattgagaaaactgttttcctgatgcatgtaaaaccgtacgagtttatcttcaacaacaacgtagccagagtatttcaggaatatgtaaagcagttccccaatgtacagttttgcctttatggacacgaacatcaactgacagtggacgatttattcggagacggaattctctactatcaatgtcctaacatcggaaaacgaacatatttggtatttactattaaagagggaactcatgaatatgattatgaagcagttgaattttaagattgtcctattattcctaacaatatatgtctgtccccacaggacacttgcacaaaaagatacattattatatagaacattaatccaagacagtatccttattccacaaaaaagtcaagcaacaatagaagaggaagagggtatcttcacggaagttcccaagcattatcgtaaatacgataaacgtgtccaccgctatcgcagtgcgtgggaagccttgattcccacacacacaaagatacaatatgccggaggtatgggattactttcatggggtatcggatgggattatggaaaacgcggacaatgggaaaccgaccttttattaggttttatccctcgctattcttctcgtcatttcaaaatgacaatgacattaaaacagaattttattccttggagtgtctacttgggaaaggacttttcattagaaccgttgacctgcggactttattttaataccgtattcagcgatgacttttggacggaagaacctgaccgctatccacatggatattatggtttttccaatcgtatccgtacccatatattcttaggacagcgcatccgttttgatgtacccgagaagtatcgcaaattctcgaaaagcattactgctttttatgaaatcagctcatgcgacttttatttagtgagtgcatttaccaatagttatcttactcccttagattaccttcggttatcatttggactgaaatttcagatattctaatgagattataggcatgtttctctaatttttcattatttttgggcatttattgtgataaatttcaaaaataataaaatagagaaacatgaaacaagaacaagaaaagccggtcggattgcccgaaaatgctttccgtccattgaaaccgggagaaaagtatcaccccatcatgtcacccgacagacagtacccggaagtgaatgcatggtctgtcacctggggtattttaatggctatattattctcagcagcagctgcttatctggggttaaaagtaggtcaggtatttgaagcagccatacctattgccattattgccgtcggtgtgtcaggtgcagccaaacgaaaaaatgcattgggtgaaaatgtaattatccaatctatcggtgcctgctcaggagttatcgtagccggtgccatctttacccttcctgccctttatatcttacaagataaatatccagagatgactgtcaacttcttccaaatgtttgtcagctcattactaggaggtattttaggtattttatttctgattcctttccgcaaatattttgtaaatgacaaacacggcgaatacccttttcccgaagcaacagccagtactcaagtacttatctcgggggaaaaaggcggcagtcaggcaaaaccacttttatttgccgggctgattggtgggctttatgacttcattgtagctacctttggctggtggaacgagaatttcacaacccgcgtttgcggctggggtgaaatgatggcagacaaggcaaaaatagtgcttaaaatcaatacaggtgcagccgttctcggtttgggctatattgtcggtctaaaatatgcagccatcatctgtgccggttcattggtcgtatggctggttatcgtcccgggaatgtcgatattgttcggagaccaagtactgaacgcttggaatccggctttgacacaaaccgtcagcgaaatgtctcccgaacttatctttaaagaatacgccaaaagtatcggtatcggtggtattgccatggcaggtgtcatcggtatcgtgcgctcatggggtatcatcaaaagtgcagtgggattagcatccaaagaaatgggaggcaagaaagtagagaccaatgttatccgcacacaaaaggatctttcaatgaagattatcgctttcggctctatctttaccatcctgctgatttccgtctttttctttttcgatgtgatgcacggaaacgtattgcatagcattgtcgccattttattggttgcaggtattgctttcctgtttactaccgttgctgccaatgccatcgctattgtcggaaccaaccctgtatcgggaatgacactgatgactttgattctggcatctgttgtaatggtagcggtcggtctgaaaggtgcgaccggtatggtagccgccttagtaatgggaggggttgtttgtaccgcactttctatggcaggcgggtttattaccgacctgaaaatcggctattggctgggaagtacgcctgccaaacaagaaacatggaagttcctcggaactctggtttctgctgctaccgtaggtggggtaattatgattctgaataagacttacggtttttcaagcggtgctttagcggctcctcaagctaatgcaatggcagctgtcatcgacccgctgatgaacggagtaggcgcaccttggttgctctatggtgtcggtgctgtattggcacttgtgctcacttacttcaaagttcccgcattagctttcgcgctcggcatgtttattcctttagagcttaacttgccgttgctggtgggtggagccgtcaactggtatgtgacttcccgcagcaaagacgaagccgtcaacacggaacgaggcgagaaaggtacattgttggcatcgggcttcattgcaggcggtgcattgatgggagtagtcagcgcagcaatgcgttttggcggcatcaatctggtcaacgaggaatggttgaacaatccgtggagcgaagtggcttcattaggtgcttacatactactgattatctggctggtaaaggcaagtatgcatatcaagaaataaaacagcaggtatatatatacttaggcccatgtatgagggtatgccatgtcactttggcataccctcattaactaattgccttcaaaactaacaaatatgaaaaacttaaatacaatgaagcgactgttcatgatgagcttgcttgcagtctctactgttttgtccgcacaacaatcgacagaattaaaattatggcccaacggtgctcctaatacaaacggtatcactaccgacgagcaagaaccagaaaagaaccgtatctcaaatgtcacagtccctaccctcactatttatccggctacccaaccaaacggtctggcaatcatcatgtgtcccggtggcggatacactcgcctggcaatggatcatgaaggacatgacatggcacaatggttcaatacacaaggtattacttatgcagtattaaaatatcgcatgcccaatggacacagcgatattcctttaagtgacgctcaccaagcaattcgcctgatgcgcgagcatgccaaagaatggaactttaccaaactgggaatcatgggagcatctgccggcggacatctggcaagcactgcagccacacactatacagccgaaacacgccctgattttcaaattcttctctaccccgtagtcagtatgaatccgacccttacccataaaggttcgcatgacaatctattgggcaaaaatccttccaaagaatcagaagcactctactccaacgaactgcaagtaaaagcagatactccccccgctttcattatacacagtagcaatgatgaagccgtgccggtagctaacagtataaactattatatggaactaattaagaacaagattcccgcctcacttcacacctatcccatcggtggacacggctgggggtttcatgacagtttcccatacaaacgccagtggaccgaagaactggaacaatggctcaaagaagaaatacaataaaaaaacagggtgtgtcgaaaattgacagtatcatcaacttgatctgtcattctacgctttgacacaccctattttcagtcctttaaaaacaaatgtttatctcttattttcttgctcccaactgtgcatctaaatagaacaaaccggcttcaccacccaatttgattttatcaacaatcccttgtactgtggcttcttcttctacttgctcacgaacaaatccccacaagaagtcctgagaagctttgtctttttcatcagcagcaacatctaccaacttgtcaatcaactcagaaacatgacattcatgcttataaacatgttcaaagacagccaatggtgattcccactcttggggaacagtatcaatagcacccacttttgccacaccaccacgtttaaagacgtactgagccaacatatcggcatgatcattttcttcacgagattgagctttcatccatgcagcaaaaccctcatatccttttgctgcaaaaaaataagacatagaaagataaaggttagctgaccacatctcagccacaatctgcgcattaatagcatcttgtaatttctgcgaaatcataatcttagttttttagttagtcatttatcataaattatagtggcaaatataaaattaaatttaatactttataccgatacaagagtttttttcttattttttttgaataacgccacttaaagctttgtcattcaaaagaaaagatttatctttgcacccgctaatacgagatattagcataaattcaaatcattaattataaaaacgttatttagaaaatggcaactaaaatcagattgcaaagaaacggacgcaaaagctatgcgttttactcaatcgttatcgctgacgtaagagctccacgtgatggtaaatttactgaaaaaatcggtacttacaatcctaataccgaccctgccacagtagatttgaattttgagcgcgcacttcattgggtaatgtgtggtgcacaacctactgacacagtacgcaacatcctttctaaagaaggtgtttacatgaagaaacacttattgggcggtgttgctaaaggcgcattcaccgaagcagaagctgaagctaaattcgaagcttggaaaaacaacaaacagtcaggtttggctgctttgaaagctaagcaagaagaagctaagaaagctgaagctaaagctcgtttggaagccgaaaagaaggtaaacgaagaaattgcaaagaaagtagctgaaaagaaagctgctgaagctgctgctaaggctgaaacagaagctgctgctactgaagaggctcctgctgctgaagcaaccgaggctcctgctgaagcataattcacacctttacttcaaaagagttaactcctccgaaaaatcgggggagtttttttatatacaagtccatttatggctcagttcaaactacaagaaagatagctttcacacagaactcccatgaataggaggtttcgatagccgttatgtgtgaaaggaaatcgtaccaactttcctgacggatggaattcctctcaccgacataatttcatcttctccccaaaaaacacatagtcattcatgtaatactatacaaaagctttttagaatttctttatgctaattttctaagactctaaaacaatctatttaatctgttaattttagtcccgtaataataggattatggtctgaataacgataaggattgggctggaaaaaggaagtatattgatactcaaaataagccggttcactagcatttatgtcccaaggtgccgccccggtcacctgcccggtcaatgtggaagagctaagagaatgatccaagtaacctacctcaccctgataaacataactccaactgtcaggagtatacttttgcaattcattagtatagccagcctccgtaaatatacgtaccggatcctcattagaataactgttcaggtctcctaataccaacacgtcagtatcaccataatattttttcagattttcgtacgtaagcaggcaatccttagcctcttgcacccttcgcgaattgaactgagactggccatcctgctgatctttatcacctccggtagcattattgcccgattttgatttaaaatggttcatagccaaaattactctgctgccattttctttcaactcaaagcattgtgccacatgacgaagaaccagatatgtgccttcataagttttaaaatccatataaggagaaactctttctgtatcataaataaaagcattctttgtataacttgttattttcttatcttcactgtctatgcctttatatttaccggtcacaccatattcctcattcagtgcctgtaccaattcattgaccgaataatctccttcttcgatttcacaaatagcatacacgtcagcatctatttctttcatcgctgccaaaactttcttccgttgcctctgaaaagcggcctcatccttggctccattactatgtccccacatagaagggcttgccatataatattcaagattcatactggctactttcatattatattttcccacctcaggaacttggggacgtctattctctttaattaccggtcgatcagtgatagtcaaagcatagttatctcccgaaacagatacctttccttttaaattctccatcctagctcccacgcgcaatgtatgatcctcatctgtcaatacaatctcacccggaatcagcaccaacttatttctcatattctcttccaaagcttttttataatccgaagtacccggcattactttatcagttggagtacgtaagacttgagaagaaagagtgatattgcctgttgccgaccctttataggtagaagagacaaacattgcattttttagcgttacttcctttcctaccaaatcattcgtaaaatcatcgggaaagatataagtttttactacggaatcggaatctgattccaaaggatcttttccaccactgcaagcccctacaaagagtaatcctgcaatccacatgatatttctaatattcaagctattcatataaactttctttaaataaaaacagaggatgtataccattcagtatacaccctctatttaatcaattcaattttctatcattcaacctttttcattgaatcttctacatattcaaacttaccattaccaaccactttataaacagctgtccaattaacattagagctgccatcataaattacaaagttacagtataggtaacatcaataccttctacaggaacagcatcagcatgatttttttccaatgccggaataaatgctttaggcaaacgtgccattacagtttctgtaatcttggcatcatccattccttcataacctttagcatactgttcacggaatttagccggacgtaaatcaatattattttgatatgcagtagctccaaaataatactcacttcctgtaggagaagcataagttgtggtatatccatcacctttcttagaaatgccaagttctttctgatcgatattttcccacacccaatctactatagcctgataatatacagatatatcagcttgatctttaccattcggcagattgaccacaacgctaggatcatagttccatttaccactcgtttttacatattgttcagttttagttgtcatataagtattctttccccaacgggcatttgcagtagaataaatatacgaatcactataagccttaacagaaccactatagtacttatacacaataatcttttcagcatcattcaaaggataagccaccttcttagccaaatacgcaggcaaatagtcctcagccaaaacgctagagctaaaattaaagttcttacccggttcacccattgctgtataatcatcgggagtcaatacaaatacatcttcatcatttaccacattccaaccctttgctgacttttcatagaaagcatattgaggttcggacttaaccaaaaccggaatatcatttcctatggtaatattatcaagttggtaagtagttgatttctcatcatccccattacctacatatttaaatgctatattaacattttttccgacataatctgtcaagttaaaagtccccgccaaagccaatgtaccatatcctttcgatggttcttgaggaatatcaaatgatgatgttatatcggtccatttagcctttgacacatctttcccgtcaaaatcagtcgaaataagaactgacaaacaatctgcattccaataacccacacaaacttcaaaagcaaatttattattttcatcttcaatttcaacagaaggagtgaccagccatgcttcacatgctccctttccattggcagaatagctgatatactgattatcattataacttttcaacgaccatttagctcctccggtcgcactaatataccaatctttaatagaagtcacatcacctgtttccaatgattcgaagtcatatgaaaatacagggtcatccatcttttggggtatagcgtcagcgttataattatattctgcaaacacatgacttccctctttggcatctggaaagacctcatttaaaaccttatataactttgaagttgtagacttattaagatatgcaccataatatccctttccatgaataatcttataatcatcatccttcaatttataataatcgatattatagtatttatcatgtttctccgatttttcctctttataatcaaatgtgattttaaaactggagccttcatcggcagaaggatactgtccggccaaccaattcggcaaataatcctgcgcttcatccgctgcagaaaaatactgattagtttttggattacctttcaaagaagcccaatctgtgaatgttatattccccttctttatatcagtcggcttaccaaaatcttcaaagccatcaaaattatcctcattatagtcacaactcacaagagccaaggctacaactgcactatataataatgtatattttttcatcattttatcgcttttagaattagaaattaatcttcaatcgcaatgaatatgtacgtccaaaagcatagaatacaccataagcgttctgccatgtaccatcggcatctgttgcatttacaatatattcttggttgaacacgttattaatgttaccatacaaggtggctttgcaactaccaattttgaaacgatagcttgcattaaaatcaaactgacctccagaaggaatcttccaaggatctttaaatgtcttcacaccaccaacaaccaaactgcttccgttcaaggcgaagtctgcatagttatttgcatagaaattatagtccaatccagcccgaaaaccatcaaggaatttcacagtagcacccaatgcacctgtcaactgtgcagagtcacctacttttacacccttcaactgaacttcagatttagcatgatccggagcataaatatcagaagctatggtacctttcaaatctgccaaaggttgtccttgtccattgtaataatatccggtagcattactatcccactgccaatcaccaacagaaagcataccgttaatagtcaaccaacgagtcggttctgcaacaaagtctagttctacacccatatgacgcgcgtcaacaccttgcatattaatgctataacggtctaccggattactattttcatccaaaatatcaccaccctttgtcatagtcttatccatccaacgggtataataagcattcagattaacattcaaccaagaagaacgatatccataacctaattctgcagagaatactttttcattcacagcattaggattggttgcattacttacagctgccgacaagaaagcaccataagagaaaaatggagcacgactgatataaccaatgttagcaaagacgttatgatgatcactaatattaaagtttgcaccacctttagctgtccatccaataaagtttactgtttctgattcagcatgctgtttgtcgtaatagagacggtcataacgccaataaccggtattggagacagaacctgccaagaaagcacttaacttatctttattatattctgcttgtgcaaaaactccttcctgcataacatatccgtcataatcacgataaaccacatcaccgacagtcaatttttcatatttccaattaggatctgcagccgctgcattattgacagccttcacattcttacgcgaatcataatccacataatattcaccgccataaagatcgctcaattcatttgtatgagtacctttataataacggaaatctagtcctccataaaaatcaatattttctcccaatttagtagtgaaagtcgacaacaaaccataccagttgtgatagtttttagatttcgacatggccaacatagaaccattttcactttgctcattgatttcttggatcttatcataggcaaaagtaccatctgcattacggaattttgttgtcaacttaccataagaagcgccacgccagtctgtataagagtaaccaaattccgaattaccttgtccgttataaccattaccacggccaatagaaacataagcaacagtactcaaagtagatttatcatctatttgccattggtgattcaatgaaatctgaggtttgtgatactcattatagttggaagatttacgctcaccgttttttccaaaaccataagacggattataacggtatgcacttttacctttcatatatttctttacttcctgccaaccttgaatggttaagccatcataactactactacgttgataatgactttgaggagcaccaaaggcagtaaaagacaattgatgagcatcatttaactttttagagacattaagaaaataattataaccttcaaaatctgtaccctgaatataaccgtcaccccatttcttgccgcctaataaactgacagcccatcctcctttcatcaaaccggtagaaacagagaacaaaatactattcatgccatcattacccataccgtaagaaatagaaccgcctttctgagcatctgtagaacgagttacaatatttaaggagccaccgacagaaggaactgatactttagaagcacccaatccacgctgtacctgtgtgctacgagtaacatcgctcaaacctgcccaattgctaaaataaacaccaccccattccatatcgtttacaggaacgccatttaccattaccgcaatattttcggttttaaaaccacgcaaattaatatccgaatctccataacctccaccttgtttagtagcataaactcccggagttgattttagaatttcaggaaattccatagttccaagtttttcctcaataaattccggagccacagtagatactgctaccggagttttacgagctacagcaatagatgaggttactaccacatcccccaatgtatgggtatccaaattcattttgactactccccaatttacctcaccttgctgagtcagtttaatagacttatccaagtaacctaaatacttaatttcaattgttgctttagctgaagtaactttcaatgtgaaattaccttcatagtctgtaacagtacctaaactagtaccgcctaccgtaacagttgcgccaatcaatggctcattgctatcggcatctaccactgtcccttttactgttgcctgcgcaccagctgtagcagcaaaacatagtgtaaagactgccaacataaggaaatgctttagatgatttctcataattttgtttttgattaatagttaatagttagttagaaacactaaatagacaacaaagataggaattatattcatattaattgcattaatattgcaataattaaagaagcgacaggtatttttccgaagattattaagattatattacatttcctaaattctacaatattttcccttttaatgcatagtaatccaagtccaaaaacaaaacttccattcgcacagtttactatcttccaccgaacctttattaataaaaatcccccttaagggatagaatctcttaagggggatataacataaaacatcaaattatcaatcaatcttccatcaatttgcgataacgaacccgcttaggttcttcattacctaaacgcttcatcttattttcttcatattcagaataagagccctcaaagaagaacacctcactgtttccttcaaaggcaaggatatgagtgcagatacgatccaggaaccaacggtcatggctgataactacagcacatccggcaaaatcgtccaaaccctcttccaatgcacgaagagtatttacgtcgatatcattggtaggctcgtcaagcaacaacacattgccttcttctttcaatgccatagccaaatgtaaacgatttcgttcaccacccgaaagcattccacaaagtttctcctggtcggctcccgaaaaattgaaacggctcagatacgcacgtgcattaatatcacgccctcccattcggataagttcattacctccactgattacctgatacactgttttattagcgtcaatatctttatgttgctgatccacataagccagtttcactgtttcacccacttcaaaagtacctttatctaccgtctccagtcccattatcaaacggaacaaagtggttttaccagcaccattcggtccaatcactcccacaataccattaggaggtaacataaagtttagattgtcaaacaatagtttatcaccatacgcctttgcaactcctttggcttcaattactttatttcccaaacgaggaccattcggaataaagatctccagtttttcttctttttctttctgatcttcattcaataatttatcatacgaatttaaacgagctttacctttcgcttgacgagccttcggtgccatacgtacccattccaactcgcgttccaaggttttacgacgtttgctggccgtcttctcttccatctccatacgcttggtcttctgctccaaccagctggaataattacccttccaaggaataccttcaccacggtcgagttcaagaatccacccggccacatggtcaaggaaataacggtcgtgagtaatacagataacagttccttcgtattgttgcaaatgctgttccaaccaatcgatactctcggcatccaaatggttagtcggctcatccaacaataaaatatccggcttttgcaacaataaacggcacaatgccacacgacgacgttcacctcccgaaagattcttcacaagctggtcttcaggtggacaacgcaaagcgtccatcgcacgttccagtttactgtctaagttccatgcatccgtcgaatcgataatatcttgcaattctgcttgacgagcaaaaagtgcatccattttctccgggtcttcgtagtactcgggaagaccgaacttattgtttatttcttcatattcggcaagcgtatcaactacattctgtacgccttccattacaacttcttttactgtcttatcattatccaaatgcggttcctgcgccagataacctactgaatagcccggagaaaagactacctcaccttgatagctcttctctaaaccggctataatcttaagtaatgtagacttacctgaaccgttcaaaccgataataccaatcttggcaccataaaaaaaggataggtagatgtcttttaatacctgtttattcgcctggaaagctttactcacgcctaccatcgaaaagatgattttcttgtcgtctgccatatcttatatcttaatttttataattgtttttcttccattctcttataataccaattatgtgtcaccgtttcataaagaactaatgaaaccacacagatgcccaaacatatccaatatatcgtgtcgggataatttcctgtccatatattctcgaaaaacaagccccccaacaagcctacttcccataacaactgataagtattattccccgtacctctctcacaatgtaacggcaggcttatcattatcacaaaaaagcgagatgcagtaattccaatgccgatacccaacaaaagagccgcaatgtaactactcattaaactgtttgaaaatgccatcaacaatattcctgcaaccaaagccgcttgaccgaactccatctctgcacgacacgaagtatgtgaaagcgcatatttggaaataagtagtgaaacggcaaagcctatcaaaatacaaatatagaatatttcattataaatatgtgcaataatgactccgaatataaaagagaccaacaacatatttattccgggaagaagtgtacggggcaataaaaaacggtctaaagaaaaaagaggaggacataaaggagcacggaaagggatatgaagcagtggaatcagtagcaatgcacctattccaaatgccgcacacacatagaccacacaagtaaaactccaataaggatatatataaacccccaacgccagccccaatgccatgccgaatcttccaaaccaagtaaaagcaacgttagcgtctgtacgtcggcgtgaagctgtaacatcaatcaccaaggtacttccggtagtcattgtcaccacactaaacaatgctccttgcaccatacgcaacaaagccactaatccgacggtggcaacatagggatataataaacttactccggctaataaagccaaagtaatcacacatacactttttcgtttaaaggtgtctattatatagctgttacaaggaccgggcagaaacattgtcaatccgaagacggcaacggctccccctgcttccgcatagctgcaataccaatgttgcaccatccacaaaggaagtacgggcaacatgatataaagcgaaatataaagaaaaaagtttgaaagagacaagattaccatgtctcttgtccataatttcgccctttcatacggaaagaagaagtcatcaaacatatcggaaccttttattaatattgttcgttctcgttaggaaaatccccgcttttcacatcttctacatattgtccgattgcacctttcatcacagtatgcaagtctgcataacgacgaaggaaacgcggacggaaaccatcagtcattccaagcatatcagcaacgacaagtacctgaccatcaacattaccaccggcaccaatgccaatcacaggtatagtcagctcttttgccaccctttcggccaatgctgccggaattttttcgagcactagtccaaagcatccggcatcttccaacagatgagcatcacgaaccaacttttccgcctctgcatcatcctttgcacgcacagtgtaagttccgtatttattaatggattgaggcatgagacccaaatgtcccatgattggaatacctgccgaaataatcttcttcactgcatcgataatctcttccccgccttccagctttaatgcatcggcatgagttattttcattatcttaatagcattggtcacagcttcatactcagatgtttgataagtaccgaaaggcatatcgaccaccactaaagcacgttttactccacgtaccactgattttccatgataaatcatttgatcgagtgttattggaagcgtagttacatttcccgccattacattagaagcggagtcacccactaagataacatcaataccagcttcatccacaatctgtgcagtagtatagtcataagaagtcaacatagaaattctttcacctctctgtttcatttccaccaaacgatgggtggtcactttacgcgtatcaccagaaatatatcctgccatatttactttaaattttataaaacggctgcaaaggtagaggttttatatgacattacctcattatctctttcattttttcaaaaccaaactctttaaagtcctgaataacaacatccgccttatcacgtattgcctctgcagagttggtggttgccagtcctactaccgtcatcttcgcacgattccctgcttccagtccatgaaatgaatcttcaaacacaatacagttttcaggaactgtgtcacagaccttggctcctaataaaaaacattcagggtcgggttttgaatgggtaaacatttcagctgtaagaataaaatctacatttgctttcaactcaggatgtacacgataagcgttactcattttttgttcattcgaacttgttactatagctatctttattccattgacacgtaattctttcataaaattctctacaccgggtatatattcatataacatacctttctcaaaattgttcaagtcagccgtgatttttttctgaatattgtccattcctgcaaaatatttatcataaatctgcgtaagggtctgacctttaatcacacgcccaaaatcttttatttcaggatggtatcgacgtcccagctcatcccagaaaacgctatattgagtttctgtatccatcactacaccatcaaaatcaaataaagctgcaatgttttttgttgtatccatatattaatttagattgatttaacgtggtaaaggtctgaataattcgccacattcttaactttgcattgcttaaaaatcataaaattgaatatgaaccttagaaatgatttcattgttataatttaataatataaaaaacaagacatgttgttcaatgcagaaaatatcctattaattgggtccgtattactttttgtaagtatcgtagttagtaaaacaggctatcgcttcggcgttcctacattactggtgtttttattagtcggaatgtttttcggcagtgacggactgggactgcagttccacaatgccggtgaagcgcaattcattggcatggtggcattaagcattattctattctcaggcggcatggacaccaaatttgcagaaattcgcccggtactgccacagggaatactgctctccactgtgggggtattactgactacactctttaccggtctttttatatattggatttcgggatttaaacacgtgagcatcaccatgtcacttattacggccatgctgttggcagccactatgtcttccacagattcagcctccgttttcaatattctgcgttcgcaaagcatgaatttaaagcataatctgcgtcctatgcttgaactggaaagtggtagcaatgaccctatggcatatatgctgacaattgttttaatccagtttataaattcttcgggtatgggatttatggatattctgggctcattctgcattcagtttatagtaggtggagcttcgggatttttattgggcaagttagctattctcatcttaaacaaaataaaccttaataaccagtccctctaccctattctattattaagttttattttctttattttcacagtcactgatttatgtaaaggaaatggttatctggctgtttacattgccggtatcatggtgggcaacaaccgcataacgaaccggaaagagatttcaacctttatgaatggtatgacatggttattccagattattatgttcctgacattgggacttttagttaatcctcatgaaatgctgaatattgctgttcccgccctcctcattggtatattcatgattgtttttgcacgcccgctgagtgtcctgatctgtctgctgccatttaagaaaatgaatttcagttcacggatattcgtctcatgggtaggcttgagaggagcagtacctatcatatttgctacttatcccgtggtagccaatataccggattccaatcaaatatttaatatcgtattctttatcactatcttatctttagtgattcagggaacaaccatttcatggatggctaaattactccatttggctactcctctcgaaaagaccggcaatgacttcggggtagaaatccctgaagaaatcaataccgatttaagagatattatcctgaccgaagaaatgctggcaaaaggcaaccgtttgatggacatgaacctgcctaaaggaacattggtaatgttgataaaacgaggaagcgagtttatgattcccaatggttcactgcaattacatgcaggagacaaattactgattatttcagagaacaaagaaggtacacctccccctctcagttaaagaggggagcaggtcagaaaccgaacaataacatgatattaagtactgaaacgataatagcaatggtgtagagcacaaaactactccaacgggagttggcatacttgcccatcactctttttgaagaagtaagccctacctgcaaaaacactgtgaatggaagctgaatacttaaaatcatttgagaaataattaatccataaaacggattatcaatgaaaaaaataatcaccaaagccactcccaacgacaggagcacccctatacgtgagtgaatatccttaatatgatatgattctccaaagataccggcaaagatagaacctgccgccatgccactggttatggtagaagaaatacctgccatcagtaaagccagtgcaaaaatcaacccggcattattccccaataacggatcaagcaacgactttgcttgttgtagctcctccacctgcgtatttgttttaaagaaagtggcagcagccaacaatatcatcgcactatttatcgcccatcccacaatcatggaaaacaatgtatcataaaactcatatttcaaaactttacgaatcgagccctcatcctgcttgttatattcatgactctgtatcacctccgaatgcaagaataaattatggggcattactactgcaccgagaacactcattataattagcatacttccctgcggaatactcggcacaacccatgcacgtactgccatcggccaatctatatctaccaaaaagagttcgtataaaaaagataagccgatgacggatacaaatgcaataatagctcgttctatcttcttatacgaattggagaacagcatgataatgacaaaaagagttgtcagtatagaaccccatacaataggaatatccaatagcatctgtaacgcaatagcccctcccaaaatctctgccagtgaagtagatatagacgccaaaacagcactgcccaaaaccggacgtgctatccatttaggacaatattgtgtagcagcttcactcagacacaaaccggtaacaatacccaaatgcgcgacattatgctgtaagacaatcaacattatcgtagaaagtgtgacaacccataacagagcgtaaccaaactccgaaccggctgcaaaattggacgcccagttccccggatcgataaatccgactgtaaccaataatcccggaccaatatatttaaagaaatcaagaccacccaaatagcgtttatgatctttccgttttagttcatctataaaattagacatgctttactttttttgcttgcacaaacatacgaataaaaaacaaataaacacttgctttgtttacatatatattctattttcgctctaaaatacccaataataatgaaaaaggaaatcttactatccgcattgctcatagctacattggctgcctgtacaggcaaaggacctgcccgcaaatttaaagagacggctgaaaggctgaatcaaacctaccccatccgcttgaatgaaaccatcaccattgatagtactcattataatgaaaaagacaacactgtgagttactattataccgtgacaggggaactggatgaccctcaattcatggataacaattatgccacttacaagaaagccttacaagaagctattgacaactcggtagagatggaagagtatcgaaaatttggaagtaaaatcaaatatatttattactcgggaagcaataagaaaaaactggcggaattcgttttctaaatggttccggcactaccaccccacacgtactaacgcatgagctcacacatatatatgtgtgagctcacacgaacgtatgtataagcctacacgttagtacgtgcaaatccatgcgtactaacgcgttattcttcttctggttttgtaaagcgaaacagggtcggatctaccggacgaatcaatacattctgtcctttttgaaacttcgctttcagtttggcaaccgttttttccaatttcgatttattagtatcaaaatatacaaaacaagtgcggttcaccagcccttcctgaccttccaaataattctttagttgataactataatgagaacgttgcggcaacaatttattattatccagttttacactatccaacaactggatatctgtaaaataaatcaatgaatctgtaaacgaagcagacacgcctactatatatacagctttggttttatttccttttaaagaaaatgccgaacataaaatcagcacgacaaataaagagcagaaaatcttgatgaatctcataatttgttttttattattttattagggacaaaagtagttatttaccgctaaatatgaaaaggtaatagataaattaacattattcctctataaacgaacaaaagcacaagatgaaagagcaaactttcaactcatgctttgttttctttttgttttggaaaccgaatttggtcttatcccaaataggccttgagcagcttgctacgtgaatttgctcttaatcttctaatggctttctctttaatctgacgtacgcgctcacgagtgagtccgaatttatcgccgatttcttccaacgtcatttcctgcgtgttaataccgaaaaacatctggataatatccttttctctttcagttaacgtagagagcgctctatcgatttccttcgaaagtgactcattaaccaaagaacggtctgccataggagagtcgtcgtttaccaacacatccaacaagctgttatcttccccttccacaaaaggagcgtctacagaaatgtggcggcctgaaactttcaacgtatccgaaatcttgtctaccggaatttccaattcatcggctaattcttccggagaaggacgacgctcgttttcctgttcgaacttagagaaagctttgctgattttattcagcgaacctacctggttcaacggcaaacggacgatacgtgattgttctgccaatgcttgaaggatagactgacgaatccaccatacagcgtaactgataaatttaaagcctcgagtttcatcaaacttctcggctgccttaatcagtcccaggtttccctcattaatcaagtcaggaagacttaatccctgattttgatactgcttggcaacagatacaacaaagcgcaagtttgcacgtgtcagtttttccaatgccacccggtcgcctttacggatacgttgagcgagctctacctcttcttctacagtaatcaagtcttcgcggccaatttcctgtagatacttatcaagagatgcgctctctcggttagtgatacttttagtaatctttaattgtctcattctctataaaacaaatttgggatgcaaatttacaatattaaaatggaataacatccattttgtttgaaatatttttgccaataaatcaaaaaaggacttatatcgagctagttcctaaaattattggattattccaaaacatatagtcctaattatttttattaaggacacttcttttaaatataacaggatgcacgactagtataatacagccgtgcatccaccaaacacacacctattgaaaaaaatcttattaccttatgtatttttatcttttatgaatcattcctgagtcaagtccacggcataattggcacgtttacccgatgggaacataccgcttaagaacaatacctgatcaggtgacaaagttgcggccttcaacacatcttccaaatcattaaccgttctaatcacctgtccgttggctttcagaataatgaaccctttgcgaacaccggcagctttcatcttaccttccgttactcctgttacttcaacacccgaaccaagattgagttgcttcttcagttcttgaggaacttcgcggaatgcagcacccaatatttccatgcctgcattcttaacaacttttgtagtaccttgttcgttctttaaggtcagttcaatatccttttccttcttgtcacgtaaaacttttaccgtaaccttgtcacccggacgatgcttagccaatccctcctgcagctctgcaaagttcttcactctcttgccatctattccgatgatgacgtcattttcctgcaatttacctgcagcagaaccgccttcaataatttcacgaacccatacaccatctactgcgcccaagtcttttatttgtttcttcatcgcctcatccatcaactgctgttcatcattaatcggtgtacctttgatacctaaaatagcacgctgtacggttccatattcttttaaatctgccacaaccttcttcataatgctggcaggaatagcaaatccatatcccgaataagctcctgtcggtgaatacaatactgagttaataccaaccaattcacctcttgcattaaccaatgcaccaccactattaccttgattgatggcggcatctgtttgaatgaatgattctacaccttgattgtatacacccaatgtacgagcctttgcactaacaataccggcagtaacggtagatgtcatattaaacggattacctaccgccaatacccactctcctaccttcaatgcatccgaatcacctacgggaactgtaggaagatcatctgcttcaattttaactaaagctaaatccgtgctggggtctgcacctatcacacgtcccttaaattcacgtccgtcattcagtttgacactaattacatctgcattatcaatcacatggttattagtaacaatatagccatctctggagattatcactcccgaaccgaatccaactctttccggggtatgcacctgacgttgctgaccgcctcctctgccgtttccaaaaatatcaccgaagaattcagagaacggatcacgaaccgttaccgtctgagttttagactcctgagtagactttatatgaacaactgcatgtacagaattctcggctgcctgagtcagatcgaccggttgcatattaatcgcatccaaagcagccaatcttgtattttgactttgttggaacacatcattaaaagccagacttttattctgttcaggcttcaacatagtataagtcgttactcccgctacacctgcgctaacagctacaatcgccgttgcccctagtaccattttagttgcttgtttcataacttaatatctattagtttgttaatttcatttttcagtttaacttttacaccgctaaagtaatgacaaaatatgtacggttgtatgcattgtcagataaattttccctcttttaacagaggcatacaggcacttaacaggggttaaccgcaatatctgccaaatttgcattcgttatcaatagctgacaacggacctgtcagaggtattaattcaacatttcacattcatttcgatactttttctcatccttttgcagcttttcgagctaaaagcattatctttgtcttctcaaagcagtcggtcggtctgtcgctgatgccgcaaggcagaagaggaaagtccgggcaacacagagcatcctacttcctaacagaaagctatctgcgaaggtagagtaatgcagaagaaaaaaaccgccttgttctttcgggaataaggtaagggtgagaaggcggggtaagagcccaccagccgcatggtgacatgtcgggctgtgtatcttaggagttgtaaggtcatgtaaaccggcattatgagggttgctcgccccacgtcggagggtagaccgctagagcctgttggtgacaacaggcgtagataaatgacagacgccttaccgctagataaggaacagaacccggcttacagaccgactgctttttttatataaagagcctaaatgagtaccatgaacaaggaaaagctgaaaggcctgcaatcgtttctcaaagatgatatatggcgagtgacggaagacgaggttagtaaatcccgtggaatattttataatgcaataaagatagcaaccctctccatccgtgagtttacccaaggacgtattattaataaagcttcggcactgacatacagcacgctgctttccagtattcctatattagccatcttatttgccattgcgcgtggttttggcttctccaatttattggagactcagtttcgcagcggactggaaggacagagtgcggccgcagaaacagttctcggattgattgactcttatctgattcatgccaaaagcggtatatttatcggtatcggtttaatcatgctgttttggactattctcagcctgacatataacatagaacgtactttcaattacatttggcaggtgaagaaaccacgcactctttaccgtaaaatgacagattacttttccatccttttacttcttccgctattaatcgtattgtcaagcggtatatccatcttcatgacaacgatgctgaagaacatggaagatttcgtattgctggcaccgctaatgaaatttatggtcagacttatccctttcatactcacatggggtatgtttacaggactgtatgtgtttatgcccaacacaaaggtaaaaatcaaatacgctatcatacccggtatcatagccggtactgcgttccaagcattccaatatctatatatcggaagtcagatatgggtttcacgttacaatgccatttatggtagttttgccgccatcccaatgttcttgctgtggacacaaatatcgtggagcatctgtttgtatggtgcggaactgtgctatgtagcccaaaatttgaaaaattacagtttcagtaaagagacagctcatatcagtcgtcggtatcatgactttctttgcatccttatcatgtcgctcatctgtaaacgcttcgaaacggaagaacctccttataccgccgtcacattgagtgatgaacataagattcccatccggctaaccaaaaacatattatatgaactgcaagatatgcacatgatttatgaaactcctgtagatgatgacgatgaatcctttgcatatctcccatctgtggatataaaccggatgaatgtggcaatgctcctgaacagactggatgtagccggttcagaagcattcaagattgaccgtgagcgatacagtgctccgtgggaagcactgatgcgagctcgcgaagaatattatcaaagcaccagcaagatactgttgaaagacctttagttattgaattgcatcatacggctcaaatatttgccgatgatatcgaattctatattcacaatgcttcccgactggaaagtgtggaaattggtatgttcgtaagtataaggaataatagcaacctgaaaagtatcatctgtcggattgcacacagtcagactaacaccatttacggtaaccgaacctttatcaaccgtcatataaccacgctttgccatctccttgtcaaacttatacttaaaggtataataacggctaccatccacgtcctggatgctgatacattccgcagtctgatctacatgcccctgcacgatgtgtccgtccaaacgtccgttcattatcatactacgctccacgttcactttatcccctaccttcaacaatccaaggttggaacgctccaatgtttcttcaatggcagttactgtatatgtaccatcctgaatgcttaccactgtcagacaaacaccattgtgagcaatactctgatctatcttcagttcgtctacaaacgaacatttcaatgtaaggtgcaggttagtttgttctttttccaaacgcactacttctgcatattcttctacaattcctgagaacataattcattaatttaatagttaaagtgcaaagataaagagaaaaagccgtcttaaataaaagatttatgtatttttgcacaaattactttgcaaacattactaatactaacaaatatggatagcacaagaatcgttggcgaaaagattaaatcgctgcgtgaaacaaaagaaatcagtgtagcagaattagcagaacgttcagggcttgccgaagagcaaatcaaccgcatagaaaataatgtagaccttccttcactggctcctcttatcaaaatagcacgtgcattgggagtacgcctaggcacttttttggatgaccaagaagagcagggagcagtcgtttgtcgcaaagagagtgccgaagatacaatcagcttttcaaataatgcaatggacttacgcactcacatgcgctaccattctctgtcaaaatcgaaagccgaccgccatatggaacctttcattgttgatgtagcttcgaatgacaatgttgagtttaccctttcgtcgcacgaaggagaagagttcatttatgtaatggaaggtgtcattgaagtgtgtcacggcaaaaaatgctatgtgatagaagccggagacagtatttattatgactctattgtcccccatcatgtacacggactttgcggacaggcagccaagatattggcggtaatctatacacccatctaaatcggattttgacatggaattatatacccgaaccctcggagactggctcgaacattgggccgaagccactcccgataaagaatatatcgtctattcagatcgtaacctgcgttttacctggaggcaattcaatgagcgtgttgataatatggcaaaaggattgcttgccatcggcgtcaaacgaaatactcatgtaggaatttgggcaggcaatgtacccgactggctcactttcctgtatgcttgcgccaaaatcggtgctgtagctgtaaccgtaaacaccaactacaagcaagccgaactggaatatctttgtcagaattcagatatgcatacgttatgtatcgtcaacggtgatcgtggctcggatgactacgtcaacatggtttatgccatgctgcccgaactgaaaagttcacaacgcgggtatctgaaaagcaagcgttttccttgcatgaagaatgtcatctacatcggtcaggaaaaatacagaggaatgtataacacttctgaaatcctcctattgggaagtaatgtagaggatgacgaactcactgaagccaagaaacaggtggactgccacgacacggtgaatatgcagtacacttccggcacgacaggattcccaaagggagtcatgcttacacattataatataagcaacaatggcttcctcaccggagaacacatgaaattcacttctgatgacaagttgtgtgtttgtgtccctcttttccattgtttcggcgtagtacttgccaccatgaactgtctgacacatggatgtacacaagtaatggtcgaacgctttgacccgttattggtacttgcgtctattcataaagaacgatgtacagccctttacggagttccgacaatgttcattgccgagctgaaccatccgatgttcgatatgtttgatttgtcaagccttcgcacaggtatcatggccggatctctctgcccggtggaactgatgaagaaagtggaagaaaagatgtttatgaaagtgaccagcgtatacggactgacagaagcagctcccggcatgacagccactcgtttggacgacccattcgatgtgcgttgcaacacagtaggacgcgattttgagtttacagaagtccgggtaatcgaccccgaaaccggcgaagaatgtccgataggcgtacaaggagaaatgtgcaaccgaggatacaataccatgaaaggctattataagaacccggaagccactgccgaagtgatagaccggaacggcttcctgcattcgggagatttgggagtcaaagataaagatggaaattaccgaatcacagggcgtatcaaagatatgattatccgtggtggagagaatatatatccacgtgaaattgaggaatttctctatcagatggaaggaatcaaagatgtacaagtagccggtattccttctaaaaaatacggtgaggcagtaggcgccttcattatcctgcacaaaggaatagaaatgaatgaatttgacgttcgtgaattctgcacaggcaaaattgcacgatacaaaatacccaaatatatcttctttgttgatgaatttccaatgaccggcagcggaaagattcagaaattcaagttaaaagatataggactggagttatgccaaaagcatggaatagaaattatttaatatatattcatggggtcaaaacagggataatgctgtcgtttaatccgtaggggcgagattcgctcgcccgaaaacagtttactttgcgtcttcgggcaggcaaaccctgtccctacagctgacgatgggataggccggtttaattttgacacacttccatgtttttcttgttacaatatccagcaacaagcatcagttatcacccttttaccatttttcgccgatacttctatgttgttctccccttttttcagccgaatatctttaaagatacacacttttacaccatccggctgcattttttttattatttgtccgtttaccttcagagttacttctgcacaattagaaaatatctgtacctctgtcactggttttacgcggttcacgctacggcgaccggcaatataaaccatcggttcaggattccagtttgctttataaaaataaaatgcatcctttttaactttacggtcgtgcgtcaccaatcctttatcattgatacccggacgatccccttctgtacgatgagctgctccgaaatcaaacatattccaaacaaaactgccccaaacgtatggatgttcactaataatcttccaattctgaatatgatattccgtctgccagttttccggatgccaccaacttcccgggctggtttgtaccaatgaatcctgctgatgataaatacttgctcctgccccatactcactgatagcaatctttatttcagggtgtgcctgatgtgtcttgtccagccatgaagccaatgtcgccggagttgctccataccaaccgtcatatctgttccacgcaatattatctgttatgaaattaatggcaccgccttggttactggctgatgtggtgggacgtgtaggatcttcctgatgtgccagcacattcagttctttaatgtactccaacggattatctccattttctttcagttcattaaataacccccaaaaacatatactcggatgattaaaatgttgacggatcatctccttcaactgctccttaccattttcacgaaaagaaggctggtcgacaaaacctttatcagcataacctccgggaccgacaaacggtatctctgcccaagtcacaattccattcctatccattaaatcatacatataagtagcttgtggataatgagccagacgaatggcatttacccccatttcaagcatcaatcgagtatcttcttcatgatgcatcggacgaagtgcatttcccacctctgcccactcctgatgacgacacaccccatgcaaaggcaaatgttttccattaagaaagaaaccccgatcggcatctgtcgtataataacgaagtcccaacggctgttccactttgtctatctcttttccatccttcaccagggttatcactgtctgatacataaaaggatcttccctgccattccataaacgaggattcagcaaggtaaaactcatttcttcgggttgtacgctggtatgaggtgcaacagtcacctttttatccgcctgataaaccactttatctccttcttttacttggagcctaagagttgcctgccggggatgttccgttccgttcgacaggttaatacgagccaaaacagcggcttgtttctcacccacatgctgctgaaaaagatatactcccggagaagcataatccaaaggagagatacaaatatcttccgtaacaagtaaatgcacatccctataaatccccccatagaaattaaagtcacctaccaaaggcatgacatcaagctgttcaccattattcacacgaaccagcacggtattatctttcccataattcaccttatcggtgatttcaaaaataaatgccccatagccaccccgatgctctcctatctgtttgccgttgatgaaaacattggttacacagtttgctccttcaaaacggagaaacagtcgtttgcctttccactcggaacggataaatagtttcttgtcataattaccgattcctcgtttatagtcgggtttgccactcaaagcatcttgtgcattccaagtatgaggcaaatctacccggcgacttgaattcttatccacttgatgggagaatcggaagttccaatcctgattgatgagtatattttctctttgcgcaagagtctgcatacttactgccatggcaaataatgcagagaaagtcagtcgaaggtgtttcatgttcttaccttttaatatccatgtaatctaaattcaacaataccattacctctacaaaggctttgttatacaaagatagaatagtatcactaccgccaactataacttttgtcggttttatctcataaatttgtccaaataagggaagaacgaggtatatgggcataaaaaaaggagcaacgccttgctccaacctttgttaaccttaaatctaatactatgaaaaacacagtgcaaatatacggactttcgggaattctgcaatagtttatctgtattttatgcagcaaaacaatgttatttaacataaatcggtatcccgtttacagctgtttgcaaaacagggataccaattttaatttcattaaaaacttgattaataagtatggccgtctttttccaattcttgtgctgtaataggctttcggtctattgcacgccaagcataaacaatgtatgccaaaacaaaaggtaccaaaacagacacataagccatgacgcgcaaagtaaactcactggaacaactgttggccagtgttaatgaactttgcaggtcagcagtggagggataatatgccgtgttattataacccacgcaaaggagcagcgccaaaaccgtcagcacagtaccgatgcccgcaaaccagataccgttggtagatgtcttgctgaaaacagatttgccgatgccgaacaatacaccgaccactcctatcaggaataaaaccaacaagacaggcatatcaatgaaattcataaaatacttgtaaggttccatatatacttcctgcgtatcgggactgacagcaaaaccatcactcaagaatgtatgtatcacaaatgccaggaaaagaatcaggaaaggaatcgtatctgtaatcaattggcgacggcaatgaggaatcaattctttatcacggatattattgataaaatacaagttgcccaatatacgtgccaagaacaaaacagcaaagcccaaaacaagattccatggattagtcagtgcatccaacccatgccatccattggcccaactgctgatgacaggcatcagttcattacccatatttcctttattcaccaagaaattagagcccgtaaagaatgtagccactgctcctcccagcaataacggccctacaactccgttgattaccaggaaccattgataggtacgcttgcccaaaatattacccaatttagactgaaattcataagaaacagcctgcaacacgaaagtgaacaagataatcatccacagccaatatgcaccaccgaagctggtgctataaaacaaaggaaatgaagcgaaaaaagctcctccgaaagtaaccaacgtagtaaaagtaaactcccacttacgtcctgtggaattcaccagcatggtacgctcttcgtgagtgcggcccaaagtgaacagtaaagaattgccaccctgcacaaaaagcagaaacaccaacagggcacccagcaatgaaaccaggaaccaccaataattttgtagaaatatatagtccatagaattttatttaaatgataaataatggaattaccgcatacaaaagttattcaccttttattgcctccggtcctttctttatggccttaaccataatattgatttcagcaatcagcataatagtaaacaatatcaggaaaataaagaaagttatctgcacggagctcgtctgcaacttggaaatagcggctcccaccggcaacatatcctgaatagcccacggctgacgacctacttcggctaccacccaaccggcttgtccggcaatataccccaacgagatagtccaaagtgcaagtttctgtaaccaccctgcatctttcagtttgtctttccgagacaggacaagtaccacaataaagaataagatgaaatatcctcccaaccctaccatgatgcggaacgaccagaatgtcaatccgacaggaggaaccaaatgagcaggatctttgatatatccgtatccgaaataagccacattctcatccaatgtccggcgtgctacacttgcagcctctttattaccctccttctgcgctttgcggaaagcatccaaagcagcaatcgccttttgaccgcgctctattttctcttgtgcagaaagagcgatggttccctccggagtttggtaaccgccttccagtaaattattgatgcccggcacatatccgtctatgtcatgagtggccagaatagaaagcatttttggaatctttatgtcgcctaccaccgtaaacggcatcccattgccaccctcttgaagtccttcggccgcagccattttcatcggctgcactttggccacctgaacgccggagatatctcctgtccatgccactatcagcgaagctgccaacccaaaggcggcagccactttgatgcttgctttcgcaaattcaatctcgcgcttgcgaagcagataccagcaactgacacccactacaaacactgcaccaagtacccaaccgctcagcacggtatggaaaaacttagccacagccatcggcgagagtgccaccgctgcaaaatccaccatctcattacgcactgtctcaggattgaatgccatgcccaccggatattgcatccaagcgttggcaaccagaatccaccatgcagaaagtgttgcaccgatacctgtcagccatgtagatgccaggtggaaacgtttacttactttgttccagccaaagaacataacggcaatgaacgttgcctccataaagaaagccagaataccctcgatggccagcggagcaccgaaaatatcacctacaaaccaagagtaattactccagttcgtaccgaactcaaactccagaatcaatcccgtagcaacacctacggcgaagttaataccgaaaagcttcatccagaactttgccgtgcgtttccagaattccttacctgtgactacatagaaagtctccatgagccccataatcatagccagtcctaatgtaagaggaacaaaaagccagtgatacatggccgtcagtgcaaattgcgcccgcgaccagtcgattagcgaagtgtcaatgttttcaaacataccgttttgatattaaaatatttatggatttgcgcgtttaatcaattcttcccctacatattgctgcttctcctgaggggtcttctcctttaaaaaagaaggaaagaaaaagagtttcaaaataaaaaacataataaacagtttaataagaataatggcccaaagcgtccggccaagggtcatctcacggaaaccgtcccgatagaacgtccatatacgaactaacaaagtattactcatagaaacttatcttaaacttgtaattattacaaagaaaaatactttatcggtaaaaaacaagtttttgtccatagaaatgtgcggggaatctatatttattgccgataaaagcaatgtcccctacatttgcagtaacaaattaaaccgcaaaaaggatgaaacaacgagtagtatatttagcaattagcttattagcgacctcttcattgaccgctcaggaagcaaagaaatggactctgaacgactgcattgaatacgctttggaaaagaatatccagttgcaacaggataaaatttcattggaagaaagtgatgtggatgtaaagactgcgaaagcaaccctcttccccagtctatcgttcaataccggacacaacgtaacaaaccgtccgtatcaggaaaacagcagtactgtaaacggcactgaaattatcagcagcaacagcaaaacgacttatagcggcaactacggactgaatgctcaatggacggtttggaatgggaacaaacgcataaacacaatcaagcaaaaaaagatgagccgcgaaatagcaggacttaccgtagcacaaacggaaaattcattgcaagaacaaatcgcacaagtgtttatccaaatcctgtatgccgatgaatcggtgaagattaatgagaataccttgcaagtgagtcgcgccacttatgaacgcggtgtagaactcttcaacgaaggaagcatctccaaggccgaccttgcacaattggaagctcaggttggtaatgaccaatatcaactggttacagccgaaagttcgctccgggattataagttacaactcaaacaactgctcgaactggacggaaccgaggaaatggatcttgttctccccactttgacagacgaacacgtgttgcaacctttacccggccaaacggatatatatcagcaggcactggcttcgcgtcccgaaatacaaagcagcaaactcaatatcgaaagctcaaagttggatatttccgttgccaaagcaggctactatcccaccatcagtttaagtgcctctgcaggcagtaccaccaatagtgccagcgaaaacggttggggaaaacaaatgaagtatggttggaacaacatgataggaattaatctcagtattcctatatttgataaccgccaaaacaaaagtgctgttcagaaagcacgtctgcaatacagcagcagtcagctcgacttaatcaataagcaaaaggagctttacaaaaatatagaaagcctctggctggatgccacaaacgcccaacagcaatatgatgcagccgagagcaaactgaaaagcagccgaatcagctttgatatggtaaacgaacagttcaatctgggcatgaagaataccgtagaactcctgaccgagaagaacaacctgctcagtgcacagcaacaacgcatccaagccaagtatatggctatcctggaccgcaccttgctgaacttctatgcaggacaagaaataaagttataataccgaaaatataaacgttatacatagtaatacagtatggaaaagaagaaaacgatccttctcagtgccgcagtcgtcatggttgcagtcggcggtttttggatgcttggaagctctgaagcaaaaagcacagtgagctttgcaacagaaaacgtaaaaaaaagcaatatcagcaattcaatcactgctacaggaaccatcgaacctgtgacggaagtcgaagtcggtactcaggtatcaggcattatcgacaagatttacgttgattataattctgtggtaaccaaaggtgaactgatagcagaaatggataaaatcacactccagagcgaacttcagtctgcccgggctacttacgatggcaacaaggctgaatacgactatcaaaagaaattgtacgaacgcaacaagaagttacacgacaagcagctcatcagtgataccgattacgaacagtatgtatataactacgaacgtgcaaaaagctctttcgatgccagtaaagccgcccttgccaaagccgagcgcaacctttcgtatgccaccatcacctctcccattgacggagtggtaaccagccgcgatgtagaagaaggacagacagttgcctccggtttcgaaactccgactctcttcaccattgccgccgacctgaccaaaatgcaggtagtggcagatgtggatgaagccgatattgccggagtggaagacagtgcccgcgtcacattcaccgtggatgcctatcccgatgatgtatttgaaggttatgtaagacaagtacgtttgggaagcaccaacagcagtagcagcagttccactaccggcactactacagttgtcacttatgaagtagtcattactgccgataatcccgacttgaagctgaaaccccgtctcacagccaatgccactatctatacattaaacaaaaacaatgtattgactgtgcccggcaaagcactgcggttcacaccgaataaagacattgccaaaggatataaaatcaatgactgccaaggagaacacaaagtgtggacactggaaggcaatacttttaccgcacatccggttaaaatcggtatatcaaacggtacattgaccgagattctaagcggcatcaccgagaatatgcctgtcgtcacggaagccgtggtcaatagcaatgcccctcaaatggaaggagtcggtgaaaatggagaaagaagtcccttcatgcccggccctccgggaagcaagaaaaaaaacaataaataaacttgcacatcaaaacctatatgcaaaaaagacagatgaaaaagattatcgaacttcaaaatatcaaacgaaacttccgggtgggtgaagaaaccgtgcacgccttgcgcggcatttccttcaccatctgcgaaggagagtttgtcaccatcatgggtacttccggttcgggcaaatccaccctgctgaatacactggggtgccttgatacccccaccagcggagaatacctgctggacggcgtatccgtccgcaccatgagcaaaccccagcgtgccatactacgcaaccgcaaaatcggtttcgtgttccaaaattataacctgctgcctaaaactacggcagtggaaaatgtggaactcccactgatgtataactcttccgtttcggcaaccgaaagacggaaaagagccattgacgccctgatatccgtcggattgggtgaccgcctggaacacaagtccaaccaaatgtcgggaggacagatgcaacgcgtggccatcgcccgtgctttggtcaacaacccggctgttatccttgccgatgaagcgaccggtaaccttgatacccgcacctctttcgagattcttgtactcttccagaagttacatgccgaaggacgcacgattatcttcgttacccataatcccgaactggcacaatacagtagccgtaatatccgcctgcgcgacggtcatgtgatagaagacacggtcaacacacacatcctgtccgccgccgaagcactggccaccctgcctaagaacgatgaagactgaccttcatcagcaataagaaacaaattaaaacaatagccaattatgaacggaacaaacctattcaaaatagctctccgggctctagccaacaacaaattgcgcgccttcctcaccatgctgggtatcatcatcggcgtagcatccgttatcgccatgcttgccatcggccaaggctcgaagagaagtatccagcaacaaatctcggaaatgggttcgaacatgattatgattcatccgggagccgagatgcgcggcggagttcgccaagacccttcggcaatgcagacattgaaactggagaattatgagaaactcagcgaagagtgcacttacctctccggcatcagtcccaatgtatcttcctccgggcaattggtggcagggtcgaacaactatccctcctcggtaagcggagtaagcattgattaccttaacatccgccagctcagtgtggaacaaggcgaaatgttttccgaaaacgatatccgcaccgccgccaaagtctgcgtcatcggcaagaccattgtcgacaatctttttcccgacggctccgaccctataggaaaagtcatccgttgcaaccaaatacccatgcgtgttgtgggcgtattgaagtccaaaggttacaactccatgggacaggatcaagacgatgtggtactcgccccatacactaccgtaatgaaacgattgcttgcacaaacctatctgggcggtatctttgcctccgccctgaccgaagacatgaccgaagaagcggtggaagaaatcacttctatcctgcggcgagagcataagctgaaagccaccgatgatgacgatttcaccattcgcacccagcaggagctgagcagcatgctgaataccaccaccgacctgatgaccacactgctcgcctgcattgccggcatctcgctcgtggtaggaggtatcggaatcatgaacatcatgtatgtttccgttaccgagcgtacacgcgaaatcggcctgcgaatgtcagtcggagcacgcggtgtcgatatcctttcacagttcctcatcgaagccattctgattagtatcaccggcggtgtgataggcgtgattatcggttgcggtgccagcttcatgattaaatcaatagcccactggcccgtattcatccaaccttggagcgtactgctgtctttcgcagtctgtaccattacgggagttttcttcggatggtatccggccaagaaagcggcagatcttgacccgattgatgccatacgttatgaataaaacaatttagcgccacaccattcttctcgtttcatgactgcgggaaagtagcccacagacttgaaacgagaaatttatcgctacgataagataaatttaataccttctgcatcctattttaaccctgaactttttatctttgcctattatgaaacaaatattctctcaacgtcgcccgctggagccggccatacatatcgtcagctggttgctgatattcggctttccacttgtttttgcagacagaggaaacagcatggactggcatcagttcctacgccacagttgcgtccccctctgctattttctgatattctacatcaactacttatggttggtaccacgctatctcttcaatgacgagatgcgaaaatacatcatcgccaatgccatcctcatatttttctcctcattgatgcttcacttgctgctggaagccttcagcactcctccacccgaggaatttacccggcggatgcctccacgctggatattctacatacgcgacatcgtgctgatgatattcgttgccggactgggagctgccatccgcaccagcctgcgatggagacaagcgcaagaaatgcttctggaagccgaacggcaaaagacggaagcggaattgaagaatctcaagaaccaattgaacccccatttcctgctcaacacactgaataatatctatgcactgatagcattcaactgtgacaaggcgcaagaagcggttcaagaactgagcaaattgctccgacacgtactttacgacaatcagcaaacctttgttccattggagaaagagcttgactttatccgtaattacgtggcactgatgcgcatccggctgcctcagcaagtagaaataagcctgcatctggaaaccgatccgggcagttcgttactcattgcccccttactctttatttctttgatagaaaatgcctttaaacacggcatcagtcctacagctcacagctttatcagcatcgccatcaccgggaatacagatggcacggtacgctgcgaaatacagaacagcaactaccccaaaaccgggcaggacaaaagcggcagcggcatcggactggaacaggtaagcaaacgattggaactgatttatcccaaacattatgaatgggaaaaaggcatcagtgcaaacggtcaggtttattcttctatattaaccattcaaaccaaaaacttatgatactgaattgcgccatagtagatgacgaacctttggctctggaattgttgcaaagctatgtggaaaaaaccgctttcctacggttggcaggcaaatactccagtgcagtgcaggcaatgaatgagatacccgcacacgaagaaattcatatactttttctcgacatacaaatgccggaactgaacggattagagttttcacacatggtgaaccccgaaacacgcatcatcttcactaccgctttcggccaatacgcattagacagctacaaggtcaatgcgctggactacctgctgaaaccaatcagttatgccgatttcctacaatcggtgaacaaagcgatgcaatggttcgaactgaaacaaaaagccggaaacagaccggaagaagaagttaataacgaatatatttatgttaaaagcgattacaaactagtacagatagcccttgacaagattctatacatcgaaggactgaaagattacataaaaatacatatagaaaacgaacccaaagccatcttgtcacttatcagcatgaaggctatggaagaaaagcttccgtcaaagcattttgtacgtgtacatcgctcattcatagtgcaaaaaagcaaaataaaggtgattgaccggggacgcattgttttcggcaaagaatacattcctatttccgatagttacaagcaagagatacaaacttatttgaatagtcattctgtataaaaaatcttattatcaatagaataataaatcaaattcgtcgatatctttttgctaaaaacaaataaattacctatatttgcagcatagacaagggaagttgtgaaacttcttaatagaatagtttagttaagtctagtttagtttttgtgttgtaagtgctccctccgtaagcgaacggtcagggagcacgttttttatctataaacagacctaccgtatacaaagggaagattaagccatttcatatagcagactaaggttttttgaacgacagattattacgtcctgcagcaatgggatgtacgtcccactgcaatggaacgtacgtcctgccataatgggacatacgtcctactgtaatgggacgtaataatccactatatgaaaccgcttagtctgaaggaagaaaatgcttagtctgcccgaagatatgtctttatttaattttaacgaatttatttctgtgggagagtgaactaaatgaatgaatgccgtgttatatatttgtgtttttcatagtaatagatttaagattaatagttagtatttgcttgtgaaagtcagtacacttaaggataaaggcgtttatccgaaaaagaaaaaagaggtcactcccttacgagtaacctctttcttcttttatttcatctttcttttatttcatctcacgcaatgccttgcataattggtcgggacaggaagtggaacgatttccgcacttcactccttccagcttcgatattacatcttcaactttcattccctttaccaaacggctgatgccttgaagatttccattgcatccgccccaaaagaatacctgttgaaccacatcgtcttccacttctacctcaatgtggctgctgcaagtaccttgcgttttataagtaatcttcatttttactcttcctcagcaggtttcatgtttgtataaaccgtctggacatcatcaaattcttccaaacgctctaccatcttatcaattgtttcgcgctgttcgggagttacatccttcaggtcgttaggaatataagtaaagtcaccaccgacttcctcaaaaccgcattcttccaagtgtttctgaatagcggcatagctcttcgggtcaccgtaaatagtgattgttccttcttcttcatcgatatcgaattcatcttctacattgtaatctatcaaatcaagaatcagttcttccatatcaagaccttctttacgcttaaaagtaaagacacatttatgatcgaacaagaaagccaatgaaccggtagttcccatgttgccgccaaatttgttgaatacagaacggacatctgctacagtacgagtggtattatcggtcaaagtatcaacgaatactgctaccccgtgagggccgtatccttcgtaagtcatacctttgtaatcgctggtatccttacccattgcatttttaatagcacgctcgatgttatccttcggcatgttttcgcgcttacaagtagcaataacaccacgcaaggtcgggttgttttccggttccggtccgcctgcttttacagcaatagcaatttgtttacccagtcttgtaaaagtcttggccatgtggccccatcttttcagctttgtagcttttctatattcaaatgctcttcccattggattatatttttataaatggttattttatcaattatcttagtttcgcattcaatttgctttccagattggcaatcagcttagacatgattttgtcgatttgcttgtcgttcagtgttgcattttcatcctgcaacaagaagctgacagcatagctcttcttacccggttccaaattcttgccttcgtatacatcaaacagttctacttctttcagcaacttcttttctgtttcgtaagctatcttttcgatttcggcaaattggatattcttgtcgagtaacaatgccaagtcacgtcttacagccgggaacttggaaagttccttaaagttgaccttcgaagtcttgatggctttcatcagctcattccaattgatttcggcataatacacttcgttgtcgatatcgaatgctttctgaatcttcttgctgatgacaccaaacgtagccaataacttgccgccacgggtgtgtacgctgacagctacagaatagatatcattactcaaattaccgaataccacgttaccgaagttcaagcccaaacgagtgaagatattcatcacataagctttcagttcataaacgctggtgttttcatcaggatgtgcccatgagttgctcacacgcttacctgtcacccacaatcccagatgatattcttctttgtatgcagccaataccttttcagggttcttcttttccgcattaaagaaatagcagttaccgaactcaaagaacttcaaatcggcattcttacggttggcattgtgctgaatgctttccaagccgccgaacaacagcgtctgacgcattacattcaggtcattgcttaacggattcattaagttaacaaggttttcggacttgtaggtttccaaaccttcataatatccggcagcagtcagtgagttattcagaatttcattgaatccgcaacctatcaactgttcggaaatcaagttctgaagctgttgggatttatctacttcccccttcgtggtcaggcttgactttaatgttgtgggaatttccacattattatatccataaatacggagaatatcttctaccacgtcacagtcacgctgaacgtctacacggtaagcaggaacttgtaaagtcactccttcgggagtctcgtttacaatcttcatctcaagactggtaacgatactctttatcgtctctgccggaattactttcccaatcagagaatgagctttttcatagtttaattctaccatgaaatcagcaaccggatgaggataattgtctttaatttcagaagcgatagttccgcctgccagttcttttaccagcaaggcagcttctttcaaggcataaatagttccgttgggatcaataccacgctcgaaacggaaagaagagtcggtactcaaaccatgacgacgcgccgttttacgcacccaagtcggattgaaatacgcactttcgaggaatacatccactgtttgttccgtagtacctgaatccaagccaccaaatacaccggcaatacacatcggctcttcagtattacatatcatcaagtctctatcggacaaagtacgttccacttcatccaaagtggtaaacttagtaccttcggcaacagtctttacaacaatctttccacccttaatcttatcggcatcaaagcaatgcagcggttggccgtaagcatgaagaatgtagttagtgatatccacaatattgttgattggacgaagacctatcaaacgcagcttgttttgcagccagtcgggactctctttcacggtaacacctttgatggaaactccggcataacggggacatgcttcggtattttctacttctacagtgatatccatatcgtgattgtctaccttgaagccttctaccgaaggacgggttaacgtagcctgtctgccgttttgaatcaaataagcatacaagtcacgtgccacgccatagtgagagcaagcatccgcccggttcggagtaatatccacttcaagtacatagtcgctcttgatgttataataatctttggcaggagttccgggcacagcatcgtccggcagaacaatgataccgtcatgaccggttccgataccaatctcatcttcggcacaaatcattccgactgactcaataccgcgaagttttgatttttttatggtaaagcattcttcaccgtcatatagctttgtgcccaaagtggcaaccacaactttttgtccggcagctacattaggagcaccgcaaacaatctgcacaggttctccctgtcccaagttaaccgtagttacatgcatgtggtcagagttgggatgaggttcgcaagtcagcacttcaccgataacgataccttccagaccgcctttaattgtttggacttcttctacgcctcctgtttccagaccgatagaagtcagcgctgctgccacttcatcaggggtcaaatcgaagttgacgtattctttcagccaattataagagatattcatatatgatatattttatgtatttcaaaatgacttgcaaatttagtaattattttcttttatcctgttatgagaacccgtttaattttcatcaacctcgtcattctgaacaaagtgaagaatgacaggataaggattaaaacggtaaaggtccttcgggaatgggtgctccgaacggattattatcggcaggtgcagcatcaggaggcggaggcggtacactgcttccaccgccattcattttggaacggataattcccggttcttctcccggcaacggtataatcatttcatcatccggattctggaaacgggcgaactcaccgcggaaacgcaacaacacatcgcccacagcaccgttacgatgcttggcaataatgatttcagccataccatgcaggtcgtttcctttttcatcctgaaatatcttataatattcggggcgatggataaagcacaccatatcggcatcctgctcgatggccccggattcacgcaagtcactcaactgcggacgctttccgtcaataccttcacggctctccacaccacgattcaactgactcagggcaataatcggaatgttcagctcctttgccaagcctttcaacgaacgtgaaatagtactaacctcttcctgacggctgccaaacgacataccgctcgcattcatcaactgcaagtagtcaatgataattatttttactccatgttcacgtaccaaacgccttgccttcgttctcaattcgaaaaccgaaagagaaggggtatcatcgacatacaacggagcgtcatacaattccttaatcttatagtccaactgcccccattcgtatggagccaactgcccactcttaattttctcgcccggtatttcgcacacattgacaatcaaacgattgaccaactgcacgttcgccatttcaagcgagaacaatgctaccggaatttttgcattgactgccatattcttagccattgaaagcacgaatgctgttttacccatggcgggacgagcagcaataatcacaaggtcggagttctgccagcccgaagtcatcttgtccagtgcatggaaaccactctccaaaccacttaaaccatccgtccgagccgccgccttctgaagcatctcatacgcctcctgaataaccggattaatctgcgtataatctttcttcatattctgctgcgaaatctcgaacagtttcccttcagcttcttgcatcaaatcatccacatcctgtgtctcgtcgaaggctttcgtctgaatattactggtaaaagaaatcagttcgcgtgccaagaacttttgggctataattcgcgcatgatattcaatatgggcagacgatgctaccttcccactcaactgagtgatataaaaaggacctcccacttcatccaaatcaccggtgctgcgcaactgctcggcaacggtcagaatatccaccggctgctggcgtagtgccaacgccgtaatagcctgatatatcaactgatgacgatgctcgtaaaaagactcggggcgaagaatttcactcaccagtgaatatgcgtctttttctatcattaatgctcctaatactgcctcttccaattcaggtgcctgtggctgcaaatgcccatattcatcaacaggctttgcctttacagttttaggagtacgtgtcgtttttcttacttctgccatttcctttcgtttaaagtagggcaaagatagaactttttgacgagttgaacatccagccgggagcaaaaataataaaagaaatacgaagactttttctataaaacatgaacaatccatacacaaaatggttttttatatggttaaatgaaaagtttaccttatatttgagccgtgtcacgtgctcaggagccgtaataaagacacactagaaattaatctaaataaaagaatatgataacatttccgaatgctaaaatcaatctgggtctgaatattatagaaaaacgcccggatggttatcacaacctagaaacaattttttatcctatcaatcttcaagatgcgttggaagtcacacgctccacaaacagtgacaaagagtacaatctccatgtaagcggaagtgctttggacggcgaaccggaagataatttagtagttaaggcttataagttactgaaagaagattttccacaaatggcagccatcgaaattcatatgtacaaacatattcctgcaggagcaggattgggaggcggatcgtcagatgcagcatacatgattaaattattaaatgaaaagtttgctctgaacatcaaccatgcgaaaatggaagaatacgcggcacgcctcggtgccgactgtgcatttttcattcaaaacaaaccggcatttgcaaccggcatagggaatatcttcgaaccggtcgatttgtctttgaaaggatatcacattgtattagtcaaaccggatatttttgtttctacccgtgatgctttcgctgccataaagccacaacgtcctgccgtttccttaaaagaagtaatcaagcagccggtagatacatggaaagacaacatgcaaaatgattttgaagacagtgtattcttgaaattccccgaaatagctgccatcaaagatgaattatatgatttgggagccgtatacgcctccatgagtggttccggttcgtgcgtatatggtatattcaaagaacctatagagaacgtagaagataagttctgccagtgtttctgcagacagcgtgagttggagtaaggattaaccattcttctaacttgttcagaaaactcttcaaacagccggtgcatgctgtttgaagagttttttatgtcatcaaacttagaatgcaacacacaagcataaaaaaaactgtcccccgactcacgtcgaggaacagccacaacacaaacacaaaataaaacacgacaaaactactatgcaattttttagcctgctctatgttttgagtaacataacttaccaccggtcaggtattcacatatccaagaggggtttcaggttatttgcactataaaaacgccacactagcgtcctttgttcatcggtctttctaaaaatatcttaattctttattgaattcctctttctcttaacttaacctgccaattccatgcagatttcagtgtctcttcgatagtagcctttgcctgccatcctaactcttcgttagcgaaagtcgggtcagcccataccttaacaatatctccctgacgacggcctacaatcttatagttcaccttcacgcctgtagcagcttcaaacttattcagcagttccaatacagacaagccgcgacctgtaccgatattgaatacttccacactttctttctgcttatcgttcaagatacgatccatagcaatcacgtgagccttagccaaatctactacatagatgtagtcacggatacaagagccgtcaggagtgtcatagtcatcaccaaatacgctcaattgctcacggatacccattgcagtttgagtgacatacggcaacaagttttgaggtacgccattaggcaactcaccaatcaatgcagacggatgtgcaccaatagggttaaagtaacgcaacatgatagcgtgaacaggagaacctgatgctacagtatcgcggataatttcttcattaatttgctttgtattaccgtatggtgattctgccttcttgataggagcagcttcagttacaggcaatgtatccggctgaccgtataccgtacatgatgaagagaagataatgccttttacattatgcttaggcatcaactccaacaagttgattaacgaaaccagattgttacgataatacaacaacggtttttggcaagattcacctactgctttgctggctgcaaagtgaataataccttcaataccggcatatttagtaaacagtttgtccataccttcataatccagacagtccaacttctcaaatgccggacggatacctgttactttttcaatattgtcaaccacatcggcgttagagtttgagagattatctacaatcactacgtcgtaaccgctttgttgcagttcaactacggtatgagaaccgatatatccggttcctcctgtcactaaaattctctttttcataagacttattattctgtcgtttttaataggttcaaaacaacttagaaggatagatacccttacgaatcatgtcgttgatacgaagaactacctgaatcttatcatcgtgcgaaaccaatcccatccatcgggcaggtgtttcaatcaccttcactctgactccttctcttatccgtttattcataaaagcaggtatagaataatgagctttcaaatccattccgctttcatcaataaacttatcaaatgcagcttgcatttcattaaatatatccggcctgaagccccacatattcattgaaaccaaactattatcatccagtgccacccatttatgcacctcattaggatacatgggattaccactgatccgctccactcctgtacggtctgttacagaaattaaatatccgttttcatccacttcacaaattccccgggttactccaccgctctccgctaaaacgtttttcaatctatagcagacattgaaactatgataaccggcatctttcaatgccactaaattattatacaataattcaaaactctcacgctgatagaaattaactgcatttatcactccaaatggggcatctattaattcttctcccatcaatacagctcttaccgaaccataaagtgctgttcgcttcggattacgtttttcttcgggaatggtttctacatcctgataaacatattccacatccaccacgtgctcgtatttgcctgaaaccagttttttgaattcttgttcaaaatgtctacttatgacaaatactattttatcaaatcccactcttacggcatcatatacggaaaagtctaatatcgtttcgccattgggaccaatcccttccagctgttttaatccgtcatacttattccccatagtggccgcaagtacaatcaatgtcatagccatttggtctctctattaattctattgcaaaaataagcataataattgaattaaacagtacgaaaaacgaaattctttgtacaaaaaagtccgaagcactgctccggacttctgaattaccttatttaaaggatgaattactctactccaaacaatacagccaaacctttgtcaacaccggagaatcccataaatgccatagccagcagaccggcagtaaccagtgcaatagccattccctgcattcctttcggaatatttaccaggctcagttgttcacggataccggcaaacaacaccatagccaaggcaaaaccaagagctgtcgaaaaggcgtaaactaccccggtcaacaaatcaaagtctttttggattaccaatatagccacacccagaatacaacagttggtggtaatcagcggaaggaatactcccaatgcctgataaagagcaggagaaactttcttcagaatgatttctaccatctgcaccaatgctgcaatgacaaggataaaagcaatggtctgcaaatactccagtccgaaagcatcaagcacaaacttctggataaggtaggtaacaatggtagcgatggtaagcacgaatgcaacagccgctcccatacccgtagctgtctcaactttcttggatacaccgagaaacgggcagatacccaggaattgtgacaacacaatgttgttcacaaatatagcggtgataaatatcaatatatattccatattcttactttttacgggttatgctttcttcagtttattcacaatcgcaatgaggtaacccaaagcgatgaaggctcccggtgcgagaacgaaaatcaacattccgtattgctccggcatgatggcaatatcaaacagcttgcctgtaccgaggaactcacgtacaccaccaaggatagtcaatgcaagagtaaatccgagtcccatacccagtccgtcgaagaatgaaggaacagggccgttctttgcggcaaatgcttcggcacgtcccagcaggatacagtttactacaatcagcgggatgaacaatcccaatgtagcataaagtgccggcacgtatgcctgcataatcatctgcaacaaggttacaaatgacgcaataaccacaataaaagcaggaatacgcaccatatcaggaatcagattcttgatagacgaaattactacattcgaacaaatcaacacaaacatggttgccaatcccatacccataccattgatggccgaagaagtggttcccaatgtaggacacatacccaaaaggagtacaaacgtaggattctctttgacaatcccgttcatcaatactttaaaattattcatagtctgctccttccttattttttgtttttacaatctttgttaggacattcagctttcttgcagtcaacgttggcacagttggctttcttgcagttgacagaatcgcatttttcaccacaagcaaccttgcatgaatcacattttgcatcacaagtctgcccttccttacagagagttccgctacaagctgttgtatccttttccactgttgccgatacttgctgagtagctccactggctccgtctacctgctgaccgctgtaagcagcgtatgcattattcactgcctgcaagaatgcacgcgaagtaatggtagaagcagtaatggcatccacctgtccgccatccttgctcactgtcaaggctttctgtcccggattcatgccggtaatatcgcctttaccgcctttcttaaaccaatcggctgcttttgagcccaatcccggagtttccgcatggctcaacaaagaataatcaataatattgccgtctttatcgaaaccaaccaacacattcagtgcaccaccgaaaccattagcagaagattctacggctgcaccgataaattctccgcctttggttgctttatatattttataggtagcaccttccagttctattgtctcaggggcttcggcaggattgttatcgaatcccggaactacgatagcaatggcatcactcaaagccttggcattagcctgtgcaatgggttcctttgtcaactcattcacataacccagcaatgctccggctaccacggttacgcctgtcagcacgataaccatgtttttcaaagatgattctagttttttcatttcttcactacctccccgaatcttttaggtttgcaataagtattgattaacggagtgaatgcgttcataatgaatatagcgaaagacataccttcgggatatgcaccgaacaaacggataaccacagtcaggaaaccgatagccacaccgtaaataatcatacctttatgagtcataggcgaagtaacatagtcggttgccataaagatagcacccaacatcaaaccacctgtaaacaaatgggccaacggagaagcgtaagcaaccggatcaacccaatgcatcaaaccggcaaatacaaacactgtcaccaatattgatacaggaatatgccaggagattatctttttccacaacatatagcccaaaccgagcaacagcgctaaagcgctgacctcacccaaagaacccggattgttacccaaaaacaggctcatggtatcgggcaactgtcccaatgcatttacatcacctttgactgccattttcattagagccagcggagtagctcctgtctgagcatcggtataacttccccattgttgaaccaacggccatgaagtcatctgcacaggaaaagaaatcagcaggaagatacgacctaccagcgcggggttgaaagggttgcagcccagtccgccaaaagtcatcttaccaatgccgatagctaccaatgcaccgataataataatccaaagcggcaggttggaaggcaggttgaatgccagcagcacaccggttatgacggctgaaccatcacagatggtagagcgttctctcttcaaaataaacttggtaatcgcccattcgaagaatacacaggcagcaaccgaagtcaaggtcaccaccacggcgcccagcccgaacatatagaatgaaaccagcaacgcaggtatcaacgcgatgagcacaccgtacatattcttttgtacactgtcaccgctatggacgtggggcgataatgatactattaatttattagccatactattttgtcgaattattttttagcattacgtgcacggataataccacctactgtgcccttacccaaacggatatagtccagcaaataacgatgagacggacaagtgaactgacacgaaccgcactcgatgcacgacattacatcttctttttctactctctcccagtccttgtgagccgaaagtgttgccaataagaaaggctccagtcccataggacagacactgacacacttggcacagcggatacagggctgagcttccgcacgggcagcttccttatcattcataatcagcacacccgaactacctttacagataggaacttctgtattaaccaacgctttacccatcatcggaccaccgccaatcacctttccggtatcttcgggcaaaccacctgccgcatcaatcagctggctcatcggagtccccatacgggtgaggaagttggaaggattcttgacagacttacccgtaacggtcacgacacgttcaaacaaaggtttgttcttctgaacagcttcataaacggcaaatgcagtacctacattctgaaccaccgcacctacattgataggaatagcaggaggagcaggaacctggcgaccgatcacagcatctatcaactgtttctcaccaccttgcggatatttcacctgcaaaggaactacctctataccgggatattgagcagccttttcagtcatcaacttaatagcatccggtttattattttcaatgccgatatatcctttagtcactttcgcagctttcatcagaatactgacacccaccagcacctcgtctgccttttccagcatcagacgatggtcggcagtaagataaggctcacactctacagcattgataataacacattccgccttgcatcccggaggaggagaaagcttcacatgagtgggaaaacaagcaccacccatacctaccacaccggcatcttttactttagcaacaatttgctcgggcgttaacgtacactctttcaccaatgtagaactgcgatctattgattcttcccattcatcaccgtctacatcgataaagatagccggcttacggtaaccgcttgcatcaatcacggcatccaccttattcactttaccggatacagacgagaagatggctgctgaaacaaagccacccgcctcagcaatcttcgtacccacctttaccacatcgcctttcttcacgatggcagtagcaggagcgccgatatgctgcgacaaaggaaataccgcctgcttaggaagcgcaagggtctcgatagctttgcctgctgacaatttattttctgccggatgtactccaccaattctaaatgtcttcactgttatatctttttaattttacttactttgaattttgattatgcttcagccttaggagcttcaggtgctttcggagcctcagctttcggaacttccacctttggagcttccactttcggagcttccacttttgcagcagccggtttagtagcagcttcacctgccggagcttccaccttcggtttacgcggcgggaaattgatggcctggatagcacccttcggacattcctgttcacacttgcggcaagacttgcacttggccggatcaatgtatgccagattgttctccagtgtaatcgcctcaaacggacagactttcacacacttgccacaaccgatacagcttgccttacaagctttgttggccacggctcctttgtctttgttcacacacatcaccactacacgacggttgttcttgcctttcggacggatttcaataatcttgcgcggacaagctttgctgcaagcgccacaagccgtacatttctcttcgtctacttcaggcagcccggtttcaggattcatgtgaatagcatcaaactgacacgcttccacacaatcgccacatcccaagcaaccaaatgtacaaccggtctcaccccccgaagtggcatgagcgatggcacatgacttagctccatcgtacagagcagtacgagggcggttttcacaactaccgttacatctcaccaccgcaactttcggttcggcagcaacggcttccaatcctaaaatggcagcaactttctccataacgggagcaccgccaaccggacataacttaccctccagcgaaccggcatcggcagccttcacacaggcaccggcaaaaccggaacaaccgggataaccacatccaccgcaatttgcctgaggaagcacttcgctaacttgggcaatccgcggatcttcatacacagcaaacttcttggaagcggcatacaagattaccgcggcaatcaagccaatcgctcccaacgaaattactgcaaccagaattaaatccataagttttagttagttatttattaattgttttttataggttcaagcgtaaaagagaacttcttactcaactttcctctacatatatatataataaaataatatggagctaaagccaataaagaaataatggccgacttcagttcatcaccaccggtaagatgcatcgtaatgaataaagcagccaacaatatcaagaaagggacgccaaaagccaaaaatacggcctgcatccccatagaagtcgttccataaagcattacctcctcacccactcggtaagaagaagctttcgtgtcgaaaacatcaaccagcttttctttgctctcggatgcattgcagtgtccttttacgctgcaagctgaacaggcagaagtttgaacgattctcactcgaatatgaaaaccgtttatgttttccacaataccacgatgtttgattatatcggtcatttttgcaaactctacattacaaaactgtggcaaaagtaatactttaattgcaatctatgaaggataaaatgatattttcgttataaaaatcgttttttttatcggaagatatcgaaataataagcaaaaaggtatatcaaaagtccccaagcactcttgatatgcctttttctctctagaccttactcttactttctgccacctccaccagataaacactgatgcaaatcataacaatcgctcccagttgcgtccatgaaaaacggtcttgccccaacaaaaatgaagtaacggttgctactatcaatatcagatatccataaatagccactaatgtcgttttcaggtatttcaatccgatgggaagaagcaaatagctgatagttgtcggaaatatgagtacaaacagcaataccaacatcggggtggaaaaaagcgacatgctcattataggtgcttcaaatccatagattgaattgacaataagcgacattatcgctgctcccaaaaatgtatatttcaacaaggtcatatctcccactcctttaagcaagcgattgctgacaactaaatatatagcataaactatcgaactgaccaagcatatcaggtttcccgccatggcattggatgccaaatcgtcaccgggctgtgtagcaatacaaagaatagctcctcccaatcccaaaccaataccaagaagtttcatccatgttactttctctttgtagaataagacagtgataacaaatacccaaatgggttccagactgacaaatatagaactggataccggtgtagtcatactgatacctaaaaggtaaaaaaacatatatccgtacattcctaatgctcctaacaaaaagagctgccatctctgacgggtggtagaatcttccggtttacagaaaatatcgataagccaaaatgctgccgccccaaataccaggcggaatgttactcctgtgaccggagcaatccataaaggcaaaagatatttcaacgcattcatattaaagcctcccaatgctttggagactatcatgctaaggtttgcttcaacttgtttgttcataataagtttttttacatgggtataaccatataagcaaccctttggttcaaagcacctctgataaattcacacgcagaaactacaatacttcatactgccatcttttttgttatatcttctcttgcctgacattaagcactcctctctttaagaataaacttttcattccttataactaactacgttccattacagcaaaacgaaataacaaggaaaggggaaacaactgctcccccgatttatattaaaacgactcataagtactcagaattccaatttttcctgtttcatcacaataaacattgccattaacgcaatcatcaggttcaaccagaaagcaaaggtatacgaatgggaatgaaacagattctgggctatattcacaataaacggacaaagaagaatagccacataattcatcgccatcacaaaggcaagtgccaatgtcaccttatggggtacagccacatcagaagttttatcataaatcaatggctgaataataccataagccaatccgttcaaaatacaccccaaagcaataagtatctcagaacgacttaccaaaataattcccataccgcaagctatcagcaacaagcaaatcatatagatacgccgtcccagcatctgcacaatcttgttcaatacaaagcccggcgccatgatagcaagaaagaataacgaaatcaggatgcccgcccgcccactggacaatccatattcttccatcaaaaaaggaagattaaaactgacgattatcaccagataagtagccagtccgtaaaatgccataagtttaaccagcgccttcacatcgatacctcgcttgcccatctcttttacagtagaggcaggtacgtcatctttgggatgatagccggacaaatctttctttaaataacatgtaagaaagatggatataaacggaaaaagataaaccagaaagggcaagtgccagttcacttctgccagatagccggtcagtgtagtggcaagtactaatgtaatattggtaatagcggaactatagccaaactgcctggtacgataactaccgacaaagtacctggatatcaacccggtggacaaaggaacaatcaatcccgaaccaatgcccagcatggcactgatagctatcagttgccacattttaccggacaacaggtagagtatgccgcttactccgaaaatagtcaatcccacttgcaacagcaacagattgttcaccttttcggtcaacttacccgataacaaaataaaagggataataagaagtgaaggtaacgaggaaagcatctggatttccaaatccgtggcagacggaaaaattttgttcaaatcccccaagatgggagaaactgccaatcccggcaatgcatttaatgccgaaatagaaaatatacctattaatgtaataaggggaattgtcccctgccctgtttgtattttcataatgaaattggtttatattatgataaaaacaaaatgtaaaagaattggttcaataataaactccctgcaagttaccataaattaaaaaacataaaatcaaggaacttttcattaccccttatgttgagggagaaaaacgcgggaaactcccacgttcttcattgtattactaacctaaactttaagtaaaatgaaagattgtaattgtgatttgagagaaggtgacgcaaagacatctgtgtttggctcaaatgaaatgctacagcctgccccggtagacactattccgatgaaccctaccactccgcagattgcctatcaaatggtaaaagacgaaacatttgctcagacccagccacgtcttaatctggctactttcgttactacctatatggacgactatgccaccaaactgatgaacgaagccatcagcatcaactacattgatgaaacagaatatcctcgtatcgcagtgatgaatgccaaatgtatcaatatcatggctaatttgtggaattcacccgaacaggcaaaatggaaaaccggggcactggctatcggctccagtgaggcttgtatgctgggaggagtagccgcctggttacgctggaaagacagacgtaaagctcaggggaaaccgactgacaagcctaactttgtcatttcaagcggttttcaggttgtttgggaaaaattcgcccaactgtggcagattgaaatgcgccaagtacctctcaccttggacaaaaccactctggaccccgaagaagcactgaagatgtgtgacgagaacaccatctgcatcgtccccatccaaggtgtgacatggacaggtttgaacgatgatgtagaagcactggacaaagcactggatgcctacaacgccaagaccggttatgatattcctatccatgtagatgctgcaaccggtggtttcatcctgccgttcctcagccccgaaacaaagtgggacttccgcttgaaatgggttctctctatcagcacttccggtcacaagttcggactggtttatccgggactgggatgggtggtatggaaagacaagaaataccttccggatgccatgtcattcagcgtaaactatctgggggcaaatatcactcaggttggtttgaacttcagccgccccgccgcacagattctgggacaatactaccaatttatccgcctgggattcgaaggatacaaagccatccaatacaattccatggaaatcaccaagtacatccacagcgaaatagccaagatgactccgttcgtaaattacagcgacaatgtggtgaatcctttgttcatctggtacatgaaacccgaatatgcaaagaacgccaaatggactctgtacgatttgcaggctaaattacagcaaagcggctggatggttcctgcctatactttaccggagaacatccagaattacgtagttatgcgtgtggtagtacgtcagggattcagccgtgacatggcggatatgttgttgaacgatatcaagaatgccatcagtgagttcgaaaaactggagtatcctactcagacccgcattgcccaagacaagaatatcactgtaaaaggtactgtgtttacccataatgcacatagcaacgctgctaaaaaataagcgtagataacaataatggagttgtgtcaaaacgtggataatgctgtcgttttagcttgtaggggcgagattcgctcgcccgaaaacagtttgctttgtgtcttcgggcaggcaaaccctgcccctacagctgacaattggatagcccggtttagttttgacacactcccttcaatcgaattaatttatggaaagaactataactatccaacagataaaagatgttgcacaggaggcttacaatctgtataaagacaatacagaaggtaaaaatgccgattacattccttatttggctaatatcaatccgaaactattcggtatcagtatttgcctgatgaatggcgaaaaaattcaattgggtgactatcaataccaattcggcattgaatctgtgtctaaagtattgacagctatactgattcttcgtcaatatggcgcacagaaagtactcgaaatgattggtgcagatgcaacaggactgccgtttaactccatcatggctatcttgctggagaatgaccatccctctactccattggtaaatgcaggagccatcagtgcagatagcatggtgcaacccattggcaacagtgacgccaaatggaaagctattgtcgacaatatgactgaactctgtggcagtgctccccaattgattgacgaactttataaatcggaatcggccactaacttcaacaatcgttctattgcctggttactgaaaaactataaccgcatctacgatgatcctgatatgtccctcgacctctatacccgtcagtgttccatgggcatcacagccgaccaattgtcagtctgcgcagctacaatcgccaatgacggcctcaatcctgacaccaagaaacaggtattcgataaagaacttgctccgaaaataacttctctgatagctactgtaggtttctaccagcacacaggcgattggctttacacctccggtgttcccgctaaaacaggtgtaggtggcggagtactgggagtgatgcccggaattatgggtatcgcagctttcgcacctcctttggatgaggcgggaaactctgtaaaggcacaacttgccattaaatatatcatgaacaaactaggtatgaatatctttaacggacatcgtatcagtatcagttaaatctgccttttctcaatcaaaaagccggtctttttcctacccgttcaggagatgaccggcttttccttttaaaatattttcctcaaaacatttttagcattctgacattatatctatctttgcaaagaaagataattatttatattatgaaaaacaagtttatacagaaaatcagtctaggcgccgcactattgctacttacaagcaataccacctttgcacaagctcccgagcaaagttacacaccaacccccgagaacatgaaagcacgtcaggaatttcaagataacaaatttggaatcttccttcattggggtatctacagcatgaccgcacaaggtgaatggtatatgaccacccacaatatccaccgcgatgaatatgccaaattagcatcgggtttttatccttcacgtttcaatgccgctgaatgggtatcggccatcaaagcctcaggtgccaaatatatctgtattaccagccgccaccacgacagtttctcgatgttcgataccaaagaatcaaattttgacattgtagacgccactccgttcaaacgggatgtgctgaaagaattggcagacgaatgccacaaacaaggcattaaactccatttctattattcacacttagactggcgtcgcgatgattatcctgaaggaggaagcaccggacgcgggacaggacgtcccaaaggacacggagactggaaaagttattataaattcatgaacaaccagttgaccgaactactaaccaattacggaccggtaggtgccatctggttcgatggagtttgggatcagcccaaagatttcgattggcaactggaagaacaatacgcattaatccacaaactacagcccgcctgcctggtaggtaacaaccatcaccgcactccgtatgccggtgaagacttccagatgtttgaacgcgatctgcccggtgagaataaagcaggactttcaggacagagcgtcagctcacttcctttggaaacctgtgaaaccatgaatggaatgtggggatataaaattgaagaccaaaattataagtcgcccaaagcgttaatacactatttggttaaagcagccggaaagaacgcaaacctgttaatgaatatcggtccgcaacccaatggagaacttcccgccacagctgtagaccgcctgaaaaaagtgggcgaatggatggaccaatacggagaaactatttatggaacacgtggtggagatgtagctccccatccatggggtgtatcaacccgtaaaggcgaccgtttgtttatccatgtattagatttaaaggataatacgctttacatacctctgaaggcaaaagtaaaaaaagcaatgcaattcaccgataaggcttctctttccttcaaacaggacaaagacggtatattgttgaagttacccaaagtacccgacgatatagattacgtgatagaattaattattaaataacctttatgagcaacaaatcaaaaattgaaatctgcgccaattctgttgaaagtgcagtaaaagcacaacagggcggagcttatcgtgtggagttatgcgcaggtattcccgaaggaggtaccactccgtcgtttggcgaaatacgcatggcacgccaactcttacaacagaccaaattgcacattattatccgtccccgtggcggagattttctatattctccattggaacaagaaatcatgttgcatgatattaaagtagcacgccaattaggagcagatggagtagtattcggttgcctgacagctgatggcaaagtagacgtggaagctatggaaaaattgatgaatgccgtaggcgacatgagtgtcactttccatcgcgcttttgatatgtgccgtaatccgcaagaagcattagaacaaattattgaactcggttgccaccgcatccttacttcaggtcaggaagccactgccgaaaaaggtattcccctccttaaagaattggtagaactggccgacgaacgcattatcatcatgccgggatgtggagtaaatcctaaaaatattcgtaaaattgccgaggaaaccggtgcctgcgagtttcatttctctggacgcaccacctgtgaaagcgatatgctataccgcaaccccaaagtatcaatgggtggcactgtgaaaatcgaagaatataaaaaggatgtaaccgacccggatatcgttaaagccgccttagccgaactagccttgaaagacgaaaatgataaggctttggaaaagaaaaccaaagaatccaaaaagttgaagagggttaaaagagatgatgagtgggatgatgaagatgatgatttggaagatgataaataatccgaaagacaatcaataataaaaagaatgaggctatcccgaaaaaaacggaacagcctcatttcttttatatctgcctacaaaagtttaaagcttatggattactttcatcagttgctcgcctaagccgatggtataaccttgtgagacaaatactacacgattaaaggtatccccaataataaacataggcaaaatagtcttgttaggcagcttcatgccttcagctatctgtttttggatagccccgtccgcatctataccatatgtaatagtagagggcaatcccggaaattcttcaggccggaacttcttgaactgctcttcattggggaataataatacaatacttcttccccactgctcaaaatctttgctcaatgctgcaatatcacgcaatgcatgatttgtaggttcctgaccggctcccaatacagccacaatataataaccacgcccggtggtagaaaggatggatttcaactcatcactatcaatcggcttataaagagactcggaattgaaattgccgataacctgaacatcatccttgctttcgcgcatcaccaaatcaacagttgtcgtttctcccggcttgatggtaaagaaagtaatatcagaaagcacaccgccatttgccagacgagtccctgtcaccaacatataatttccttcatcaagtgccgttccattcttcagcaaattgctccaggtggcaccacctcccatatcgatatcaccttcgtcataattcagtaactgcaaagtcccttcgggagtcacctttgaaatagtgaagtgagaataatatttgggatcttccaatgatttgattggagtatattttgcaatcaatttacctgtctgtgcagctgacggagaaacagcctcaaagtctacatcaaccggtctctcatcacctataatcaattgcaccttacccgtcacctcgtcaatacgtgccggaatccccatgcttcgcgccatggatacaaagaatatatcacggctatgcgcatctgccacacgagcacgccatactccggcaggtgagatcggtgcaccgcccaaattgcagttgttgtccacctgaatgctatcggccacccaggaagccagcttcatcggatcggcacggaacgcttccatatcttgttttgaaacaaccttaccgaagaaagacttatacggtgtcagcatttcattgcttacacgcggattacggacaaaacggcggaaatactctgcattttcgcaaaggcgagactgcatgtggtctaccaatacttcaagactgacatcgcgcaagtctttagaggaaattctctgcagaaggtctattccccccttttttgatttatcggaacgcaagcgggcaaggaaatcacggatcaccagatgattaccgcgtgacgcaaccaaaatcttagccacggcttcttcatccaatttatactccttcgcaaagttacgagccgattcatcactcataaacgtagctacatacgcattgcgaatggaatcttcctgtgccatccggcgattatttccggcacgctgttcgggagtaacttcaggcatattgacaccttcggcaggaggaacaatatccacttccaccatgtaattatctcctgctgttttatccagcttcactgtcagattattatccttcccaaatgaaagtttggaatatccgaacttaccatccttagaagcccataccaacatatcgcctttaccggcagtaaggaatgtttttccccgagtatctgtctgtttacgggccacagtataaaattcagcataattgtatactttaaattccacctttgcgtcagtcaccggattaccttcggcatccaccacggttacctcagctttagctgtcggggcataattatcaattacattgatctctgtataattgggagtttcatacattacttcttccggaccgttgtatcgtccgaagactttcgtatgcatcaacattccacgtgaagccggagcgttaaaccaacctaaatccagaaccggttcaggttcacacgcaccaaagaaatgccattttccatctacccacgcttccacccaagcatgattatcatctgtatgtgcccaacggggcgtataaacctgacgggcaggaatgcctaccgaacggagtgcagttaccgtgaaagtcgattcctcaccacaacgcccgtaagctgtctttacagaagcgagtggagaactggttcgcgcatcggatggtgtatagattaccttttcatgacaccagtgatttacttccaacacagcatcgtgtaatgaaagtccctttacccgatccttcagctcttcatagaacaccttacggctgtcatccaaattctcgttattcacccgcacaggcagaacgaaatgacggaactcacgctccggaattgtcttgccccacggcatttcctcacgggctttcaatgaataatcaatattttccagataatactcaccggaatagtccgtaatatcccccaatggcatataagcatataggaaggtcagagcttcccgctgttcgtcactcatcggttgttcgaacacctgaaacaggtctccgtgcgacaactttgaacgtcgggtttcaaagtcttgctgaacggcattccgttcggcagcatcacttatcaaatgtttgttgttggtgcacgaggtaaaactcagcattaaactaagccccgtggcacatagagccaataacttcatgttgttaattaattaagttagcaattattattggctacaaagataaaactttttagcaggaatgcgaaaataaatatttttaagtgtcctaaaagctatttatctgcagaaacattgtgccgggaagtatcggcattcgcattttgcttttcataatactcttgtttccgcttatttgcctgctgcaccagactggttacatatacggtaaagataggaaacatcatcattccaagcgcagccagtaccaccgaaagtatcttgccggtcggagtcacggcataaatattgctacccacggtggtcacatccataaatgcccaccataatgcactccaataatctgtcaccatcgggttcaccttatgctccagcacaaaaaatatcagactggcaaaataaactgtcgccatcaacatagtgatataggaagtgaacaaacccgaagctttgcttcccgagagccatcccaccacaatggccagcgcataccctcctcttagaagaggtataaaacgaagaaaataacttacctccggagaaaaagtgatgtgataataatcgatgatattcagatatggaatagaaaccagcaaaaaaacaaagtgactgctcaaatatctccatttatcgggtgccagaaagaattcaagcagaaaatcaaaaaggaaaaacatacatatccaaaattgtattctgagataactcccctgattaataaaaggaatattatggaaagtatccatcgaaatacttatgattaagaaaagagacagacagaggattaagacatgcagaatcccataaattccttttcgggaatagataaaagaagaaaatgctgttttcataaactatacctatttattattgtttcccctaaaacaccttaaaactgtactttgtttattcggcacaaccggggttaataaacctaaacggataaacatcaattcggggaggttgttatagacacgtaacaaaaacaaatatattttttaaacctaaactttatggcaaacattagcaaatcagtcaagctcggggtatttaccctcgcaattatgaatgtaactgcggttgtttccctgcgtgggctacctgcagaagccgaatatggactgagttcggcattttattatctttttgcagccatcgtcttcctgataccgacttcattggtagcagcagaattggcagcaatgtttcaggacaagcaaggcggtgtattccgctgggttggtgaggcatacggaaagaagtggggttttctggctatattccttcaatgggtggaaagtacaatctggtatcctacggtattaactttcggagcggtggcattggcatttatcggcacaaacgacgctcacgatatgtcactggcctccaaccgctattactcattggctgtggtgcttatcatttactggcttgccactttcatttcactgaaagggatgggctgggtaggaaaagttgccaaagtcggcggtatggtaggcaccatcatcccggcaggcctattgatggtgctggcagttatctatctggcatcgggcggacaaagtcaaatgaactttgacggtaacttcttccccgatttcagtaatttcgacaatctggtacttgcatccagtattttccttttctatgccggtatggaaatgggcggtatccatgtgaaggatatggagaatcctgccaagaattatccgaaggctgtatttatcggtgcagccatcacagttgccatcttcgtactgggtactttcgcattgggtatcattatcccggaaaaggatatcaacctgactcagagcttgctggtcggcttcgacaactactttaagtatgtacatgcttcctggttatctcctatcattgccgttgcattggcattcggtgtgttggcaggcgtattgacttgggtagccggtccgtccaaaggtatctttgccgtaggtaaagccggttatctgcccccgttcttccaaaaaaccaacaacaacggtgtgcagaagaatatcttgttaatccaaggtttggccgtgacattgctcagcttgttgttcgtagtgatgccatccgtacagagcttctatcaaatcctgtcacagctcaccgtgttattgtatctcatcatgtacctgttaatgtttagcggtgccatttatttgcgctataacatgaaaaaggctccacgtcctttccgtatcggcagtaaaggcaacggtttgatgtggttcattgccggactcggtttctgcggttcattactggcatttgtgctcagcttcatcccgcccagtcaaatatcaatcggcagtaacaccgtatggtttgccgtattagttataggatgtatcgttgttgtctctgctccgttcattatctatgcatctcgtaagccatcatgggtagataagaacacacagttcgaacctttccactgggaagaacaagctgccccgacagatgccccaacaaccggagaaacaaaataagctgtctcccatacttttatcttggaaaagagagtgcatcaaaataaaaattgactttgaacactctctttttcttttcccgcctatatttctttcctttcattcttcctattcaagaaaacattcctatatttgcagagtaattatctttaaaattactctttaatgatatgaaagtgttgggttatggatttattgtgatgctgctattggtatgccttgccgggtgtactcattccccttgttcatcccaacataaaatagcacttatccattcttaccagagaggttataacaacgccgagcgaattaacagactctttgccgatgaactgaagaaaaacgggctacaatgtgaaattaaaagttattatctcaactgcgaaaaatacggcagcacagatgaagaacgtcgcatttccgggttcatcgacgattcgaatatatggggagccgatttaatagcagtccttgacgaccaggccacttattccctgatgtcatgcaatcatccgaaagtcagagaaatacctgtcgttttcagcggagtgaactaccccaatacagaactactgcaacaatatcccaatgtaaccggatacatcgacagacccgattacctcaagacttgccagatgattgaacggattatgggaaaagtatgtatccacgttattaaaggaggtacttttctggataaaattatatggaaagacctggaaaaacaatgcacaggacacaatatcaacatacgcgacagggtgaatgaacggatattaaatatatccccggattcactagagaataaaaaattctctccttttgattcggaaaaaccaaccgaactctcttatctcgatacaaccatgattgccaaactggtcagcgactctgttcccgcacgccggttattgtggatggccagcggagttttcgattattccttgtttctatataccaaacgtgatttcaccactttacgcatcggcagtttgtttgacaatcccgggtttgagaccataaatgaaggattcggaacaaatgactatatgctcggaggctattttacacctatcgaaattcaaataaaagatatggcggcaggaataaaagaaagactggacaagaaaatgcccggtcagcaattacagcaatgcgccaaacagtatgtcgtcaattgggttactttggagaaatataaaatacccgaagaaaggattcccgaagagtatataatcatgtacaaacctttcagcaaaaaatattccactcttatcctgaccatcaaaatcgttgtcggcatccttctattgttatttgtaagctacctcatttatatatatggacgggagaaaaaacggaaacaggatgctttgcgcaacttaaaatatgagcatgagctactgatccttgccatggaaagcggaaatacgtatgcatggcggtttgatggagaaaaagccattttcgatccacagttttacgaactgattcattatgactctccgcaaatgaacatcgatgatatggtaaaattcattcatccagacgaacgagagagatttctgcatcaggtggccaacctttcagaccatcccaaacggacagcacaataccgctgtaagtttacaggtgaatatcaatggtgggagtttcgttacaaacagatttgtcacaatgacaatattcatatcatcaccggtctgctgcaaaatatccaagaggtaaaagacaaggaagaagagctgattcaagcccgcaaggttgcagagcgggcagaattaaaacaatcttttctggataatatgagtcatgagatacgcactcctctcaatgccatcaccgggttttccaacctgctgactacggaaaaagacctttcggaagaagagaaacaggaatttatctccatcatcaatgataataccgatttattgctcaaactggttaatgatgtgctggaactatcacgcattgaatccggcaatatgtcattcaattaccgggaagagagcgtccgttctttgctcaacagtatttacaacacccatcaactgactatttcatcacccttaaaatttatcaaggagtttcccgaaggagatgtatttgtacacatagacaatatgcgtatgacacaggtcatcactaatttcctgaacaatgccaaaaagtttacaaagagcggacatatcaaattaggataccatcatcaaccagccagtcatgaagtgcatatttttgtagaagataccggagccggtattccaaaagaagaactgcaaatcatattcgaccgattctataaacataatgagtttgcacaaggagtaggacttggcctgtctatctgtaaagtgattgttgaaaaaatgcagggacgtatcgaggttacttccgaaataaacaagggcagccgttttactgtcgtactgccctgcctgtaattgagttgttttagtattcttccattttaagacaatattcttttcggtagtgtaaaatgtaaaacaatatagcccaacatcccggctatcaccgtaccgctcaaaacacccaattttgcctgacttaaaagaaccggagaagcttcgaatgataaattagctataaacagggaaacggtaaaaccgatacctcccaacaagcagatacctgccaggttcacccagttcatccccccggccatgccagccaacccacttttgacaataagccatgtaaaaaagtaaatacctacaaattttccgactaccaatcccaccatgaccgcccatgtaggtgttcccacttcaatgcctccgtgaccggctgtcagcaccacaccagcattagcaaaagcaaacaaaggaataatcacataattcactaatccatgcagactatcttccaatgactgtaaaggagaaatcactctatcggaagccgattcgatacttttcaacacattaatctgcaatttgctcaaaattataccttctttgtctgtactcggaaatatttctatgttctccttaatacggttaatatacttacctatcttataatgtggtgtagccggaatcgtaaacgctactatcacccctgcaatagtggcatgaataccactttgtaaaaacagataccacatcaccagtcccagtaaaagataaaaccaacgattgtgtatatgcaaatgattaccggcacaaagcaaaaaaagcactccaaaagaatacaacaagaaattcacatccagatgggaggaataaaataaagcgattaccagaataccaccaatatcatccaccacagcaaaagccgtcagaaatattttcagactgataggtacacggttgccgaataagcttagtacccccagggagaaagcaatatccgttgccatcggaatagccagaccactctcggcatccgtacccgacgtcatacaataatagataataaccggaacaatcatccccccgcaagccgccactatcggcaacaaagcctgtcgaaaactggacaactcacccaccaatgtttcacgcttaatttccagtcccacactaaagaagaaaatagtcatcaaagcatcattgataaaattcatcaaggtcatgtgattcccattatgactgaacaaattaaattcccctatctgaagatgtacttctttattccaaaaagctgcataagcgtctccccagggagaattagctataatcatcgccagaagaacgataaccatcaatagaattcccccattaatgtgataccgcgtagcacttagaaacgaaacattcatgtttccgattttgagtttttccatgtctttcctgttataatattagattcgtgataaattcttataaaacacgaaccttcctgttatctttgaagtcaataacagaaaggaacgctttattgtttgtataaaatactcttcttacgaagtatatgtcagccgttatagcttcgtaacgccaagtttttcacccacagtacaaatatactggttaaaattaaatttagcacaagagttaacacagaaattaccagtgcagggcctcctaaattatatcccaatgcaataaagatgattcccgctcctacttctccacgagtaaacataccgatagataaagcaagacgctcgctcaacttacggtctctatagaataacacaggaaacagcttcccgacattcgataacaaagacacgattaccacatgataaataatcattccccaagacatcatttcttgcgatccggtaatggaatgagtaccgctatgcgtctccgaaaaatccactccgacaaagagaggcatactcatacccaccaggaacataaacaagaaagaaacaccggtagataccttatgctccaaaggagtatctatctccttatgtttcataaccatacccagaacgaaagccggcaataacacttcaatatggatacttccttcgtctccataaaaatatttgctcaccatatacaccaactgtgtaactgcaaaaactgccaccgagtaaaagaaaatcgctttccagtcttgccgccaattgtatttccctaactgtttccagccgatagagagcagaacaaacactactaaaacaatgataatcaattgccagcgcagccccaccatcattatttgcaacggaatcatcagcaagatggtatccaggtcgtcaaagatagccaacacctgaatctttttataaatccaacttgattttaatccgagagccgccaacatggtaaacaagatacctgcagaggtgggcgccgcaaaacggcttaacagaagattttctttccatgcttcccagctatgccaatattcgggcggtagcaagacaaatacataataaacggctatcaaaatccatggcatcgctgccgtagccattgcaataaaataatcctcagcataactcttccaccttgttttatccatgacaaactcacgtccgacattaatcataataaaactcaggcagatgtaaagcaatacatcagacacactctttatggtagtatacccttcacctaccgcccccggtaagatttgggacaccaaaagacccatcatcagaaaggccgaaaaagacagaacttttctcatttatatttatttaaagattatataataatggaatgattgccttgaaagttctgctgacagcgacaatcattccgggtattttagatttttaatccaacttcaatactgcaaggaacgctttctgcggtacttccacattaccaatctgcttcatacgctttttacccctcttttgcttttcaagcaatttacgtttacgactcacgtcaccaccgtaacattttgccgttacatctttacggacagcctttatcgtttcacgtgagataatttttgcgccgatagccgcctgaatagcaatatcaaactgttgacgtggaatcaactccttcagcttctcacacatccgcttgcccaaatcgtatgcattgtcgacatgtgtcaatgtagaaagagcatccaccgactcaccattcaacagaatatccagttttaccagtttggaaggacggaaacctgactgatgataatcaaatgaagcataccccttggaaatactcttcaacttatcataaaagtcaatcacaatctctcccaacggcattctgtaatgtatttccacacggtttcccgatacataattctgacgcaccaattctccgcgcttgcccagacacaaagtcataataggaccgatataatcggttgcagtaatcacggtagcatcaatataaggttcctcgatatggtcaatcagagtcgggtccggcatacctccggggttatgcacctcattggcatgcccctgcttgtcatataccatatacgatacattcggaacagtagtaatcacattcatatcgaactcacgatccaaacgctcctgtacaatttccatgtgcagcagtcccaagaaaccgcaacggaacccaaagcccaaagccaatgaagactcgggctggaacgtcaatgaagcatcattcaactggagcttctcaagcgaagcacgaagattttcataatcttccgcttcaatgggataaactcccgcaaacaccatcggcttcacctcttcaaatccggcaattgccttctcgcaaggacgggcaatatgagtgatagtatctcccaccttcacttcccgtgatgtcttgatacctgaaataatatatcccacatcaccggtacgcaactcattacgaggcatcatatccattttcaagactccgatttcatcggcatcatactccttacccgtattgaagaacttcactttatctcccttgcgtatcactccattctctatcttaaaataagcaatgataccacggaacgaattgaatacagaatcaaaaatcaaagcttgaagcggagcctggtcatcgcccaccggatgcggcacacgttcgatcacagccgccagaatatcttccactcccatgccggtcttgcccgatgcacgaatgatatcttcacgtttgcaacccagcaggtcgattatttcatcttccacctcctcgggcattgcacttgccatatcacacttgttcatcacgggaataatttcgaggtcgtgctccaatgccatataaaggttggaaatagtctgcgcctgcactccctgtgaagcgtccactaccagcaaagcaccttcacaggcagcaatcgaacgagatacttcgtatgaaaagtctacgtgtcccggagtatcaatcaggttaaggatatatttttctcccttataggtatattccatctgaatggcatggctcttaatagtaatgcctcgttctttctccaaatccatatcgtccaacatctgtccttcagtcacctgaatggtattggtgaactccaacagacgatcggccaaggttgattttccatggtcgatatgtgcaataatacaaaagttacggatattcttcatcttcgtcgtttaaatttcgcgcaaatatacaaaaaaatgcgttggctacatacaaaaaacgatgtgccaacgcatttttttatgagtttctttttcttgtttacaccaattttacaaagacttccccttctacttcagaagtttctactttgtcttctcttaacaaccaacccaaaccaagataaaaatccttatcagccttcaatttcgcagcctttttgatttgtttttgtgtcaaaccttcggttccgttcagtgcttcccagatttgtccggcaagagcaccagctttttctttcaacattttcgatttacttttagttaaacgttaatccgcatccgctttcagcattgacgaatgtttgtgtttcttatcggttgcaaatatacacaaaattatgttattcaacacgtttgaatcagaaaagttttattttctataagaaaaagcgattttctcagttattttttatgcatttcgagatattcactccaaattttagcagcttcttccaccatctttacacacggacgcttggcataatactgttccgtgcgggcttccggggtagaaataaccggttcttttttgcttaatcccaacaagtcggcacatctcaatgcaccgtttctgcgcttgaattcttccgccaattcctgcaccaacgcataattggcagcctttccctcacgatcactgccttccgtagccccggtttcgagtccggcaagcaggaacatgccacaagccgccccacacgtttcacgcatacgtcctataccgcctccgaatgaagcagccatccgcaacgcctgctcacgcgtaaagccatactcatcggcaaaggcggcaacaacagattgggaacagttatatccttctttaaataaagctattgcttttgctactctatcttctttcatttcgctacattatttactatttcatggttcatatatcctttcagattctccaccgcaatgtccatcaaacgtatacgggcttctttggttgcccaggcgatatgaggagtaacaaagcagttcttggccgtcagcagcgggttgtcgtactcaggtggttcggaacataaaacatccagaccggcggcagcaatcatccccttattcagtgcatcagccaagtctctttcattcaccaacggaccgcgcccggtgttaatcaatatagctgtaggtttcatcatggcaagacgagccgcattgaccaattcttttgtttctacagtcaacgggcaatgcagactcaccacatcacattcacggaacaactcatccaattccattttttgtattccttcaggcaattgagactgtactttcgaagtatacgcacacaccttcatcccgaaagcagaagcaatgcgtgcagttgcttttcctgtatttcccaaccctacaatgccgattttctttccatccaattccgtcaattcggtatcccaatagcagaaatcggaattgtccgcccaacgtccctgccgattggcatgggcataatgtcccacacgctgagtaatgttaagaagatgtgcaaacaccatctgtgccacagaagcggtactgtaggcagggatattcgtcacaataataccgcgttccttggcagccgctacatccactatattatatccggtagccaagacaccgatatatttcaatgcaggcaatgccgccatattctccgcagtaatcaccgtcttattggttataagtacttccgctccggaagagcgttccatcaactcatcaggagctgtacggtcataaaccgtcagctcacccaatgcttccagcccattccatgacaaatcaccgggatttaacccgtaaccatccaaaacaactattttcatacccttttattatgattattctttaaacttgtctccccaaagcccttgcatccgttctttcagttttacttcctgagcattattctgcggatgccagatccggctgttttttatctcatcaggcaaaaactgctggttcacaaagtttccctgataagcgtgtgcatatttataatccttaccatatcccaactgcttcatcagcttggtaggagcattgcgcagatgcaatggcacaggcaggtttcccgtagagcgtaccaactccaatgcactgttgattccttcgtatgcagaattactcttcggactggtagccagatacacagttgcctctgccaagggaatacgtccttcgggccaacctatcttcatcaccgcatcaaaagccgtatttgccaacaacaatgcattcggattggcgagtccgatatcttctgccgccgatatcaccaacctccgggctatgaaagccggatcttccccgccttccaccatcctcgccaaccaataaagcgcaccgtcggggtcactgccccggatagacttaatgaaagcggatataatatcataatgcatttcaccatccttatcgtatgccagcggattctgctgcaagcgttccgtcactttttcatcagttatcactatcgctccatcatcggtatcggcctcaaccaccagttccaatatattcaggagtttacgggcatctccacccgaaaagcgaagcatcgcgtccgtttcctgcaactcgatatgcttctccttcaaaataacatccttggtgatggcgatatgcaagagttccagcaaatcatctttttccaatgactttaatacatataattgacaacgggacagtaacgggcgaatcacttcgaaagaaggattctctgtagtagctccaatcaaagtcaccactccggtctctacagcccccagcaacgaatcctgctgtgatttgctgaaacggtgaatttcatctataaataaaatgggaccggcctgcgaaaagaaacggttgctttttgctttctctatcacatcacgcacatccttcacccccgaagtgacggcactcagcgtatagaaaggagtttccagcttattggcgataatttgtgccaatgtggtctttcctacccccggaggcccccaaagtatgaaagaggaaatgcgtcctgcatcaatcatcttcctcagaattgccccctgtcctaccaggtgcttctgtcctatataatcatccagcgtcttcggacgcagacgttctgctaacggttgtgccatagttgtatctagttatactgatgttgcaaagttaataaaataatacctttaatcggctcactgacataaaaaagtgcccctgcattttgttcaaataacaggagcacctcaagaatataacagaaatggtttttccaaatagccgaaacaacagtttgattagaaagtcatcatcaccatcaatcggataccccatttattagcacccggattatccagataattaagacggcgtacgtagtcgatatgtagtatcttgaagatattatgaatacctaccgaacattccatataaggcgttttagaatccatcacaaaactggtaggatgcccgtcgcgcgtgggaaacaggaacagttcactgtcacccggattcttcaacggattattcttgtccgtcaaatgaccgtacagcattttgaaaccgatagcctcacgccattttaacttcttcagcaatggaattcgattgaatatctttccattcaaatcccaggaaatatcaaacgaagcataacggtcgttcaaaaattccatgttattgaccaaattgaaagtctcacgctggagaatatatgacaagttggctgccggcataatcagcaatgggaacggcactttattccactgcgcccctcccttcaggaacatatcaatcttgccccatgaagaaaaccaaaaacgcttatatatacctacttcagtcaggttgtaattatattcacctccaaacacacctttaaaaccggtcgtatgcgacagcgtgaacaccggggcatcaaaagacaccggcaagcggcgctgcttggtattgatataagtttctcccggtgcatatctgaaagccagcgaagcctccatcgtttgaatgtccggtatcaatgttttcttgtcatcattggtaatgtatgccaagccaccggtaggttcatctttactatgcttcacctcaacagtggttttcagtccgtattgagtttcattctcatacttcaatgcaacattgcgcacgtatgacatttggtctactgtagtagtcttgaatgacacaaacacattatccttatctgtcttcagaaacttatccgtcggcgacatcacatcatatcggtaagtcagagtgatggaatttttcgggaactcgcgcggcaggtattcctttttattgaaagaatattccatttccgccatatacttggaacgatgatctttgaaaccgtaagcataataccccttaaagaataaatgcggattcaggtttgccgtagtctgcgcactcatacgcaggcgaagcccgtctatatagttatttgaaatcatggtattcaccggacctatatccaccttgctcggatgatctttcgttccggtttccacaaaattctcaacaaatgctttcagcacaaatatcacatatttaaagccgggcatctgctccaacctcttgaccagtacatccatcgagctttccgtctctgtcagcggcacctgccgatactgattccagaaatcctctcccctcatcatggcatccgcctcttttatttccgctccctttctcttaaacaactgttgcggcaattcatcaaatgcataatccgaataacgtgtcattctccggatttgaaacccctgcataattttcatcagggtcagctccacaatcatgtcgtctgttttcagcacccattcaccgttcggcagttgctcaaactcctgaatgatatccatgttatcgacaaagttcacacccgattttttaggcagattcatggtacacttctttacagtgtaactggagtcggccaatacatacaagtgtcctgtaaaaccgaaatcctgtgaattattgggaacaaacgtcaagtggaagcaacgatccttatccacatacgtcgtatccataatataatatttgtagaaagaaatggcatcgctggaagatataggactgataaacgggtattgcagcaagcggatatcatcatcatatatattcacatccgtgaatacgtctttcaataccgtactcagcatatcccctgtagcaaacaattcgttcacccccgatgaattcatacctttaatgatattcttctcactcttcggatgcttacgataaattttctgtgaggccgtttcgtccacagaaacaggaagaataaacttacccgtttcctcgcaaagctcaatctgatctttcaggaaaggcatctttttgtacatccctttgtccagcatttcgggagtaacatcatttaaagccatcgtaatcttctgatacttattgtattgatagtaatcattttcatccagcttgttatttcgcttatgggcaatgactttcttcatcatctccaccgccggattattcttacgggaatatttttcccgtttaggcttcacgattacttcctgcaactcgatatcatccgaacgcaatttcacattcatcgttttggttactccgggaataatattcaccaccttgttgacataacccaccgatgaaaatgtcagtttattccatccctgacgcgtttccacactataatgtccgtcagcatccgttattccgcctactccttttccctcataatacacagaagcataggggattggttcattcgttaacgagtcagttacaacgccttgtattttttgggcagacgcagcaattgtactaatcatcaatacccaaaacaataaaaacgactttatatatttattctccatatctttctaccggtatcttatatatatacgagaatgcaaatttaatcattaacttaaaaagaagttgctaatataatctaataaaaaaagaaatcttacgttttgaccaatatttaagtgaaatataacagattattcacttgagcaaaagacaataaaaaaggggtcttttcacaaagccccctttttaagttttcaataggtattagttttttttaaggtaaaaagattgttttcaggataacgatgcaaatatcgagcctttttttaaaccagccaaataaaaaactatgccatacaacatgtttttagacttttctgtcttttttggctatttacaaaccgaaaagctctttatctgcctcattacatagacaaagataagatttttttgggagaatgaaaacattttatcgtttttattccttccctataaagtgctcatccacttttctgctatgctttaatactttggcatcaatgaaaaaaactatctcttcggcaatattcgttatatggtctcctgccctttcgagcttgcgaatcacagtccccagttccagacaagtcaaaaaacaatcgggatgctttcccaaatatttagtcagcacccccggagcatccgcattaatctgatccaacaaattgtccttgcctaagacagccaatgccaaatccaaatcttcttcattcaatgcagtcttggtcatttcaagcataccgagtacttgtctttgcatctcctctatccgcagttcacggagtaattctccatcaagtgctgtttcatcgcttctcaccacaaaacgggcaatgccttcggcaaaatctcccaaccgctctaaatcgctgtttatcttgaacatggccaacacaaatcgcaggtctatcgccaccggattataaagagcaatggtatcttccacatcgctgtctatcttcagttcgaaagcattaacccgtttctcgcgaacaatcacctgttgcgctaggtcacggttgaatgtcaataccgattccccggccctgtctaactggttatacaccagtgtccacatttcgttcacctcttttttcagtgaggtaagctctgattctataaatttcaccataatatcatctttctttttgtattctttttttctgacggtacccccatcatccgaaacgtcccgtaatgtaattttgagtggcttctttgctggggtttgtaaaaatcttcttcgtatcgtcatattccaccatcgaacccatgtagaagaaagcggttttgtcactgacccgtgctgcctgctgcatattatgggttacaataacaatggtatattccttcttcagttcgtgaatcagttcttccaccttagcggtagaaatgggatcgagcgccgatgcaggttcatccatgagcaagacggaaggcgacacagccatggcacgcgctatgcacaaacgctgttgctgtccgcccgaaagggcaaaagcggactctttcaacttgttcttcacttcatcccacaaggcagctccttttaatgtttcctctacccggtgacggataaattcattatccttcactccatttacccgcaacccataggcaacgttctcaaaaatacttttcggaaaaggattgggacgctgaaacaccattcccacattcttgcgaagttcgtccacctgcacagatttatcatagatattcacgccatctatctgtatcttcccctcaaggcgtgcaccgggaatcaaatcgttcatacgattaaagagacggagaaaggtagactttccgcagcccgacggaccgataaaagccactaccgctttttcttcaatcgccatactgatatctttcaatgcctggaaatctccataaaagaaattcacatgttgcgcatctatcttattcatatattatagattaattcgtttttaatttattcgagaaatacctgcgaagtccgttcgccagcaaattgaccaccagaacaataaggataagcactaaagcagttccgtaagcaatgggcaattgtgactccatatcggttccactggtcgatatgacataaagatgataaggaagggccatgcattggtccaatatgctatgcggcaactgcggcaggaagtaagcggcacaagtaaacagaatgggtgcggtttctcccgatacccttcccattgcaagaataagccccgtgataatattaggcatccccatcggaagaatcacgtagcggatagtttgcaatttggtcgctcccaacgccaggctgccttcgcggtaactatccggaatagctttcaaagcctcctcggtagtacggataaccaacggcacacaaagcaaacccaatgtgagtgaacccgccagaatactatcgccaaaacccaggtacttcacaaacagcgccataccaaacaaaccgaaaacgatagatgggatgccgctcaaattattcgtcatcacccgtatgaagcggaccaatttacctttcggagcatattcgttcatataaataccgctcatcacgcccacaggaaaagcaaacaatgcactgcctatcatcaaataaaaagtacccacgatagccggccaaatgcctcctcccgtcattccgtcgctgggaggcgaagtgagaaacttccagttgataactcctatacctttatatataataaagcccaagatgcaaaacaaaatcagtacaatactgtaactaagcagtttgaacactccgaacgcaatccactgtgaacgtctcttgcgtaccccttgtcgggcattaaatatattttcttccatattctatcgtattatgactttcttccgaaacccgctccggttttggatgatatatactctacactaaaattgataatcatggtaatcagaaacagcaccacccccagcagaaacaaggcctcataatgtgcaccaccggcaggagcttctcccaattcggcagcaatcgtcgcaggaatcgtgcgtagcggttccagaatcgttgtcggtatcacagccgcattgccggtcaccatcagcacagccatcgtctcaccaatggcacgtccgatgcccagcaccactcccgatgtaatgcctgaaatggaaaacggaatcaccactttatagatggtctgccaatgcgtggctcccaaagccagactcgcctcgcgcatggcacgcggacaattacgcatagcatcctcgctgaccgtgataatagtaggcaaagccataatagccaacacaatgcttccagccaaaccggtctctcccaccggcaaatcgaacaccttttgaatgagaggtacaataactatcagcccgaagaatccgtataccaccgacggtataccattcagcaattcaataaccggtttcagaaatccgcgtgtgcggctgcttgctacttccgacatatatacagccacagacaatccgaacggcaatgcaaaaagaatcgcaaagaagctcacccaaagtgttcccatgaccaaaggaacaaaaccgaattgcggggccggagttgctgtcgggaaccattctttaccggcaaacacttccgagaaagagatatgctcatctttcagcaaacgacccggaaagtccttctctataaactttgccgggacaaaagcaatgatacccggatggtctgccactaccttaccgatacattctcccgccttgtcgtattccgcccccaactcttcttccgaaaaataagaagtaatatcttccagccggaataccttaattccgatatcgggacctcccacttcactccaattggttatctcttcgtcaaacacatctttaatttgcaccgcactcagttccctgaccggattcttcccgttgacagccagcacatacccttcttctgttaccttgttgccaaagagtccgaatgcctccgtaaacagaaaaatgacaatcagcactatcgtaatacttgtgataaagccactgcaagtcaatattccttcgacaatcttttcccaaacttgtttcatactgttttagtcttctattagtaatcgatgcaaaaaaagcttctcgatattaaaatgatatgaaaggagcttgaagtatttgctacaattatattacaaagttgttacacccggacagaaaagtctactcctccacctgaaaagcaacacctcaccttgtaacggaatcgtaatacacaagtaaaacaaatgacacaggaaaacgtttcttttgcacatgaattaatataataacttatgaatcagttaaaagccctgtttttctttgtcttatcaatttgcagcctgcacactgccgcacaacgcatcaaaggcagcgacaccgtattacctgtctcacaagagactgcagaaatatttatgaacactcaccccgagcagcgggtaaccatcaccggtggcgggaccggagtcggcatatccgccctcatggaccataccaccgatatcgccatggcttcacgccccatcaagttcagtgaaaaaatgaagttgaaagctgccggacaagaagtaaaagaagtaattatcgcttacgatgcccttgccatcatcgtccacccggacaaccctgtcagccgcctcacccggcaacaattggaaggtatcttccgcggaaaaattgtaaactggaagcaagtgggaggccccgatatgaaaatcattgtctattctcgcgaaacctcttcgggaacatacgaattctttaaagaaagcgtcctaaaaaacaagaactatatgagcggcagcctctccatgccggcaaccggcgccgtcatccagtccgtcagccaaaccaagggagccatcggatatgtaggtcttgcctatctgtccgaccgtgtcaagccgatagccgtctcgtatgacgaaggaaaacactatgtactccccaccatggaaaacggaaccaaaagacaatatcctgtagtgcgtccgctctactattattataatgtgtccgacaaagcgaaagtcagccctttcatcgagtatgtactttcccctgcggggcaaaatattataaaaaagggaggatatattcccgtgaaataacgcatatcccaaaaagaatacgtatttttgcaccttaaagtgtaaaattaatatcactatgactgaaatgaacgctacagaagctacagaaaagagaagtctgaacttcatcgaacaggcagtagagaacgacctgaaggaaggtaaaaacggaggaaaggtccaaacccgtttcccgcctgagcccaacggttatctccacatcggtcatgccaaggccatttgcctggattttgggatagccgcacgctatggtggagtatgtaacctgcgtttcgacgacaccaacccgaccaaagaagacatggaatatgtggaagccatcaaggaagatatccaatggctcggattccaatggggaaatgaatattatgcatccgactacttccagcaattgtgggacttcgccatccgtctcatcaaggaaggaaaagcttatatagacgaacagagctccgaagtgattgctgcacagaaaggcacgcccacccaaccgggtgtagaaagcccttaccgcaaccgccctatagaggagacactcgaactgttccaaaagatgaacaccggagaaatagaagaaggaaagatggtgttgcgtgccaaaatagatatggcaagccccaatatgcacttccgcgaccctattatctaccgcgtagtaaaaacgccccatcaccgtacaggcgaaacatggaaagcataccccatgtatgactttgcccacggccagagcgactttttcgaaggtgtaacccactctttatgtacactggaattcgttcctcaccgtccgctctacgacctgtttgtggactgggtaaaagaaggaaaagacttggacaacaaccgccctcaccagtacgagttcaacaaactgaacctgaactacacgctgatgagcaagcgtaacctgctgattttggtaaaggaacacttagtaaacggttgggatgacccccgtatgccgaccctctgcggtttccgccgccgtggttattctcctgagtccatccgcaacttcgttgacaaaatcggttacaccacatacgatgccctgaacgacttcgcgctgttggagagtgcggtgcgcgaagacttgaacacccgtgccactcgcgtatccgccgtaatcaatccggtgaaacttatcatcaccaactacccggaaggacaagtggaagagatggaagccatcaacaatcccgaagacccgacagccggcacacataccatcgagttcagccgtgagctttggatggaacgcgaagactttatggaagacgctccgaagaaatacttccgtatgactccgggacaagaagtccgcctaaaaaatgcatacattgtgaaatgcaccggttgcaagaaagacgaagagggcaacataatagaagtatatgccgaatacgaccccgataccaaaaccggcatgcccggcagcagtcgcaaagtgaaaggaacactgcactgggtgagctgcgctcattgcctgaaagcagaagtacgcctgtatgaccgcctatggaaggtagaaaacccacgtgacgaaatggctgccatccgcgaagccaagaaatgcgatgcactggaagccatgaaagaaatgatcaacccggattcattgcatgttctgaccgaatgttatgtagaaaaataccttgcagaagccaaaccactggattacttacagttccagcgcatcggctacttcaatgtagataaagactccacgcccgaacacttggtgttcaatcgtaccgtatctttaaaagatacctggagtaaaattaataaataaaaaacagcttatgaataatgacctgtcttcctattttgaagacccggaatttaaagaagcgttagaaaaatacgagggtatggtgaaaaaccatacccccgcttattttgatgctgacgaactgacagacatcgccgaatattatgcttcaaaaggaagacaaatagaagcagaagccgcaatagactttgctttacaactgcatcccaacgatacggatgccttgatttttcgtgcccgttccctggccatgaaaggcaggctggacgaagcatatatggttatggacttgattgaagaccgatcggatcgcgaggtgaggttcttgaaagccgatttgttgatggaagaaaaacgcatggaagaagccgaccatgtattcgaagaactagctgcctacgaagaaggaaaactggaaacccttatcgatattatcctcgcttatatagatgccaatcaggaagctttggcaaagaaatggatcaagcacgtgggcgaaacatacgatcttgcctccctttcccaaaaaaaccagaagttcagagacctattgtgtgacttttatatcactttcaataatcccgaagcggccattcctcttctgcaagccacactcgactgctatccctactccatcaatcattggaacagtttgggcaaatgctacttgagcaccaatgactatgaagaggcacacgaagccatagacttcgcactggccatcgatgacagcaatgcggaggcactgacgcttaaagccttttgctaccaacaaagcggtgaacttcaaaaatcctgtgattactatctccgcctggcagagcaacaggaaaataaaacacgtgcttatctggcattggcaaagacctattttgagatgcaggattatacctcctccatctattatatagaagcactgctggacaataaagacgcattaagcaaatacgaactgtccgaactatatggcgacatagctttatgccatgccgccctgaagcatatcggcgtgggacaagcatccatccggcgttctttggaactgaacgagaacgaccccgatacgcttatcgttgcaggacgattcttcctgatggaagccaaagcatgcaatgacgagactgccaaagcagaaaaccaggccaaaggagaactatacttccgacaggcattgaacttaatcatggaagacgaacggctggactacctgttcactatcggcgctgcttgtttcgacacacagaacttcaagcttgccgcacaatactacgaacaaataaaccgtgagtttcccgacaatgcacccgccacttatttctttctggcctattgctatttctatctggaagaagccatctcctgcatgcattacatcgcaaagatgaagcacgaactgcccgatgcgtacagcaacctgggcacaagcgactctatactgagcgatacacgctttaacgaattaatgcgtaacctgaaagacagtgtcaataatggaaaagtagacttagataatttcttataattaattaatcatggaatcagttgcatttatccaatggtgcttagatcaccttaattattggactattacgttattaatggccattgaaagctcttttatccccttcccgtcggaagtggtggttcccccggccgcttataaagctgcaggaggaaatagtgacctgaatgtatttctggtagttattttcgccaccataggagccaatatcggtgccatcatcaattattacattgcttactttgtcggccgacccttggtatacaaatttgccaacagccgtttcggtcacatgtgtctgatagacgaggcaaaagtacagaacgccgagcattacttcgacaagcacggtgctctttccacctttatcggccgcctcattccggcagtacgccagttgatttcaattcctgccggcctagccaaaatgaagctgtccacttttctgctctacactacattaggtgcaggcatctggaactgtatcctggcggcaatcggctattatctgcaatcagtggtacccgaagaacaacttctgagcacagtaaccgagtacagccacgaattgggctactgcttcattgccattggtgtattggtagtgggcttccttatttacaaaggacgaaaataagtgaacctttttctacttacatttgttataattacaatatcagaactaaaacaataaaattatggcaaaaacagcattcaaaggcacaccggtaacattagccggcgaatttgtaaaagtaggaactcccgcacccgaatttacattggtaaaaggtgatttaagtaattatacattgaaagacggaaaaggaaagtatttggtactcaatatctttccgagtatggacacaggcgtatgcgccacctctgtacgtaaattcaatcaattggcagccaaccgcccgaatgtgacggtactggccatctcaaaagatttgcctttcgcacagggacgcttctgtaccacagaaggcatcgccaacgtcgttcccttgtccgactaccgatatacttccgatttcgcacagaaatacggcgtactgatgacagacggacctttggcaggacttctggcccgctcggtagtggtcatcaacccggaaggcaaagtggtatatacggaattagtacccgaaatcactcaagaacccaactacgaagcagccctgaaagctgtggagtaaagtaattcatagggatattcagtaaatgtctctaaaaaata

SEQ ID NO: 6650 - DNA, 2066 bp, Unknown
  gut microbiota DNA sequence
tgggaagccatttgcagatagcggccggctgcctgtgtgttgccccgttcgatggcggcggcagcggcgttgaggttggcaacggggcttgccggatatatcttgacactgatgtctatgattttgtagaactgttccggagtgttcttgtagctgatggctacggtgtaaagctcgcgtaacgaaagcatctgcggattgatttcggctatgacacgtgcttcgtccagactgaagttcagctctttctggttgcgttcatcggtggcatcgctttcgggagatacatagcttcccttgaagtgctgtctgccggaagaaacaggacgggattccgagatgacagatgcagaaggggatgctgcaaaatctccctcccgggtcctgtcctgtcggggaacgaaaacactttctgtttttgttgctcttattatttttattgctttatccgggatagggatattttcactttgtgtctttttcccattgccgttgataacttctttttttatattcaggctggcttgctgcacccattccgccataggaagtgaagcacggtaatcgatgctttgattgccctcgtcgagggcgatggcggtgaatacgggagggacatctgttttgcctctccgtttgttgagcgccgaagtgcggcggtacaaccggtgtgcacgttctccattgagcagaatttggggaagttcctcactgtgttctccatctgtaaggataggagtgaggcgaatatgacttttggtatccatttgggaaacaccgaatgtcattttcatggatatcacggcagagtcttgccggagagtgacagacggaggtaaaatgtcaagtctcaagttttgtgcagtggcaaaagtgccgcataataaaagactgaatagtatgtttgtcttgaatttcatggctaattgggttgtatgttgcttttatatatttattgaatgaaataaatgaatgaaatgcctatttgggttggcccgaagtaattggagtgtgattgcctgatgagtgcatctcctttggcggggccgtatttatcataggtgaggtgggcatatccgacggatatgcttgcttcgagactccagaatgtgctgagcagccattggtgtccataggtcactccgcagcctatcagattaccttggtaacggttgttcttgactgtggtgaaaggggtggttccgctgaaattgtattgggcgaagtgggcttgcactccgaaaaaacttccgatgaaggtttcattgagccaccaacgatattcgggctggaccagaatatgtttcatctttttgttttcgcccagattccaggggttgtaattgacactcagactgaatgagtgagtgtcgtcgcatcttatttctcctcccaaattgagggtgccggtaaggtcataaagaatattgctttttacagcaatactttgggccgaggctgtacgcgaagaaataactgtcaacatgattgctattatcaataaataagaatgtcgcattgtcaatatttttattttatgatttttctgttactttagaagtaacggaagaggcggaggaagggaaaaatccatagctacagaggtaaagtgtggattttgtggatgttaggagaaagaaagcgcttaaaataagtattaacccatgttaacgattagtatgtggggagggagaggtgtatgtgtaggaaaaagattttttaaactagaaacgaaaaaaaagtgtataaatcttgcattatatctaaagtttgtatacttttgcttccaaaatatcttccgttacttctaaagtaacagtgttgtaattctctgttttataatataatgtgaagttttaaaactgcttatatagaaaagttgatgtatttaattattaccttattggctttgtttaattcatcattcttaaagcttttcaaataggtttcggtcactttcgtggaggaatgtccgagagcatcacaaatcagttgttctgagaaatggcaatatttggctaaagtagcccaggtgtgtcgggcgacataagtaatatttagaaatg

SEQ ID NO: 6651 - DNA, 56846 bp, Unknown
  gut microbiota DNA sequence
aaatcagtgacttaattgttagtgtaaagtttaagcatatcaagttccactttaccagcgaattctaaaaagaagaaatatattctatcttccatgaggcgggaaaatcccttcatggaagattttttattcggaaggtcggtttatctttgcaatcatatttaaaatccatcaggtttgctggctatttcttttgtaatatctataatgtcattgtatcaggggaactcccaatatgatgcgttcccaagtctaatcgggatatgtcggtctgtgtcggccaaaaaaagttattattattgttttcataaactgttactactgttttggaaaaaactcttttgttttttgtatcttgaaagttcactttagttaaagtttatttcatctgctgccaatctttggcgagtcatttttattttcatatcttggatatatattattgtttagttgtaatcaaagagacattttacatgattatgaagataaaatatttgcttttgttttctttattgatgtttgagtactcattggctgccgttcccaatgactggcagaaacgtttcctttctccttctgtggcagaccgtccgtgggcagtttggagttgggataataaagatgtcacttttcaggaagtgagagataagttggacacgatgcacaaagttggttttggagggtgttgtattttggctgtcaatgcttatcgggaacccggatattggcgggtgtttaattttacaatgaaggaagccgaccgtcttggcatggatttgggaatgcagatgagtgaccatggttctttacctgatgatatacggattactccttcagaagctatgcagaggttggtgtggagtgatacaattgtagatggggggactttacgtaatctagccttgcctcagcctgatacttataaaggatattatgaagatatatcggcttatgcatttcctgccagtcttgataatgccggtctcttatcggtttccggggattcctcttcacaaacagcatacttcatcagcccggagcaatccatgcaattacctgtgtatcaggggcgccttactgcgcggttgcctgaagggaaatggcgtatattgcgtgtggggcatacagcagttgcacctgccgatactgttgccggacaggaacaaggactgaggtgtgataagctgagctccgaaactgtatacaaattatggacggactggtttacctatgtatatagaaaggcagatgcggaatcgattcggcgtatgttgaagtatgtttatgttaatcattggactgcggataatcaaaactggacgaagaactttcccgccgagtttgaaaaacggcgtggttatgacttgattccctatcttcccatattggcggggataccgatggagagtgccgaccgggtggaaagtatagctcgggatgtacaattgactgtcagtgaattattgacagatgtattcagtactgttgcctcggattgttttcgtcagtatgattgtcggataataggagagggtgtacctcagaacaatgggttggttaagattgacgggacttggaaagaaagtccggctatgttgaaacctttgcttgaccgcaactttgttaccgataatggcagtattttcttttgtatagataatggtgtgagtgaagcggctgcggacacttcgttaaatgcagaagcagaagaacaaagtctctctgatacacttgcaaatgagagaatgaatgaagcttggatggatagtcttcgtatcatgtccgattctaatcggaattggtgggaagaaagcaagtcgtttcttacttatgcttctcggtgccgaactttgttgcagtatgggcgtcaggtgaatgattctctattatttgtagataaaactattctctcagatatattttggacacatcgcaacggtgaagacatggatatttatttttttgctagtcaggcagacagtatgcgtatggttacagtatcttttcccgttactcaccgtatgcctgaattatggaatgccgttacaggaaccatatttcgttctgctaattggaaagaagtggaaggtcgtacggaagtgactctgtctttacctgcttacggttctgtctttgtggtgtttccgaaagaagactccggagctgagattgtggagccgactttggtaacgccggttgtactgaaaataaacgaatggacagtcaatttctcggaaatatataaaagcattactcgtcctgttctttttaatagaagtcgggaggagaataagcagataaagaattattttggccgttctttctataaaggacttttcatgtggaagacatctcaagaaggacgtattgtagttaggttgggaaaagtggatgaaatggcaacagtccgtatcaacagtatcaattgcggtacggtgtggactgctccttatgaagtggatgtcactgatgcactccgtagtggaagtaatgtgatagaagtggaagtacttccgtcagattgggaaggcccgatagaatttgtgcggaaggaataaaactacggcttttagtttactttaactatgaatattagttttaaaactaaaacttttagtttatttgcggtaaacaaaagaagcttatgaaaacgttgactgtaaaagaagaggaaatcatggggtatttctgggagaaaggccctctgtttgtaaagcaattgcttgaattttatgatgaaccgcgtcctcatttcaatacactttctacgatagtacgcggattggaggaaaaaggttttctgcatcatgaagtgtttggaaatacttatcaatattatgcagtggtgagtcgggatgattttaaaaagaagacattgaaaggagtaatcagtaagtactttaataattcatatttgggagctgtatcatcacttgtaaaagaggaagatatttcggtagaggaactgaaacagttgattcgtgaggttgagaatgccaataaataaatcaacggacagtaactatgggagcatttttcgtttatatacttaaatcatcggtctgcctggcggtattttatttattttatcgcctgttgctcagcaaggaaacgtttcatcgtttcaacagatttgcattgcttggcattttacttttgtcttgcattgtgccgttcatggaggtaacggtaaaggagccgactgaggtgcaccaacaattccttaccttcgaagagcttttgttgacggtgggggtgagcccggtagaagaagctggaaatataatgttggtgtctgattttacatggagggaaatgctgttgttagtttatttgtcgggcattgttttctttttaatccgcactgtatggtctttattccgtatgttgcatttgattagggatagccggatagtcagtcgggaaaacggtattactataatcgctcatcgaaagaacatagctccttttagttggatgaaatttgtgctgatttccgagacggatttattggaaaatggtacagagattctggttcatgaagtagcacatatccgtaaacgtcattccattgatttattggtggcggatatatgtatcttttttcagtggtttaatccggcttcatggctgttgaaacaggaattacagaacattcatgaatatgaagcggatgaatgtgttatcaatcaaggcatcgatgcaaaaaaatatcagttattattaattaaaaaagctgtcggcacaaggctctactctatggccaacagctttaatcacagttcacttaaaaaacgtattactatgatgttaaaagaaaaatcaagcccatgggcacgtttgaagtatctttatgtacttccgttggcagctattgcaataactgcttttgcccgccccgaagtctcaacggaattagatgagatttcagccgtcaaagttaatgatttgactgcaattgtgaaagccgaagaggttaaaagtgcagaaattctgtcggaagatggaataaaagtgaaaggccgagttcttgatgaagaatatagtagtggaataataggtgccaatgtgcttattaaaggatctactataggcactgttaccgatgaagaaggtcgttttgaattgccggtggaggcgggcaatgtcttgcaaatctcttttgccggttataaaacggtggaggtaaaggtcgctgcagatgaaaaagaacaggatattgttattgtaatgtcaggagaaaaaccgtctgctggagggcaagtgtttcagattgcagaagagatgccttcatttcccggtggcatagacgagtgcatgcgttacatagcccggcacgtaaagtatccggcaatatccatagagaatggtgctcaggggatagtatccgtccggttcattattgagaaagacggaagtatttccaatccgaagattgcccaaggggtagacgagtatttggataaagaagctatgagggtcatcatgagcatgcctaaatggaaaccgggaaagcaacggggagtggcggtgcgtacccagttcacgctgcctgttaagtttaggttggtcgttgatgaagctaagaaggataatacgcctttgcagaatagaaaaaagtaagaatgatatggggtgaataaccataaaattaaagtataatgctatgaaatcatttgtaacactcatgctgtgtctattgtctatgacaacttttgcacaggtacacgatgaaattagttcggctatggaagaatttgattatgataaagtaatcaatctgatatcccctagcacaaaggattcgttattgttatcgactaggatacaggctttgaaggctatgaatcgttatcctgaagccattgtcgatttgacttctctttttgtaaaggatactacagatacaaaaatattgatagatttggcagagtgttacaaactgatgggtagtccgcgtcaggcggctgattattatcggaaggcggtgagtttacgcccaaataataagttctttcgattgcaatatatacgttctttgttgaatgcggagaactttaaagaggcacgcgatgcttgccatggctggttggaacaagatacggtttctgccaccggatataagtatttggggcaggcttatgaaggaatgcaggatatacccaatgcttttttcagttataatgtagcctatcgtcgagattccttggatgcccagaccgtcgctcgtatagccaatatctttaataataaccggcaatttacagatgctattgatgtgacagagtgttatcgactgagcgatacgacaagtgtggatgtcaaccgccagaatgctaaagcttattgtatgttgaaagattataagaaggcaatcgagcgttatgaaagtttgaagagaatgggtgaccgcagttttcttaccttttattatttaggtatatcttattatggagacaattggttttatggctcatacgataatttgaaggaagcgtatgcgaaaaactctaccgatattaatgtattatattattatgcaaaatcctgttcgcgcacttcatggaagaaggaaggggtcgaatttatggaaaaggctgtagaaatagctactcccggtgatagtattttggagcgtctctataaaggtttggcggaatgttatggctatgccggtgagagctataagaagatagaagttatgaaccgtttgtataaattgaataaagattataaactgttctatagtattgccagagcttatgactctaacaaggattatgagaatgccatccatttttatgaaaagtttatgtctttgactcccaagaatcaacgtttcccttatgatgaagaaggaaagattattgaatctgctactactatgtatcaaatagccgaaaaaagggtgaagaagataagggaagaagatttctttaggaatggagcgcctgatgatttttttgttgttcctaagaaaatagatataaagaaagatacggttgccggtaagcaataacagatttttgagtatctttggcacagcccgtatatgattgtcatgtgcgggtgggaacagataaaaacgaatggctttatgatgagacacaaccggatatcaaagttattgttgctactgataattccctctttgttgggattgatatttacttgtattttccgtggatatactgccaattggatacagatactatgttattcttttgctccgttagtttcttctattattgtggctatttgcttcagggggcgctggatgggattattgcttttatggacgtttgtggcttccgttgcatttaatgtgcctttgcaaaactggctgttccattctgccgatgatatagtccgttatgcttcaataacagatttatacaaggaaaaagataagcctatgtattttacttttgatcgtttggaggtggataataagaggaggagtaccatcggtatttggcgtgaacatacccgacgtgtatcccgacattcttatcggacggagaagaagcagcattggtattcggtatcaccggtttttgaggattcattacctgaacataaatatgcagaaagggaggtaaaagcatgggttgttgccgtaaagcatgataagcaggattcgttggtatgctatgaatggtgcactttcgatataggggattataaaaaagcgattgacaaatcacgttgtaaagtacagcattcggatgcgcctatcattaaaccgctttacaaacaatttacaacaaagagtgaatggcggaatattttcttaaatgtaggtttgcttgtcttttccatccaggtgttgataggagtaattatgaattatagggttggaaaatcttgataaagcagtataatcaggttaagtaattagaaaggctgtgtgcttttccaaaagacttttgtatatgttgaaagcagggggtgtcaaaactaaaccggcttatcccatcgtcagctgtaggggcaaggtttgcctgcccgaagacacaaagcaaactttcgggcgagcgaacctcacccctacgaactaaacgacagcattatccacattttgacacactcccctgttttttataaagcctattgtttgttttcatctgtccgggaagttgatatacaatctcctttcacacataacggctgctgaaatcttctattcatgggcttttggggtgaaagtagtcttccttgttactattttattctgacagtaaggttatgtaattctgtatcggtatgctgggtcggcagattattttgtttaatctgcaacttgatggcaggctgttttttgtcttcttcggaaactgtgtatgtatagcgctgtttataaacaatttgtttatccgaaggacggagcagatatcctgtttccttttcaaaccggttgtacaagcgcaagacaatttgattcaaccctttttgcagatgcaataataccttttcttcacggaatttgcaacgatacggattcaaatgcttcatgacagaacgaccgttcagataaacttcaataccgtttcctgcgcctacgtccactaatacatcttgtgctaccggtgattctacttcctgcatgacaaagtaagtctcaaggatattggcagggaacatcatcttttcttcgttcgtttctttccattgtccgtttcttacaggagtcttatcaagactgatattgatagtggaaggagcgtcaaacaaactgctgcccggtccgcagaggtagcgttttccccatttggttttaggatttacttttaaagggctggctttagctccgtcaagtgttattctttgttcatttccggtcggatttgtaatgacaagttctttgccgatttcctggggtgtataagtcagttccagttgggtattacggttaggaatttcccattcatagcttactgtgctgcgataattgctgtaataatcaaaacaagagtagctgtaattaggtacatattcatgagtggcagcaataggtgttgtcacgtccatgtctaaagaaagaacttctatatcagtattgttgtacgctgtttggggtacagtaatatgcaaatttcctttcttttgactgatgtgggtgtagttgccttttgcctctttcagcttgaaacccggagtgttcaggataatttcgccgtgcagaggatattttcctgacaaaatcagatagagtgtattctcttttcgagtgatggctccccattcatactgttcacggaagggagaagcatccgtgtcataaatggcttctccgttcttttccagccaggcaccgatttctgtcaatacttccttttcgaaaggaacaacggagccgtctcctttaggcccgatattgagcaggaagttgcccccgtgcgaaaccacattgataaggctgcgcaatttctccattgctttggtatgtacatctcctctttcctgccatgaacgatagctccatgtttcgttgaacatggaagcggccgactgccatgcagtttggagggctccttcaggataggcattatcagccatgactgcaaagtcataacggtcattgccgagacgtccgcttaccatgcagtccggttgcagtttgtgaaccagttcataaagctcttggctttgttggggagtattggaacccatatcaaaccaaagttcggagatggggccataattggtgagcagttccgtaacctgttgtttcgtaaactcatggtgttgcggagtaataaagtcacagttatggctggaaataggataggcttgtggaaagtgccaatcaatcaaagagaaatacatgccgaaattgatacctccccgtttacaggcttctgccagttcttttacgaaatcgcgtttaccgggagtggcatcgtaagagttatagtcagtagttgctgtcttgaacatgcagaatccgtcatggtgcttggttgtgaagatgatagaacgcattccggcttttttagccaaggcaacgatggaatcggcatgaaagagagtagggttgaaccggagtgccgtatcgccataccagtcactgaagataccggcaaaagactgtatctgttcactatatccgcgagtgacaggtttgccttcccacacaccgcccagttcggagtaaagtccgaaatggataaacatggagtatttattatgatgccagcgttcttgtgattcttttcccgatgccgggatgagtgtcatgcacattaataataagatgaacagttttttcatgataattgttttttaatatgttccataatctcttcttgttggtcggggtgaaaccaagcgatatctgcatcccgtttgaaccaagtcatttgtttgcgggaatagatgcgtgagttttgctttattttctcaatggcaaaatcaagtgtccattcgccatccagatatttgaatatttctttgtaccccactgtattcagcgagttcaagtctttgtagggatagacgctgcgtgcttcttccagtaatccctcttgcatcattatatctacacggcggtttatgcggtcgtataactcctcacggtcgcgagtcagtcctatttttataatgcggaaaggacgttctttacaattgcgggtgcggaaagatgagtacgttttgccggtcatgtagcagatttccaatgcatggataacccgtttgggattctttaaatctactattttgtaatattcagggtcaagcagtttcagctcggcacagagtttgttcaatccctctttttcatagcgttgaagcattagttccctggtttctttgtcaacggtgggaatgtcatcaatacctttgcagatggcatccacatacatcatggaaccaccggtgagtacaacagtatcgtgtgtttggaacaagcattccagctgattcaatacgtcagtctcatattgtgcggcactgtaataatcagtcagttccaaagtaccgacaaaccaatgaggtacacgtgacaattgttcgggagtaggggcagcagtacctattttcaaatctttatatagctggcgggaatctgccgaaatgatagaggtttggaaatgttcggcaatggaaagacttaattctgtctttcctacaccggtagggccaatgaggacgataagggtgtgagacatcaggcttaaaaataaaaggggcaactgaatcagtcgcccctacaattcagattaatagttatcttgctcgtaagggtcggcagcactgccacttcccatatcaaatccttcggggtcgaagtcttccatgtcaaagtcttgatcaccatagaaattctcgtccaagtcaaggtttccaccattgtttgccatcatttcgtcaaaatcaagagtctgcttgggggcctctcccgctttgcgtgagcaaatggcattgtcaaggtctttgccggttatgatttcagacagttcgataaagaatacacgttcagacaaggggtcgaagacataaagcaatttctgtttttcgtcttccaacaggtcgcttaacttggtttccttcatgatgtaactgtcttcatccgaactggtacccatatcctccagtgtgatttcctgttctttttcccagtcatcatcacagatgaagaatgaggttagttggtcatttttgtatcctgctgctttcaggatggcttcgtgaaagtcatggaaagtagcttcagaatctatctttatttctcttataaaatcatcgacttcatcagagatgagtgtaaatctatataccatatactatataacttgtttttcgtgcagtaaagttataaaaaactttgttatctgatgatacctctttgagaattttctatgaaagaaataatatattctatttccgggctcataggaacttcttttcgcacttctgccaatgcgtctgtcacgttcataccgctttgatagataatgcgataggtgttgtgtatgttctcaatcagttcatttgagaatccgcggcggcgtagccctacaatattaattcctgcataagcaatcggttcgcgtccggcaatgatataagggggaatgtctttactgaatcgcgagcctccctgaatcattacatatccgcccacacgacagaactggtgcatcaatacggcagcactgataatggcattgtcgtcaatgataatctcacccgccattttagtagaattcccgataatacaaccgtttcccaccagtgcatcgtgcgccacatgtacaccttccatcagtaggttgttgctgcctaccactgttctgcctttggcggcagtaccacggttgatggttacgttttcgcggatagtgttgttgtcaccaatttcagcagttgtatcttcaccgtggaatttcaaatcttgcggtatagcgcctatgactgctcccggaaagatggtgtttccattgccgatacgtgaaccataaaggatggtggcattaggcatgatggtattattgtcaccgatttccacattcttatcgataaatacgaagggaccgatttctacgttttcaccaatctttgcttcgggatgtatatatgctagtggactgatcatttcttttcttatttgttttttactatttgtgccatgaattctgcttcgcacacaactttctcacctacgaatacatatcctttcattgtagaaacaccgcggcggataggtgccagcagctctacacggaatatcaatgtatctcccggcactactttctgacggaacttcacaccgtctattttcagaaagtaagtggagtatctttccggttcgtctaccgagttcagtacaagcagcccgccacattgtgccattgcttcaatctggagtacgcccggcataacgggttcttgagggaaatgcccctgaaagaacggttcgttggcagtaacattcttcacacctacaatgtagttggcaccaatggctatcactttgtctaccagttggaacggatagcggtgtggaagtaattcgcggatgcggttaacatccatgataggggcttcgttacaattataaccgggagcctgaatttcgtgcaatttgatttctttgcgtatctggcgtgcaaacttattattgattgtgtgtcccgggcgtgttgcgatgatgcgtcccttgatgggtttgcctataagggcaaggtcgccaatgatatccagcagcttatgacgtgccggttcgttgtcccataccaaaggaatgtgattgatataacccagctgggtggcatccatgtggggaacacccattacgtcagccagtttgtcataattgtcctggctcatttctttttcgtagatgacaatggcattgtccaaatcaccgcctttaatcaggccggctcctaataacggctcaatttcgcgtacaaatacgaatgtacgtgcagaagctacttcggtggggaatttagacatatcctccaaagtggcaaactggttggacagaattttggattgatatgaaatcaaagcattgacactgaagttttcatccggcaaaacaataatggaagaaccggaagcttcgtctctgaattctattttcgatttgatgatataatagtccttaacggcattttgttcttcgatacccacacgttggatgcactctacatattgtttggcactaccgtccaatatcgggaactcgggtccgttcacttggatgaggcagttgtcaatgcctgctgcataaagtgctgccaatgcatgttcgactgtgcttacttttatgccgttctttatcagtacagtgccgcgggtggtatcacctacattttctgccactgcatcaattattggttgtccttcaaggtcaatgcgttggattttatacccgtggttgtccggtgccggattaaatgtcaccgtcaagtttactccggtatgcaggccttttccgtttaatgagaaactgcctcttagtgtcttctgtttcaacatggggtttatttatttagttgtttttttaattcttctatttctttctgcatgctgttcagtgctgcatacatttcgggaagcttcttgtagacggccgatgacttcatgaagttcttggcattgatggccggggtacccattatcttttcattggatttgatattgccgggaacacctgcctgtgcaccgattcctactttgtctcccactttgatatgaccggccagacctacttgtccgccgaacatacaccattcgcccactttggtagagccggcgattcccacttgcgaagccattacggtgtggcttcctacttccacattatgggctatttggataaggttatcaagctttacgcctttgtgtatcactgttgctcccattgttgcacggtctacacatgtattggcgccgatttccacatcatcttctatgattgctatgccgatttgaggaatcttttcatatccttcggatgaaggggcaaagccgaagccgtcagcaccaatcacacaaccggcgtgcaatatacagttattaccgatacggcagtcatggtatacagttgcatgcggatataatgtacagttattgccaactttcgcatggctgcctacggttgcatgcgggtggagtgaagtattgtcaccaatctcagcaccatcggctacacaagcgaatggggcgatatatacatcttttcctattttggcggtaggggcaatatatgccagcgggttaatgccggtttttttaggtttgctcatttcataaagtgtcagcagctttgccagactttcgtatgcattgtccactttgataagggtcgctttaacttcctgttcggggacaaagtctttgttaaccaacacaatggtagactgcgtatcataaatgtaatgagtatacttcggatttgaaagaaatgaaagtgcacccggcattccttcttctattttagcaaaagtatgcacagttgcgttttcgtcaccaacaataattccctggatgtattccgcaatttgtttagctgagaactccataatactgttttaattctttatgttctaaatgtttctgttttattactcgcgcgttacatatctgtgtaaccacactattaattatgcaaattacgcattttttttttatatatccgtacaattcgctaattatttaatgtccgccttcttcagggcgcaggtaacatacataatatttcttgacttttcgagagagtagggagatattcagcatatccgaagcttcggcaatgtccttggtgcttccgtcgttgtagatgatttcaatgctgtcgtcttcctttttgtacatgtcattttctatactggatatcgatagaaaataattcgcttctttcctgttgatatataactgattacatatccttgaaagcaattcttcctttctttctttcgagatgggggaagaggtgacttctactttaaagagatgacggttgatgagtccgcgactcaaagtagagagtataatatcactgtggctgctccatactttcagtgcagtccatatatcgttgtcgtctaattgaataaaatattctagacaattagaatcattataaaattcttctttaccaatggaatggtacaggaagaacttcaaagccggggaagcaaacaattcgactccttttgaggctaattctttggcacggagcagcgtactgatgagcatcttttcgctggctacggatgttttatgcaggtagacttgccaatacatcaagcggcgtgatgtcagaaagttctctatggagtagattccttttgattcgactaccagatgatcgtcttttacgtccagcatcttgatgatacgcgccgaaccgatattgccttccgttactccggtataaaaactgtcgcggcgcagatagtccaaccggtccatatccagttgtccgcttaccaattgatgaagaaacttcttggggtactcgtctttgaagatttggatagcaagattgagctgtccttttaagtctttgttgatacgctccatcagcatcagtgaaatttcttcatgcgaaactcctgtgaccagtgtgttctccagaacatgcgaaaaaggtccgtgtccgatatcgtgaagcaaaatagccgcctgaacagcttccgcttcgctgtcaaaaatgaaattacctttggctgtaagatggctgatggcttcactcatcaaatagaaggctcccagcgagtgctgaaaccgggtgtgttgcgctcccggatacacagcagaagataaccccagttgctttatgcgtgtaaggcgttgcagcaacgggtggcatacaatattatataacaaccccttcgggatattgataaacccgaagacggggtcgtttatgatttttctttcactcattaaaggattgctttcaactgttcttccatttgtgcctgaactttcttggcttcttgtccggctacgtttgcgaagttttcagttttatcggcatagataatggcgcggctggagttgacaatcagtccgcaagtgttgttcatgccatatttgcacacttcttccaatgaaccgccttgtgcaccgatacccggtaccagcaggaagtggttgggaacaatcttacggatatcttcgaatgcacgtccttgggtggcacctaccacatacatcatgttttcatcgtttgcccaattctgtgaggtgcgcaacactttttcaaacaggcgttctccgttggcatcttctgtcagttggaagtcatgcgaacctttattgctggtcaaagcaagcagaataacccatttgccttcgtaagtgaggaacggagttacgctgtcttcgcccatataaggagcaacagtgacagaatcgatgttcaactcttcgaagaaagtacgggcatacatagccgaggtattaccaatatcgccacgtttggcatcggcaatgatgaattggtcaggatagttttccttgatgtagttcactgttttttcaaaagcaatccatcctttcacgcccatgctttcatagaaagccaggttgggcttgtatgcaatacagtaaggagctgtagcatcgataatagccttgttgaaagcaaagatagggtcttcttccttcaacaggtgttcggggattttctttatgtcagtatccagtcctacacagaggaatgatttcttttttttgatgttctcaaataattgttgcttgtccatagttatactatttagcttaatattattataattcactctccttcaatcgctctgcattttcggccactatcagatggtctatgcaatcttgaatatcaccgtccataaaagcagccagattgtagatggtgtaattgatacggtggtcggtgatacgtccctgcgggtagttgtaagtacggattttggccgaacggtctccggtggataccatagtcttacgcttgctggcaatatcatcgatatacttttgatgttccttgtcgtatataaaggtacgcaggcgcgaaagggcgcgttctttgttctttggctggtcgcgggtttcggtacattcgataaggatttcctccactactcccgtattcgggtttttccagttgtaacgcagacgcactcccgattctaccttgttgacgttctgtccgccggctccaccgcttcggaaagtatcccatttgatttcgccttcgttgatttccacatcaaatggttcggcttccggcaatacggcaacagatgccgccgaggtatgcacacgcccttgtgtttcggtagccggaacgcgctgcacacggtgaacgcccgattcgtatttcagcgtgccgtacactttgtcgccggtcacataacagataatttccttgaatcctccggcagcaccttcgttggcactggagacttccagtttccaacctttcgtttcgcagtatttactgtacatgcgaaacaggtcgccggcaaagatggctgcttcatcgcctcccgtgccgccacgtatttcgaggatggcattacggtcgtcctgcgggtcggcgggaacaagcagcagtttgatttcctcttccagctcgggaatacgcacttcgcaggcattagcctcttcgcgtgccatttctttcatttcggggtcggattcggttgtcattatctgctttgcctcttccagtccgttcagacattgtatatattctttgcgggccttcataatgtcgctcatatccttgtattccttggtgagcttgacataacgcttttggtctgcaatcacattcgggtcggtgatgagggtggaaacttcctcaaaccgggctaccagcccttctaatttttcaagtagggtattattgtctgccatatatgtttatttgttcttggtttcaatccaggtaaatatgacggccatagcgagtaggagaatgacatatcctatccattgccatgtcgtgtatttttttacccatttcttggattggaagtacacgtctgcaatgatgcctgccgtagctcctatagccatataagtaacgttttttagaaaaagattgtccaaccatacgctcagacctatacaggctgctcccagaaagatacatgccagcatcagcaggcaacctttgggtggtattccttttcttgtttctttgttttcgtccatggccttctctttgccggatttagtatttaaactccccaaactcggagcggataatcaattctttcttgtcgctttcttctacgcgtcccacaatttgtgcgtcgatattgaacgacttgctgatagcgattacttcttcggcatgctccggtgacaggtaaacttccagacggtggcccatattgaataccttgtacatttcttcccaatcggtgccgctttgttccttgatggtcttgaacagcgggggaacagggaacaggttgtctttcactacacgtactttgtctacaaagtgcagaatcttggtctgtgcaccgcctgagcaatgaaccataccgtgaatttcgggacgaagtgcatccaacagcttcttcactaccggagcgtatgtgcgagtgggtgataaaaccaacttgcctgcatccagcggactgtcctccactttgtctgtcagtttcaggtttccgctgtaaactaattcttcgggcacggccttatcataactttcgggatatttctctgccagatatttagagaacacatcgtggcgggcgctggtcagtccgttgcttcccataccgccgttatattctttttcgtaagtggcttttccgtaagaagccagaccgacaatgacgtcacccggacggatattggcgttgttgatgacatcggcgcgcttcatgcggcaagtcacggtagagtctacgataatggtacggaccaagtcgcctacatcggcagtctcgccgccggtggcataaacgcctactcccatatcacgaagctcggcaagcagttcgtccgttccgttgatgatggcagaaatgacttctccgggaacgagcagtttgttgcgtccgatggtggatgaaaccaaaatgttgtcgacagcacccacacaaagcaggtcgtcaatgttcataatcagtgcatcttgcgcaatgcctttccacacactcaggtcgcctgtctctttccaataaaggtaggccaaggacgattttgtgcctgcaccgtcggcgtgcatgatgttgcaatattcggggtctccgcccagaatatcagggattatcttacagaaagcttgggggaaaatacctttgtcaatgttcttaatggcgttgtgtacatcttctttggatgctgacacgccgcgctgcatgtatcgttgattactcatgagttaaatgttttgttcaattgaatgcgcaaaaatagctattattttgcttatagccttgagttttacaaaaataaaaagaaatccgggggtatgttttgcttcctgtctgtatttattccgatgcttggccccgatattagccggattaagccttttcatccttttgattaagtcttttgatagggcagattattacagacttcggcaatggaccatacagtccgttgtaatggactgtatggtctgccgtagtagactgtacggtctgctgcagcggactgtaataatcttccgtttgaaagagcttagccgacagtaaagagttgcttggtcttcccttttctgcgagaagcaggatagttgtttatttcaggtattgctctttaaagatattgacgcatagaatgaagatggaaatcagtagtggaccgaatatcactcccatgaaaccgaatagagacagtccgatgacaactccgaatatcgtgatgagaggatgggtgtctgccatctttttttggagaataaagcggatgaggttatcgatattggttactattaacccacagtaaagaagcaagccgatggcatgaggccaatcacccgatatagccatgtaagcagctaagggaaaccatacaagggttgttcccacaataggaatgacggtggcaaagcaggtaaggaaaccgaatagcaatgcactgggagcatcaaacaggtagtatcccaacgtagcgattgctccttgaatgattgccaataatgggatacctattgcatttgcccggacaattatattgatttcgttcattacatgcttcttattgctgtcactgaaggggagaagctcataaatatattgttccatttttgttcctccaatcagcatgaagtagagtacaaaaaccaaaacaaacagattgacggcaaaactgctgatgccgcccatcagaaattggccgatgccggggagtatggatgctatcgagcttatgttttctttgcttagtaagtcatattctgtcttccggcgaatccagtcggcaaggttggtaattgtgtcgacaaaagtggcggtgtctacattgacggtctgtaacttgctgatgagcagccatacagccaatgagagaggaacaagaaagcagagtatggcttctatcaacaggataatggcagtgacgctttttcttatttttttcttttgagtaagatagagcatctggtctctgaccatgatgtagatagtacatgctcctaatattcctcccataaaaggagtcattttcaagaagagcaaaagccctaatcctagtatgatggtgataagggagtatttccggtattgttcttttacgctcatgttttattgtatatctcctggtggataaacaataaaacagagcataatgttcatttcatcagaagggaacgttctttgtcatgttctcgtaattgttatattgcccgctgatgtttccttctgtttcgggagccagttccatagcctttttcatatcttccacagagccgtctttgtcacctttcaacagtttgatgcgacctcgttcgtgataggcttgtgcaaagttgggattgatttcgatggcttcatcatatactccgatggccttgtcgaagtctttctttgtaaggaaaagctctcccaacagcagatatgccttttcattaaaaggattgagcgacaatacttgattgaaacattcctctgcctgttcctcttcaccggttgctgcaaggatttctcctttcaacagcagagcttgttcgtcttcggggttgaggttcagtaatttctgaatgtcctctgcggcatcttttgcttgcttcatgccccataatacttcagcacgtaattggtatgcctccgtataatcttcttttaagacaattgctttggtcagcatggcaatggcattgatttcttctttcattcccaccgctgccttggcagtgagataataggtcagcggattcttgtcgtctaaagcaagtgccttttggcaggcatcgttcatgccttcatagtcttcctgcatgaagcagatacttgctaatgacagaaaagtgttgacctgttccggctctttttctgccatgcggttgaaggtgatgcgtgcatcatccaggcggttggcctggatgtatgcattggcaagcaaggtgagcgtttccatttcgtcattgatggcaactgcttcctcaaaacatttgatggcgtatggcaatttgcccatgtgccgggcgcggataccatcgtattttaaaatctcaaagttctttttatcgtttttctctttttctgtttcaggggtattgctcccaccgaataaagatttaaaaaagcccataatttataatcgttttatttgtctacagtaataacgaatcgtctgagatagatttcttgttctttgtcttggctgttactgaatctcacagctttgacgggagctttctgcagatctgctgtcaggcgattcttttcctgcttgtaatctattttcttccattctttgccgtcggtcgaaacttcaagtactccccaggttgccacttcgggtttgccgaagtcaatgtcaatgctttgtgccggataaacgttgtccagttcgatggtgataaaacctttgccttgccatttgattacttccagtgccggagacacttggatgcggttggtctttaactgtaatggcaggtttctgatttgttccacatcactgataagtttatgcggcatataatcggtagttgcatccagtagggtattatatttcttgttatagcgttctgtgactgtggcaaaagtttggtcaatcaatggcttaatcacttttgtggcagtttttacgcccggctggtatggattctgattgtaagtctggtctatttggaacatctgttgctgtaacgcttttacatgtttgtatttgcgcataaacagttcctgattgccgttttcgtatgcttttgccatggccaggacttcttctcctgtttcgcccagcagcttgaattgtgtcagccatggtttcatttctttcaccaatggagtgttttcggcgtcagtcagcaagatatcaccggattctgccattctgccgaaagtttcctgcagggcggtataatcgttttcattgtatttctcgccttttatataactgtcggtaaaactttgggcaacgggttgcaaggcaacggattcgtcacgacgatatcggtgtccgttagctcccaaatcggaattatgtgccgcaaagaattccagttcttcggcagatgcaggcataatgtttttgatggcatctttccaagtcttttcactgtcatacttttcggggttccatgagtaggatgccactccgtatatggcaatcttcgatgcttcggcatgttccatcggattagtcacgaagccggacatttggtcggctatccgggtgtcattgccgtatacgggaccgagcagcaggtggtcgcgtacatagtcggaaacagggaagttccaccagatataggccggacgtttgatacgttcgttaatccatcggatgccttcttgggtgatgtcggagataacgcggtcgcccgtccacatgatttggatactcggattcagcttgtcgcccagtgtggtgagatatccgcctttagggtcggaccagcttttgttatactctgtgggacacatgacaaggggagtcacgtcctttttcacttttacaaagttttcgtcgatgtagttcaacagctctgcctgtttgacagggttggttccttcacccgaaatatcgtcaaagaaaacagcgaaagagcgcacgcccaagtcatacatcttttcaaactttgccaacaggttgtcacggtcttcctgattccacttgatgtcttgtcccggatgaatggcccatacgaaatcgacttcattttctttagccacctttaccagttcttgcaattgttcggcttctttttcgggatagggcagacgccagttgggagaactgtggtaagggtcgtctttaggtccgtagatatacgtgttcatcttgttttcgccatagaatttgagttggcgcagacgagcggcatggctccacggagtgccatagaatccttccactacaccgcggaagcggatggaggggtagtcttttatttcgacagccggaagttggttgtctttcaacaggcggctgagagtctgcaaggcatagaatgttcctcgttcgtcatttcctgccaatacgatttctttatcgttgatacaaagatagtagccttccttttgattgggaatgcggcgggcaaacttgcggatggctttgtctcccttttccccgatatagatacgtagaccttctttggcagaatgattgcctgccaataattgttttaattgttgtactgcataggggttggcttccgtgtctcccgtgaattgatagcttccgggtaaagtgattagctgtccggattcggaaatctgttgaggaacaggctggatgtctgtatgttgtgcaaatgcattgaatcctgtaaacagacaaataattgctaaatacgcttttctcatgtcttatttggggtaaaaggttaataaatcagtggcaaagataatacttataaagaaagaattccatcatttgattgtattatttcttcggataggaggtatgaaagcactctttctgctttttcgcgttctccgtttatgcggtttaacagagtggcggcagagaggggagaagtttcgagctgttcgcggatttgattttccatctcttgaaattcccccagtttcatacccgaatgatgtttgctgagacatacgtcacataaaccgcagttatgctcgtttttctcgccaaaatagcggagcagcatacggctgcgacatttgtcttcggcagtggcatactctgtcatggccttgattcgggtgatatagctttccttgcgctcttcatagatgtcacgggtgatggcaagtcggccggcctcctgcctttcacgggtatatataatgtaaggtgtcttcttgcgcggaatatagtgcagtatatggcggcgggtcagcatcaggagaatttcataaatgcgttggcgggtcagtcccgagcggatggccagagagtcttcgtttatataggcatagtcggtaaacaagccggtgtaagagcgaaggatgacattgatgagtttctctgtttcggggtcggtctcgcggagtttgtacaactcgtctctgtggatggtgaacagaatgcgggaagcattgtcttgttcatctgtatattccagatatccggcacgtgtcagtattttcaaggcactgtctgcttgtacagggaaatgcttgaagttacggcagaactcatccagattgaaggcaaaggtacatcccaaaccgtctcccatcgccatctggaaatagtagttcacatcttcatatactttgcggatgtattctttgtcggggaatgtgtcggtaatccgtttgctgagtgttgctttatcgctcttggcatagagcaggacggcataagctttttgtccgtctctccccgcacgtccggcttcttggaaataggcctcgggtgaatccggcaaatcaacatggatgacgagacgtacatctggcttgtcaatacccattccgaatgcattggtggcaaccatgacacggcttgcgcccgataaccaacttttctgccgttggtctttgacgtcattgttcagtccggcatgataaaaggtggctgtaatttcattgtttaccagtaattccgctacttcccgggtacgcttccggtttcgggtgtatacgatggcgcttcctgacacgctgttcagaatatgcagcaattcttcctgtttgctttctgtgttgcggacaatgtaagccagattctttcgctcaaagctcatgcggaaaatgcggctgtcttctctaaaacctaatttagtctgaatatcctttactacttcgggggtagctgtggcggtaagtgccaataccggaacagtaggaagcaactcccgaatttcggaaatctttaaataggcagggcggaagtcatatccccattgagagatacaatgagactcgtcgactgtaatcatgttgattttcatattccgcagtttggcgcggaatatatcagtgtccagtcgttcgggagagatataaagaaatttatagtcaccgaatatgcagttctctagtgcaacaacaatctcttcgcgcgtcatgcccgagtaaactgccagtgctttaattccccggtctcgaagattgcgcacctgatctttcatgagcgcaatgagaggagtaatgaccagacacaatcccggttgtgccaatgccggtacctggaaggtaatggatttacctccaccggtaggcatcagccccaatgtatcatgtccttttccgatactttctatgatttcttcttgaataccgcggaagttatcatagttccagtattgttttagaatctctttgtaggtcacccttttctattcctcactaggtttgatatcttcaatctgtaactgcacctctccgcgcttatgcgtgttttcttcgatggtataacagatgtcgaacgagcgcttggtcttgatgtaacgggcttgtgagctttgtccgaaagcgattccgttcatgacgttatttgatttgttgtcgaccagctccagcttgatatgttcctgatcacggcctactactttgctggttccgtaatcatatacattatgtgtacagaataccggtttgtgattatccgggccgaacggattgaactttttcaggtcggcatgaaatttcggggtaatgtcgcggaaatctatttcggcatcgatgtctatcaccgcactggtttgttcgggtaaaatatgttcggatacatatgtttcgaaacggtgggtgaactcttctacattttctactttcatcgaaagacctgccgcatacgtatgaccaccaaagttttccagtaaatcacgacagttttcaatagccttatacacatcaaaaccggaaacggaacgagccgaaccggttgccaggttatccgtgcgtgtcagtaccactgccggacggtaataaatttcggtcaggcgtgaggctacaatcccgataactcctttgtgccatgcttcattgtaaatgacaatggtacgacggtctgccaatccttccagactgtccacaatgtggttggcctcttcagtcatggttttgtcaaggtcttttcgggtctcgttgtactggttaatcagattggctttctccaaagcagaagagaagtctttttctatcaatagttctacagcctctttaccgttctgtatacgaccggaagcattgatgcgcggacctattttgaacacaatgtctccgacagtgatttctttctcggataatccgcaaatgtcaataattgctttaagtcctacgcttgggttggaattcaactgtttcagcccatgataagtcagtacacggttttctcccatgatggggacaatatcagaggctacactgactgcaaccaaatccaaaaggggagtcagctggttgaactcgataccgttgttcaaagcaaaagcctgcataaatttgaatcctacaccacaccctgacagatgttcgtaagggtaagtggcgtccgggcgtttggcattcagaatagctacggcaggaggcagtacatcatcgggtacatgatggtcacagatgatgaaatcaattcctttttcttttgcatatgcaatttcttccaccgctttaatgccacaatccaatacgataattagttttacacctgtttcgtatgcataatccacccctttcactgatactccatagccttcgttgtaacggtcgggaatatagtaatcaatgttcgaatagaactgctggagaaacttgtataccaatgctacggctgttgtgccgtctacatcatagtctccataaaccaatatgcgttctttctttcccatagcttggtttaggcgttctacggcaatgctcatatccttcatcaggaaaggatcgtgtagttcgctaagctgtgggcgaaagaatcttttagcctctgctgctgaggttatacctctttctagcaatagcttacagaggacgggattgattcctgtctctttagctaatgctttagctgcttctgtctgttcttggcttggaggttggtaattccatttgtgattcattttatatattgttttttctttttcttctcgcatggggaggcttcgcttctatttgtttcaggcagtctccaattaatccgtaaagttaggaaaaaacaaataaaaaaaccgttaattccgtatatatttttacggaattaacggtagtgctttaaatactagtatattacagcattatttaatacctaactttttagcgatttctttaggaagtgctttcttgttgacaacgatattcatggttttatagcgcacgaatgcttttgatgcataccatacaccgttatatttgccggctttgccccaagagttctttaccatatagtattcatttccatcctggtctttggcgataccataaatctgcattccgtggtcatcggtagtttcccagttgtcatatgcttcctggcgttcttcctgagtgcaccatttctgaggttgcggtttgctgttcagtttcttttcttccggtttcattttcagccaatgtgccatgtcggaaccacttaattcctgtactttttcagcatcgggcatcactgcgataccatcgcgggtaaatccttgttcgctgacgtcagacccccatgcaatagtatagccggtattgatggcattgtcaaatacttccatcagttcgtcaattggtaggttgtaagattgtccccaacgccagttgtcctgaatttcaagaacaaacggttcatagaacggatgatgggtgtaagaagtcaatgaaatataatcgtccggattcagtccggttgattcgaagaatgactgcggagtatattctttccctttgtaagtgaatttttcgggacattcacccaaataaatgtcatggatggcagcaatagctttcttccacagcggtttacggttttcgtctgtttggagcgaacggtgttttccttttgcgatggcagcaacaaccgcatcagatacggcagtcagttctgtatggttacttaatgtatctccatacatcacacccgggcgcatttcttcttccggcaccaaaccgaattttttcataccatatattacatcatagaaagaacctccttgtgagaaagatacatctccatgagtgcgcactgctgcatcggcacggtcaagataagtttgatgtacgatgtacatttcggacaagtcgtattctccttttcccatacggagtaattctgattccaaaaaggccatacttgagtagcaccagcaagttcctgcacggttttggttcttaatagaagtaataggaagttcctttacggtagtaaatacaaatccttcttctttaggttcttcttttgcttcttgagccgacagactcatgctgaagagtccggctgcggcgagtaatgtaaatcttttcattcagtgataatagttttgtttgatattaaattattattcattcataattgcttctacctcttcgatggtgatggggatgcgtttttctccggtaaaacgagagccttcaggggtaatcagaatatcatcttccagacgtatgccgccaaagtctttaaatttatcaattgcatcgtaattcaggaagtcggtatgcatcttttcggctctccacttgtcaatgagagcgggaataaagtaacagcccggttcgtctgtgataacaaaaccttcttgcagacggcgtcccatgcgcaaagaagcaagtccgaattgtgacgaagggcgtacttcatcgtcataaccgacataaatctgtcccagatcttccatatcatgtacatccagtcccatcatgtggcccaatccgtgagggaggaataaggcatgtgcaccgactgcaacggcttcgtctatattgcctttcatcagtcccaggtctttcagtccttgtgccaatactttacatacttcttgatgtaccgacatgtaagtgatgcccggtcgggcaatttccaatgctttgtcgtggcaggccaatactatattatatacatctttttgacgtccttggaattttccaccgacaggaacggtacgggtatggtcggaacaataattgctcagtcgttctgcacctgcgtcggtcagcatcatgcgtcctacttccaaaatgtggctgtggtcgtggttatgcaatgtttcaccatgctgagtcaggatagtggcaaacgaagtcatgcttccataagaagaagcgatgccgtccaatactccggcaatatattgttcttttactcccggtttgcataaacgcatggcagcggtatgcatttcatagccgatattgcaagccaagtcaatttcttctatttcacaggcttcttttacagaacgtaaagcaacgacggctttgatcagttccagtgaagcatattttttaacgatagaagcacggataccggtcagctcttccaacagcatcatgttatcataacgatagggaggaagaaagtgaacttttctgccttgtgcaatggcttttcccactatttctttcagttgtgcaaaaggaaaactctgctgaatacctacctgtgcggccaagtccttgacgcttggttgaggtcccatccagataatatcgtccatatcgacatcattgccaaagaaatagtcttctcctgcttcaacgtccatcactcctgcatatcccggatgagaatgaccgaagaaatagaggaaagaactgtcttgacgaaatttatatgtattatccgggtagtttgccggagcttcgttattgcctagtataaggataaggccgttttgcactttatttctcagtgcttgccgacggtttttataaatagcagaatcaaacatggttaacttgattttaattgaatattaatgaactgtttgcaaatgtaacaattataattttaaattcatgcgcagaagtttaaaaaataatcactgcggagtgactttgaccttatttatccctgtatatttttttattctttcttgtataaacgggaatttcttaataacttgccacatgttttcaatgagatttttattaaatctgtttcttttaatttcttaataactaaccaaatgaatggaatgataagccgaagcctgatgggagtcttttgcagtgcttgcttttcggtgatgaatgcacaagaccgtcccaatattgtagtatttattgtggatgatatggggttgatggatacttctgttccttttgtaacagaccatcatggaaatgcggtaaaacaaccgttgaatgaatggtatcgcactcctaatatggaacgccttgccaaacagggtattcgtttttctactttttatgctcagagcgtgagctccccttcaagagcttctattatgacagggcagaatgcagcccggcatcgcactacaaattggattcagccggagaataacaaccgtactccttatggaccgttggattggaattggaaaggactgactcgtaataatctcatttatccttatgtattggaacaggcgggctataagaccattcatgtcggtaaagcgcattttggctgtataggcagcgaaggggctgatcctaagaatttaggctttgacattaatatagccggttctgctatcggcagtccgggcagttattatggagaaaacggttatggggcgataaaaggagcaaagtctcgcgctgttcccggtttggagcagtattttcataccaacacttttttgagcgatgcactgacatcggaggcggataaagaaatagagaaagctgttgccgaaaaacgacctttttacttaaacatggctcattatgccgttcattctcctttcgagacagacaaacggtttataggacattacacagacccgaagaagaatcaacaagcatgtgcctttgccactttaatcgaaggtatggataaatcattgggagatttgatggataaattggaagaattaggtattgctgagaatacattgattatctttttgggggataatggaggtgatgcccctttggggggagctgcggattatggctcgtcagcaccttttaaaggtaaaaaaggttcggaatatgaaggcggagtgagagtgcctttcattgttgcctgggcgcatcctgatgcggaaaataagtttcagaaagcttttcccgttgcacaaaatgccatacagacacagatggggacagtgatggatatctatcccaccgtattgtctgttgccggagtaaaagtaccggaaaatcatatattggacggctccacccttgaaagaatgatagcaggcaagaaggataaagcacatcgggatgacttcctgatgcatttccctcacgaacaccgtggcagttatttcacttcataccgcaaaggcgactggaagctgatttattattataacccggaacatcccgatgctccttattataagctgtttaatctgtcagaagatccctatgagaagaatgatgtggcaaaagcagagcggaagaaagccaaagaattgtttgggctgatggtgaaaagattagagatggaaaaagcactctatcccatcgacaaggataaaaatgagttaagacctttttttatagcaaaataatttttgaagaaaagatgtttgaatattcatcgaaaaagataactttgcgccgaactttaatgggaggctgtttgttccttgactttgattatgaaaatagacgataaaacaggattggtattggaaggaggaggcatgcgtggggtatttacctgtggcgtgctggattatttgatggataacgaaatctggttttcttacggagtaggagtatcggcgggcgcgtgcaacgggctttcgtatatgtcccgtcagcgagggcgtgcaaaattcagcaatatcgatttgttggataagtatcattatatcggcatcaagcatctgtggagcaaacatagcatccttgaccaagaattgctttacgagcatttccctaaagaaatcctgccatacgattatgaaacgtatgcaaagaatccggcacgtttcgaaatggtgaccaccaattgtcataccgggcgcgcctgttatctggaggagaagtacgaccggaaacgtattatagacatagctaaggcatccagcagcttgccttatgtgtgtcctgttgcatatgtggatggcatacctatgctcgatggcggaattattgattctattcctgtgatgcgggcttttgagcagggatatgaaaagaatgtggtggtgcttacccgtaatcgtggttatcgtaaaaagggaagggatatcaagatacctcatttcatttataaaaaatatcctcgtttgagagtggtgctcagtaaacgttgccgcgtttataatgaacaattggaactggttgagaagttggaagatgaaggccggattatagtgatacgtcctcacagacccatggaagtcgaccggattgaaacggatataaaaaagctgaccgatttgtatgacgaagggtatgcttgtgcgaaaaagatatttgaggaaaagcacttgctggagaagtgaatttagcggaaaaacttttgatgaatatattcaggtagcgttatggttgaggcagtcataacgctaattttatattatgtattttgttttcttcctgaattattgattatattttggggggtatgctgatatcggccggacttcctaattcgtttcataggatgagcgtaattattttgataggtaaaatcgtaagagtgaagaaaaaagcatatatttgcaattttcaactataagtcttatcgtagattattatacataaaaaatatacaatgaaaagaataattccattcttgctatctgtctctcttctttattcttgtcatcaggaggaagaaatcagtctgccgaccgatgggccggttattaatcttgctgagttgggactgtctgaaaatgatgttgtacagggacgtatgcgcattaaactgaaagaagaacctgccggaaatttaagcgagaagagtatcgaaggcggcatatccgcacgaattaaaatgataggtcgttctgcttctgcattgaaaataacccgcatggaacgtacttttcctcatgccgggaaatatgaagaacgtacacgccgtgagggactgcatttgtggtatgatgtttggtattcggaggatgtttctgtggcgcgtgcgaccggtgaagtttcagtgctggaagggatagaaatagccgcgcctgtcgtgaaggtgagatctttgggggcggacgaaccggtttggcgtgccgtcgactttaatgatacttttattgccaagcagtggtatctggaaaatccgggtacggagtcgtggcaacaattaggagccgatatccgggtggctgatgcctggaaaaaatgcacaggagacccccgtatcatcgttgccgtgatggacggaggtgttcaggtagaccatcccgatttggtagataatatatgggtgaacgaaggagagatacccggaaacggtattgatgatgacgggaatggttatatagacgatataaacggttataattttatgtatgattccggtaaactgactcccatgaaacatgctacgcatgtggcgggaatcatagcggcgagtggaaataacggtaagggaattgccggaatagcaggaggaaacggtacggcgggaagtggcgtaaaactgatgtctacccaagtgctgggggctacaagttcaaataatacagctgcggctattaagtatggtgccgataatggagcggttatcagtcagaatagctggggttataatacgaccactaccagtgtttcgtatattgatcctgcggataaagcggcaattgactattttatcaagtatgccggatgcgacaatgatggcaatcaattgcccgatagtccgatgaaaggcggtattgtaatctttgctgcaggtaatgataatgtgtctaatcccggtacggcttctccggcagactatgatgcggtggtgtcggtggctgccattgctccggactatacaaaggcttcttattccaactatggttcatacattgatatttcggctcccggaggtaacttgaatggtaatggaatggtatatagtactattcataattcttcttacggggatatgagtggaacttctatggcttgtccgatggtgtcgggggtagctgcgttagttattcagaaatatggattgaacgaacggggatttactcctgacaggttaaaagaaatactcttcaagagtgcttatgatgtggataattataatccgaaatatgccggacaactcggctatggttgtgtagatgctactgcggcattgggaattgaagtaacggatgagatgccgacgctgacattgaaaaacaataaagtgagtgatggaaacttgcttttttgggtaaactatcagttggccggtaatgcacgtatcattatttataatagtacgggtggaaaggtattcgactcaaaaagaggagtaatggctatgtctatcacaacaatagatgtaagtaagttggctgccggatattacacgatggaatatcaatgcaacggccgcacgatgaaacagaactttattaaatattaatccggtagaagaataaacagtagaatatgaagaaaacgatattttgtgtaatagctcttggcatgtcggttgccacagtttatgggcaggatgaggtaactgctatcaatacgggtgctgccaatttcctgactatcatgcccgatgctcgcaccgctgcattggccggtgcaggtgtttcactcaccggaaatgagaatgccatctttttgaatggcgcgtccattgcagcggataaaaactgccggggaggtgcttcttacacgtatgctccgtggatgcgcgattatcagtcaggttattcgttgcatacattgggaggtttttataagatagacgaaaagaatgtgattctggcaggatttcgttattataattatccgaaattgggtgtgcttgagaccggaggagagagtatacgtccgaaggaattggctgccgaggtgggttatgctcgtgagttaatcaagaatctttctgtgtcggctactttccgttatatttattcggatatgggaaaggtgggtaatgaccggggagcaagtacagttgcttttgacttaggcgctttttatacaaaggcgattgccaggatggaaggggcgagttggtctgccggattgcaggtgagcaatctggggccaaagattaaatatcccaaatccagcgagtctctgccgatgatggccaaagtaggcggttcggtagacttgccgttttcacagatgcaccgtctgatgatgacggccgatttaggttatcgtttggctccttcggatgtgcaggctgtgaatgtgagtgccggagcagaatatacgttggcagagcattttatgtttagaggcggttaccattatggagacaaggaaaaaggcgaccatagctttgccactgtgggtgcaggaatgaaccgttacggtggacatttggattttgcatggttgtttgcatcggatgactgtccgttccgaaatacattttgggcgactcttggatattctttctgatgatataaataaaagggagtgtgtcaaaacatggataatgctgtcgtttagttcgtaggggcgaggtgcactcgcccgaaaacagtttactttgtgtctttgggcaggcaacccctgtccctacagctgatgattggataggtcattttagttttgccacactctcttttatttatgccttgttgtaatgccctggttctaatgattatcgttcatttgcttcatgcggccgatcaacaggtaattattgtcattttcttggatggaacttgccagtgtgtttaccttctccctaatttcaggtaacaggttggttgtcttgagtgctgtttccagctcctctttcaacacaccggggtctacgttgcgaatgtaatacccgttccggcaacttgcgaaccaaaaagcatctcctcctcccaaaaagtcattgtgtactttgtacaatcctcctttcagtgtttttttgtctacaataaaatttcggtgctctcttgtttcgctgccaccgtgattgtctgtttgctccatttttcctacgacagtcccaataaagcaagtcgggtattcgtattgccagtgaattgggatttttccaccagagaaatggatggtaaaggtcggctgtagtttgttctgtgcataatcgtaatgatacaaggtatctgctttttctatatgaaagtccagaaaggagaaatcaaaggcttccgtgttgttgttatggtaaatgtcgttgctgtaatcgggcttcatctctgttatgggagaaagctcggcaagtcggttaccttcgaagtcttgtacccaaatcattcttggattgtttttccaaggcagcgtggctacagtaatccgccctttgtctccgtctgcatagaagacggatttggggagcatccatttttctgcttcatctatcaggggaatgtttttttgcaattctccgttcagattgtaagtgatgagtttggttgcattccatggcatgaggtagatgcggtcatgcttttcatccagttggaaaggccctacctgagtgtattctccgggaccgtttcccactgagccgatgttacgcaaaaacttccctttacggtcgaataatttaaaaggtatgttttgagaacagtggattagaatgtagttatccgatacagttacgctactgtttcttaccagtgcttcgtccttattgtccaactttacaatatccaagtcttcaatgaaataactgagtggcaagtggatggaatctttaacggctgtccagtcgcataccatgagggttgttccgtttgttgtcacttcggctgctacagtgggcaattcgttccatatctttgaatcgtccgatgccgtgttgtcgttctctttttgtttgttgttgcaggctgttataatcaaggttgccaaaacccaaaagaaatgtgttctcatactttgtagttttaaaatttaccgcaaagttaggtatgaaagggatttgattgtaaaatcgtgatggacaactaaaaaatattatattgttgtgtattagctatttatttgttttatgtgatggacaattaatacttttgcaagtattcgtccaatgaaattccttcatcggaggtgataccgagtttttctttcattcgtagcttcttcttgctgacagagtttcggcttatacagtaaatgttcgacatgtcgtgtaggctgacattgatttttatcaggcaacagaagttaatgtccgctacactcaaggcgggaaattcctgtttcaggcgtgttgtgaaatggtcatagttactgtcgagtatgactcttatttcccgccattcattgtctgtcaatgatatttgccggttgttattcttgtcttcttctgtgtcattgtctaaagaaggtagttttttgaatacttccattttacgaagcagctcttcgcgtaacatgccggccttctctctgaggacacttaattcttctgcttgtttcagcagtttgttttcttgcttcagtcggtcgctttcttgttgaagcagccttttcatttcttcttttcttttgtattggagatagaacaggaaggcactgacaatcatggagaggatgaatgtaagtagcaatatgaggttgatatgacgttggcgtacaatttccagtgcattgatttctgtttccagctttagttcgttatactggctggcactggcttgatggttataggctgaatagatgttatgaaggaaagcaatggcattttcatgtttgcggaatgccttttcgggagagccgatgtgctcgtacaggtgagagaggcgtagtgcggcttcacttgccaaaaatatattgcttgattgggataccagattatagtaataacaggcggagtcttcccggtgcatgagctcgtaaacatgagctttgtacatgttgtgcaaaggaatgtcgtttcgcttcatatatcgacgggattgtcgtagggcttgcagggcttcggagaactgtccttgtgctgtgtataagtcggtatattctttagcaaggctatagacgaattcgctgtctttatctttcatggcacaggctttggcggaatccagcatttcttttgcgactccgaattcttttagttggagtagtgtctgagctttttcccgataataatgcttgcggtgcagatgagtggtgtctatgcccattcttttgttgatgtaagccaaagcagaatctgttttccctatttgtttaaagaattgtgttttatatatataggtgcgtacaagctcctgagggcattgttgtccccttgctcttttttcaattatttgaagcatggaatcggctttatcgtatgcctgattgtataggaataatctgtacctgatgtggtttatctctttcaggtttattgtgtcttttgttttttcataatgttgagacagtttctctatcttctctgcagaatgccggatgaacggttggggtgaggtgctgaactgaattcgccaataggtatagacgtcttctccttccaacttttcaggtatgattctgtttaagtaagtgagcgtgctgtctatttgtttatctgcatagaattgttcagctttttgcagccataagtcattttctcgtacagaacaggcggtaagtaagaggagcagggaaaatattgagagagactgtaacttcatgcggtcatttgatagggaatgaaaagaggatgtcccattttgatgaaacatcctctgtataaaattctgttttatttgatattatttggcgaagctcaccgcacgtgtctcgcggataactgttatttttacctgtcccggataggtcatttcatcttgaatcttcttcgcaatttctcctgacaggctttcagtctgcttatcgtcaatcttgtcggcgcctacgataacacgtagttcacgaccggcttggatagcgtatgtctttgttactcccggataagacatggccaactgttcgaggtcattcaatcgtttgatataagcttctactatttctcggcgcgctcccggacgtgcacctgagatagcgtcgcacacctgaacgataggagccaacaggctggtcatttccgtctcatcgtggtgagcaccgatagcattgcagatatccggtttttctttgtacttctctgcaatcttcatacctagcagtgcgtgcggcaattccggttcttcatcaggcactttaccgatatcatgcaagagtccggcacgtttggccttcttcggattcaatcccaattcggaagccatcacagcacagaggttggctgtttcgcgggcatgttgcaataagttttggccgtatgaagaacgatatttcatcttaccgatgatgcgaatcaattcagggtgtaaaccatgaatacccaagtcgatagtggtgcgtttaccggtttcgatgatttcgtcttctacttgtttacgcactttggcaaccacttcttcgatacgtgccggatgaatacgtccgtctgtcaccaactgatgaagtgccaggcgggctatttcgcggcgaaccgggtcgaatgcagaaagcacgatagcttccggggtgtcatccactacgatttcaacacctgttgctgcttccaaagcacggatgttacgtccttcacgaccgatgatgcgacctttgatttcatcggattcgatatggaatacggtgacagagttttcgatagctgtttctgtagcaactctctgaatggattggataacgattcgtttggcttccttgttggctgtcaacttggcatcgtccatgatatcattaatgtaagaagcagcttgtgttttggcttcctccttcaaagagtccaccaaacgttctttggcttcttcggcagacagaccggatagtgcttccagcttttcgcgttcttgcatctgtagtttatcaagttcctcttttttcttgtctacaataacaatctgtgcttccagattctctttgatagcttcagcttccgtacgtttacgttgtacttcttcttgtttttgattcagcatcagttcgcgctgtttcaacttgttttcggcttgttggattttctggttgcgcaatgcaacttctttttccaagtcggcctttttatttaagaatttctccttaacttcgagaagcttgttcttcttaattacttcagcttctgtttgtgcttccttaatgatgatatcatacttagatttcaggccatatctgaaaagcatgtatgataacccaccacctacagcgaaacacacaattgctattattactgttgttaccattgttattaatttatataaataaaaaacgcacaaccattctgccaagaactcttctcttgacagttaagttgtgcgtgaatatctttaatttaaaattttaaactatccgtttttactaagatattgctctatctcttttgttagctcttttaacttctcctgataaggttcagtattatttttgtctttcatagaaatgttttcaaaagctaattccaacgcagccattgcccaatgccttgtagggctgaaatcaggaaagcggctacggtatttgtttagtttattatcaatctgtttggcagcgttcctatataacagttcatcttcccgacgaatagttaaagggtatctttcgttgtcaatcagcaaatgtattttcatcacatcgtccatcatactatcgttttattgttttaaaatcctattggccttttaataaagcgatgcatctgtcgacttcacgcacaagctttgacaatctttgttttgtatctttgatatcattatcgtggatactgattgtcctcgccatttttaaattggtatacattgcttccaattctttacgactattttctacttgttttatctcttcgtctttttcggcgagaagttgcttcaaccgggcattttcacgtgttaattcgtcgtgtaaatacataaaatgtctcagtcttgcttcaaaagtacttaatagctttttgtcttcttcagtcattttataccaaaattgtacacaaatatataggattgaaagcaaacaagaaaatattttgaaaggaatttatcaatcccgaccaaaaaaactttttttaagtcttttgcaactcctttttttatgtctttctgtcggtttactttttcagcgttttgtatgaaaggatatgccaggtagtgccaatagctatggcgagtaatattattttcaaccaaaggtagggggctatttggaaaatgcaataactgagtgttatccatatcaatgataaggaaatgatttttgcacgtagggggatagcgcggtattcgcggaagtttttaatataaggtcccagttgtttttgttggattagccaacgatacagacgtggagaaccgcgaaaatagaatgcggcggataataataaaaaaggggtggtaggcagaagaggtacaaagattccgataatgcctaataccagtgatattgttccggtgacggtatagaaaattttcatggatgcaaatatagaccaaaaaatgaaaaaatagggataactgttctatattcttagattttataatgtatctttgcatctgcacaccgaggtgacattaggtgtaagttctttctaaatataaactaaagtgatgtatacagtaattaagcgaatggaagtatcggcttcgcacagcctgaatctttcgtatagaagtaaatgcgagaatttgcatggtcacaattggattattacagtttattgccgttcggaggtgttgaatgcagatggaatggtggtggactttacccatatcaaagaggctgtgatggggcgtttggatcatcaaaatctgaatgaggtacttcattttaatcctacagccgaaaatattgcacattggatttgtgagcaaatacccttttgttttaaagttgaagtccgtgaatcggaaggtaatactgtgatatatgaaaaagattaatgagattttctatagcttgcagggtgaaggatatcatacaggtattcctgctatatttgtccgcttttcgggatgtaatatgaagtgttccttttgcgatacgttacatgaagacgggataatgatgagcgatgaagaaataatatcggaagttgttaagtaccccgcttctatggttgttcttaccggaggcgaaccgggtttatggattgacgaaagtttggtggatgctttacataatgaaggaaaatatgtctgtgtcgaaactaacggtacgtgtgtgctaccaggcaatgtagactgggtaacttgttcgccaaaagaaggaggggaagtaagattgaaccatatagatgaggtgaaggttgtctatgtgggacaagatgtatctgtttatttggatttgcctgctcggtattattttatacagccttgttcctgttccaataccgaggcagtaattgcttatattctgaagtatcccaagtggcgattgagtttgcaaactcataagttattgcaaatcccctgatgtctttttctgcaataaaaatgctttcaagaaaaagttgatataaagttgctttcacacgtttcgctctctgaaaccctttattcatcggctttttgggtgaaaaggatttttaagaggtgaatttattgctttcacacggaaactcttatgaacagtgagtttccggtatttgtgaaatgtgaaaggacattttatcaactttcgttcaaaactcaattaatgcattaaatcggcgagataattcagagaaaagtgttttgaaaaaaaaagaccttggtcttttcgcaaaacatcttgttctttttaaaaaagaacaaagtctttttctaaaagccgatgaagtttttggagactcttgattcagtattagttttatcgtttatatttaaaattttaaataccgatttcccaacagcaataaataatagccttatcaatttcataaactgttaagtttctttttatataaggcaaaggtacgtattttaaggagtttcggaacggggaaagttgaggctttgcatgatataaaaaaagttgtatcaatttgatacaactttttagcacgggaggagaggctcgaactcccgacacccggttttggagaccggtgctctaccaactgagctactcccgtgttttcggctgcaaaggtagtgtaatatttgaaatatacaaatctatttatgaaaaatattttttttctattcgttcagtaatcctaattcgttgaacatgacccgataagctacagcttttttttccagggccaaaggataggcacggctggaagaaggcattctgtataatttcatagccttgtctccaaattcgaaaggttcgcttgtacctacggttggctcttttacctctatttgttcgcggataatgtctgttgctttctgtccggtggtaacaatggctttgcacatcggaatttgttttagtaacaggctgatatctgtttgttctattacttccagaaacttgtcggaggcattgtcttgtaaacggcggatagctgaagctgtatcataaagtgcgattcctttgtcgtttaggaattcaatgatacggtctttatcaaatactttcttctcagggttcaggaaatgctctttgtcctgaaagaaaataagtccgacgatacgccacatatcattttgcaggttagggtagaagaaatccatgctccaccgttttttttgcggaggaaaactgccaagcatcagcaggacagcattagccggcagaaagggttctaatggatgttcttcgatatttaatagagaatccatgaaatctttggaaattaagtttatgaagctatatcgaaatatgtacttaccataggggcaaatactcggattcgtccctacagcaaagctataatggcaagagtagtaaaccgcaatgcgagtttattcttttggcttcggctcttttttagccaataaaacgatattgtaaacgtattcggtcatccaattttcagagtatcccaatgcgtgttgatacttacggatagcaatacaagttttgtgtacgctgtcatctttccagtctgttttggtcataatgtcatggatagttttttccgtcatattacgtaacatcttcttcattacgctgggcatacggaacttccattgcatcagattgccgataagcatcatcaagtcattgctgaatccttggaacataaaaagatatgtctttacatcgtttacattcttacaattctttttaatggaattgtctatttctttgaagaaatcatcacttagtccataaagttctactaacatttttttacagcgtgacttttcggcaattcctaatttattgttttgggtcgggattttaagtgtacgtttgaaaactgccatgtcaggcagaaaattaatattggtaatacctatattgcaggccattacagactgataatatacacgaatcagcgtcatgaagtcttccattccacctactttggtgttttcttctccttctgcttgttttttactgaataattttgaaaatatgctcatggcttttttattttatgttcttgccgcaaagatacttatttttttttaatactttaccaacattccaaatcttcctcaatgtccttcattctatctttcgtgaaaacaggattcttaattccgctacgtttctgtatccgataatcttctaataggcggaaagcatatttgcctaatagaacgatggctatcaggttacaaatggtcatgaatcccattgctatatctgccaggccccatgccaagtccaagctggcaagtgcaccgaacattaccatgccgcatacagagatgcggtaaaccggaatagcccagcgttggcgggtgatatatcgtacattggcttcgccgtaataatagtttcccaatatactactgtaagcaaaaaatagaattgctactgctacataaattgttccgatatcacctatttcattatttaacgccatctgtgtcagtttaattccgttggcatctcctgtagacgccagcccgctgaaaagaatgataaatgctgtacatgtgcaaatgaccaaggtatctgtaaaaacacctaatgtttgaatcaatccttgttttacgggatgggtgacatcggcggttgctgccacattgggtgcagaacccataccggcttcgttgctgaacaatccgcgtttgatgccttgcatcaatgccatgcctatacccccgcctaatgcctgttcccaaccgaaagcattctcaataatcagctcaatgactcccggcaaatgtttgacattcataatcacgatgaaaagtgctaaaaaaatataccccaaggccatgatgggtacaatgatgctgctgactttggctatacgctgaatacctccgaaaataataattaatgtaagtgcagtcaatatgcatcccatcagagccggagaaatattgaaagcttcctcgaatgcggcacagatagtgttgctctgcacggaattgaaagcaaacccgaaggtgaaaatgagcaaaaaggcgaatagaattcccatccatggttgttttaatccttttttcatgtaataagcggggccaccgacaaaagaattatgtccatgtaccttatatagctgggcaagtgtggattcgataaaggcactgctggcaccaaaaagtgcaattacccacatccaaaagactgcacccggaccacccaatgtaatggcggtggctactcctgccagattgcctgttcccacgcggcttgctatggagatggcaaatgcctgaaaagaggagatgtgatgttcgcgaccttctgtcttgccggtggaatctccaagcaggcgtaccatttcgcctatcatgcggaattgtacaaatttcgttttgtaagtgaaccagaatgcgcaacctagcagcattataattaagatgtatgtcaaaataacatcatttacgttgccgattaattgggttaaaatatccattactttatattgtctttagtttaggttttaatattgatgtttttattcttggtttagtctgaagtaaaacttatgtccgctaaatacaggctctactaagccaaaacgaataaagtctgctaatagttcgcttgcagtcttcctgtttaagttacaaattcggcaacactgattgagagatatttctccacgttctttcagtgtgtcaagcagccgttgttctctttctgtaaactcaaccaatacgccttccgttttttttgtatgctgccacattttcagatgtacaggtgtggcaaggatattttcatctttgatacggatgtatgcccaaggcttatttttttcatccagtgcatagacaggcttgactgccatttcaccgatagaaacttctaatacgctttttccttcgaccaaataagtccgtgtctcgatttctactttagggcagcaatacattgtggctgccgcttctatcatatatatttcttcttctgaacgaatgccggctattttgccgttgtctttgacgccgaccaacaatcgtcctccttctgtattggcaaaggcggacaagcttcgggctatcttgcgtgcatccgatatttcgaatttaaaatcttgatggcaatgttctccctccgagaccagttgccggatgtattgggtatctgttaatggcttcatttcggttgcaaaaataggaaaaataatgcttatgctcaaaagggaggaggaaggatgaaacaaattataggtattaaatgataaaaatgaaagaattaacttggttattatcaagctttttctttcatttgcataggaaaaagaaattagcttttaaataataaaggatatgaagaaattgggacttgtcattgtgctgttgtgtctttctatggcagttagtgcaggtgggtttatgttcaagcatcttgaagtaaaagatggtttgtctagtaatcgggtaaacgatatatttaaagattcagaaggctttatgtggtttgctacggcttcggggctgaatcgttatgatggttgccaaatgaaagtttatcgcagccataaccttgacttgggacctttgccggataattgtgttcaaaaggtacaggaagatggaaagaaaagactgtggatacgtaccgctgccggttatacgatttatgattctaaaacagaaagttttaatcgtgatgtgcatgctttgttgtgggaagccggtattgacggaatccctgctttgacttatattgataagaataagaacatgtggttctatattgcttctaaaggctgctatctttatattcctgaatcacagttgctttatccgcttttgtttgatgccggtcaattgcctgaaggagagataacggatatttcagagtgtagtgatggagcattgcttgtgtataatacgggaatgattgtgtgtctgaacagggatacaaataaaataaattgggatttaaaggagatatccaaagaattgggaaataataaatatgagactttttcttttttcgtagataaagagaatgacatttggatttacagtccttccggactttggatttataatccggcagagaagaagtggcaaaagaagttaagagaccttataaatcggcaatcgcggagtgcggtgttgtccgttgctcaggatttgcaaggacgtatttggataggacgggaacatgacggggtaaatatcctgaataagtctaccggggaaataaaaacattgatgcatcaacctgacgatgaacgcagtctgcaagataatactgtttctgcattatatgaagatcctaatggaatgatgtggttaggcacatggaagaaaggaatatcttattatcatgaaagtatcttcaaattcagtcttgattatgtgggtgatgttactgctgttgaagaagataagaatggggatttgtggataggaaccaacaatgatggtttgatacattggaaaataaataccggtgaacctcaattgtttgtccgtgaggtatccgatgccaattctttatcatcggatgctgtctcttgtttattgagaaccagagacggaaagctttggataggaacgctgggaggaggattggactgttatgataatggacgatttactcattataagaatatggtgaaaaatagtaaatcattgactgataataatattgtggcgttggcggaagataaatctggtattgtctggataggtacatcaggtggtggtctgcaaagtctcaatccacgtacaggagaatttaatacttataataccacaacgtctgaccttgcatttaatactgtttcttcattgtatataactagggataactccttaatgatagggacttcccggggactgtctgtcatggatttatcaacaaaaaagattatttctttgacgggaactaaatcgggaaagactcgtttctcaaaccagaatataaatcaggtgtatgaagatagtcgtgggctgatatggatagcaactcgtgagggattgaatatttataacccgaagatagatgaattgacgattcttgcagagaaaaatggtttgtcaaacctgttgacagtcggaattgtggaggatgataactcgaatatgtggataacttctgccaaaggattgactcatatcataccgatgcttgactcaaagaccggtatgtatgattttcgttgtaatatttatgatgaaagagatggtttacagagtagcggttttaatcaacgctctgtgaaaaagttgtcttccggtgaaatcgtaataggaggagtatatggaattaatcgtttcttttctgataagattaaatacaacgaggtattgcctaacgtgttttttactcatttcttgttattcaataaagaagttgaagtaggagaagtatatggtgataaagtcattttggataaggctttgaattttgtagatcaagtggagttggattataagcagaatatgttttgtgtgcagttcgcttcagataattatattattcctgagaaagtggaatatgcctataagctggaaggattcggtgatgaatggattacgactaagacaggagaggcggtttataccaatttatttcccggtacttatttattgagggtaaaagcaataaacagtgatggattcagtggaaatgaagaagcttcgctgaaaatagttgttacacctccgttttggctgtctacatgggcttgtatactgtatgttattctgtttgttggcattatgttgttaatgtgcagtaaaatgtgcggtggcaaacgtaaatccggaccatcagaggagcagtctgagataggagaggatgaatcggatgaggaatcggaagaattagaacagcccggcagttataaaccggaagagaaggtgacgtctgaagaagaatccggtgccgttttacttgctcacgatgaatcaatatcttccgaagttgtggatgaagttgtttcgaaagcagttgaagaagaagaggttgtagagataaaaacgatagaatctgttttggaggaaaaaaaggaaattgacaccgtttcaaccatcaagacccagagggccagagttatccaacttatagaagatgaaaacagtgacgagtatactacttatatagtaccggaagatgagttgccggaggtgattattactgcaggaagtaagaaggttgatggtattatccctcctgctatcagtgagatgataggaacgaagaaagctgtaagccatagtggtaatgatgaatcggtagatgagaagctattgggagccgcgatgaaatatgtagaaagtaatatttcccgtagcgatttatcggtagaagaattaagccgtgaactgggaatgagccgtgtaaacttatataagagattggtggctatgacagggaagacaccgatagagtttattcgtgttattcgtttgaagcatgctgctaagttgttgcgtgagactcggatgaatatatcggaagttgcttatcaggtgggattcaataatcctaagtattttactaaatattttaaagaagaatttggtatgcttccgtcagtgtatcaggagaaagaaaaacaagaacaaggcgaatgataagaacaattccatttggaagttgttttatttgtaataatcacatttaaaataagaatagaatggaacatacagtcatacatgatgagaaggtaaatcggtttgaggtttttgaatcgggacagattgcttatctgcaatatgaggaaaaagacggggtgctggatatactccataccatggttcctccacaattggaaggaatgggaatagcagcagatttgacaacggctgctgccagatatgccgaaataaatcaattgaagataaaacctacttgttcatttgcaaaaacatatttcatacgtcattcgcaatacggggatttattggtataaagacgaaaaagcagtgtgttggaaatccaatgtaactattacactggtttgtttttgacacactgccttctttggtatccgtattttagtcacactgtttgtgagtcataatctccaatactaatttatctgtttcattcatgccttgtgagccgattttggtcaggttgcggatactgcggtctacattatcatcgataataccttctacggaactgacgcatttatgctccattgctaaaatagcggaaaatacagctgtagatacaccactggtcagtttgagggcacagctgggctttgctccgtcgcaaatcattcccgtgatattggctatcatattttgtacggcaaaagtaatctgttcgtaatttcctcccattaagtaggttattccacaactggaacctgttgctgcaactacacagccgcacaaagcagataaacgccccaaactttgttttatataaataactgtcaaatgactgagaacgagtgcacgaattaattcttcttcagatttatggttgtcttctgcataaaccaccacaggcaaagtagcagtaattccttggtttccactgccggagttactcattacaggaatcatggctccggccatacgtgcatcgcacgctgcagaagtataagatagaatatgagtgaaagtattgctgcctaataactgtttttcgcttttgctttcttttaatattttgcctaattgatgtccgtaattaccttgaaaagagcgttcggctgcatttttgttcaaacgtttggtctcaagtatgaagcggatttcttcgagaggggtagttgtggcaaattcataaactttccgtaaattaagttctggttcatgttgttcttcttcagaggagcttgtagcctgtttgttcagtataacatcattgttatgagatacatatataaaattagtatgccctcctgatataatagccgttgccttgtcattatcggcttcacagattatctcaatatatagcttttcgtctatgtcttttttaagcccgatgcagattgcttgtgaatctatcagcttttttccttcctctacagcttcgggggtgctgtcttttaatacttcaagctggtattcggattttccgattaaagctcccaaagcaatggcaatgggaaggccgatcataccggttcccgggatgcccactcccatggcatttttcaatatattggcacttaacagtgcttttattttttcaggtcttttccctaatgtttcagttgctttggctacacaaagtgcgacagctataggttcggtacatccgatagcaggaaccacttcgcggttaatcagggcaatgatttgctctctttctgacttggcaatcatagttttagaatttttatgaataagaaggctgtccgattcattttattcagaatgacaagatgatgggactgccgggtctttagagacagccttcttatccggggttttatttttctttcttgtaattatctaatccggtctgaaggaaatctacgtatttatctatatcttcgtcatatgaatacgatttattcagcggctttccttcattgtctattaatacatagaatggttgtgcattagcaccaaacttagaacgttgcagataactccatttgtcacctactgtgcgcagagtacgttccttaccgttttccattaccttgatatgttccggcaatggctctttgttgtctacatataatgtaatcaatacataatcgtctgtcatcagtttgcttactttcgggtctgtccatacagcagcttccatcttgcggcagtttacacatccgtagcctgtgaagtcgagcataaccggttttccattgcgtttggcatattccatgccggcatcgtaatcatcaaatttggcatggacttcattgttatacaaattgaaatcctgagttgtcataggaggagcgaacgcgctgacagcctttaacggtgctccccacaatccgggaaccatatatacggcgaatgccaaagaaatcaatgccataaagaagcggggtacacttgtggtattgtcatcgtcatcatgtgggaatttaatcttgcctaacaagtagaatcctaacaaaccaaagattacaatccacaaggcaaggaacgtttcgcggtccagaattctccatccataagctaagtcggctacggataaaaactttaaggcaaatgctaattcaaggaaacccaatgttacttttatgacattcatccagcctccggatttcggcattgattttaaccaagacgggaacatagcgaacagtgtgaatggcaaagccaaagcgatagcaaaacccagcatgccgatagcaggggcaatgacactgccggtggtagaaacttctaccaataagaaacctataataggacctgtgcaagagaaagaaaccaatgacaaggtaaatgccataaggaagatactcaataaaccgcttgtttgttctgctttgctatccactgcattactccatttggaaggtaatgtcaattcaaatgctccgaagaatgacgcagcaaaaataatcagcattaaacagaacaagatattaaatacagcattggtagatagagcatttaatgcacttgcaccgaaaattaaagtaatagccaaacctaatgcaacataaataactacgatagatgcaccgtaagtccaagcatcacggatacctttctttttatctttgctgcgtttcaggaagaaacttacggtcatcggaataataggccatacacacggagtgaataaggcaagcaacccaccgatgaatccggcaaagaaaatatatatccaagaacgatcttgctgcgaagttgtctcaccatagctgttcaattctttgataaccggtgtccaatagtcctgtacagaggtttcgttatcggataaggctacagtagcagcactgtcaatggcagttgcttctgcaacagaattttcagcagcaggttggtttactgtttcggctttggtttccgatgttgcaactgtagcggtagcggcattcccttttcccgagaaggagaacggtacttctgtcggtggtaagcagttttcgtcattacatgcaccatattccaaatagccttcaatttgataggaagcatctgtgattttaaacttctgaacaaaagttgcagtattctcgaagtaacgtaatttcatttcgaacactttgtcgaagttttcaatttcttttccctgtggagtgagctttcccatcagctctgcaccttgtattttttccacattaaaggtagcggaaataggaccgcccgaaggaaggtcagtggaataaacatgccatccggcatcaatattaccggtaaacacaatctgtgcttctgtgtcggaaattgttttcaactcagttttaaacttgactggttcttgaatttgggcaaatgacggaagccatgccatgattatcaagaggcagcttaataaaaacttctttttcattgtctgtattttacgttattaatattctgatgatacaaagaaagggataaaatctaaaaaaagagtctttatacctatataaatatcggcaattgctgttttcggaagaaaaatcaagggtatatagtgacttattgctgtttttgtaattccagcactttattgcggtattgagaaggagtcattcccaccaccgattggaaaaggttgtagaaagtagaaatggagttgaaccccaagtcggcagagattgcttttagcggggtgtcgttttggggattggataataggcggatggcttcttcaatacggaaactgtttacatagtgagtaaaggattgtttggactgctcattgataatacgagaaagataggtgcggtttgtgcctaataaatcggctattttatcctttgtaatactgttgtctttgtaaattttttcttcacgcatggctcgctctaaagctctgaaaagttccagacttttctcatcggtgagtgatgatccggcatatttttcgggagcattaccggactttccgttttgttccagttctctgatacgtcggttcagttctgtttctcttttgatggcttcttgattttgcttgacgatacttacataaagtttatttttacgttggtagaggtagtacagcaatcccaatacaataaagataatgataaggataaatgtttgctgctggatgcgttgttctttctgcatcacatctagcttactctgttttatcatattctcttgtcgctcggtgtcatatttaaatctcatctcgcttaaatctctttccttatctttattaaaaagactatcattctccaagcggaacaccttatagtaattcagtgcgttatggtactgatgaagttgttcgtaacaggtagaaagagtttcataaagtgcattgcggtgaattgcatttgcccgtgcatacgaaattgccaatccttgtttcagtaacaggatagcttcttcatagttcttttccttcattaaaacacgggcgtatcccaaatgggcatatacaatggaagaagtttgtgcagcctgtttatctttcattgcttttttatagtattcgatggcttgtacatattctcctgaatcacataggatatttccgaaaagattataagtatgtgcctgatcgtaaaaatcattttccagcattaacttttctgcttcatgaatatattttatggcttcttcgttttgcttcatcaagaaatacagataagcggtattgattgctccggtgtaaataatataggggtcgttgagcctatgtccgagttcatacgattctaacgcatatttgatgccggctttatcttttttcagataatagatattagctaaattagctaataggatagcgtattgctcttgatatttattttgttgtgccaacgtgatacccttatacagccattgaatggcacgataataatctgtatcgatattggcagcatatagccctaaattgccatacactgagcatagaagagaatcattgtgaagtttggttgccaactccaaagccagattcaaattctttttggcaaccttctccctgccactcatcatttgtgcttgtccttgaaagagataggaatatagatagagagatggatttttactcttatccgctatatttttcatgtattcagcataagtgattgttttggagaactctcctttattgaggtaatattgacatagaaattttagtgcattactattttcaggttcctttttgataacttccagttgcttttcgataataaaaggcttcttttgcgcttttgcgcaaaagggtgtccaaaggaaaagtactaaaaggagatacgttatcttcatgcgttttttctattgtagatgcaaatgtacatgataattttgggattttcattctgcattgtctctttcttataataatttatgaggagagtagacttaaaaagtgggatataagtggtcttaagagaaaaaatatagtgttttttgttttttttctcctaaaagtattgcaattttaaaataaaagcgtatctttgcaccgctttcaggaagaaagtacttctcaaaggagttttggagaggtggcagagtggtcgattgcggcggtcttgaaaaccgttgtaccgcgaggtacccggggttcgaatccctgtctctccgctgaacgtgctggacagaaatggtcagcaaacggacaaaaagctacaaatcaatgatttgtggctttttttattgcccgaaagtcctgcttccaagacttcaaaagtacggtaaaagacaaagtttcgttactaaatcgttacctattccctgccggacaaaaacggtaacgaattgtccataaatgacctgataatgactatattagtccatagtctgcataactcgaaaacgagaggtaaaaactaattttgcaactaaaaattttgagttatgaaatcgacattcaaggttcttttttatttgaagaaaggttctgaaaagaaaaacggcgaggttatgattatggcacgcatcaccatagacggcaaactttgccagttcagtacgaaac

SEQ ID NO: 6652 - DNA, 20478 bp, Unknown
  gut microbiota DNA sequence
catccaatatacggcagagcaaaccacgtttatgtaattcacgttccaaagctatggcaatagtactcttaccggaaccgctaagtcccgtcagccacagcataactccccgttgtcccaacagcgcttctttatccttccgggaaagcatacggtcaaatataggatatatgttctcgtctttcattctctattttcatttaatcttttactttatcaaaaaggccatatcatcggtatcagaataactgaaattataaacgtcaatatgttcaacggcaaaccgacacgcacaaaatctgtaaatttatagtttccgataccctgcacaatcaaattagtctgataaccgataggagtaaaaaagctggcagatgcagcgatacagatgacaacaaaaaaaggtgtcggacttactcccaactgatcggacaaagacagggcaagcggaaaagccagtgcagcagcggcattattagttatcaactcagtaaacagattggtgataataaataaaacagccagcaacacatgcggactataatcatcactcatatcaataattccatgagcaatgaaacctgatgctccagaatttaccatagcccgactgatagcaaatgcacaggcaatggttatcaagatatcccacgagatgtatttagtatatttacgtgccggaaaaagtttggtccacgccattatcacagtcgttacagccgcaaaaaagaacatatcaagctcaacaccgggaaatagttcttccataaaaggtaactctcccactgtcgctcccacaatcatcaacaccaacaaagtcaatgcaaaccaacgttttttcctgtcacctttcggttcggtgtctttaccattagccaacaatacaaatacagaagaatccccccatgtagaaataaatgaatcatcggcccataacaccaatgtatctccctcatgaaacttcacccttgacagattattggtaatactaacaccacttcgctttatttcttttacttcggcaccataatgacgggcaaagttaaaatcccccacccgtttgttgatacccgggaaacgtacacctatcaccgcctcaacacgatgataagaagaaggctccgcttcaacatactcatcgtctgccgtattcttccgagcctcaggcaacaatcctgaagagaaaaacaacaaataaagaatacccgccaaagcaatgaaaacgcctaccctgcccaactcgaacattccaaaccccttatatccggcatccaaaatcataccatccaccaccaaattagtagaagtcccgataagcgtgcacattccacccaatatggtagcgtatgagataggaatcaaaaatttggttgccggaatacagacagactctgcccatcgtttgacaataggagcaaaaatcacaaccaccggtgtattattcaaaaaagcagaaacaaaggaaataacgggcagcatacgtgcctgcgccttcatgaccgttgttttctcctgaggcagaagtttctttatcaactgtcccaatgctcccgattgccggactccttcactgatcaggaaaagcaacgccacagtaatcattcccttgttgctaaaaccctccaacatctctttcggtgtcaatataccaaaacaaaggaaaaatacagttacagaaaacaagatcattccgggacgcatcttatcaagaagcagcgcggtcaccatccctatcaaccccagaaatacaataatcacttcaaatgtcagcatcgactccggatattagtttcgtttaacgataaaccaaggattcagcaagtccggcttgttatacctcagcggttcttcttttcccgcctgatatatttctgctcctgatgccttggctatggcatgcccggcagccgtatcccactccatggtaggagcaaaacgaggatattcatcggccagtccctcacacactttgcaaatcttgatggaactgcccaccgatatcaactccacatgaggatatatctttcgcttttcctcaatatactcttccgtttcgaccgacagatgggaacgggaagcgaccagaacaaaagtttcatgcgttccggcacacggcatacgaaatgccgatgccttcatttcttccagtgaacggtctgcacgtccggttactccttccattttataagcgccggttgccacttcaccccaataaagcgtttctttgacaggaacataaatcactccaaaaacaggaactcctttctctaccaacgcaatattgacagtaaactctccattctgttttataaattcctttgtgccatccaagggatcgactatccacagcgtatcccatttcgcccgtacctcatatggcaaatgctttccttcctcactcaataccggatagtctgtttcctgcaaataagtcataatgatttcatgcgccttacggtctgcaagagtcagtggagaattatcagctttcctttcaatctgaaaatcagaagaaggatcattataaacgttcagaatctccttaccggcagctaaagccgcatctatcgcttttaatatatattcagtctgcatggtgtttacttccattaaaatgcttctgtcatattgaaatagaacaaactttggtcattggcaaaattacgtccgaaatccagacgtacattcatacgcggctgcacctcgatacgaagtcccacaccggcattgggtaacactccttcaatcttacccatggtaggtcccataaaaccacaacctccccaagcaacaaaacccaaatgatgcaacatacgctttacccatgtacttttatccgtattgaacatctgacgatattcggcgagcaccacatgagaagatttatcacgatactgccccatataatacccacgaagatcaaaaggagtgccacttaaagcatattggttcataggaacatccccaaacacattcttggtctgagcagtccaagctataacttttctatttcctacctttttatattggcggtagtccacctccaaacggtagaaattattatctcctcccaagaatttctgatacatcaatccacgaaaatccagataaatacctttataagcattagcaggaatatcccgactgtcgtaagtcaacaaaaatcctactcccgaattgaaagtagaatatccgctggcggtacctcccaaccttttataatcaggctgattaattaaatgtttggcaggctcggacattttatcataactcaagtcaatctgaggaccggcaaagaaattacttttacccaaacggaataaaaaccacggattaatctgaaaaccgctataacgatattcactggtagagtcactgcgctcataatgcttattggtggtatacccgactccataaaagttctccaatgtattcttgtaagtgaattttccaaaaatacggaatttatcattcttgaaaaacaactgaggtttcaccatcaggttcaaccctccctcgaacatcaccgcaacggccatcggcaatacagaacgtttttgcaaggtatccgacggattcatacgaaatgtaacaagagcactccctcctatcaacgcaccaaagtccggagtataactcggtcctcccaatatattataatgtatgttgcgtttggccaccttccggcgtcttaattccttttttgaaagttgatgagcaatggtgtcctcaggataacaactcatgtcatttccttgtgccgccacattccaagagcaaaacagacacaggagcaagctaagtaatattattttcataaatagtctattgtctgcagaaagttcattctcaaaaaactttccttgatgaataagttttcaaaaatacaaaagtcctatcaataaataacaatacattgaatttgttttaatttagttcaaaattcttcacttactttataatgtataatgtgccacgctataccctcattgtaattgacactattcaatttcctgtattcctcttttctttcccatctttagcttccgccataatctcagttcattatgtgttcagagtcagtattccctaatgagaatggcaaactccgcagtcttttgccgaagtttgccattctgattctcttctttgtattttcaatatagctattattataaactcttgggtcccgatcctggtatccatttccttctggattcaattctcctccaacacgaagaaataagttacagatggcatcagaacttagaaaaatccacttcttccacaccgctcaagtcatgcaaagtcacctcttccgcaccattcattcccaccaccacggtatagggcggatcggtagtataagtatggctgctgccatcggcgtactcttccgacttcccgtcaccccatttgatgagtccggtcaagtcgcttccccggaacctgggaatgctgaacatacggttggaatggacaatagtgatacgttttaatgaactcaatcctgcctgcaccacctccacctgctgttttgcctgtccgcctatgatagtgataatagccgagcgtgatgcctcttcgggattggcttccacgacaaagctcaatggataagccgtcagtcctcttcctttcaacgctttccttatccatgtttccgaacattccacatcgaaagtctctacattggtattcagttcaaatcccaagactcctcctttttgaggcatgtcgtattcttcccgtgccacaaggaccgcatctttctgcacctgcacgatattcaccttttccctgattccttgcagttcgttgacgaagtatatgtctgccgttcgtgcgtcatatccctcgttgggcaacacggtgatgcggcgcgaataagaagaaagtgccttggtcttgacttccgtcaaccaatccacatcgggcagcaccatttcataatccacattgctacgcaactctatgacaatctctccaccaccgctggacaccgtatattcttccttggaaagcaacaataagctgcctccctcctgatagaccgtgaccgtgctcttcaacgcaccgctgctgaagacaatccgcccctgacgattcttgccttcttcattgggagatatgtcgaacttcacctccgaagtggtgagcgcgcgaggagcaccggtacgagccgatacaatccacccggcagcctcttcttccacctcgtattcaaacgtcacattagcctttacctctaccgttatttctcctcctttggtggcaacctctatcttgtcagctgtcaccgtcaaggcatcgttctgtttttgcgtcacagtaatcttcttctgtaacgttccaacccttaaaatcagagtcgcattccgttcattgtaatcctcattcttttcggcacttacggtcacagtagcgttgccggctttgcccgaagcaggcgacacgatgcaccacggttggtcactggttgcagtccaatccgctgacgccttaaaaccgaccgcaaccgttcctccttccgccacaatgaccggcggaatttcagtatccagcgtaatggagggggcaaccggcttttccgattcgtcagaactactgtccgaacaagccacaagcaacatgagcgcccacaagacgagaagtatattatatcgtgaagttttcatacgaatattctttatggtatttatgaatcattaatcttattacctctattgcacaggagctcccaccttgaacttcaattccttggtcatgtcatgcagttgcaaacgcagcaggtaggtgccggcagacagtttcccggtgtcaatgctcacctgccgttcctgcacctcgcacatccggctgaaatcgctgccatcggcatcaaacacttgcaccacggtttcggcaggcacttgcagtgtcagcaatcgggtccggttgttataggtcagtgaggtctccttttccaaacttacctcctcactcaggacaaaatcccacacacagccgtcttcctcgtttcctttaacccactctaccttttttgtctgcgtatgagtccaataagccctgatacggtcgccggaagtaatgggccgggtaatagtcacctgtactccgggcaacaaatagccggaaccggaaggtaattgacttgccattaaagaataaagatcttcttttatatttccattcttatcgacatgagccaaactgattttacccgtaaaaggaagactaccataatagccaaggaaaccgatatccagcgagaaaggcttattgacttcaaacaccttttccgaagaagtgattccccggtaattcttaccatccgtataacacatgaaacgaaaatcttccacgcctatacctccttcatccttcttcaatccgataagtgccgattgatattcattatagtggccgccggaagcgcctgctccctgttcaacggggtcgagagccgacaagagatagtagccgtttccccagccgctccatccccagttcacccggaaatagttttcagtgtcataaccgtcgagcacaaaggcatgagcgccttcactgctgccgccggtataaatgaccggacgcctttcatccagttcgcctttcattatccgcatccactcggcaaaggaataattactgcgcactatgtaacgtccgtccttgtcatatcccatgtaagtctgtagtcctttcactacatcggtcacataagcgcctgtaccttccccccctatcgggccgaaatcagacgaaatcatgagtgcacagtcgcgcatcagagtggctacggcatttccggcagtcgaagaaaaagattgcgcgtagctgagcggcatattgtcccagtcataggcatgtcctaaagactgtgcagcaatatatctctggtgagtcctcgtagtgtaagccggcaaagtgccactacccgccttgggccactgatgatatcgcatgacaatagcagtagcggtggcagtgcaaccggtataggtctccttgccggcaatgtgcgggcacagccaattgtaaggattggcctgatcccatttagccgtctccaattctaccaccgcttgtccggcacggaccgtcgtccagcgttgagccagactgttgctttgcgtcgaaccatacgtcggagcacgacgtttctccgctatctcttcactgattccctgcaaccacaacttcaggttgacaggcaaatcggtctgtggaaaactactgtcgaacgaatagcccaacacaggcatcaccgcatcatcgcccgccacaatgacgaagccctcgctgtcggtacagccaaacacataataggcaggagcctctcccactgcccgggcagacacggcttcatccgtaacaagcaaccgcaaagaagaaaaggcggaacgctgcggatgtccctccttgaaaaaggtaatagccaactcttgagccttctctaccgaaatattgtctgcccacaagaaagtaggcagcaaactgaataaaaacaacagcaagtgtctcatagaactaaaatataaggcaatgaatactaaggcttaccaattactctccaacagaaaaaaccaagaaaaagaatagtcggcaatcccgattacaaatataaagaaatctattatcttttgtgaattatcgcatttatttatgctctatcatcaagaaaaaatatttgcgagacacttcatcagggtggaacgatatcaagaatcctccttcgttctgcaaacttttggatgcatttacatgctttttatttcttatcgtttccatcttgattaattaatacttaaatttgcctcgctaaaaagacctaaaacaaatctaatatgagaataaatgtattttgtatcctcattttctgttgtgttttcttttgctatggaaatcatattcactttaagcacattaatgtaaaagacggtttgtcgcaaatcaccgtcctttccatttatcaggatgaagtaggaacattgtggtttggttccagcgaaggactgaacagatacaatggcgacaagatagatatctatcgtccttcgcaaaacgacaacggccttacccacaatgaaatcagcgccatttgcggagacaagagcggaagcatctatatccgatccatctatgatttgataaagttcgatatagaaaaagaaaagtttacctgcatccttccaaatgcagcccataccatgtattgctataaagatacattatggctcgggtatcggaacgaattgcaatactatctgaaaagtgacggaaaaatacaccacgctgctaccttggacaataaattcagtattggaaactctctaattatagacaaggattacatctggatgggacataagcaaggcgtttcattaatatcccgtaaagattataaaacaatcaagaccatcacgggcatctctcatgtttcttccatctacagagacagccgaggaaatatatgggccggcactgtgcaggatggtctataccgtatcagtccgcaggaagaaataacacattacaccgatagcaaccgtttatccaataatcagataagaacagttcaggaggataacaacggacatatttgggtgggaactttcaatggtctgaaccattataacccaaattccgatacatggtccgcccatctgcatcaagataatatagactacggactcagccataactctatcaactgcttatataaagacctgcaaggaacaatctggataggaacttatttcggtggagtaaattactttaatcctgataccaacacgtgtcggttttatggttcgggagcaacaggaaaccatttcctgagttttccttttgtcggcaagatggtagaagacaggacggggaacctttggatatgtacggaaggaggaggattgaatctgttcaaccgaactacccggacctttgagaaattctcttatcatgccaatggactgcccggaacagctcataataatatgaaatgtatctattatgccaaagaaagaaacaaactatacataggtacgcatacaggcggtctcgccgtcttcgacattacccggaaacagttccgtacgctaattccttctcaaaacaacccgacttcacaagccggaaatatcgtcaacgaaatacaaccttataaagacaagcttattatactgacgcaagccggtgtctaccttttcaatcccgagcaagagacattctcccccctcacccacaatgaggacatcaataagcttctcttccgtccctatcaattcgaaacctttcttattgacagcaaagaaagattatggctggccgattcaaaaggaggacttctgtgtatccacatgacggacaacagcctccatcgctattataccaatgcgcaagactcttcttccatcggcaaattcaggatagtggatatcatggaaaacagcaaaggcgagatatactttggtaccatcggctcaggcttattcaaatatatccccgacaatgattccttctgtcaatatggattaggcaataatgcgctgcctagcgattattgctactatatctgtgaatctcccatttaccgccatctactgattctacacagcaaaggattctccctcttcgatcccgaaaccggtaaaagcaagcatacatacaatttatttcaaatgggatattgccaggggtcaagcatttatttcgcacaaaatggagaaacctttatcggcggagtaaacggcatgctttcttttttcgaagaacaactctaccacagcaacaataattatcatatctattttgatcagttgtgggtgcataacacacgcgtactgcccgatgatgaaaccggaatcctctcgcaaacactctcgcaagtaaaagaaatcaagctttcacacgaccagaacaatctaatcttcgagttttgttcctccaattatacgttgaacgaagacatcatttatgaatacaaattagaaggcttttccgaccattggattcctacccattcacagtctatttcctacaccaatctcagtccgggcatgtatcgtttaaccgttcgcgaacatcaaggtacgcacagtatcagcctcaacatctacatcgctcctccattctatgccacttactgggcatttatgatatatatattgtgtgtgattggtatcatgtacctcatcatttatatcaaaaccaaacaaacccaacttcagacctcactccaattcgagcgcaaagaaaaagaacgtacagaagagctaaatcaggtcaaactgagattcttcaccaacatttcacatgagttccgcacccctctcacactgattatcggacagattgaagtgttattgcagtcaaacaagcttgctcccaccatctataatcgtatattgcatatctataagaacgcgtggcacatgagagatctcatttcagaacttttagacttccgcaaacaggaacaaggctacctgaaactgaaaattgaacataaggatatcgtcccttttataaaggaaatatatatgtccttttatgaatatgccgccacccagcaaatcaattaccggtttgaatgcccggaacaggaactcaaactatggtttgacccggtacaactgcaaaaagtcatattcaatctgatttcaaacgcctttaaatataccccaaaaggaggtaaaatcaatgtgagcatcagcagtacaaacacacaggctcatataagtataaaggataatggttccggcattccgcaagaagcagtcaacaaaatattcgagcgtttctaccaactggagaatggtgccaacaaattcacgctcggcacaggaatcggactagcactttccaaaggaatcatcgacctgcatcatggaaacatccatgtaaaaagcgaacctgaacaaggaagcgaattcattattgacctgctaaaaggaaattcccatttttcacccgaagacattgcgcatacccgcctgaccacggatgacagcagagatatcaacaagccgctcgacctgacagaaatgcctgttgaagaagtccttcccgttgtaccggatacagacagtggaaaacctgtgctcctcatagtggaagataataaagaaatgctggatttgctgaagagcatattcgaatccatgtatgaagtacacattgcccaaaacggcaaggaaggattacaaatggcatatcaggtacatcccagcctcattatcagcgatgtgatgatgccggaaatgtcgggtaaggaattatgctacaaaataaaaaacagtatcgaactatcttatatccccgtcatattgctcacagcacaggtatctgaacaatatacaatagaaggatatatgttcggtgcagacgattatatcaccaagccctttaatgtgaaaattctcatagcacgctgcagtaaccttattaagactcggcaacaaatgctggaacggcttaaacagcctattgccaacaaacaagaagccccggacaccattaacataaacgaccgacaactattggaaaaagcgacacaaataattaaagagaattttgaaaacccggagtttgacatgaatcttctcgcctctgagcttggaatgggacgcagcaaactatatacgaaattaaaagaaataaccggactgactcccaacgagtttactctcaagttaaaactggaagaagccatgcatttattaaacaatgcacctcatctcaatgtgacggaaatttcctaccagctcggattctcttcggccagatacttcagcaaatgtttcaaaacattctatggtattgctcctttgaatgtacgtaagaatgctaatccatccgcaaaagaggagtagaagacaataggggagaaaataaataggggtgtatcaagacgttctaatgctgtcgtttagcccgtaggggcgaggttcgctcgcccgaaaacagcttgctttgtgtattcgggcaggcaaaccctccccctacagttgacaatttaatagaccgttttagttttgacacaccccaaacctaaccgtaatccaaccttttacctcaacaattaagatatttgtttaatcccatcccggattctgtgttatctctttgttcttaccaatcacattaacaggtataggatgataataatgcttattttcatcaaacgagcgattttcccagtcggtgccggcaaacacatcaatataatgttttccgttcaattcaaacagcttcacacgttcaggatcagccttgccttctgacggattaaaacgaggattatcaaaatctgacggttcaaaacgcatacccagtacacgatttgccaaacgcttgccccatttccaacgcatcaaatcctgatagcgagtatcttcaaaacacagttcaacacgacgttcacgacgaatttcaataataagggaagacaaaccttcagccgcatatttcgggtccattacaggattcagggtcaagtgaggcattccggcacggtcacgaatcacattgacagtccggtctaaatcagactgtgtaattgttcccaattcagcttttgcctctgccaaattcaataagacttcagcatagcgcaacaatggagcgtcatgtgtctcgttaccgtaacctttcatatcttgctcggcaatataatacttaataacatgataacctgtagccgattcccaacctgtcattcccgctacccgagggaagataaacttgtctttattgtacagaatttcttttgagtgacgaggatcaagtacaatctgagtcaaacgcgggtcacggttatccaaaacattctcatactcatcatcattaaaagtctcactcaaagcaacaggtttagcacttccatccggttcgatgcaaaggaagtcgtctacaaaatcctttgtagcaccattacccgaagcaaccaaataaccgcacaaacgatgtcccaacaaaccggctacatactttctaaacagaatcacttctttattatcagtcaaatcatcactggtaaataaagtggcatagtctctatccggatttccggtattatagatttcatatttcttcattgccatcaacgcttcagatgctttcacagcttcctgcaagaagttttcataatcacccagtccatggtattttctataagtaccttcgtaaaggcaaatacgtgattttaatgccaatgctgcaccttttgtcacacgcacccctttattaccccagtcttccggcaaatagtcgcaagccttattgatatcttccagaacatggtccatcacttccttgcggggagtacgcggtccatacagttcttcagaatccgtagtcaaaggagtagtgatataaggaacatcaccatacatctgcactttatccaaatagaaccatgcacgaaagaaataagcctcacctgcatacttgtttctgatattttctgctattcccactttctcataattagcaaagaaagtattgatgcggcgcagcaaagtccaataccatcctccggcagtcgggtcattgggaaccgtctcttttccggctgcaatctttgtatacgaagtatggtttgagttactcttcgaaacatagttatcagtctgtacatccttccagaaataatccgcataactactattccatgcacccagggtatgtcctaccataaaacggtaataactgtcatttccggcttcattgtaaataccgttattatagacttcaaggtcactttcggtcttccaatagctattgtcattcaagtcgtgtgtcggatttctatccaaaaaggagtcattacaagaaacacacatcaatgatacagccgctaaagctgctatatttaatattatttttttcatcttgtctactaaatttagaatgttacgtttaacccgaatgaataagtacgctggaacggatataccatagtaccattcttacctgctgcttcagggtcgtaagctcccttcacattggtgaattcaaacaagttctcagcactgaaataaacacctgcctttgcaacgtgcaggaagctcaaccatgatttcgggaagtcatatcctactgtcagattcttcagacgacagtaagaagcatcctgcaaatacttggtctgcttttgttggttctttgtttcgcgtgcaataggacgtgcaaaatatgcatcacgattatcttcagaccatgagtccgtaacaaaccatttctgagtattataatactgtgttgccaccggccagaaaggttgtgaactcggccagaaatcacgtttgccgataccctggaagaagacattcaaatatacattcttataagacatattagcagtgataccgtattggtaacgcggagtagtgttaccgattactttcaagtcaccatggtcatctaatgtattcgagccgttgtttatcttcttatttccatccagatctttatacatgatatcaccgggagcccagttagcccctaacttagactggtctgcatggttttgcacatcggtgtccgactgatagaaaccttctgtttcatatccccatatttcaccaatcttctgacctacataatagtcacttaatgttccactcggattttcatatttagtaatttcagcctgtgaatccgaaaggataaagcctaaatcataagagaagtcattgccaatacggtcattccatttaacggatacttcccaaccgcgagtgcgtagctccgctttgttggcaggaggagctgttgttcccaatacttcaggatattccactttaacaagcatatccgatgttgttctctgataccagtcaaaagagaagtccaaacgttggttcaacattgtaaaatcaagaccaatattaaaggtagaagctttttcccaagtcaagtcgctggataccaagcctgccggattgatatacaaagatttctcaccgtctacaaacagccagtttcctgctgtacccgaagccataaagggaatatacggataatatttagtgttacccgaccaactgctggctgtcaacaactgattacccaagataccgtatgaagcacgtaccttcaagttatccaaccaagaacgggtagattccatgaaagcttcttccgaaacacgccatgctcccgagaatgaaggcaggaatacaaaacgattatcggacgggaagcgggaagttccgtcataacggccgttcacttcaaatagataacggttattatagatataattcaaacggaagaaaccgccgcgtaatgcccattcataaccgctttcactaacagtttgcataccggtacccaagctcattgaaggtaaatcctgagatataaggttctgacgggtagcagtagttgtattatacttagtcaattcctgattgaaacctaacatggcttttacataatgcttttctgcaaaagtgtgttcgtagtctgtataagcattgaaagaataataatctttattaccgttcacccacgaataactgttgttattggtattaccttccgtctcaacaaaagcattggtaatcatatccacttttttacgatgttcggcactgcggctgtaattcaggttataagtaaaatccacacgtgcatgccaatctttcgtaaaagtaaaatccgcactacctgtcaaccagatatcatgtactttcttcttgtcacgacctccttgttccagcaaagaaataggattctggtcatcgaaatatttaccggcatattggtcaagttccggataacgtgcatcacctccccacggacgagccatacgtgtcggagttgaaaataccatctgctgccaaacatcatctttatatttatgaggcttatcggtagtagtatagttatacaatactttagcccccagcttcatccatggagtcgtttgattatctacagacaaacgagtattcaaacgctgatagctgtcttcccccactttatacatcccagattgatttacataacctacagaagtataaaatttagtcttttcattacctcccgaaatatttatattatggcgatgagaaggagtatatttcttcagcattaaatcggtccaatcagaatgaccataataatacatagtaccgttcagcacttcatattcaggattattagccggatcattagcataattcttcattttttccactgtatccggattatacatcacatccaaattagcatttgtcattgcccgatttacaaattcggcatgttcccaacttgtgtcgaccatctccggcaatacagtcggtttagagaatgccacgttaccggaataagatacagtagtcttcatatccgaacctgcatttttcgtagttaccaaaataacaccataagcagcacgtacaccatagatggcagatgcagccgcatccttcaagaccgtaacgttggcaatatcattcggattaatcatgtcaagatccatttccacaccgtcaaccaataccaatgggctgccaccatttatagaagtagtaccacgcacattcagtgttgctccggtacccggctcaccactactcggcgtaatctgcaagttaggtatagtcccctgcaatgcactggtagacgaagtgatgggacgtgattgcaaaacttttgcatcaacagttcccacagaacctgtcaaattcactttcttttgcgaaccataccccacaaccactacttcatccaaagcctggctgtcttctttcaatttgatagtaaagctagtttgatttccaactttaatctccatactctgataaccgatataagagatttgcagaatagctccttcaggtacattgctcagggtaaactttccttcaaaatcggttatcgtaccgtttgtcgtaccttttaccatcacatttgcaccgataatagactcttgtgaatccatcaccacaccggtaatagtcttaccttgttgcgcaacaatggccactgatgccacatccgatttagccggcagcaaagatgtcttcgctgcatccggacttgcaaatacactcacatttgccaacagcattgatgtagtgcacatgaagaatcctttctttcgtaaaagcaaagaaatccgtttcgatgtttttttcataataatagcttaaaattcgttagtagtaaactttttaacagtacaaaaatagggtatgcccttcactagagcataccctttttttgagttctttgtacataaattaaccgaacggactattttatacataactatggacgcgaaggatacattatcagccggacactaccgctttgcaacggtttcttcagacgaataccgatacgcgtataagcaggagagttcacttcaacagtctccgaatcaaattctaccacacccggagcttcaatatccaccgtcattttttctcctcccagcaccaactccaaacgattatttcctatcatcttccagtcggcacgagtagtaatagctgtttcaaaagaaattcctgacactgcttcaaaacggtcttcaatcacgaacgttccttctccggcacgattataagtaaaggtacgtatcagcttttccagttcaggtaccgcagtagcataagcagatgtataatcaatctgaaagatatctgtgccgccagtcagttctttcttcaacaccactccctgagccttcttgcccgacacctgacattgtccgttgataaagggaacgggatgaccaaatgaatttttaataggatatttataagcatttccactgaaatagtcaccgggataagagaaaggtccacccatatcgcctgccatcgtctgactacccatcactactgcataagaacccacatcattatgattatggttttccgcgttatgccctccctttacagatacgcccaaacgacaagtcgaaccggtagcagggcggctaataataatgcctgcttcatcataacaagaatgaagttcatcagcctcggccttcaatacctcttgtatttcgggagtcatttccactttccaagcctgatgggggaacatgccgatggtgtgcaatgaaagattatccataccgggtatttcatatttttcttcataaggagctgtacccaacacattatcacaatagtttgtaataaaccaagaaggtgaaacacctgcacgacagtcggcgtaggcagggcaaacctgattcatgatctgaatcttctttccatattgtgcaatacgggcaaacttaggagtacggaagaaatcaatcttccctttcgtagcacgacaaatttcttcacgcaacaagataaacgagcaaaaaccataattataatatcctaccccctcactgcaatatccgtcatcactatatcccttcattccatatacataatacttctcagcagcagccacaaagtaagcacgctcttccttgtcctgcaacaaagcaagtgcagctcctgtcacgccggccaagcacaccgagttccagttattcgtgacagtaaaccaataaaaaggttttgtttcttccaaacaacggtagatagggcggaacaccttctcacggaaagcacacatcgccaaagctttcgtttcggccggcaagcggtcatccaataaataaatacattgcgccaatgtatttccggcagtagcaacaaccaaatccacataataatcagttccatgatagttatgcaagttacggtcatgtgcaggaattgaccaaggcttctggcgacagagctcttccaccccttcacaaatcgccggaataaaccgtcgcttattttccaaacattccgccaataccaatcgccacaaatattgataacgggcattcatcatgttctctcccggcagacgaatctcggtcttattaagatgcaaataaagcgaatctacaaaaggcggcattccgtccttcaggctggtatgagcctcttcaattaattttcgagcttcaggagtattcttcatcttatcccaataagtacgatctttataagttactccgataccttccggtttttccggtaacatgtcggctatctcacgaatacgttctgccgaaatattatttccatgtatctcgtcttttgccatccggtaaacctctgtccctgccagcaaaaatgcacccgggccatacacctctgtcatttcacgggttacttttttggggtcagcaccaataggctgcacatagcccaatttaccatcttcctctactgcccctaccaaagctttccagcccttttccactatgggaaggaattcttctttcgacaacaatccttcgttgatgccgtatgccaaagcatagacaaagaaaccggaacaactggtttccggagaagaataagaatgagggtccagcatactggctctccaaaagccgtcagactgttgcaaggtggctacacgagtagccagttccacaaacaggttctcataaaaagttctgtatttatttcccgcaggaagttcacgaagaatttcgaccagtccacccaatacccatccgtttcctctcccccaaaacaccttctcaccattggcctctttttgagtaaagtaacgatggtctctataaaacaaacgggcatccttatcataaaggaactcataagtctctttatactccttatccataaaacggagaaatttcttatcaccggtaatgttatacaaacgggcataaaccggcggagccataaataatgcatcgcaccatgtccatttttctaaagtggaagcatcaccataatccaataagaaagatcctttagaaggatgctccatcacccattcagtacgggccttcgtaggaatcagcatctcttcttttccatatttacgataaagatccaaatatgtttgtgcaacacagatatcatctgcatgatacatccgtttatccacttgccaataattgcgtgcccccaagcgccgcaaccacttaaaataaaaatcatcctgattttcctgctccgccacggatgcccatttagacaagcccagataaaacgtagcatttacccaattcaacggatcataggtaacttctttcatgtgggcaatttgccagtcggcaacacgcctcattgtttgtcttacttcatgttttgaaaaagaattttgtgcataagagcaacataccacccagcacaaagacaacaaaaatgctattcgtttattcataataatatttatagtttttttattgctacaaaattaaagcttcaggtattctttatgtagcaatattgtcctgagtatatacatttatagtactcaaatagcattttcagcccttccaagtcgggaactcagtataaacacaaaaaagcctccgaatcatttgactgactcggaggctttcatcaaaaacggcggctacctactctcccactgttacgcagtaccatcggcgtgacaagg

SEQ ID NO: 6653 - DNA, 56959 bp, Unknown
  gut microbiota DNA sequence
ggtttgctcgcccgcaaacagtttgctttgtgtcttcgggcagtccctgcccctacagctgatgattggataggtcattttagttttgactcactccctttttactcctgaaccttgcagcaaagtaacttgagccatataacaaagtcattgtgcggcattccccttacctttgcatcagaaaacgtaaaacatggaatgtatgaagaatatttttgaaaaagatttgtcaggtgaaatggtttctcccaatgaaccgggttatgaggctttgattagcgatattttcgcaactatcaagactgcgactgaaatgaatacgggttatcgcacttccgaagaagtacgcgagtatatgaagcagattcttggcaaaccgctcgaaaagagcacaacggtattgcctccgctctatatagactatggcaaacctatcactattggcaaagggtgtttcattcagcaatgctgcacttttttcggtcgtggcggtattacaatcggtaacgatgtattcatcggtccgaaagtcaatctgataacaatcaatcatgacccgaatctggaaaaccgcagtgcaacctatggtcgtccgatagtcatagaagataaggcatggattggaatcaattccaccattcttccgggagtacgcatcggttacggtgcgattgtcggagcaggaagtgttgtgaccaaagacgtgctgccgatgacagttgtagcaggtaatccggctcgctttattaaggggattgaagcccgatgaattagaaaacattgaaatatgaaatcttacatcattgttcacatgatgacctctattgatggccgcatcggaatggatgcgtagtaacaacaaaacctatccggtcattaatctggttatctttccccttaatccatcttttcctttatattaagcctttattcactaaagattaagtacttttgtacagatgtgttccatctccataggttgcggagttaattccataacctttggagatgactccatagcctttggagttaagtccaaagtttatggagatagaacaccaaaggaagaaaacccttagccatagagctgcaagggcttacggatacagacaaaatcttttaaagatggatatagaatatgatttcaaggctaaccctttcaaggaaaaggacggcaagccggtgctttatccggcggtagtggtgagggaaacgattactaccgaccacatagtgaaggaattgtccaagcacagtgcgtactcggcaggctgtgtggtgggagtgctgcaagaggtatccgatgctattgtggctcatttgcggcaaggaaaaaatgtgcggctggacggactgggtacgttctctcttgccttgtcctcgcgtgaggtgacagaccggaaagagatacgtgcggcatccgtgaagataaagaaggtgaacttccgtccggtgccggaactggtgaagcgggtgcgacaggaaacagacatcctccgtgccgagttcggcttcctgcccacggtgaagaagcgtagcaaggaggagcgttggacgttgctggaggcttatctgaaagaacacggttccattacacgtctggcttattcggaatggctgagagtggcgcgtaccacggctgcttacgaactgaaggcttggtatgaggagaagagattggacaaaaaaggaaagcattctcatgcggtgtatgtgttgtacaagcaggaaagtatctgattaatattgcagctgtgaataatttttttaattaataaaagatgcgtactatgaaaaaaagtatttcaactcttcttttctattttatttcagtttctttgttttctcaaaaagtatatactccggattgggaatcattggataaacgtccggttccgtcttggtttgaagatgccaaatttggtatttttattcactggggattatactctgtgccgggatggtcgcctaaaggaacttattccgaatggtataagtattggttggaaaacaagaaattgatggggaacggtgattttaccggtacggaaatctatgattttcatacagctatgtatggcagggatttcacttatgccgattttgctcccatgttcaaggcgatgagttatgatgccaatgagtgggcgaagctgtttgagcgtgcaggtgcccgctatgcggtgttgacaaccaagcatcacgatggttttgcattatggcctagcaaggaggcttccacatcgtatggcaggccttggaacagtatggtgataggtgctcatcgcgatttggtgggcgaatatgtggatgcgttgcggaagaccaatataaaagtggggtgttatttctcgcttcgtgaatgggggaatccgttgtataccaaagaaacgatgggattgttttatgaaaaacatttcttccctcagctgaaagatttggtgaatacgtataaaccggacttaatctggtcggatggtcctgatgctatcaatgataaagaatggcaggtggaaagaacattggcatggctttattcagaatctcctgtgaaagacagtgttgtggtaaatgaccgttgggcaaataatacaggacggaagcatggggattattacactagggaatatagtaattcaagtgcatcttatgataagccctgggaagaatgcaggggaataggattgtctttcggatataatcagaatgaggatttggaagattatacttctcctaaggcattggttttgactttggttaatattgtaagtaatggcggaaacctgttgttggatgtgggaccgaatgcgaatggtaagattccgccgatcatgcaggaacgtttggttcagatgggagactggctgaaagtaaacggtgaagcgatttatgggacacgtgcctgggtgcgtccttgtcaatggacaaagggtaaccgggaatggaaatcgaaggaaaaacattatgtgagcggtgatgctattttgaagcagacagtggacccggaaccgggttatgcggtgaaagaggtgttttttaccaagaaaggaaagaatgtatatgccattttgcctgcgtatccgaaaaataccatcaagttgaaggatatccgttctaccggcaagaccaaaatttccttgctgggatcagagaagaaggttaactggaagcaaaaaggagatgatattgtagtggaaatgccggccttgtatatggatgatatgccatgtgactatgcctggacgcttaaattggaaaatgtggcagactgattttttctttttcctacccgccggcattccttttatatattccgggtcgggaagtaaaagtaatgccggcgggcaggctgtaaagaaaggttatattttttctatttttgccaaatatcctcctcccgggagtaagtcaagctgtaatgttttgccggatttgatttttcggttgctgatgactatctttttatagttcgagccttcatccgatgcgatggtcatccggtaagtgcctttgggaaggaagtcggtctggagtttgcctttatagggtgtttcaccgttaagtacggaaagataccatgtatcgccacttcttctgactaaagctgccaattttccgatgcggctttcgggaagtactttggtttcgtcccaaaccaccggtacttcttcgataaacatccgtcccgggcatgataacatatcttccatgtcggcggcaaaaatcagcatgggagaggtaaaggtgtaaatgcttgccaattggtgtgtaaaggttaccgacggagggcaaaatttccggaaattcaaaggggtatagtcggcagggcctgccagccagcgggtaaagggtaatacagtgttatggtaaggccatgccgggccgggtgcccagctgttttcggctcctacgctttccagtccgcgtactgcttcttttgccagcaggttaggataagtataactgtcaccggtaggtttgtttactccatggaaaataaccatcaaatgggctttggcggcatcttttaaaatgttttccatcagattgacggtaaaaaggttttcggtgtggaagaagtcaatcttcagccctttgacacctgcttcggcacatttcttcataaagccggagcgttcgtcggcatctaccagccctatgtcggtcttgttgcccgaacggggagaggaagggcgccatacccagatgtctacattcttggctttgccatagtctgtcagttcttttaaaagttcccatttggaacgtccgttggtgttcttttcagtttcttcccaaagttcccaaccatcgtctaccacaaccgattgtagtcccagttcggctaccccgtctacatattttttatggttggctacgctgaggcggtcattcccttctgtcagccatgtgaaaacagagcgtcccggtttgatccattccgtatcttttcccttaggaaaaagggtggggtcgggacggtcggatacttgggcaatgatttggttattgactaaaccgttcaggtcttcggccaacatcagtacgcgccacggggtgacgatttcattttctccgttgcgcggcgaggcaatccacggtatgttacgaacctcttcatgccaaaacttggagtcgggaagacctgtgataattcctgtttccacgtgtcctttgttctctacatagccaaattgtacgcggttgttttctttgccgaataaaacagctccgtggaaattgaaaaggttggcttccgtgatggcggcataggttccgttcggtaaaaggaatgtggcgggaggagccagcagttcgtctttgatggagtcggtgctcctgtcctgataagcttgtatccatccatactggaaggggccgctggcataccatacgtgtgtgccggaggggaaagtgtaggtggtttgttcgccgtaaatacaacggggaccatcggagggaatacggtaacggagagctacgccgtcatcgaattcccatgagtctatgtaataggtatttccatctttttgttctattgtatatgttttatactttccggaagttgtgctgacggtgctgttctttacttcttttcccagtaggtggttgtctatgttcattcctaaaggggaggaaaggatgacgggttgccctttgaacgagacgtcaaaattgagttggcctgcttctatcccgatgttcattttggcttgttgtgcttgaaggaagcacgggatggagaaagtaaatgccagataagccagtcttttgagtttcatgatatttatataggtttaatgagttattcaattacataccaagtgtatcctttagccggaatttttacggtaaggttcaccgtatagtccctgttcagggtataagttgccggtgtgccttcctgttcgcggatgcgggctgtctttgtcagtccggtatagtaaagcggaagttggatgtcacgtgtcatttccttgtcggtaggattatagaacatggccagccctttttcttttccggcaggagcgacgtgcatgataccatcccagtcgcgggcatccggtttgcgtaagtggatgatgtcactgttcaatatattccggtatttcttataccagctgatgatttccactactgctttttttgtttcgggagtgtcatacagacgcgggccgcggtagcaggcttgtactcctgcgccataattttggaacatcagtgttttgtattcgtataaatgttcactcaacggttccagtgtggctgctgctccacctccctggtattccaccaatgggacaaagctccataatgaggaaggaatgcgttcgaaagtgcaatcgtagttcagttgacgggtatggataagttggcggtcgcgtggtaatgaccaattggcttcacggtagccgattcctactttggtagagccgttcaggaaataaaagtcggggacattgaggtagattccgttttcgcacatccaatgataaagttccgttaccttatggaattggttccattgtgagtctttcagtcctttatggtggggatggacggttgaggcacagaaatctcccggataagagccgtcgtgttcaaagcagcgcattccggttttctcgaagaacgtctttatcttatggaaatattcataaccccagtcactgcacaggcagggagaactgccgaatgtcatgccgccgcgtttccctgttttcggattgatgacatccacttcgtcacttatccagcggctggcaagcagggagtaacatcccatttcgatgcctttgttgcgggcatagtccacgaatgctttatatttggcgatgttggcatccgagatgtcttctgcattcagacccgaaccgaaactcaggataatcatctcatagcctgtttcggcacattggtcgatggcacggtacaccgtttccggattggttgaggtgagatgcatgaagatgggattttccgtagtccaaggtgcgatggtgcggtacattttgcgggtaaacagtcctttacgttcacggtcgtagctgtcgaacggcatttcgtatacgctgaaagaacggaaagtgccttgggacggtatggcttggtcgggtcccattttgggtgagacttccagtatgcaaggggtttgcagcaaatagttccgttgcgaggtataatcaggatcggttacccatttttcggtaatgtctgtttctttttccgtgaaactgccggcacaagcatagtcgctttctatatggatattgggcaagaggaacttggacgggtcacctcctccgggagattcaggttcggcaaaagccaggtattccaattggaatgtgtcgatgttgataggtaggtcggaccggtttatcacttcaaaccgtttgcggatgacgggaattttatcgtataccgatacatggagtttcacaatgacatctttcagttccttgtcaccccgcaaagtaaaggtgatttcactgccggttgcagcttccttattgagcgcccaacggctgcgtgcccattttatatcttccttgatagggcttatttcaaagtcctctaccaaaaaagattcgggaatggtagttatgttctctatccatttgtcttcaatgtaagcccgttccggttgtccggccaatcccccgattaagtgcttcttgccatcaatttgtatgctgccttcactgctgacagcacggagcatactttctccggtcatgcggttgatgatattggttgtggccaggttcgggaaaatccggaaagtgcgggataccatcgggttggccacaataatacttttaccgtctgccgaagcataaatgcctgctttggctttttcgggtgtaatcaaccaatcaaagtcggttttcgtagaagcgggaacggataagacaggaagtttgctgattttatctgccagtttgcgggaaatgccggtcgtcatttccgggccttttcctgcgtatcccgcatggatggtttcgggtttggccgatttatattcaatggttggggtaatccacaatgcattgtcaccgctggcaccgtcgtcggtgggttctaccgataattccagtatacggatgcctttcaagtctatatccatggatagaggcgattcattgccgtgcaagatgccgctgttgtaaagctctttgccgtctcctttcacgataaagcaaacggaacctttgtctattttgccactggtgccggccagtcccaggaattgcttgtcattgcctttcttgcggaaataaagttttgttccgtttactaatggaaggacggccaggctcttgtccgaaatatcgactttgctgtctgcaacgcctatttgggagcgcaggcgtgtagcatccccatggaggtctattttcagtatgcttttagcatgggtacctatcacttcattgtatattttcccattgacggcagcttgttctccggtgacggattttccgttctgtacttttccatactcttgccatatatgagataagtctagttccgatagttttatcgtatgttgggcttgcccgcttaagcagatgaaaagggcagtggtcagtaataaattctttttattcatataaatcttttaaatgtgtttctatttattaccaatatctgtcctttccggttgaacaaattcctgatggtagtatcaggtgccttttggtggcaggactgcaacaaaaggacagaaatggcttttatgtaacaaaggaaagaataataaatgtataaatcaatggattttcttgtttaaaacatggattatgtttttgtgttccattgatttgagatgagataggagtgtgccaaaagctctaaatgacacttgcatcgtgaatcattacttttgacacactctctttttttagtatttctatttcttattcatacggattgaatgttccgttgtcccaatcttgcgtttgctccagcttggaattggtttccaaatgcttgttgggaatggcatagaaataatagttattttggaaattgatttcatatttctggtctaataccaccacagaatctttaaaataggtcgtatagtctttgtctatgtctatattgtcttttattttgtcgaattcgacgggggaaatctttagtttgggcaaaagaccatgacgtcgggttccattcatttcggatgcgaacatgcgtcgtcggcgcaaatcccagtagcgtttgccttcataggcaaattctattttacgttccaacatgatggcagctatcatttcatcgtgtgacatatttgctttcagaccatacatgccattgcttccggcttctattccggcgcgttggcgaatgcgttttaaaacttcgtaagcttcatccgatttaccattttcggcagcacattcggcatagttcatcaagacttcggtaaaacgtatttctatccagtcggtactgcttctttcagtataatagggagtatagcttacattgatggctttccggcaatagaaaccgctgctgctggggttcagggtagagtgtccttggtatgtccattggattctgtcttttttaccactcaattcccatttgcatccattataggctatggtgttggtgaagcggggatcacggttttgccagaagtgaagcgggtcataatcaggtgattctgtgataggagttccggtgatcatcgggtaagattctaccatttcctttgtaggctgattgcaacccgaatagttttgggcttccgacagaggacgtgtcgcagcatcccaatggtgggtaatgtcgggttcctgatagcgtgtaacgaataatacttctttattcatttcatcaaaccagatattttcataactgtcgtacagcccgtatccgttggcttctatttgttcggctgccattttattgtacgtataggctgtttcccagcgttcagccttgttctcaggattgaattgcgggctggcataatagagcagaatccggcctttcagtgccattacggttgcttttgtaaagcgtccttcgtcgtctcctgtccatttccagggcagggcatcgatagcatcgtccaaatctttgatgattaagttgatgcattccgaagttttgttacgggtgacatataagtcatcggttaatgcctgcggttccagaatcataggaactccaccgtataaacgtaccatctggaaatatctccaagctcttaaaacaagtgcctgggcctttaatgaggttttggttgcgttatctatatttccggtttcgatactgcttaacatgatattgatgttgcgtatttctttgtagggccagttatctattgaagtagtggtaagatgaccgtataaaatgccagtttcaccataagcctcgtccgaatatccggctacgtcctgatcccatcccggaaggttgtcacgatacaatttgttaagataggcggtggcatattgggcattgttccaaacatctttctcggtgatggcagataagtcttttttatctaaaacatcaatacatcccgaaaggacagcggttgttaatacgctatataataaatattttattttcatgatattttcatatttaaagagttagaaactgacattgataccaaatgaataggtgcgcatcaatgggtaattcatgatgcttgagttctccggatcataagctttaattttatcttgcagcaggaacaggttggttcccatcaggaagaatttcatttgtgaaagcccccatttggataccagttgttgtggaagctggtaagtgatattcacattcttcaagcgcaggaatgaagtatcttgaatccagaaagtcgattcttcggaagctccgttgtcggctcctgcccttgggaacttggcatctgtgttctccggtgtccaataatctgcccgccatgcatatgcggaagcttccattccttcccattctgtacgctggtcataaaagcgtttacctccggctacaccttggaagaataagtccacacttaatcctttccatgccccgcccacagagaagccataattgataggtgatttggtatgttttataatccattctttatcattatcgtcaatctttccatccggttcgtccgagtttgcacctctgatatctctgtaattgagcattcccagttccggttttttcccaaagatggtatatccttcgggcagtgcgtcgaggtcggcctgtgtgcggatgatatcggttgccacatatcccatgctgcggtctgtgttgtatcctaattctgatttatagggacgtaagttttcggcttcgtctttggtaatcaacttattggtggcgtaaccgaagttggcgttgatattataggtaaagtcttttcctattttatctttgtaggaaagttctatttcgaaaccttttgtgtcaatcgtcgcgtaattttctttaggcatgactcctccgaaagttgaaggcaggctggccaggcggtctcctaaaatatcgtaggtatgtttatagaatccaccggcacttaatgataagcggtttcgtaatatctgcatatcaaatccataatctatatccaatgatttttcccaggtaatttcggtattggggattacatcggccgaaactccgttgcttagcgaaccgaaataagcaccggtattcaggttgtagcgttgcatccattgccagcctcccacagcatcatttcccagtaagcctatggaggcgcgtagtttcaggtaatcaatgaaccggacgttgtttttgaagaagttttcttctgagattctccatgccgccgatgctgacgggaagaatccccagcggtgtttcggatcgaaattgacagaaccgtcatagcggaaagaggcttccagcaaatacttgttgtcgtatgtatatcccaggcggcctacataagagaggcgtccgctttctgaacctttaccgttgagtgtcgaatttttaggatctgaacttccggcaaataattggtctacagccgaagatatgaagtaattgcgttgtccgtccatccagtcggtagttccttcatactgttcgtatacaaacagggcattgatatcgtgtttgccgaaagtattgttgtaagtcaccatggcattgagttggtaactgttgtcattattgtatttttcatacaagaagtctccgtcatctctggttttcacatagtccagttcattggtttgtatgtggttgtgtgatcctgtagttttgaaaacatacaagtcgtaaggacggctgaactgcttgatgaacgtgtgtcgttcatatttattgtatgtcagtttcaggctgaggcctttgatgaaaggaacatcatattggagagctacgtttatttcatagttggaataacgctttttgttgtatccgctatttccattgattacttccatcgggtgccatgccaaataggttccgttgggctttccgtcaatataaggggcaaaaagtccgcggcgtagcaatccattgtataggttgttcatattgtcgttgtcattgtcccatttccaataaggtttatggtcgttgcgcgtatccatgcttaagtttaaagatactttcaggtctttggtgatattggcatcaatgttgctgcggatactgtattttttgaaattaaggttgtcgaatgaacctgtctcgtaataatagtttccaccgataaaatagcgcaccttatcattaccaccgtttacattcagcgaatggcgggtgacaacgggagatttccatgtctcatccatccagtcgtatgagtggttcttgtaatattccagttcgtcttcggcataatattgcatgtctccttcgggaaccagttggttgcgcaaagcctcgttggtgtataaagcttgttcgtatgcattgaacatatccggtattttggttgcttccgaaataccgattgagcctgtataattgatggtcggtttgcctattttgccttttttggtagtgaccaggataacaccgttagcggcacgtgaaccataaatggcagccgaggcaccgtctttcaagacagaaagattttccacttcgctggcatccagcccgtcgaaggcaaacttgtcgcggactacgccatcaatgacgtacaggggggcggtactgttccaggtaccatcggcacgtatggatacggatgaaccacctcccggtttaccggctgtttgggtgatgttgactccggccaaccgaccgcttagtgcattggaaaggttggaggcgggtacattttcgattacttcggaattgatggaggctaccgaaccggtcaggttgactttcttttgggtgccatagcctatcacaacaacttcttcaagagtttgtgaatcttcctgaaggatgatggaaaccatacttttattgcctattgttatattttggtcaacgtagccgatataagagatagctaaggttgctttggctcccacttcaagggaaaaacgtccgtctatgtctgtaatggttccgttggtcgttcctttttccagtacactggcaccgatgatagcttccccatttttatccatgactgttcccgtcactttctttttggtttgctgagtaacattagtttcatcgtttttctttgaaaatacgatgtaattgttggtatgttcgtattttagattggaacttttcagcagttctttcagtatgtcgcttactttggcttttttctttgacaaagtaacaatgttctttacattcagttctcggttgctgtacactaccaggtagtctgtttgtttttctatttcagagaaaagggtttctaccgttacagcgtttgaaggtagttctattacagcgttttgtgctttaccggtagaagcaaataaggggaaagtacagaaaaacgtcaaaaatatagttactttcataatatttaatgtcctgttttgcgtttttaggcataaaagatgccctaacaaaggttttattttcatatctttgtttccgattaagttaataatttctagatttttgaaagggtttggaatacgttacgcttaatgtcgggttggcaggtgttggcgcatctgccgacttttttattaaggaaacgcgtgtgtggtgtgtctttctatgttttcatggttctttttggttttatggattagacaataggttaacggtataaagtaatttcattcgtattctctttttgttttattttgaaagggtgtattttctgaataatccgcaatacctccattaccccgtcgcgctggcggaactttcctgtgtattcgtattccagtatagaggtgtctttgacgatgattttcacgtcataataaagttccagttttttcaatatgtctttcagcttttgtttgtcgaaagcataaagaccgtctttccagatgatggggcctttagtgatggagcccaccaggaaacgtccattggcagttgcggttagctgttgttcaggacttaacagaactccttgttgttcttgctcgggatggtagacgcgtacagatccttccaacagtgcaacggtaagttcttcgctaggatagttgaagacattgaattgtgtaccaagtgcttttatatccacctttccggtagagacaataaacggcaacgttcctttcgccacttcaaagaaggcttctccgttgagctttacccggcgttcctcaccgaatatggaaggataggtgagggtggaaccggcattcacccatactttgctgccgtccggcagtacaatatgtgcgcgttgtccggccgggacagagagtttctgagtgacaggctgtggtatatccatactgataaacgagtaagtaacccaccatgtggaaactatacaggcaatgatgatagccgcatagcgtaaaaaatggaatgacaatcttttctttttttctatctgtcgggctttcatgaaacgcttcaggctttccttacctaataattcgtttttttcttgtgggtggagttttaccagcgattgcaagtgctggcaatttatcatttccttcttcagttcttggttggaaaaggcctcctgcagtaaagctttcctttcttctttactgagttctcctgcgtaatattttataattcgatggtccattttttatctgttctgtatagtaaacgaagcaagagaaagaatccgccaaaagaaaatgaaaaaatcagggaagagtaaataaaaaaagaagtagaggcaggcagtcttttaattcctcgcgtaattttttgtatgcaatagccatttgtgattctacggtgttgatggatatttgcagttctgaagctatttgctgttgttttttgccttccagtttgttcatgacaaaaatgcttcggcaccgttcgggaagtttctgcaaagcttgttccaaacgttcttctatgtcggtttcatcggggaagttggtattgaggatctccaaagaatcatatttcatgcgtaaggtcatatcaaattcgctttgcatttcggccacagcttcctgttcgttcacccgtttgcgtaagtagtccagacatttgtttttgatggaagtaaacaggtaagctgtaaggttggtgtatgcatccaaccggtcgcagtgttcgtataaatgcaggaacacgtcttgaacgatgttttcggcatcactttcggacaatacatattcgcgtgcgaaataaatagcacgtgaataccatgtgatatagaaccgttcaaaatttgtcatgacgaatccttaaatgatttaaatgcaaaattaaaattttctattgaaatattaaaaatgataaggaatattatgggatttttattaagagaagaattacgctctttgtgcttcttacatcggttgatacggtcatctctccgaactgttataaagtcagaagaaaaatatgggggagtttcgtgatatcctgtccggagaataaaataattctttaagaactcaagccccatgattttgtaggcgggtcggttttactttgccggtattgtttgaagccgtcaattgatggggtaaggtaagtaattgaaaagttttttgtatttttgagctgtataaacagtgaaatggatgaaagaaaataataaggaacaagaaaggtttgttgcttatattactaagcagcaatgtgttaatgaagcagcatccgttaccgattttcttcggaaatatgcttttaggtatcataattccgcttttatatcatctgatccggttcagtttcctcatcgttatcatcggaaggaagatatagaaataagcggttttctgacggcctatctgagtttcggtgctcgtcctcaaatactgaaggcagcggagaggctggatgctgtcatgcagcataaccctttggtttatgtattgtcgaaagattggaaatcggatttttgtggggaagaatctttttatcgcacagtgtcgaagaataaaatgggggaattattccattggttacatggaatatatacaaaatatggctgtatggaagcggctttaatggcgtgtcaggagggctctccgatacaacgcctatgtcgtttgttgggcgtttcggacaaggcaccgcaaaaaaaacttaatatgtttcttcgttggatgatcaggcgtgactcggaagtagatttcggtatttggacttctttttcgccttgtgatttgttgattcccttggatactcatgtctgtgaagtagctcatcggcttcatcttactcgaagtaaatcttatacattgaataacgcaaaggccattacccgtgcacttgccgaggtttttccggacgacccgtgtttgggggactttgcgttattcggttatggaattaatgatggaaaataacgatattaattttactatgaaagagtctttatagcagttgctgtatttgttctcttttgagttccgtatcaggatggaatgccggactgttcatgtattttttcaagctatataacagttgtcgggcttcggggcgtttatccatgtcttgccaaaagtctatacctgaaaccaatatttttcctttacctactctagcttcgaacaataaggctaaggggcgattggtaaaccagtcgtcgatgacgcggacgatgggatgtatctttggagaaagtttgctgaactcaattgctccggaatggctcatggcatcccaccattggtagtcgctgtgatattctgtggggaattcactaagagccggatgtgcgggattgcataatatgcccaaggtatgaggtgcttgtttggcagtccatgctgtattccagaaaatgctggagaagcctatttggatatcgccccccagttttttggataaacttcctttctttagtgaaagtaagactgtggctcctttctcaagggtgtttagtgtgatggtatccaagcggtcggtcatacagattttattttcatggggaatggcttgtcggactgttgggtatacccagatgttccagtcattttttctattgtttactgaaacttctaatatcaaacgttgaggtgtggtcacagtagtgagtggagctgctacttcccctaaagtaaaattattgccgacaggtatttcttttgaattccattgtcctgattggagaatgtttccttcagtgtcacgtaaagtccatccggtagttgcgttttgcagagggctgcttccatagtgagcgacctcgacagatgctttcaaagtatcattgtttgtgaaaattagtttggacagacgtgccaatggtacggtggcattgcagaaacggctgtattcttcgggggatatataccctttttcttcccagaaggcatcaagcacacctaccggtgcggtgccttgtcccggaaaatcgtataaacccaacaattggaatcctccgaagtctttagtgcggagggcggcttctatgtcggccttgtaacaaagtacttgtaactttcctgatgccagcaggaaactatcggaaagggctttcatgccattctcttgtagactttcttggaatatttcaaagttggtagggcgcattacccctgtatactttttcatttctttaaaattgggatagacgcaccattgtcctatttcatgacttactatgggttgggtgaaccggttaatatattcagaccagtcgtagtctgtacgtggtgcctgggcattgatgatactgttcagcccttgtccccatccctgtatgcgtggtgaggggtcgcttaagaaatcactgacaggcaagttgggccatccgcctgctgtgctataaattcgtcttttatcttgttttttccaataggaggtaaattcagccagataattgttgcttcctgcgccggcaggttcattgccgtacatcatcatgcagaaagagggatgattgccaaaagttctcactatagcttcgctttcttttaatataaaggcgtccaatggtttcccatctccgatagtggtgctgctgtttgcccaggatgaacattctatttccagatacattcccattttgtcggctgcacaaaaagcagcttcgggaggacaccaggaatgaaagcgtatatgattcaaaccgtggttacggcaggctgtgaatatcttttcccatgaagcttggtcggtaggtgggtagctggttttgggaaaagctgcacaatccagtgttccgcgtagaaagacgggacgtccgttgatggtgatgtggcggtctgttactctgaaatcgcgcataccgaactgctctgtatgagtatcggtagtcgttttttctttatcggtcaggctggcttccagtgtatataaattcggattgaactcatcccacagacaaatattgtctcctaatgaaagtattgtttcagttttgttctcgccgggaagaagcactatttcttgttgtatgcttttcccattggcttttaaggttagaatagcggtggcttttgtcttttttttgtttttcaggtatgtttttacgcgaatgtttttagcattgatatcaggataaatatctgtgtgtactatgcttacttgtgggcggacttgcaggtacatgtcgcctattactccgttccagttaccttgcgtgtggtctgaaatactgtgtgagttttctcccggatcaatgtcttttattctgttatctatacgtaaagtgagtgtatgcttgcctggagtgagtacatcggataagtcatattgatggggagttccgagtgtgttctgcatgcctatttctttatcatctacccataaacgtgtttcccaatggcatcgttccagaaaaagagagatgtcttgctggttccagtcggttggaatatttacttctttccgataccatgctacacctttgtagtattttacgggttgcagccaaaaaggtattttgatgttatcggagttccgatattttgcataatgttcatttttaaaataagagtcatcgttgatgcttcctgtccaaggtgtgttaatattaatatcttctcctaagccattagaagtcatagaaccgggcaatagaatgctaccactccaattggtagagtctgtagtaaattgccatttgcctgtcaggtcaattcggttttcaggttgtgaacatgaaactgttaataggaataagaataataaagaattgattttcatctatctgattgtttatggtacttggttaatgatatatcaaatgttgtctcctgccgatattttttattatctatctgtgcggaaaggtgctacaggcagtccttctgcattgaatacatttcctacagtcgcatcatcgaaacagtaacggacagcaatcggctgttttattttgggtgaagaaactatcagccggttttctttgatacgtgcattggcaggtacgaagtttccgtcatttccggctattgttactcctctgatttttttgtcgggacatactaatttcttttctgtatgactaaaagagaggatagcttttcctttttctatggtcatttgtgtgaagaaaggtgtttcataacctttttttaatgctttgtaagttctgcccaatactaaattagccagtctaaaaccagcttcggctttttgggcaggatggatgttgtcagggtcaccaatatcggtagtggttatcagtcctacattgtcaactctatgtgctacttgttcttgtgcttcacgtatcaatgcgggaccgttattggtagagtggtagttgtatggagctatttgaaccatataaaaaggaaaattcttgccgaagccttttcgccaacttgcaatcattttttccatgagcaaattgtatgatgacggattgtctctgtttgattctccttgataccaaatggctccggcaatgtcgtatggcattaacggatgaatcatgctgttgtaaaggactcccggtgttaccggccaccaggggtaaggcttgtttattactgcttcggcaatgactttgttgtttatgacggtgtctctcggagtccatacttcagcgggagttcctccccatgcggaaacaattaatcctatgggtacattgagtttctgttgcaaacgtttgccgaaaaaataagctatggcacttcgcttctgcattatttcgggggtacattgttcccattgtgcatagcaatcttcttgcggagatttgcttccttgtttgctcagactgaagaaacgtatgtggggatggttagcgttgtcaatctcttcttgccggttatggattccgttgttgggactccattccatgtttgactgtccactacataaccatacttcgcccaataggatatctttcagtattattttgttttcttttctgttgtcggtgaatatttgcagggtgtacggacctccgtgcccacaggtaggaatttttgttctccaacgtccgcagtcatctacagaggttgaaatggtatcattgggcatccaacttcctactaatttgaccgtagtgcttgcttctccccatccccaaatagaaacagtacttttctgttggagtaccatgtggtccgagaatatggccggtaaatgtattggggtagaagtttgcccatttgtaactgcactataacacaatgccagaaaaatagttttaatagttcttttcattatattgtatagattaaggtgaatgaatattcctgatagaggaatagatttgcaaaagaaataataattgttgtataatcccatagatattttagcttaaatgatggattatatttctattttttttgggggggaggaggaaataaaaatccccggtcaggataatcacatcctccggggatttacttttactttaaaggttagtataaattaggttaggtcttatacttcttatagtgggacatattctacaaacgcttccatggcttcatagcatgccaaacctagctggtcatacaatgctgctgtaccacgattacggtcttcgctacgttgccagaacagacgttcgtcattacccaggaacggtgcactttccatttgagactgatgtttcaagatagagttacgtttagcacgcagttcctcagggctgaacggaactgccatttcaatattctctatttcccattctgcccatgcgccacggtacatccatgtgcgacagtctttcaaccattctgctccagcttccttttcaatatcgatggcagcaagaactgcatcagtacatacgcggtgagttccgtgtgggtcggccaagtcaccggctacgaatatttggtgaggctttacttcgcgtaacagcttcagtacaatttctacgtcagcttcactgataggattcttttcaatcttaccggtttcgtagaacggcaggtcgaggaagtggcaacggctcaaaggaacttgattgaaggtacaagcagtacgggcttcaccacgacgaatcagacctttaatggtcaggatgtcgcgtgtatccatatcgccttccttctttgctgcaaggaatttcttgatttcagcatacttgttcttgattgtctcattagagttatcatcgaaaagttgattgaaaccattgataaaatgcatgaaacgtactacttcttcatcacctacggcgatatttccggatgtttcgtatgcaacgtgcacttcatgaccttgttgaaccaaacggcgtaaggttccacccattgagatgacgtcatcgtcagggtgcggagagaagattaccacacgtttggggaacggttttgcacgttcggggcgataggtatcgtctgcattcggcttgccacccggccatccggtgatggtgtgctgcaaatcattgaagattttaatgtttacgttgtaagcagagccatagagtgccagcagttcgcttaatccgttttcgttatagtctttgttggtaagcttcaggatgggtttctttgtcttcaagcataaccatacgatggcactgcgaatcaatttatcgttccactcgcagttggttaccaaccatggacgttggatgcgcgttaagtgggaggctgctgccaggtcaatgcaaacatttgcattgttatgcaactgtaagtaagaagcgggaagtgtatcacttactttatcttccactgctttcttgataatatcggctttgtcatcgccccatgccaacagataaaccttgcgagctgccatgatagtggcaacgcccatagtgatggaacaaggaggaagattgtccacacccagattgtgtgcggcttcggcacgtgaagtggagtcaatcagaatcagtcgggtaggtgagctgagacttgagcccggttcgttcatggcaatattgccttcacgaccgatacccatcaaaatgatatccataccgccaaatgtctggatgcgttgttcatacaggcggcagtattcgattacggcttcttgaggaatagtgccgtcaatcgtaaacacattctgcttatcgatatctatctggcccaaaaacaggtcattgagttgtgcgaaactgcttcctgcaccttcggcagccaagggatagtattcatataagttgaagatgactacattgcggaaacttagtccttcgtctttatgcttacggacgagttcagcgtatagcggacgcaatgaagcaccagttcctgcaccaatcacgcagaattttccttcgcgctggcgctcatggattttggcagctatttcatcggctatgtgttgcactccttcgtctaccgtttcgtagatgtctgtcggcaccttctcaaaacgagtgagtacggaacgctccactgcattttcgggtttataatacttcggagatactctgttaagagaaatctgcgagcttaggtttgttctcataaattacaaattagctttttcgatgtccttaaaatacttgtaggtacctactttcagttcatctgttgctgcttcatcacaaacaatgatgccatgttgatgcatttgtaatgcgctaatggtccacatttgtgtgataccgccttcgacagcatgctgtaatgcgcgagctttgttgtgaccgttgcagataatcagcacttctttggctgaaagaacagttcctacacctactgttaacgcagttttgggaactttgttcacatcattgtcgaaaaagcgtgagtttgcaatgatagtgtcggttgtcagggttttgatacgggtgcgagaagacagggaagaacccggttcgttgaaagcgatatggccgtcaggaccgatacctcccataaacaaatcaataccacctatttcggcaatctgcttttcgtagtttgcacattcagcttccagatctgttgcgtttccgttcaggatatgtacattttctttcttgatatcaatatggttgaagaaattcttccacatgaatgtgtggtagctttcaggatggtcttcgggtaaaccgacatattcgtccatgttgaaagtaacaacgttctggaaagatacttttccttgtttgttcagctcgatcagcgctttgtacatacctagtggcgatgaaccggtaggacaacccagtacgaatggtttttcgggagtggggtttgctgcattaattttacttgctacatagtttgctgcccattgtgacagtttttgataatcaggttcgataattactctcatggttcttttttaagttttaagttaactattcgttttttctatttattgtctgttttaggatgaactgttcacccaagttgcaatattactgaaaattggggacattcccttcaataaatgagttttttctttctgagaaagtgattttctttgttttattagcattctctttcgtttttataaaaaataacataaaaaaatggttcgtctaaaatgaaaaagagatgagggtaggaggagtgccttttttatttataggaaagaaataaagagttatgtaggttgtagccggtattgatatataaatcatttagtaatagagtttgataagtgaatttatttattaaataaagcttatttaataatctcctaatttatgggtacgtaaacgatgttgacgaataattcttatgaattagaaataattgacagaaagatataatatattaggttctataaaaactttttgcaaaattctctctttatgaaatatgatttcataaaaaaataactatatttgtgagcattaacggaatattttagtatgggtgataagttgttgaaagagatagagaaaggctctaagttggctgtgatgaagaaacgtatcatcacacattatatttataatggtagttctaccattactgatttggcaaaagaaatggatttgagtgtgcctactgtcacaaagttcattgatgaaatgtgtgaggatgggtacattaatgactatggaaagttggaaaccagtggaggcagacatcctagtctgtatggattgaatgcagagtccggctattttgtcggagtagaggtgcggcagttttctattcatttggggttaataaactttaaaggtgacgtgatgcaattaaagatgaatgtaccttttagggcaaagaatactcctgagtgtttggatgagttgtgcaagataatcaaacaattccttcagaaacttccgatagagcaggataaagttttgaatattaatgtaaacctttcgggacgtgtaaatcctgatttggggtacagctatagtatctttaattttgatgagcgtccactttcggatattatttctgaaaaattgggcggtttccgggtgtcgattgataatgatacgcgtgcaatgatatatggtgagtatatgcagggtgcggtgaaaggtgaaaagaatatcatcctcattaacgttagttggggattgggtatgggtattatcattgatggaaagctttataaaggaaaatccggtttctccggtgaatttggacataattacggatatgaaaatgagattatctgtcattgtggcaaaaaaggatgtatagagactgaagtttcgggttctgccttgcagcggattttattggagcatattaagaatggagagacttctattatttcaaatagcaggaagaatattgaagaaataacgcttgatgatattattgctgctgtgaataaagaagatttgctttgtattgagttggtagaagaaattggtgtgaagctgggaaggcatgttgccggattgattaatatatttaatcctgaattggtgattatcggtggtgatctttctcgtacaggagattatctgatacagcctattacaacggctatccgtaagtatacgctcaatttgatgaaccgtgattctgtgattgtggaatctaaattgaaagagagagccggtattatcggtgcatgtatgctttccagaagtaaattgtttgaatcttagcctttttcgggcaaattattgttttgatgtcgaaacattaataatgtaattattttgttttgtcattctgaattttgcgaagaatctgtaaacataaagtagatgtaaacagattcttcaatttgtttgggatgacaaagtgataggttattttagccttgacacatacatggcgataatgagagattgcctctttctatttatttttcaactcttgtttcaatatttcccaattctcattgaatgcaggcatggaaggaaatagtaggtttgctccttcatcccatagcacttggtcgggcagaggaccggtgtttaccgcaatcgtaaagatacccgcagctactccggcttgtactcctaatggtgcattttctataacgagtgcttcattgggttgaaggtgagctttctttaaagccattaagtagggctcggggttgggcttaccatattttacatcgaaagcagtgaccatcagttcctttttaaatatgccggggaaattatggtttaatctgtctaatagagaagtttgtcccgaaccggttactaccatcggaatgagaccttcttctttgatttttgtcagaacttcataagctccgggcattctttctgccatagggcatttattaaactcttcagtttttgcctgatagattgcttttatttcttcttctgttgcgtcatgtccgcgttcacgacggcttacaatgtttatcgttgaggctcctgtgcgaccttcgtgcatgtaggcttcatcgcggctgagtccgaaaccgaagcggagcatcactttgtgccatgattcggcatggttgggcatggagttgaataatacgccgtccatatcaaataatacggctttcagattgatggtattatatccgtgagattggaggtaattgtttattgcttcttgaaacattattttatagtatcataatgaagcacggattacacagattcacagttttaatgaaactgcatgtatccgtgaaatccgtgcctgaataaaaaatcttatagattataatctagcttggattgctttagattcttcttcgtatcccggtttgtttaatagagcgaacatattctttttgtatgcttccacacccggttggttgaaaggattaacgccaagaatatagccactgataccgcaaccgatttcaaagaagtaaataatttctcccaaatagaattcgttcagttcaggaacaatcagacgcatattaggcacgccaccgtctacgtgtgctaattgcgtacccagctctgccatcttgtttacttcatctacacgttttccggccaggaagtttagtccgtcaaggtttgcctcatccgaaggaacttcaagtttatgattcggcttctcaacagagattactgtttcgaagatggtgcgttcgccttcctgaatccattgtcccatggagtggaggtctgttgagaaatctacagaagcggggaagatacctttgttttccttaccttcagattctccatacaattgtttccaccattctgatacataatgcaatttaggttggaaattcactagaatttcaatcttcttgccgtcttggtataaagcgttacgagttgctgcataaacagcagcaggattttctgcaaaaggtgtgtcgggattgctgcaaagagcttccattgtacgtgcgccttccactaatttaataatgtcatatccggctactgcgataggtaataaacctacgggagtcaatactgagaaacgaccgcctacattatccggaataatgaatgatttataaccttctttgtcggcagttacgcgtgcagctcctttcttggcatcggtaatggctacaattactttctttgccatttctttaccgcgttggtcttcgcattgctttttcagcagacggaaagccaaagctgtttctgtagtagtacctgatttggagatattaattacaccgaatttcttgtctttcaagaactctgtcagttcaaacaagtaatcttcaccgatattatgtcctgcgtaaatgatagtcggagcatttttcttttcctgcaaccattggaagctgttggataaagcttcaataatggcgcgtgcaccaagataactaccaccgatgccggcaacgatgactacttcacagttttcgcgaagtacctgagcagtctcttgcaaatcagtcaagtgttcagcagtaattgatgaaggcaagtgtagccagcctaagaaatcattacctttacctgtaccgttttccagagtttcaatacaggcttttacctgaggtgcataagcagcgatcgtttcttttgaaacaaatccggctactttgtcgatgtttaaactaatattcttcattgtatctgaattttatctgaatgaatcagttaataattttatctcaatcatgggcgagatgcgctcatacaatatattataaacggcatctacgatgggcatgttcacgtgcaaatgtttatttagctccttaatacattttgtaccgtagtacccttccgctatcatttccatctctatttgtgcgctttttacagaatatcccttaccaatcattgtaccgaacacacggtttcggctgaaattggaataagaagtaacaagcaagtctcccaaataagcagaatcatcgatagaacgttctacgggatgtacggtgttaaggaagcgattcatttcctgtatggcattcgaaatcaatactgcctgaaagttatcgccatatttcaaaccactgcaaataccggcagcgatagcgtaaatattcttcaagacagaggcgtattcgatacctgccacatcggggcttactgaagtcttgatataatgtccggccaattggcgggcaaaaattttggctttgtcaatatccttacaaccgatagtcaggtaagaaagacgctccaaagcgacttcttctgcatggcaaggccctgcgataacggcaatattatcttcgggaacaccatatactttgttaaaatagtcggaaacaatcaggttttcatcagggacgatacctttaatagctgtgacgatgaacttgtcctttattttggttttcagctttttgaggtggcttttcagataaggagaaggagtcacaaatatcagggtatccgattccttgactatcttgtttatatccgacgaaaagttaatgcgcttgatatcaaaacgcacactagtcagataagccggattatggccgagacgtttaaactcttcaattcggtcgtcacgacgcatataccagttgattgattcagactgagccaagactatctttgcaatagccgtggcccagctgccaccacccattattgctattttaccgggcaatttcatgttttgtcaattagattttgctaatccatccggctacttcatctaccgtaggattggtcaattccaatttatattttttatttatgccacaaatgtcttggtgtaacttctgtgggtttacatctttcatatcactcactaaattgtaaccggctttttgaatagcgggaacccactcttctgcaatacccagttccatgaacttggctgccgagtctttcggagtaatcttttcaggacgcatttgcgggaagaataatacttcctgaatataaggcttacctgtcatcagcatcaccaatcggtcgataccgataccgatacctgaagtgggaggcataccatattgtaatgcacgcaagaaatcctgatcaataatcattgcttcgtcatcacccttgtcggccagcttcatttgttctttgaaacgttcttcctggtcaatcgggtcgttcagctcagaataggcattcgccaattctttaccgtttaccatcaattcgaaacgttctgtcagtcccggtttagaacgatgcattttagtcagcggtgacatttccaccggatagtcagtgatgaaagtgggttggatataggtaccttcgcaaaactctccgaagatctcatctatcagttttcctttacccattgtttcatctatctcttccattttcagctctttacaaacctgacgtatttcctcttcggtcttatcattgaggtcatagccggtcttttccttaatagcctccaagataggcaagcggcggtaaggagctttaaaactgattgtttttccgtcaataatactatctgtgcttccgtttacagcaatacagatgcgttccaataatttttctgtgaaactcatcatccaattgtaatccttgtactgaacataaagttccatgcaggtaaactcaggattatggttcttgtccataccttcattacggaagttcttaccgatttcgtatacaccttcaaaaccacctacgatgagtcgtttcagataaagctctgttgcaatacgcagatagagatccatatccaatgaattatggtgcgtaataaacggacgtgcacttgctccaccgggaatggattggaggataggagtttccacttctgtgtagccggcttcgtctaaagctgcacgcagtgttttaaccacaatggcacgtttttcaaaggtttcttttacaccttcgttgacaatcaggtcaacataacgttgacgataacgcaattccgggtcttcgaacttgtcgtatgctacaccatccttatattttacgataggcaacggtttcagggacttagatagtacggtcagctttttggcatggatactgatttcacccatttgtgttttgaagacatatccttcgatacctatgaagtcaccaaggtccagcagacgtttgaatactatattgtataaatccttattttcatccgggcagatatcatcgcgggtgatatatatctgaatacggccttttgagtcttgtaattcgataaatgatgctttacccatcacacggcggctcatcatacgtccggctaccgatactttgcggggctctgtttcatcttctttgaactcggcttttatatctgtagaaaatgcgttggttacatactcagctgcgggatatggatcaatgcccatagcgcgcatttcattcagactgttccgtctgataatctcctgttcacttagttctaatacgttcatcctgttaaaacattaactcaatttggaggcaaaaatacgaaagattttgcaaagtacctcatttagacttatttttatttcgataagcttccatcttgtgccagctcgcataccatggaaatcataaataacagactgatggctccacaaacaacaaggagagtaatgttgactaggcgtgcttttaaatgggttgcagtgtgcagattggctgctatgtattctttaaagaaaaggtataatccgggtacggctgaacttgccagcaagaaatcttcgggaatctggaagaaataagttttggtaaaaccgataagcgcccaatggcacaagaataagatgaggaaaagattgactcgttgtgaaaaagccaataacagtccgatggtgaatactgctaccgaacatggcatgacaggagaagtcatcatggggaaatccatgccgcgggctacagaaaacaaggggtaagctaaagggaggaaacataatagaacagctagtttcttatgtttgtgattcaactcgaagggagtgtaatctactattaaatcgtaaatccagaagaagcacattattccccaaaaaagagctaatgcattgctgtagctgcgcggatcgcaataaatatgataataaactacggctacccatgcattgataaaaataagatagagtttcatcccctttttctttgcaggggtgggatggtggaataatgaataggtaagccataagccgacaagggtgataattagttggtaaatccatgttccggcattgtattgagcgattgtttcccaaaaaatattcatctcgtatgtggttattggttaaattcgggcggcaaaattacaaaaaaaacgattgaatagtctatctttgtggcaaattataaatggagaatacaatgaaaaagctgatgagtttaatgatgttggtttgcgcatgtctgctcagccaaccgatgcaggcacagaagaaggaggtaactcctgatgatgccggttatatagtaaaagtaggtgatatggcccctgatttcgaaatggagctgacaaacgggcaaaaggtgaaattatccgatttacggggtaaagtggttatgcttcagtttacggcaagttggtgtggtgtttgtcgtaaggaaatgccttttatcgaaaaggatatttggcaaaagcacaaagataatgaagcgtttgctctttatggggtagatcgcgatgagccgcttgataaagtagtggcttttgccaagcagacgggcgtgacctatcctttggggcttgatccgggagcggatatttttgcaaaatatgcagaccgtaaagccggtattactcgtaatgtgttgattgataaggccgggaagattgtgatgttgactcgtctttataatacagaagagtttgcttcgctatgtaaaaagatagatgaaatgttggctgaaaagtaataaagaatgagatttataatagtactgattacttcattatttgttttatccctttcatcgtttgcacagaataaaaagccccgtaccggtaaggaatctctttttggcaagaaactggccacttatcaaattacttctaacgaacttagcggggcttgtttttatttggtgagtgggcatggaggtcccgacccgggagcaataggtatttatcagggacgtcagttgcatgaggatgaatatgcgtatgatatcattcttcgtttggcacgtgaactgctgacacggggggcaaaagtccacattattatccgagataagaaggatggtatccgtgacggtcacattttgtcgaacagtaagcgggaaacttgtatgggagatcccattcctttgaatcaggtggaacggttgaaacaacgttgcaagtgggttgacaagctgtttaagaaagataagagtaattacaagcgggcaatctttattcatgtggatagcagaagcaaaggaaagcaaacggatgtattcttttatcatgcaccgggtagcagtaaaggcaaacgtttggcgaataatttgcatcgcacctttgataagaaatacgacaagcaccagccgaaccggggatttaccgggacggtaagcggacgtaacctttatgtattacgcaatacgcaaccggtggcggtgtttttggaacttggaaatatccaaaacaagcgtgaccaacaaagactggtgttgcagaataaccgtcaggcactggctaaatggatagcagaaggtatagtgaccgattataaaaaagggaagtaattacttccctttttttatattcgataagaaaaatttgttaaactaaagatgcaatattgcctgtgtccgacaaatttgtatatttgaatcttatatatctgatctatcgattgaaaaactaaacacaaacaattatgagtagtaatatcttcttaattatcgctcttatcacaaccggaatctttgtgatacaatttattctttctatttttttcggggacattgatacggagatagacatagacgctgatatcagtagtgtagtgtcttttaaaggacttacccattttggtattggctttggctggtacatgtatctggcaggacatacggatgtagccaattacatcataggaatattaataggtcttttctttgtgttggctgtttggtttctttataagaaagcttatcggttacaacaagtaaaccgcagcgaaaaaacagaccaattggtaggaagggaaagtaccatttattttaaacacggtgatggaaaatataccgtccagataaaacgcgatggcgctattcgtgagatagatgtggtttcggaaagtggaaagacttatcaaaccggagacaggaccatcattacggcttacaaagatggcatattatatattcaatagttgaaactttaaagaaataatctatgacacaagaaatgatgattatggctgctatattggtagcagtcattttgcttacttttatcggtattctttctcgttaccgtaagtgtaaaagtgacgaagtactcgttgtatatggtaagaccggcaatgataagaagtcggcgaaactgtatcatggtggcgctgcttttgtttggcctattatacagggctatgaattcctgtctatgaagccgatgcagatagactgtaagttgaccggtgccttgtctgcacagaatattcgtgtggatgtacccaccaccatcaccgtagccatcagtacagaccccgaagtgatgcaaaatgcagccgaacgtatgttgggattgacaatggatgacaaacaaaacctgattaccgatgtcgtttacgggcagatgcgtttggttattgccgatatgactattgaggagctgaactcggatcgtgataaatttctttcaaaggtaaaggataatatcgatacggaacttcgtaagttcggactttatctgatgaatatcaatatcagcgatattcgtgatgccgccaattatattgtcaatttaggtaaggaagccgagagcaaagcgcagaatgaagcgcaggcaaatattgaggaacaggagaaactgggtgcaatcaaaatagccaatcagattaaggaacgtgaaacaaaggttgccgagactcgtaaagatcaagatattgcgattgccgaaactaaaaagcagcaggaaatatcggttgccaatgctgataaagaccgtatctctcaggtagccattgccaatgctgaaaaagaatctcaggtggcaaaagctgaagccgaaaagaatattcgtatcgaacaggccaatactgaaaaggaaagtcgcattgccgagttgaattcggatatggaaattaaacaggcggaagctgccaaaaaagcggctatcggacgaaatgaagcacaaaaggccattgcacaatctgatgctgaactggcagtgacgcaagctaatgccgataaacaggcaggtgaagcggctgcccgttcggaagctgccgtgcagactgcccgggaaatcgctcaaaaagaagtggaagaagcaaaggcgcgtaaagtagaatcttcattgaaagctgataaaattgttcctgccgaaatagccaagcaggaagctgttttgcaggcagatgccgttgcagaaaagattacccgcgaggcagaggcgcgggcgaaggctttgctggctcaggcacaggctgaagcccaggctatcaagatgaaattggaagcagaagcggatggtaagaagaaatcattgcttgccgaggccgaaggtttcgaggctatggtgaaggctgccgaatcgaatccggcaatcgccattcagtataagatggtagaccaatggaaggaaattgccggtgaacaggtgaaagcattcgaacatatcaatttaggtaatatcacagtgtttgacggaggcaacggtggaacaagtaatttcttgaatacgttggtaaagacagtagctccgagtcttggggtacttgataaattgcctattggagagactgtaaagggaatcattaatccggaagaaaagaaagaagagaagacggaaggtaaggaaaaataattccaacggttacagtcttgggagtaataaatgtacaaggcaaactgttttaggattgtgtcaaaacgtggataatgctgtcgtttcgttcgcaggggcgaggttcgctcgcccgaaaacagtttgctttgtgtcttcgggcaggcgaaccctgcccctgcagccgacaatcggataggccatttgagttttgacatactcctaacttgcaaaatagcagtatgatcaaagagttgaaagatagatacttttttattctttcatgcggattaatacattggatacgatggccgtcactccgcctgtagtaatcccggaagagaaaatattttttattgtttcgggaaagtggcacaggatgtcgggaaccatctccacacttagtcccaaagaaaaactgagtgccatcactaatgtggctttgcgattgattttctgtgcggcaataatgcggatacctgccgaggcaactgtaccgaacattagcaaggtagcgcctcccaataccggttcaggcatcaaagagaaaatcaatcctacaccggggaataaccccaatagaatcagacaaccggcaatgtaataacctacataacgactggcaactcctgtcaattgtatcattccattattttgggcaaatacggaattgggaaaagaattaagaacccccgccagcatagaattaaatccatcggcaagaatacctcccgaggcacgtttgataaatgtttttccttctaccggttctcccgaaatcagtgaattggctgtgatgtctccataagcttcaattgctgtgatgaggaataccaatcccaaggcaatgaatgcagagaagtcaaaatccaatccatacttgaaaggtagggggatattgactcctccgaagctttgtacggcagagaaatcgacttttccaatgcaccaggcaactgcataacctatcatcaagccgatgacaatggaactcatgcgtaagtagcgattggaacttcgattgaagaatatgataagaacaagtaccagcagtgccagccctaaattctcaaaactgccgaacgtaccgttaccttgggcagcaacacctcctccgcatgcggttatacctactttaatcagactcattccaatcagggtcactacgattcccgataccaaaggggtgattactttacgggtatatttcaagatacggctgatgaccatttctacagaagaagcagcaatgcaagttccaaaaatcaatgggagcccttccagcataccggctgaaataatgggaccgataaaagaaaagctggttccttgaatgcataacaatcctgttccgatacccccaatgcgtttgcattggatgaaggtagagatgcctgaggcgaacaatgccatggataccaggaaacttgtggtttccaaatccagtttcaatgctcctgcaataataagaggcggagtgatgatggctacaaaaatggctaataaatgttgtatggctgcaaagatagcttctcgtacaggaggacggtcattcagtccgtaaatcagccctgtcgtatgagttgaggttgctttttcctccatacgattatcttattttgatttcacaattgtccagactgtcaatgatagccagcgattcaatgcgtatgcctgcgttgcgtaagtaatcaccaccgtgttggaatgacttctcgatgataaagcccataccggcaagttcggctcctgctttctctaccaggtcgataatacctttggcggcattgccattggcaagaaagtcatcaatgaaaagaacgcggtctcctttttggagaaagtccttacttacacaaacgtcgtaagaacggtctttggtaaaagaatatacactggtggtgagcatgttttccatggtaacgggttttttcttctttgcgaagaccacaggaagctcaagcaggtatcccaccatgatggcgggtgcgattccgctggcctcgattgtcattactttattgatattggtcgaggcaaaacgacgtacaaattccacggctatggatttcattaaaatggggtccatctggtggttgataaagttatctacttttaggatgcctccttcaaaacatttgccatctcgtaagattcgttcttttaatgctttcattggttgtgtgatttttgataatggcggcaaaattacaaattttattgggaagaggaagggagaaggcggttaatgtttatgatatatcgagaatatgaaatatgagcgggaggcaggtcggtatccgatgtaactgccggtgcctgagaggaggaatgtttccgcccaagtactaaagcaagttactttgggcggattcggtttatttctacagcgaaacgataacaagagttgtttttgatatactctcttgtgttaccattggttgtaatgtatattttcctgtttgaatttatctttggcttcctcattgcgttgaggataaccgatgggaattaagttgaaaggtacgatatgttcgggcaatgacagaaccttgcgtacgttctctatacgttgttcttcaggatagatggctgtccatacagcccctagctccaaagcttcggctgccagcaacagattttcggaggctgcagaacagtccagcatccagtacttgccgaattctccattcaatgatttggctaaatcaccacaaaccacgatggccatgggtgcttccgcggtcattttggcatagggcaatacttctgccagcttgtttaatacgtctctgtcatctatcacgataaaagcccagggttgcttgtttacagccgagggagccgccatagcagctttcagcatgatgtctactttctccttttccacggggcgggatgtataagagcggacacttttgcgtgccataattatttcgatggcgtttttttcttctttagtattttcgtttttatccatattctgacaattttccatcgttattaccgataaaacaacagcaggtaataacttgaatattgtatttacattcatcgttttaataaatgattagtaattcaagtggaattcgaccactgcttcaattcctttacggaagatatcaagaggaatattctcattgggagagtggatagcgttgctttccagtccgaatcccatcaatacggtttttatacccagaatttgttcaaagtcgctgatgatgggaatacttcctccacggcgaacggcaagcggcttcttcccgaatgctttggcgaatcctttttcggcagcttgataagccggaagggtaatggggcagacataaccttcgccaccgtgcatgggggttacttttactttcacataatcgggagcgacagcattgatgtaatcgacaaacaatttggaaatcttctcatgattttgatgtggaacaagacggcaggatactttggcgtaagcttttgatggcaacacggttttagaaccttcgcccgtatatcctccccaaataccgcaaatatcgaatgatgggcggcaactgttacgttccagggtagaatatcctttttcacctttcaatgcctttacattgatggcagccatatatttttgttcgtcgaaaggtatttgggctatcatctcgcgttctgcggcaggcacttcttccacatcatcgtagaaatgaggaacagtgatgcgaccgtcttcatcaatgacttttgccaatatgctgcataaggtattgatggggttggctacggctccgccgaaatgacccgagtgaaggtcgcggttaggccccgtcacttcaatttcccaatatgccagtccgcgcagtccggtagtcagtgagggaaggtcggctcccagcatacttgtatccgaaacaaggataacatcggctttcagcagctctttatgttctttgataaaggcattcagactgggtgaaccgatttcttcttctccttcgaagataaatttcacattgtgcttcagcaatccgtgtttcaccacgtattcgaaagcttttacctgaatcatcgcttgacccttgtcatcatccgcaccgcgtgcccagatatgtccgtcacgtatttcgggctcgaacggttggcttttccaaagctccaatggttctgcgggcattacgtcataatgcgcatatattaatatggtgggggcttcatcgctgatatgtttctgtgcgaacaccaatggattaccttgagacggcataatcatggcttcgtctgctccggcctccaacagcagttctttccagcgcagggcacaggcaagcatatcgtctttatgttcgggtaatgcactgatactgggtatgcggatgagactgaaaagttcttccatgaagcgggcttcattttctttaatgtattgtttaatttccatagctgaatgatttttgtcgggttaaagttaactttcccggaggaaagaaaaaaattataaaacttaaataaaggaaaatgcatatatagaaagtccaaagagaagcagacaggctgtttggctctttgggctttttgataaagacactttttatagttgagtggttctgtctatcaaatagtagtctaaaacagtgatggctgccatcgcttctacaatgggaacagcgcggggcaatacgcaggggtcatggcgtcccttcgctttcatggtggtgtcgataccattgatattcaccgtgtgttgctccattaatacggtggcgacaggcttgaatgcaacacggaaatagatatcctgtccgttgctgatgccgccttggatgccgcccgagtaattggtttttgtttctattcgtccaccgttgttgtagaatacatcattttgttcgctgcctctcagttccatggagtcgaaaccttgtccataggcaaagcctttcacggcattgatgctcagcatggcatttcccagtgcggcgtgcagtttgccaaatacaggttgtcccaatccgatggggcatcctttgatgacacaactaatcacacctccgatggtatcgccttcacctttgactttccagatgagttctgccatttcttttgctttttcaaggtcgggacaacggacatcgttgctttctatcaggtcgaggtcatagctcttgtagtcatggtccagcttgataggtcccacttgtgaggtgtaggctgttacgctgatgcctaattgctttaaggcaagtttggcaagtgaaccggccacaacgcgcgaaattgtttcgcgtgctgatgaacgtcctccgccgcgatagtcgcggatgccgtatttttccatataagtatagtccgcatgcgaagggcggaagagattctttatattctcgtagtcgttagaatgttggttcttgttccataccacgaaaccaatgggacagccggtggattttccatcgaagatgcctgaaaggaattccactgtgtcaggttcctttcggctggtggtaaggagcgattgtccggggcggcggcgattcagttccttctgcacaaaatccatatcgatgtcgatacctgccggaaaaccgtcaattacaccaccgacaccgggaccgtgagactcgccgaaactcgttaatcggaaaatattaccaaatgaattgaacatgttgtttgtagttttaaaagtttctattcgtaaagataacgattttcttgaaacaatggctatgtttcaggtaaaattttacttttccggttttaagcttttgcatattctttgcggttttcttaaatcactttttcaggcgggctaaggtttttcttcctttaggctaagtcttttcctacgtccggctattacgtcccaccatagcagaacgtacgtcccactgtaatgggacgtatgtcccaccgtggcaggacgtacgttccattgcaatgggacgtaataatctgccgttcaaaaaaacttggtcttctgtatgaaacggcttaatattccttatgggtttaaatatatcggtttgtgaattctcttactctttccgtatattccttggtgtggatgaggtaggaatgggcatggtcggctcccggaactatccatagttccttgggttcgggctttgcctcatataatttatataccatccgggttggcacgtagtcatctttgtctccgtggatgaagaacatggggaggtggcatcgggccacttgctttaaggcggatgcttctttgaatccccatccgtattccatccggcataaccggtcggcaatgtacattagcggaaatcggggtaggccgaactgggctttcagttctttggagaactggtcccacacattggtatatccgcagtcttcgacgaaacattttacatagccgggttgaggctctcccgataccatcatggttgttgccgcccccattgagatgccatgtaccaccatacgggtgctgtccccatatatttcattggctgtgttcatccattgtatgacgtctttgcggtcgagccaccccatctgaatggcatctcctccgctcagtcctgtgtctctaagatcgggcaggagaatgttaaagcctaactctttattatacatgtagccaatcatcatcatgcggatagcgttgtcggtatatccgtgaacaatgacggcggtttttgccgtcggctgtgcagcagctacataataggcatgcattttgacatcgtccggggcatagatgaatgtatctttaagagcacctgcattttgcaaactgtctttccatgacttcaaataaggatacgtgtcgaacatatactgccatgagccggccaaatcccttccccggttatcgggacgaagagagtagttgagcatatattgaccggctcccagcagaatggcagcgagaagaatgagtacaatacccgttccgatgagatatttctttttcatactttatttattccatatatcccaagcaccgaaagcctgcaataacagcatctccaaaccgtttttggtgatagctcccttgtcggctcctttcttcatgaatagggtggtgtcgggattatacaacaaatcataaagcaaatggttgggggtaaggcactcgtatggaatattgggatattcattggcacgaggatacatgcccaccggtgtacagttgatgattactttgtattcgtccatcactgctggggttaaatcttcgtatgtgaacattccttcgcgaggagtgcgtgatacgaatctggcttccattcctaacttcttaagtccatggtaaatagctttggaagcgcctcctgtgcccagtatcaaagctttcttgtgttgcggttccaacagtggctcaatagattgggtaaatcccataatatcagagttatatccgaccagtttgattttccctttagcggggcggatgattttaatcacgtttacggcaccgatggcggctgcatcagaatctaattcatctaaatagggaatgacttgttccttataggggatggtgacgttcagacctgccaaatcatgattctccagcaaaacgcccggcagttccttgatggaaggaatctcgaagtttacatattcggcgtcgatactctcggagtggaacttctcattgaagaagttctttgagaaagaatgtccgagtggataacctatcaaaccatattttttcataaaactcttgcttttagttattttgttgctaaataaagtgtacagatacccaatgtcaatcgtttaaagtttacttggctgaatccggctttgcggatgatatcagacattatttctccttgtggaaaagccttgatggattggggcaggtaagtgtatgcactttggtctttggaaagaagttttccgagggtggggataactactttggaatagatggcatataattgtttcatggggaaccaatccggttccgaaagttccagaatgactaattttccattgtcgtcaagtacgcggtgtatttcacgcaaacctttatccaggtcttcgaaattgcgcactccgaaagctacggttatggcatcaaagcgtttgtcggggaaggttagtgccgtacaatcttctttggcaaaagaaatacggctttccagtccggcagcctttactttttcacgacccacattcatcatgccttccgatatatctgtgcctatcagttcttcgggttgaaggatgcggcaggcttgaatggcaaagtcaccggtgccggtggctacatccatcatgcgttgcggatgaaaaggttttagccagttgatggctttacggcgccaacttttatctatgttccatgacagagcatgattcagttggtcgtaggcgggagcaatgttgtcgaacattttctctacctgcacacttttcttttcgtcatcgttatagggcttgatattttcttgtggatagttagtcatacgcttctttatatatagggggaaatccggggcggactgaatctgccccggatgcatgggagtgtgtcaaaactaaaccggtctatcccatcgtcagctgtaggggcagggtttgcctgcccgaagagacaaagcaaactgttttcgggcgagcgaacctcgcccctactaacgaaacgacagcattatccacgttttgacacacccacgttatttatttcaagtactcggtaacgttcttttcaatacgttcggcgatattgtcagtatcagcttttacaaacttctcaccggtaatgtgctcgaacagttccatataacgttcgctgatagagtttacgatttctggagtcatttcgggaaccttttgtccttctttaccttggaagccgttttccatcaaccattcgcgtacaaattctttggaaagttgtttctgaggctcaccttttgcaaagcgttcttcgtaaccttccgagtagaaatagcggcttgagtcgggagtgtggatttcgtccatcaggtagatagtgccgttgtgcttaccgaattcgtatttggtatctaccagaatcaatccgcgttcggcagcgatttctgtaccgcgtttgaacaaagccaatgtatatttctccaaagtttcatattcttcaggagtagccaatccttgtttcaggatttcttccttggaaatatcttcgtcgtgcagacccatctcagccttggtagtcggagttacaatcggttccgggaacttttggttttctttcatcccttcgggaagtttcacaccgcagatttcgcggacaccgtttttataagcacgccatgcgctaccgcaaaggtaaccgcggacgatcatttctacagggaagccctggcacataacacctacagttaccatagggtcgggagtagccattttccagttggggcagatgtcggtggttgcatccaaaaacttggctgcaatctgattcagcatttgtcctttgtaagggataccttcgggcagaactacatcgaatgcagagatacggtctgtagctaccattactaacttttcgtcattgatgttgtacacatcacgcactttaccgtggtacacgtttttttgtcccggaaagttaaagtctgttcttgttaatgctttactcatgtcttttttatattaaatgaattgtttttcttcttgcagggtcagatagtcttttgtgatttgtcggccgcagctttttccatccgctcggctttctgcttatcctcaaacttttcgtaagcttccactattcttgtcaccagcttatgccgcacgatatcttttttattcagttcgataaaactgatgccttttacccctttcagaatcttcaaggcctgcaccagtcccgaagtttgcgatgacggcaaatcgatttgcgtcatatctcccgtaacaatcattttggtgttcatccccatgcgggtgaggaacattttgatttgctgtgtcgtggtattctgagcttcgtccaatatcaccacggcatcgttcagtgtacgtccgcgcataaatgccagcggagcaatctgaatcacattcagttccatatattctttcagtttggcagccggaatcatatcctgcagagcatcatacagcggttgcagataaggatcaatcttatctttcatatcaccgggaaggaatccgagcttttcaccggcttccactgccgggcggcttagaataattttcttgatttctttgttcttcagagagcgcacagcaagtgcaatggcggtataagtcttgccggaaccggccggaccgatggcaaacagcatatcgttcttttcgtattcctgcaccagtttcaactgattggggctgcgaggtacgataggctttcccgtcacactgaatacaatcgtgtcgccggtcttttccacttggggtttgcgtcctttgacaatatccagaatgacttcttccttcaatgagttatactgtgcacagtgtttctccagtgccaggatgctctcttcgaaagcacacatttcttcctcgtcccccattactttaatgacatttccacgtgccactattctcagtttgggatacaaggctttaatcatttgcatattggcgttgtttacgccataaaaaataacaggatcaatatcctctaaaacaatatgtttttctatcatttaactagtttaggtacagatgtactattttatagggtgcaaatttaatgaaaggttttcattgttttcattttccggggcaatttatttgcataagctttccctgaaaaaagattttaggttatctttgcccggcaataatgaaaaagacaattaaagttatgaattatatcaaatgtgcatgttgcactctgttttctcttctttttactttgacagtatcttcggggtgtaaggaaaaggatatgtcgatgaagatgaatgagcctcgtaatataaaaggtgtaatcagttataagcgcagtttcggtgacttgaatgatactcatctgagtgcggcaaagcggattggtatccgtcccctggcttctcgtacagaggcggaggggttgggtggtaaattggtggaggttgctccatgcgagcggtatgccatggactcgctcacacactccattccttttttggtgccgaaagccggtgcattactggatactatcggagccaattttcttgattcgctgacttgcaaagggttgaacccgaatcaaattatcgttacttctgtacttcgtacttccgatgatgtcaagcgtttgcgtcgccgtaatggaaatgcttccgcaaactctgcccatgcattcggaactacatttgatgtgagttaccgtcgttttaagaaggtggaagaccctgacgggcgtcctatgcaggctgtgagtgccgatacgttgaagcttgttttggctgaagtgttgcgtgaccttcggaaagcggacaaatgttacattaagtatgagttaaagcaaggatgttttcacatcactgcccgttaacccaacctgttgttcttaaattttttattcagatttcaaaatgcgatactttatatatctggcttacgacggaacaaattatcatggctggcaaatccagcccaacggtatgagtgtgcaggaagcgttgatgcgtgcgctttctactttcttgagaaaaaagatagaggtggtgggagcaggacgtacggatgccggtgtgcatgcccggcttatggtggcgcattttgactttgaaaaagaattggatggggagcagataaccgataagctgaaccgtctgcttcctcccgatattgccgtgtatggagtaaaacgggtgagggatgatgcgcacgctcgctttgatgctacttatcgtacttataaatattatgtaactactcggaaagaacctttcaatcgtcaatatgcatggaggcttttcagtgagccggatttcgggaagatgaatgaggcggcccatactttgtttgattataccgatttcaccagtttcagcaagttgcataccgatgtgaagacgaataattgcaaggtaatgcatgccgagtggacacaggtcagtgaaacagaatgggtatttaccattcaggcagaccgttttttaagaaatatggtcagggctgtggtaggtacattgatagaagtgggccgtggtaaactctcgatagacggtttcaggcaggttatagaaaaaaaggatagatgcagtgccggaagctcagtgccgggacacgccctgtttttggtcgatgtgggatatcctgaagaattgtttgtcttgtaaggaagagattattgtttttcggtgaggtatttccaatagcgcacaggcatgtcttgccgatgctttctcggattccatcgctctttgatgcagatggccttgaaataagttttccataattgccggaacagtttctcgtcgttagccatcaggctttcgttcaacatacctgtgacaagatgggcttgttgaggattctcgaaagtaacttccttcatttccttcaagtcataataatatccgtattgccgtttcacgtcgtagataagccacggttggtcggcaaaacggtctttgaaatgctccaccgcaagagggagggcattgaactgtggctcgacagcagcaaaaaatgttccgtccgcagctttctgaaagcggacaaactgcatcagatgtacccgttctccgtccactttcttgtagattttcgataattcgagtacgtcggcatctgcaaagttcgtctcgatggaacggggtgagtcgatagcctttcgtatatagcggaacaacctcttgtctacttccggcagctccgacagccagcaataggtgagggcggacagggcatggtgggatattttcttttccaacccgcgccacacgcgcattgcttttctttcatcagtactgacgtggaaggtttcatcgtaaaagagcggtaacggctcgccttcctttaaaagcaagtcggggaaggttttgcggaagtaggcgtcaaagatgcaggtcagcaggccttcgaaggtatagtcgtagataaagatgttcattcgttttctggttctttaaattccaatatcagttgtcgttcatctgtctttttcttgggcttgggtaccaatagtttcctcactcctaaaggagtgagctcgtttactgtccgggtgggtagctcattgcaagtgataaaatattgcgctttcttcattactactcctattttcttcaactcatagaatcccagtttcgaaaagcggcgcgaagcaacgataaatcttgctgatttcaccccgatgcccggcacgcggagtatcatctcgtagtcggcccgattgatgtctaccggaaattgctcgggatgccggagtgcccagcctagtttggggtcaatctccaaatcgaggtcagggtaggagtcatctactatctcttccaccttaaactgataaaaccgtaacagccagtccgcctgatacaaacggttttcgcgcaccaagggaggctgtttcagtgccggaagccgtttgtcgtaagtattgaccgaaatatagcctgaataataaacgcgtcgcattgtgggatgccgatacagtgaagaggaaagatacagtatatctttgtcagattccgatgtggctccgacaatcatttgcgtgctttgtccggcaggggcgaagcgtggagtgtggcgaaacttctttctgtcctctttattagtgagtacaccttgctgaatgtagtgcataggtcggtacacgctttggtggtctttttctggagcgagaagtttgagattctcctctttaggtatctctatgtttacgctcagacggtcggcatagagtcccgcctcgtttaccagctcgcgactggcgccgggaatgcttttcagatggatgtaaccgttgaaccggtgtatgagtcgcaggtctttggcaacccgcacgaggcgttccatcgtgtaatcgggattccgcactacacccgaactcagaaaaagcccttcgatgtagttgcgccgatagaactcgatggtgaggtccaccaattcgctcaccgagagcgtggcacggggaatgtcgttgctgcggcggttgatgcagtaggcacaatcgtaaatgcaataattggtgagcatgattttgagtagcgaaatgcaccgtccgtcctctgcaaaactatggcagataccccaacctccgacggtgttgcccagtgtgcccggtgaattgcggcgcactgtcccgctgctggagcaggatacatcgtatttggcggattctgccagtatcttgagtttggcaaggacgttttcgttcatatcttcgacagggatattttcgccaaaaatacggatagtgtttgaaacagacaagtgctttctgattatttatatcaaattggatattccttttcgaggcttttgttgtaactttgcagccgattaaaaaaaacaggtaaaaagatgatgtggttacttttagcttttctctcggcagcattgctgggattctatgatgtatttaaaaagcagtcgttaaagaacaatgcggtaattcccgtgctcacgctgaatacgttgttttccagtttgatattccttcccttcattgtgttgtcggcatggcgtcccgatacattggaaggcggacttttttttgttcccgtggcagggtgggaggtgcatcgatatatcattttgaaatctgtcattgtcctttcttcctggatattggggtatttcggtatgaagaatcttccgataaccattgtgggaccgattaatgccacccgtccggtgatggtgctggtaggtgccttgttggtgtttggcgagcggctgaatctctatcagtggataggagtgctgatggcggtcttttctttctttatgttgagccgaagcggaaagaaggagggtattgatttcaggcataataaatggatatatttcattgtgatggccgctgtgctgggagctgtcagcggactgtatgacaaatatctgatggcgcctgtcagtcagggaggcatcgggctggaccgtatggtggtgcagtcgtggtataatatttatcagttgtttatgatgggtgccgtgttgatgctgctgtggtggccgaaacgacaggcgagcactcctttccgttgggattggtgcattatattgatatccatcttcctttcggctgccgactttgtatatttctatgcgttgagtctcgatggcgccatgatttccattgtttcgatggtgaggcgcggtagtgtgattgtatcttttattttcggtgcaatggtattccgtgagaagaacctcaaaagcaaggcggtggacttggcactggtgcttatcggtatgatatttctttatttcggaagccggtgagcattgtcaggtgcttccgataagaatatatgcttgataagcagtctgttgacctatgggggtgagggacaggtagcccgattttatccttccttcctctatcaggagggggtgttggaggcgtaaagaccggtcggcttgttccgcttcgccgggagaggtgtaatattctattatgtaacggccttgcacacggtcacacacatatctgtcataaaccattcgggccactacccccatattcatccgcagatttatttccacacagggatgaatggcatagcctgtcttcgccaaaggcgtgcggcatatcatcatgtccactcccagataaccttcatactcgcctatggtgtgtgctagttcgatggtcagccttctgcaaagcagacggaatacggatgcggggacgtatgccgacaattttcccagaatgtcgtcatcggttgccagaagattttctttataaatgccgcgcttgtccgtctcaaacagagaataacctataaagcgcacctcaccctttccattgctgaaaaactccatagcaaagtcttttaccttatcataaaacggctcgcccaccactgcttgttgggtgtggagcacgtgctgcacccaacctttcagcgggcgggtgaattctccggaagtgtactggatacctcgtccgctgcccgaccacggagatttgagcacagccgatggatgtgaacggacaaaagattcgacttcgttctctgtatgaaacaggaaagattcgccaacaaacggaacgttggtatccgtgccttcaggaagagtgagaaaatcttccatcacgcaatcatattccgataccgcagaagcggaatgtaaccatttctttttgcggatggccgacaatacgtgtacggccgtctgtcgtcccgaaagttcacggatacgcttcatctcttcatctgtgaggcaagcctgattcgtgattcctgcctcgcgtaaccgacggagtagggaagggttccatccccagggagatatcttagtataggaagaagataatccggtgacaaactccactgcaggaagcagcggagataaatttttcacttgttcgccgtggagcaaggtatctgtcagcaccgcatctcccggtgcggcataccatgccggaagcaccgacaaatcggctgccatccgtcgcgcactggccggcggcatgtaataagaatcaccacacgccaatgccatatcattttcagggttaaacagataaagagttttcatttacagtgcaaagatagtcatttccttgtctattaaaagaagaaaaataataatattttgctatctccagtttgcaatttgaattagtattgctatatttgcagccgataaaaaagcaaccatggaaaccttttacagaacacacagttatctggtggaacatacaaatgctcctgttcgccgggacctgatggacgaaatagactggaatgacagactgatcggtatcaagggaactcgtggcgtggggaagacgactttcctcctgcaatatgcaaaagaaaagttcggaacagatcgttcatgtctgtttatcaacatgaataacttttatttctccaaatatacactggtggattttgcaggagaatttgtcaaacgcggcggcaaggtattgctgatagatcaagtatttaaataccccgaatggagccatgacctgcgtgcatgctatgaaaagtttcccggactgaaaatagtattcacgggttcgtctgtgatgcggctgaaagaagaaaatcccgaactgagcggcatcgtgaaggtgtattacctgagaggtttctcttttcgcgaattcctgaacttgcaaagcggcaataacttccgcgcttataccttacaagaaatcttagagaatcatgaacagatagcaaaaacaatcctgcgcaatgtcaaaccgcttgatttttttcaggattatctgcatcacggtttctatccgttcttccttgagaagcgcaacttttcggagaatctgttgaaaaccatgaacatgatgatagaagtggatatacttcttatcaaacaaattgaattgaaatatctttcgaagataaaaaaattactatatttgctagctgtggacggtcctgtggctccgaatgtcagtcagctggctgcggagattcaaacctcgcgtgccaccgtgatgaattacattaagtatctggcagatgcacgtcttatcaatatggtttaccccaagggagaggaatttcccaagaaaccatcaaaattgatgatgcacaataccaatctgatgtattccatttatccggtaaaggttgatgaacaagatgttctggacaccttttttatgaacacaatgtacaaagaccacaagctgtacaaaggcgataaaggcacttcgtttatggtagacggtaacttgcacttccgtatttgtgccgaaggatgcaagttcaagaataacccgaacgtatattatgccccccacaaactggaattgggacacggcaatcagattccgttgtggcttttcggctttttatattaagagatagagaataattttaattacctaataattagtaattgtatgactaaacaaaaaaaattcatcacttgtgatggtaatcaggcagcagcacatatctcgtatatgttttctgaagtagctgctatttaccccatcactccgtcgtctactatggctgaatatgtagacgaatgggctgccgcaggtcgtaaaaacatcttcggcgaaacagttttggtacaggaaatgcagtcagaaggcggtgcagcaggtgctgttcacggttctcttcaggcaggtgcgttgactaccacttacactgcatcacagggattgttgctgatgatccccaatatgtacaaaattgccggtgaattcctgccttgcgtgttccacgtatcggctcgtacattggcttctcacgcattgtgtattttcggtgaccaccaggacgtaatgtcttgccgtcaaaccggttttgcaatgttggcagaaggttctgtacaagaagttatggatttggccggtgtcgctcacttggctaccatcaagtcacgtgttccgttcgtgaacttctttgatggtttccgtacctctcatgaaattcagaagattgaaatgctggaaaatgaagacttggccggcttgatagatcaacaggctttggctgaattccgtgcacgcgcattgaatcccaacaagccggttgctcgcggtatggctgaaaatcctgaccacttcttccaacacagagaatcttgcaacaacttctatgaagctgttcccgctatcgtagaagaatatatgaacgaaatctctaaaatcacaggccgtaaatacggtttgttcgattactatggtgctgaggatgcagaacgcgtaatcatcgctatgggttctgtaacagaagctgctcgcgaagctattgattacctgatgagcaaaggtgaaaaagtgggtatggttgccgtacacttgtaccgtccgttctctgcaaaacacttcctggctgctgttcccaaaactgtcaagactattgctgttcttgaccgtaccaaagaaccgggagctaacggcgaacctttgtatctggatgttaaagactgcttctatggtgcagaaaatgctccggttatcgtgggtggtcgttacggtttgggttctaaagatactactccttctcagattcttgccgtattcaagaacttgtctctgccgatgccgaagaatcactttactatcggtatcgtagatgatgttactttcacttctcttcctcaagaagcagaaatcgcattgggcggtgaaggtatgttcgaagctaaattctacggactgggtgctgacggtacagtaggagccaacaagaactctgtgaagattatcggtgacaacaccgacaagcactgtcaggcttacttctcatacgactcaaagaaatcaggtggtttcacttgctctcacctccgtttcggcgatactcctatccgttctacttatttggtaaacactccgaactttgtagcttgccacgtacaggcttacctgcacatgtacgatgtaactcgcggacttcgtgataacggttcattcctgttgaatactatttgggaaggtgaagaactggctaagaatctgcctaacaaggttaagaagtactttgcacaacataatattactgtttattatatcaatgcaactcagattgcacaggaaatcggcttgggcaaccgcaccaacaccatcctgcaatcggcattcttccgtatcacaggtgttattcctgttgacttggctgtagagcagatgaagaaattcatcgttaagtcttacggtaagaagggtgaagacgtggtgaacaagaactacgcagccgttgaccgtggcggtgaatacaagcaactgacagtcgatcctgcatgggtgaatctgccggatgaaccgaaggctgaaaacaatgatcctgctttcatcaacgaagtggttcgtcctatcaacgctcaggatggcgacttgctgccggtttctgcattcaagggtatcgaagacggtacttggcatcagggaacagctcagtacgaaaaacgtggtgtagctgcattcgttcccgaatggaatgctgaaaactgtatccagtgtaacaagtgtgcatacgtttgtcctcacgcttctatccgtccgttcgtgctcgatgctgaagaacagaagggtgctcagttcgaaacactgaaagctgtaggtaagcaatttgacggtatgacattccgtattcaggtagacgtgctcgactgtttgggttgcggtaactgtgccgatgtttgtccgggcaatccgaagaagggtggcaaggctttgaccatgaaacacctggaaggacagttgcctcaggctgccaactgggaatattgctctaagaacgtgaagagcaaacagcacttggtagacatcaaggctaacgtgaagaactctcagtttgctactccgttgttcgagttctcgggagcttgttcaggctgtggtgaaactccgtatgtgaaactgatttctcagttgttcggcgaccgcgaaatggttgctaacgctaccggatgttcttctatctactcaggttcggtaccttcaactccttatactacgaacgaaaagggtcagggtcctgcttgggctaactcattgttcgaagacttctgcgagttcggtctgggtatgactttggccgacaagaaacttcgtgcacgcatcgaagctgccatgaagaatgctatcgccagcgatacttgtcctgccgaatacaaggaagcattccaggaatggattgacggtaaagacgatgcagataagagcaaggctgctgccgaaaagattatcccgatggtggaagctgctaaagataaatgtgaaaactgcgcaacaatcgccgaattcaagaactacttggtgaagaagagccagtggattatcggtggtgacggtgcttcttacgatatcggttacggtggtttggaccacgtgatagcttcaggtgaagatgtaaatattctggttcttgatactgaagtttactctaataccggaggtcagtcatctaaggctactccgctgggtgctatcgctaagtttgccgcttcgggcaagcgtgttcgtaagaaagaccttggtatgattgccactacttacggttatgtatatgtagctcagattgccatgggtgctgaccaggctcagactttgaaagccatccgtgaagcagaagcttaccccggaccgtcattggttatcgcttacgctccgtgtatcaaccacggtttgaaagccggtatgggtaagagccaggcagaagaggctaaggctgtagaatgcggttactggcacttgtggcgtttcaacccggctttggaagaagaaggcaagaatccgttcatgctcgattctaaagaaccgaagtgggaagaattccaagactacctgaagggcgaagtacgttttgcttctgtagctaaacaatatccggcagaagctgccgacttgtttgctgcttgcgaagaaatggctaagaaacgttatgcttcttatcagcgtatggctgccatgaattggggtgaataactcaattatataaattgttaaggaagaaggggatgtgccgtgagacacatccccttttatttatagttcattatctgttttcaacagattccttggttttatcatttacctttgtaaatgatatcggtgctatacctgaatgataaaagacaattatgcactagtcgtaccaagcgttttcgtcctttcgattatgcctgtctgtccgtcggattactacagtctccggcagcggactgtatagtccgttgcagtggaccgtacagtctgctacagtggactgtacagtccattgccgcag

SEQ ID NO: 6654 - DNA, 70768 bp, Unknown
  gut microbiota DNA sequence
taacggatttggtcgtatcggccgttttgtattccgtgcagctcagaaaagaaacgatattcagatcgtaggtatcaatgacctttgcccggttgattacttagcatatatgttgaagtatgacactatgcacggacaatttgacggtactatcgaagctgacgtagaaaacagcaagttgatcgtgaacggcaatgcaatccgcgtaacagctgaaagaaatccggctgatttgaagtgggatgcaatcggtgctgaatacgtagttgaatctactggtttgttcttgactaaagaaaaagctcaggctcatatcgaagctggtgctaaatatgtagttatgtctgctccttctaaggatgacactccgatgttcgtttgcggtgtaaacgaaaaaacttatgttaagggtactcagttcgtttctaacgcttcttgtactactaactgtttggctcctatcgctaaagtattgaatgacaaatggggtatcactgacggtttgatgactactgttcactctacaacagctactcagaaaacagttgacggtccttctatgaaagactggagaggtggtcgcgctgcttctggcaacattatcccttcatctaccggtgctgctaaggctgtaggtaaagttattcctgaattgaacggtaaattgactggtatgtcaatgcgtgttccgactttggacgtttctgtagttgacttgacagttaacttggctaaaccggctacatacgctgaaatctgtgcagctatgaaagaagcttctgaaggcgaattggcaggtgtattgggttacactgaagatgcagttgtttcttctgacttcttgggtgatactcgtacttctatcttcgatgctaaggccggtatcgctttgactgatactttcgttaaagtggtttcttggtatgacaacgaaatcggttactctaacaaagtgttggatttgatcgctcacatggcttctgtaaactgctaatcagtttataatccatataataaaagccgtccaaagtaatttggacggcttttttatgtctcatctgcaatttattgtgaaaagatgtggcatatattaaatataattatatctttgtgctattcgatgaatattattaaacaaatagaagttatggatgcacaaaaagtagatgcctttataatggcaaacggaaagttctttcccgattatcaagtagcagcaatcagagacatgttgcttgctgctgacgattcaaaatggtcaatgttgcaggttatgcagtttaaagatcccaccatctgcttgattatctctctgtttgccggttcgttgggtattgaccgcttctttatcggagatacaggattgggaattgctaagttaattacttgcggtggttttggtatttggactattgtagactggttccttatcatgggagctgcccgcgacaaaaatatgcaaaaacttcaaatggtactttaatgacgaaaaagggtctgtacatgctttcggttgttgcttgtgctgccgggtatgtatggcttgctgcttcgtccatgcatgcagaagaaggagtgtggagaggatgcttatttaagcagtttttccatattccttgtcctgcgtgtggttctacacgggctctcatagcactctgtcaagggcattggaaggaatcattactacttaacccgaatggtgtcttactggcagtattgatgttgctggttcctgggtggattttattggatatcattaagggaaaagattctttttttcgtttttatttatgggttggacggatttttatccgaaaacgcatcttcattattttcctttttcttgtattaattaattggtgttggaatatttataaaggcttatgatatactataaacccgcagaacatgaattggaggctgcctcaaacagttatctaatgtcattattggctgtgatggccggattaccttttcctattataaacttgctggcaacagctgttttttatttagccaataggcatcggacgtattttgtgcgctggcattgcacacaggcattggtatctcagcttcctttattctgtactaatagtgtgttgttttggtggacggtcggtttgctttttggagatgtggaacttacttctttttatttcgcttacctgtttaccgttgtactttttaatgttgtagatttggtcgctacggtggtttctgccgtacaagtgagaaagggcaaacagatagagtggtatgtttacggaggtttgacagatttgatttgtaagccatgataaagaaaatatttttgcagtcgattgtatcggcaatgttgtttttaattgtgttattctctttttctcgtgtagactggctttcggtttttgatttgcgtgagacagttatcgaggagaaactgggagatatgtattgggatttgtactccgggtctgctgtttttctggagtcggacacagttcttgctccattggattcgttgttgtcacatttgtgtgaggccaatgatatagaacgtgataaaataaaattgcacgttgtacaaagtaatgaagtaaatgcttttgcatttcctgataatcatcttgttgtttttacttcgcttattgctaaatgcgaaaatcaagaagaattatgtggggtgatggctcatgagatagctcatatgcagaaaggtcatatcatgaagaagttagtgaaggaagtaggactttcggctttagtgggtatggcatcggggggacaaagcggagaagtgttgagaagtactgccaagcttctttcttctactgcctatgaccgtacattggaaagtgaggccgataagacagccgttttttatcttttacaatcaggaataaatccggaaccttttggtgaatttttgttcaggctatctaaagaggaggagttgccttcattgaccgagtgggtgagtacgcatcccgattctgagaaacgctccattcaaatatgtaattgggcaaaggagggaagtaataatatccggtttgtgaagatattaagtatgaaaacgtggaaaactctgcaacaagctgtatctgacaagtaattctgtgacttttattccttttcttggttgtagattacacaaattcgttatctttgtgcaattattaaccgaaaagctgttttggattaagagaaacagtggcagaactattttttagatggtaaattatgatttgataacgatattgggccctactgcctcgggaaaaaccccattggcggttgcattagcatacaagctcgacactgaaattattagcggagatagccgacagatatatcgccggatggatctcggaacagggaaagacttggctgattatgtcgtaaacggtcatcaagtgccttatcatctgattgatattgtagaccccgggtataaatataatgtattcgaatatcagcgagattttcttgcggcatataataaagttaaacaaaaaggtaaattaccggttttatgtggtggcacgggtatgtatctggagtctgtgctgaaaggatacaggctgctgccggttcctgaaaatccccaattacgtacttcattggctgataagtctttggaagagctgacgcaaatgctgtcaacctacaagaaattgcataattctactgatgtggatactgtgaagcgggctatccgtgctattgaaattgaagaatattacaagcagcaaccgcctgagtacagggagttccctgtgttgaatagcttgataataggagtggatattgatagagaattacgtcggcagaagattactcgtcggctgaagcaacgccttgacgagggaatggtggacgaggtaaaagccttgttggaaggagggattgcttccgaagacttgatatactacggtttggaatataagtacctgactttatatgccaccggagtgctctctttcgatgatatgttccgtcagctagaaaccgccattcatcagtttgccaagaggcaaatgacatggtttcgtggaatggaacgtaggggatttaccattcattggttggatgcccggatgtccacggaagagaaagttgagaagataatgaatttgttggatactaaaagttagatattatggccgtagaaccaagcaggtggggaatcatatataatccgaaagccggtagccggaagactcaaaagagatggaatgagatacgagactatatggaaagccgtaaagtcgtatttgattatgttcagtcggaggggttcggctctgtggagcggttggcgcggacattggccaataacggttatcgaaccattgtagtggtgggtggagacggtgctatcaatgacgctgtcaatggtattatgagttcttcagccgaagacaaggagaatattgctttggggattattcccaatggcataggcaatgattttgccaaatattggggattggatgaagataattataagcaggcggtggactgggttatcaatcgtcgtctgagaaagattgatgtggggtgttgtaacttttttgatggtgaacagcatactaatcgttatttcattaatgccatttacattgggctgggggcccgcatagtgcaaatctcagatggaactcgtcgcttttggggaattcgcgaactttcatttgctgcttccatgtttttattgttgtttgagcgtaagctttatcgtatgcatttgcgtgtcaatgatgaacatatccgtggtcgtattatgactgtttgtgtaggtagtgctcgtggttatggtcttactccgagtgcggttccttataatggctggcttgatgtatctgttatataccgtcccgaattgttgcagttgctttcagggctacgaatgctactgaagggacgaattctgaatcataaaatggtgaaaccatatcgtacgcgtaaagttaagattctgcgtgcgcagaatgcttccgttagtctggatggacgaattttggacaggcattttcccttggaagtgtctattatgccggaagctattacattgatcattcctaattgatagggcaatgatgtaagatgaataatttctcaaagtatagaaataaatatgataacaatttcagatttaaagaagagtgacaatttctttctgttggccggtccatgtgtgatagaaggtgaggaaatggctctccgtatagccgagcatgtagtgaagctgactgataaacttaacattccatacgtttttaaaggttcgtatcgtaaggcgaaccgttcacgtctggattcttttacaggcatcggtgacgaaaaagcgttgaaagttttacagaaagtgagccggacctttgatgttcctgtagtgaccgatattcattctgccgaagaagcggcaatggcagccgaatatgtggatgtacttcagattccggcattcctttgtcgtcagaccgatttattggtcgcagcagcacagaccggaaagattgttaatataaagaagggacagttcctctctcccggtgccatgcgctttgcagccgataaagtggtggaagccggtaatgaccaagtgatgttgaccgaacgcggtactacatttggttatcaggacttgttggtggattatcgtggtatccctgagatgaagtctttcggacatcctgtgattcttgatgtgactcattcgttgcagcaacccaatcaaaccagtggagtgaccggtggtatgcctcaattgatagagacgattgccaaagcgggagtagcagtgggggtagatggtctgtttatggaaacacatgaagaccccaccgttgcaaaaagcgatggagctaatatgttaaagcttgatttgctggaaggattgttgactaagttgattcgtattcgtcaagctttataaaggtgatgaaatgatacaatgatacaatgaaggggttgtgtctaaacgttgataatgctgtcattttgttggtaggggcgcgattcgctcgtccgaaaaacagcttgtttgtatattactcccaagggcatgactgccggttcgggcaggcaaaccctactcctacagtttacgattgatagactattttagttttgacacatccctttcttctcttcctgtatctatgggaagcacattggcagatgtggctatttttttaagatatatgctttcatacgggcaatatcattcaaataatcctgcaaatcttgttcgtggtcttcttcttcagccatgatatgtttggcaatgtcacaggtagtgaaatcaattccgttggtgaattcggcaatttgctgatagcggtagatagcgcaacgctctgattcgacattctgtttcaataagacttccgaaccgaaatctacgggagcgtcgtacttgcaacgtgcaaggtcgaaccactgtttcgggtcgagcacgggcacaccttccagctcgataatgcggtcggctaatagttttgcatggttatattcttcggcagcatgttcttggaattcgcgttgtacgtcgccgcgcatggcaccttctactacaaaagaacctacccaatactgatagaaagccaaccattcttcagacaaggctgcatttagttgagccaataactctacgatgtcaattttatcctttaggatatttactgtttctttagccataatgaaaaagtttaagttagtgtttattatttagtttacggcagggatagtcatatcatctaatatttctatgccttccttgtctacatctttttttacattagaactagtgtacagccagatgccgaatcccagtactattaatataaagaggattattccccataatttacctttgctcatagttttttggttttggttttatgataagaacagccgaaaaagaaaattgttttttggtggaagagatttttattttgtgcagaagggaggggggagtttcacaaacatcgggaagttaatatgaggatactctgaaagttccggttgcagtatggcaatgaaagctctgtgtattttcagagtagtgccctaaggttttgcggcttttaaaaggtcgtagtgctttccgtgacggtccggtcctattggggaaagatggagccgcattgttttcttggggatttaaatcactgttttatttccttatagcgtatcgtaaaccaagggaagagtaagccgtttcttagagtcggccaaggtcttttaaacggaagattattacagtctccgacagcggactgtacagtctgctacaatggactgtacagtctacggcaacggactatacagtccacggtggaagactgtagtagttcgactgacagacaggcataaccgaaaggaggaaaacgtttagtccggttaatgaaacgacttagagagttcaaaacgtatgcagagcttggaaatcggagggtatagtgtcagctgacccgaaagatgacattatgtcggcaagccggtaaaggtgtggttcctttcacacataatgggaattgaaagctcctgtctgtagagattctgtgtgaaagcgattgtttctgtaggagggggaccctaaatcagaaggtagtggataattaccacatcccccttacagtgatgagagtgcaatgatattaaataaaaagaaggaagcaggaaattttatcctatcttactaatctttttcaacttttcctcatctatgatttttatctttctaccgtcgattgtgattaatttttcagtagcgaagttggaaagtgtgcgaatagcattcgatgttgtcatattagataaattagctaagtcttcgcgtgaaagataaatactcaatgtagattcatcctcttccaatccataggtttctttcaagaaaagaagcgattcggccaaacggccacggatatgtttctgggttaagttgactgtcctttcgtctgagatgcccaaatcaattgagagctggcggataaaaaacaatgctaattcagcatttgctttcactaatttcatgatggccggcatggggattaggcaaatagtacacggttcgaacgcagatgctgccgtaacaaaattgccctcggcaaaataagcgcggtaagcaaaatattcttttgtttttaaaacccgtataatctggctacgtccgcctacaccttctttgtaaatttttaccttaccacttaggaggcacatcaagtgcatgggagtttctccctcacaataaatggtttcattctttttatatttttgtattgtaaaattctgagccaagaactctctttgttcttgagttaaaggttgccacaaatcaggtatactttcggcaatctctgtttctgataattctttttttaccataggtgtgctataaaaccgtgttatagagcacaaatatagaaagaaaataatgaaagaagaaatttaacttagaaaaataacggaaaaagggagattgctctcccttttactttatttcgtgaataataattcgcgatatttaggcaatggccagatttcgtcatcgatttcgagttccaaactgtcaatgtgttcccgaatttcttcaaggtagggacggactttttcttcatagctgaatgccttttcaacctgactgccgaggtgattggctaccttgcgggcttcggtcatatcatgtacggcttttttgatagagaggatgcggcgttggatttcacgtaccaaatctttgcggtcggctgtcatttcttcgtattcttcggtagagaatatctctttcagtccacgtaggttttctaataatctgttttgatatattactgctgtggggacgatatggttaatggcaagatcgcctaacacacgactctcaatctgtactttcttggtaaatttttcgagttctacttcgatacggcaatttaattcattttcgttgaatattttttcgccaatcaataccgaacgtgattgcgggtcgttgaatttcatgatggcttcgggcacatggcaaatgttggtcagtccgcgacgggctgcttcatctttccattcatctgaataaccatcgccttcaaagcggatgttttgagaagcaataatagtttctttcaatactttatataatgcttcttcctgttccattccatcagacactagtcggtctatttgtgccttgaattcgttcagttggtgagccatggctgcattgatgacaatcatggaggcagcacagttggcagaagagcctgcagcacggaattcgaagcggtttccggtgaaagcaaagggggaggtacggttgcggtcggtattgtcttgcaagatggcagggatacgactgatacctaactgtaatgccttcttttcatcgggagtaagtttggcatcgctcaggcgtgccactacttcgtccaacatgtgggataaatggcgtcccaagaaaatggacaggatggcagggggagcttcattggctcctaaacggtggctgttaccggcacttacaatggaagcgcggagcaagtcctggtttttgtataccatcatcagcacattaacgataaaggtgagaaacaacatatttccttcggcagtttttgccggagagaataaattgatgccggtatcggtgcagagtgaccaattgttatgtttacccgaaccgttaactcctttaaatggtttttcgtgaagtagtacagtgaaattatgtttggcggcgatgcgtttcattaaatccataaccaattgattatgatcgtttgccaaattgacatcctcaaaaatcggggccagttcgaactgattgggggcaacttcattgtggcgtgttttggccgggatacccaaacggtgacattccaattccaattctttcatgaaattggtgacacgggaaggtatggagccgaaatagtggtcatccaactgttggtctttggcagaagaatgtcccatcagggtgcggccggtgagacacaagtcggggcgtgcgttataaagtacggtgtctaccagaaaatattcttgttcccaacccagatttgcatacacgcgttttacattcgggtcaaacatcttgcaaacttcggttgctgctttgtccactgcaccgagtgctttcagcaaaggtgttttatagtcaagtgcttcgcctgtataggatatgaaaatagtggggatacacaatgtgctgtctacaataaaagcaggagaagaaacgtcccatgccgtatagccgcgtgcttcgaatgtatttcggattccgccattagggaaagatgaggcgtcaggttcttgctggatgagcagtttgccggagaagcgttctattacatcgccgtcatcaccgaattcgataaagccgtcgtgcttttcggctgttccgtctgtcaggggttggaaccaatgggtgtagtgagtaacgttgaaggtttttgcccagtttttcataccgttggctatcatatcagccatttcccggttgatgggagttcctttttcaatcgcgtttataactgctttatatgcctcactgggcagatattcctgcattttcttacggtcgaaaacgtggtcgccgtagtaatcagataacttctcagaaggatagtcaaccttgacagggcgtcggttggcaagttcttgaagagcaaaaaatctcatttttgacatgttgtctttcttttactggttgttgcggtgcaaaattactgctttttgattaaatatttgctatattgattatcaattttcagtttacttaagagatttgttttgcagtagggagtgaacttatgtgtacttcattttttccgaatgctgtctgctgaatgttatgggaaatgtgccaaaactaaaatggtgtatcattttgtcattctgaacaaagtgaaggagctgtttacatctactttatgtttgcagattcttcgcaaagttcagaatgacagtattatcagcgttttgacacacttttatatgcaaaatgatagaagttatgatgaaagccggttatccgttttgtagtacatcctctttttcgggagccccgggctcttcacgttcagtcgggtttaggggattgaagtaatagatatccatactatccaggtatttcaggaagtagggcagacgctgcataaacatgctgcattcttttgctttttcaggtgtccaagctgcttctgccaaagctatcaggcgtgggaagaccataaaatccaatcgtttgaagtcggctactctttctgtccataaagacatttgcatacccatgacttggttttcatatcctttcatcaaatgggatatcggctcggggaagttatataagttttctatggtgttatatcctgcccattggcgtcccactttgtgggcaccgaactgggtgaaatcagcatacatgggacgacgtggcgtcaatatgacccgataaccattttccaaggcttttaccagctggtgttggcggtcgtgcctccaccacattactaccgctttgcggggtgagataccggcatcaattatttcatcccaaccaatcatggtttttccttttgaagctacgatgtctgcagcgcggcggaggaagtaatgttccagtcctttctcgtctactaattttttttctttaataaagttctgaatttcaggatcggtaaaccaactttgattgccgtagtgtacctcatcaccacctatatgtatataaggagaaggaaacaggctcacgatttcatccagtacgtcactgataaaccggtaagttccttcccggcaagggtggaaagtgaaatgttgccaacggccttcaccgcctcccgaatattcaggataagcgcggcatacagcagtggcatggccgggcatgtcaaattcaggaactaccataatttgtcgttcagcggcataagctactatttcttttatatcttcctgggtatagaatgtggcaggtgctttcgggtcatgataattaccgacggcacctatctgagtcagtttgggatatttttttatttcgattctccatcccggttcatcggtcagatgccagtggaatacattcagacggagcgaagccatgatgtccagatattgcttcactttttctttgccgaagaagtgacggctttcatccagcatgaaaccacgccactgataacggggggcatcattgatagtgcaacactttacctttccatttccgaaacgcgacaattgtaataaggattctttggcgtgaaaaagcccggcttcggtagcggctttcagtataatgctatctgttttcacttgcagggtatatccttcttctgccagtttcagttgtggttctatgaaaaaagcgataacgtttgctacagcattttcattagattgtgttaaattagaagaggtttgtgaggctattttgtcggcatacgtttgatttccgtaagttttagtagccttcgtaataataaattcacccttattcctttggtagtttgccggagtggggaagagattttgtgctgataatgaggtggaaacagcccacagtaataagtggactaaaatagaataatgtttcatggtctttaagggttaatagttcagatgcaaaagtagctaaagttttttgtttttcttaaggtcgtaatatttttattgtatatttgctattcggataaagaaaacaagacttaatgaaatatatacggattattgggatactgatattatgtttgcttcttcctttgggtatgtctgccaaaaggtcaaagaagcgtatacccgataaacctgtggttgccgattctatacttcagaatatatttcagttttctcctttctattcacgcatcattgatgaatataaagccgatttgtatttaaaaggaaaactcaaggtccataagaggaatcatcttattcgctatgtgccttctatgtttcggtttgagaagaatgtgaacgattatatgatagagtctgtgagtgagatgcattatacggctcctgatatctatgatcgtaagataaaagccgtgtcttccactttccctcgtgaccggggacagattgccgatatagcggagtatttgaatatgaatatctattcttcatctttgatgtcggataaacttttgtcacctcttgataagaaggctagtcggtattatacttatttactcgattcggtagccggtcctaatgattgccagaaatataaaatacttattattcctaaatttaaaggaactcagttggtcagtggatatatgtgggtaagcgatcaggtatggactatccgccaactttatattgaaggagtatatgatgtgataaattttaaggtaaatattataatgggggaggaaggtgatgaagaatttctgcctgtgcgttttgatttgaatttgatatttaaatttttaggaaatcatctggagatgaattgcaatgcctggatgaaataccatgagatacattattataatcagggagaagccagacgtaagtcgagtaaaaagcatcatcatgatttaacggagtcttatcagttgacttgtgactcggctcagttgataacggacaaagataagttcaaggaacttcgccctttgcctttgtctgtagatgaagatagcttatataaaaaatttgctatgcgtcgtgatacgatattgcatacacctaaaaagaaaaagagtaaaagtatcgagttttgggggcaattgggtgatgctcttatcagtagctacaatgttaacttggctggtattggcagtgttcgttgctctccgcttatcaatccggtgctgttcagttacagtcatagccggggcttctcttataagcagaagtttaaatataaccgttacttccagcatacagggcgtttgttaaggattgtaccgcagattggttataacttcacgcgtaaagagctttatgtaaaggcagacacagagtttcagtattggcccgagaaacaggcgggatttgaaatcaatgtgggtaatggtaaccgtatttatagtagcgtggtattggaccaattaaaacaattgcctgatagtacattcaattttgataaagtggaactggattattttaaagatgtgtatttgaatttgttccataatattgaagtggtgaatggtttgtatatcaaggcgggtgtctctatccattggcgttatttggcaaataagaaaagattggaggtagagaagcctttgcctgaagaggattggttggcactaaaaggtattcgctcggagtataatacctttgcaccccgtgtacgtattgagtggactcccggaatgtattattatatgaatggacatcgtaagatgaatgtaggttcgaaaatgcctacgtttacattagattatgaacgtggtatcaaaggggtgttaggtagtaccggttcgcatgaacgttgggaagttgatgttcagcaaaatttaaaattaggaggtatccgtagtttaggttaccgtataggcggtggtatgtttacagaacagaatgatgtgtattttgtggatttcgccaacttctcccgtcataatttgccggaaggttggaatgatgaaatcggaggaacttttcaattgttggatggacgttggtacaactcttcccgtcagtattggcgtggcaatcttacttacgaatcaccgttcattctattgaagccattgaatcgctggttggggatgattcaacaggagcggttatatgcaggtgtcttgttcatgcctcatttaaatccctatatagagttggggtatgggataggtacacatatctttgatgtaggtgcgtttgtgagtactattaacggacgtttcgatactttcgggttcaagtttacttttgaattgttcaataaatagtaggcttcttacttttctttttcttttaaacattctcttttgttttctgtttactacatcataacagaaacaaaagcctatatgtattattacaaactatttttatgtcttttattccttcctgttggactgtgggcgcagagtggggaggtgtctttaactttggaacagtccgtctccttgatgaataaggggaatcggacattgcagatggctgataaggcggtgggcatagcacgcagtgaacgccaaaagatgaattctttttggtatccatctcttaatgcaaccggagcttatgtacatttgtctaacaacatagaggtgaaagaaccattaaaacaatttacggatccggcgaaagattttgttcattccattttgcctgacgaccggtttatttcttctattttagacaatattggaacacatacactgacctttccattgcttcaacgtaacttgactactattgatgccaatatcacttggcctgttttcactggtggaaagcgagtttttgccactaaaatagggaatcgtatggtggatttcgcacaagtagaccgtgaagaaacggaagccgttcttcagacagatttggtagctgcttattatgcccttcgtttggcacaacgcgtagtaaaagtgcgtgaagaaacctataatggtcttcagaagcattatcagaacgctctgaaattggagtctaacggtatgataaacaaagcggaacgtcttttctctcaggtcagtatggatgaggctaaacgtgaactggagtctgcacgtaaagatttgacagtagctcagaatgctttgaaagttcttttgaatgtggaagatgttactgttatcaatcctgtttctccactttttatgaatgatgatttgccgaatgaattatactttaagaacttgataggtggcaataattatatggtaaataaacttcgattacaagagtcgatggcagataaccaattaaaaatcagtaagagtgcttatgttccaaatattgcacttttcggtaagcaaactctgtatgccgataatcttcctcgtaatctgatgcctcgcacaatggtaggagtgggctttacgtggaatatatttgatggcctgaatcgtgaggcaaatgtgcgtcaggctcgactgacaaagcaaacacttactttggggcgagaaaaagcccggaatgagctgagtgtgttggttgataaactgtatagtgagattcagaatgcccgggataatgtagctgccttgaatacaacgattgagatgagccgtgaattggtgagaattcgtaaaaaatcatttcaggaaggcatggcaacttccaccgaagtgatagatgccgaaacgatgttgtctaaaattcagatagcctttctgatggcatattatcaatatgatgtatcgttggcttctttgcttgctacctgtggagtgcccgagactttttggcaatacagtcgtgcaggaaagacggaagattttatatttcctacttatgaatcgggggattctccaataataaaagaataatttaaaatatggaaaagcaaaagaaacaattagccgttgctttcatggtggtactggtagcggttgtggtcgtgtctgttatcggtattattgccatgagcaataaacctgtgatattgcaaggacaaatagaagccaccgagattcgcatttccggtaaattgccgggacgcatagatactttcttagtgaaggaagggcagaatgtaaaagtaggtgatacgcttgtcgttatcaacagtcccgaagcttgggcaaaattccggcaggtaaatgcattggaagatattgccaagtatcaaaacaaaaagatagatgatggtacgcgtgagcaaatagtgcgttcggtagaagaactttggaataaatctaaaagtgaccttcaattggcaaaagtgacttatgaccgtatacagaatttgtatcgtgacagtgtggtgaccagtcagcgtaaagatgaagtagaggctgtgtataaagcggctgtggcagctgaacgtgctgcacatcaacaatatttgttagtgaaagatggagctcagaaagaggataaggagagtgcgcgttcattggtggatgctgctcggagcactgtaaatgaggtacaagccttgttgatggatgcccgcctcactgcccctgagaacggacaaatttcgactatttatcctaaacgtggagaactggtgggagcaggaactcctattatgagtttggtggtgttggatgattgtcatgtggtgctcaatgtacgtgaggattacatgcattattttcgcatgaatgaaacctttaggggaaatgtgccggcactgaaagttgagaatattgagtttaagatatattacattagtccgttgggtagttttgctacttggcgttctaccaagcagacgggaacttatgatatgaaaacgtttgagattcatgctctgcctctgcaaccggtggatggcttaaggccgggtatgtccgtacttgtgaatttgaatgaattgaaatgaggactatttcgatggggcagtcagttttaatagcagttatcaagagggaaatagaccgtatgttgtcacgtcgcatttactttgtggcgtgtattgtacttccgttgttttcgcttttttttatgggaacaatttttggtgacggacaaatggagaatcttcccattggtgtcgtggatggtgataatacggttacttcccggcaaatcattcgtatggttaaggtagatccgacttttcgtgtcactcaatattatgccaatgagacagaggcgcgtgctgatgtgcaaaagaaaaatatttatggatatctgagtattcctgttggctttgaagctaaggtaatggatggcaaggaagtggctctgacctattattatcattatgcattgttgagtgtgggtagcgaaatacatggtgctttccaaagcttattaaagaatatatcggttagccctattgtaactcatgcagtggcgttgggagtaggcgaaggagaaatcaaatctttcttattgcctgttactactcaaaatcatccgttattcaatcctgatatggactattctgtatatctgactcatccttttttcttcgtgtttctgcaagtactattgttactagtcactacttatgccattggtagcgaagggaaattcggtacctcttttgagtggctgcagactgccggcgggaatatgttgatagccattatagggaagcttttgccgtatacgattatctttatagcaatgagtatctttgctaattatatttactttggcatattcgatataccgatggattgcggattctggccactgaatcttacttcagcattgttcgtactttctacacaggcattggctgtatttcttttttccctatttccgtcattgagtatcattatcagcgttgtgtcaatggtgggttcgttgggagctactctttcaggagtcacatttcccgtaccgcacatgtatgcaccggtgtattatgcttcttatctgtttcctgttcgtcattttattgaaataggacagactttactctatggtaattacggatatgcttatatgtggactaatgtagtggcgttgttactctttttgctgttgccgttgctgttgttgccacatttaaaacgttctttaattagtagaaaatatgacaatattgaataatatacttgctgtttccgtgcgggaattccgtgtgatgtgtacccgttattctatcttaatggtattaagcggtggtatttttttatatggtttgctatacaattatatgtatgctcccaatgtggtacgtaatgcgccggtggctgtagtcgatatgagtcagacacctttgagccgtcattactcgcgcttgctggatgccactccgcaggcccaagtactgacaaataatgctgatttgcaagctgccaaaaagttgatgaagcagagggaggtagtaggaattgtttatatacccgaagattttgatggtcgggtggggcgtggtgaagaggctgtttatgtaatgtatagcactaccacggcttttctttattatgcttccatgcaagaagcatcggccggggcaatgttggcggtaaatgatgaggttcgccccaatcaggttgtttttctccctcagaaagatatacaaccgattatccggacaagttcaattgatgtagtgggtatggcactgtataattacaccgatggatatggcacttatttgattccggctgtactgatggtcgtgatatttcagactttggtaatggttatcagtatgctgagcggtaaagaacgtgaagaatccgtatctcgtatgtctcttcacggaagagaagagacaactgcttttcgtttctttacttcgcttggcggtggagataataatgagaaccacagggtagacttgtcgttttcacgtatggcatccattgttttgggaaagacttcagtgtatgtattgttttatgcctttttttcagtctttctgttggggttactgcctttgttgtttcaattacctcatttggcgcaccctatacttattattcagttgatgataccttatattatagcaaccagtttctttgcattggcatgttcggtgtttttcagtgacagtgatgcgcctttgttaatgatagcctttttttctgtcgggttgatatttctttcaggggtttcttatccgctggaattaatgccgtggtattggcaatggacacattatttgattcctgctgcaccgggtactttggctttcgtgaaaataaactcgatgggagccgatatgtcagggattagtcaacagtacatcattttatggatgcaatgtgtggggtattttatattggcatgtttagcttatcgttacaacatgaaaaaagcacttcctattacatagtatattttcgttaaggttgtctcaatataataaaagccttctgtttttgtctttcttagaaaaagttaaaggtttcattttgtcacatatataggtgtttctttgtaatacgaatgataaatagggaaaaaaagaaaaatattttgctatttaattttggtttatccataaaatcactaattttgagcattgcataaaaatagaaacatatattgcagataaaaaacagaataatttataaccttaatataacaactatgagttacttacgatttgacaagactcttatgacgaacctggaggaatcacttccgaaagaaatccttcgcacaaaccgttcgggagcctaccattgtacaaccattgttgattgcaatacgagaaaatatcatggattgcttgtcattccggtaccggagattgatgatgagaatcatgtattactatcgtctttggatgaaacggtagtacagcatggcgctgaattcaatttggggcttcataagtatcagggcaataactacagccctcgcggacacaagtatattcgcgaatttgagtgtgagaaagtaccaacaacctggtatcgtgtgggtggtgtggtgctgaagaaagaaaaactgtttgtacatcacgaaaatagaattctgattcgctacaccttagtcgaagctcattctgccactactctccgtcttcgtccttttttggctttccgtagtgtccgccaatatacacatgaaaatgcgcaggcaagtcgtgattatcaggaagtggataatggtataaagacatgtatgtatgcgggatatcccgaactctttatgcagcttaataaaaagaatgagtttcatttccagcctgactggtatcgtggtatagagtatccgaaagaacaagaaagaggttacgactttaatgaggatctctatgttccggggtattttgaagtagatatcaagaagggtgaaagcgttgtattttcgggaggtgtttcggaagcaagtacacgaacgttgaagaagacctttgaagaggaaatggaagaacgcaccccgcgtgataattttcagcattgcctgataaatgcagctcatcaattcctcaacaaacaaaacgaggagtcttatattcttgccggctatccctggtttaaatgccgtgcccgtgatatgtttattgctcttccggggctgacattggctattgatgaagtggctaagtttgagagtgtgatggaaactgcccgcaaagcgattcatgattttattaatgatgaaccgaatgacctgaagatatatgagatggaacatcctgacgtattactttgggccgtatggtgtatacagcaatatgccaaaatggtttcacgcgacaaatgtcgtgagaagtatggtcagttgttggaagaaataatggaatatctgcgtagggaaaaccatcctaaccttttcctccattccaatggattgctttatgctaacggaacggagaaagccattacctggatgaattctaccgttaacggacatccggtaattccgcgtacaggatatattgtggagataaatgcattatggtataatgcgctttgttttgtcggtgaactagtaggtgaaacaggaaacaataatttggctgaaacgttacaaactttagccgagcagaccggtaaatcatttatagatactttcttgaatgaatatggctatcttcttgattatgtggatggtaatatgatggattggagtgtgcgtcctaatatgatatttaccgtagcctttgattactctccgttggatgcccgtcaaaagaagggagtattggatgtggtgaccaaagaattattgacaccgaaaggacttcgttcgctcagtccgaagagtggtggttataaccccaactatgtaggtccgcagatgcagcgtgattatgcttatcatcagggaactgcatggccgtggttggcaggattctatttcgaggcttatctccgtatttataagatgagtgctttgggattcatagaacgtcaattgataggttatgaagatgaaatggtttctcattgcattggctccatccccgaattgtttgacggtaatccgcctttcaaaggacgtggagctgtgtcgtttgctatgaatgtggcagaaatcttacgagtgttatatttattaagtaaatacaattattaaaaggaggagcctgtatgaaagtattaatgtttggatgggaatttcctcccaaaatatatggtggtcttgccgtagcttcttatggtataacgaaaggattgagcttgcagggtgatgtggaaactactttttgtatgccgaaaccttgtggcgaggaagagcagttcttaaatatcataggaatgaaccaagtgcctattgtatggcgcgatgtgaattatgattatctcaaagagcgtttgccgtcttatatgacaccggaacagtattacgctttccgtgaccatatttacgctgatttttcttatatgcacgtcaatgacttgggctgtatggaatttggtggtggttatccgtcgaatctgcatgaagaaatcaataacttctctgttattgccggtgtagtggcacgccaacaagaatttgatattatccatgctcatgactggctgacttatcctgccggtgtacatgccaaaatggtcagtggaaagcctttgtgtattcatgtgcatgccactgatttcgaccgttctcgtggcaaagtgaaccctacggtttatgccatggagaaaaatggtatggatcatgcggattgtatcatgtgtgtatccgagttgactcgtcagactgttatacatcagtatcatcaagacccgcgtaaatgctttgccatgcacaatgcggtttatccattgtcacaagaatatcaggatattccacgcccggatcattcaaaagaaaaagttgttacttttctcggacgtatcactatgcagaaggggcctgagtattttgtagaagcagcggcgttagtacttaaacgtactcgtaatattcgttttgtgatggcaggttcgggcgatatgcttaatgcgatgataaatatggtggcggaacgtggtatagcagaccgtttccattttccgggatttcagcgcggacgtcaggtttatgaaacctataaacaaagtgacgtgtttgtgatgccttcggtttccgaaccgttcggtattgctcctcttgaagctatgcagtgtggtactccttctattatatccaagcagtccggttgtggcgaaatcctaaccaatgtgataaaaacagactattgggatatacatgcgatggcagatgccatctatgcactctgtacttatccgtctctctttaattacttgcaagaagaaggtaaaaaggaagtggatggcattacatgggaaaaagtcggattgcgtatccgtgctctttatgaggaagtattaaaaaactatggtaaataataaaaatcacactagatatgaaaacaatctgtctttactttgagatacatcaaatcatccatttgaaacgttatcgtttcttcgagataggcaccgaccactattattatgatgactatgccaacgaacaaggcatcaacgaagtagttgagcgttcgtatgttcctgcgctgaatacgttgattgaaatggcaagagccaatggaggcgcattcaaggtagcactctctatttcgggagtagcattggaacaattggaaattcatgctccgatagttatcgaactgttgcatcagttgaacgatacaggttgctgtgaattcctctgcgagccttattcacatggtctttcttcattggcaaatgaagactgcttccgtgaagaagtggaacgcatgcgcgtaaaggttaagcaaattttcaaccaaacgccgaaggtattccgtaactctagtttgatttactcaaatgaaatcggttcaattatagccgatatgggcttcaagggaatgttgactgaaggtgctaagcatattttgggctggaagagttctcattatctgtatcattgtgccatgaatccgaacttgaagttgttgctccgtgacttcaaattgtctgatgatatcagtttacggttctctaactctgactggagcgaatatcctttgtttgcagataaatatgtagattggattgcagcattacccgaagaagaacaagttatcaatatatttatggaactttctgcattgggtatggcacagtcattgtcatccaatattttggaattcctgaaagcattgccaatatgtgcaaaagaaagaggcattactttctctactccaacagaaattgttaccaaactgaaatctgtagaccagatagatgttccttatccaatgtcatggacagacgaagaacgcgatatcagtccatggttgggtaatgtgatgcagcgtgaagcattcaataaattatatagtgtggcagagcgtgtgcacttgtgtaatgaccgtcgtatcaagcaggattgggattacttgcaggcaagtaacaacttccgtttcatgaccagcaagaatacgggcattagtattaaccgcggtatctatgattctccatacgatgctttcaccaactatatgaatatattgggtgattttatcagccgtgtaaactcattatatccggttgatatggataatgaagagctgaactcgttgcttaccaccatcaagaatcaaggtgaagaattggtagcattgaataaggaggttgaaagattgcaagctaaattggcaaaagccgaagcaaagatagctgctgaagcggaaaaaacaccatccaaaaaggccgttgccaagaagccggccgctaagaaggcacctgccaaaaaagcggctccgaagaaagaagaataggtattggcttattgattatgataatgagggtgtgtcaagactaaagtgatagaccatttcagttcttgacacaccttctttttatttggcttgtgtttcccttttgtatatctttgccgcactgttattaaagtaatgccacatgaacaaacaaatatctaaatcgcaaatcatacgtttccgccgatggtgcaggaaagggtatgccatattttgcagtttggggaagactgtggcaatcggcaatctgagaaaaggaatcgttgaggcttctttgaaaaagcagcccggtgtatgtctattgtccgtgctatgccgtccggaccgagtggatgaggaagacgacaaagcccccgatagggaggtggcggacaggatactttcattgattattcttgagataataactgtaaaccggttgcgttgtgcgattggtggagagttattgtcttttatatctatatggccggaagaacgtgaaatgcgttctctccggctttttttatgtcattaacagaagtagaaacgatgctgaacaaacttaaaaacaaagtattaagcggtgaaaagataaccgttgaagaggcagaatggctagcaggggaagctgataaggaagagctttatgaggctgcttccgtgataacccgggagatggcttcaggtcattttgatatgtgttccatcattaatgccaagtccggacgttgtcccgagaattgtaaatggtgtgcgcagtcggcacactaccggactgagacggaagtttatggcttggtggataaagcggaatgtaagcggcaggcactatacaatgaagttcaggggatagcccgcttctcattggtcactagcggacgaaaacccggcaagcaagatatgcaacaattatgtgaaacatttgaatatattgcttcatgttccgatattaaactgtgtgcgtcactggggttgcttaccgaggaagagctacgcagattgcacgaagtgggagttacccgttatcactgcaatctggagactgccccttctttctttccatcgctctgctccacccatacccagcaagaaaagatagaaaccctgtgtgccgcgcgccgggtggggatggatgtgtgcagcggaggtattatcggtatgggtgaaacgatgcggcaacgcatcgaacttgctttcctcttgcggcagttggaagtacagtctattcctatcaatctgcttcaacccattgcgggcactcctttggaacacgcgccccgtttggcggaagaagaaattctgaccacgatagccctgttccgctttattaatcccacggcctaccttcgttttgcaggggggcgttcgcaactaagcccggaggcgatagggcaggcattgcacattggaatcaattcggcgatagtcggcgatttattaaccaccctggggtctaaagtatcggacgacaggaaattgatagaagcagccggttatactttataataaaaacgatatggacaattttgataaagagcatttatggcatccttacacatcgaccgtcaatccgcttcccacttaccgggtgaaacgggcggaaggagtgtacatagagctggaggacggcaggaagctgatagaaggaatgtcctcatggtggtgcatggtgcatggatacaatcatcccgtactgaaccgtgccgcacgggaacagatagaccggatgagtcatgtgatgttcggtgggttgacacacgaaccggccatcgagttgggcaaactattattgaagattgcgccaccgcgcatgcagaagattttttatgccgactccggctcggtggccgtggaagtggcgctgaagatggctgtgcagtattggtatgcgcaaggcaagaagagcaagaataattttgttacgatacgttccggttatcatggggacacatggaacgccatgtcggtgtgtgaccccgtgaccggaatgcatagcatttttggttcggcattgcctgtccgctattttgcaccgtctcctcgttctcgtttcggaggagaatggaaagaagaagatatgttgcctctccgacagctattggaagaacatcacgaagaactggcggcattgattctggaaccggtggtgcagggagccggaggcatgcgtttctatcattccgaatacctgcggcaggcagagaaattgtgtaaggaatatcatctgttgctgatatttgatgaaatagcgaccggcttcggaaggaccgggaaactttttgcatgggaacatgccggcgtgcagcccgacattatgtgtataggtaaggctcttaccggaggctatatgacattttcggccgtgcttaccgataacgaagtggctgatgtcatatcgaacggctatccgggtgcgttcatgcacggtcccacgttcatgggaaaccccttggcatgtgccattgctcgggcctcgacagagctgttgctttcctgcggatgggaacaaaaagtgaaggcgatagaagaacagctgaaacgggagctggcaccggccggagaattgccgcaagtggcggatgtgcgcgtattgggagccatcggggttatcgaagtgaaggagcccgtggacatggcttacatgcagaagcgctttgtggaagaaggagtgtgggtacgtccttttggaaaattggtgtacatcatgccgccttttatcatccaacctgaagagctgagcagactgactcatgcgctggtgaagatagtaggagagctgtaagggctctatgaaaaaaagaaatgacacaagtttagaaaaatatgagtttatttgaagatttggaacaagagcttgactgcttgaagagtaaaaacaatctgcgcagactgcccgccactcatcatcgtggcagggaggtggaggcagatggcaacgtcatgttgaacctctcttccaacgattacttggggttggcaacagatgccgacctgcgtgccggctttttgcagacccttactcccgacagcttcctcccttcggcttcctcttcccgtttgctgaccggtaattttgatatatacacccgcctggaggaacggctggccgagcttttcgggagagaaagtgcgttggtctttagcagcggctatcacatgaacgcgggcatcctgcctgctgtgagcaatgtccgcacgctgattcttgccgataaactggtgcatgccagccttattgacggcattcgcctttcaagtgcaaagtgcatccgttaccggcataataattatgaacaactggaacaattgttgtctgcgcatcatgccgaatatgaaaaggtgattgtagtgacagaaagcattttcagcatggatggtgacgaggcggacctcaatcggttggtgaggctgaaacgacagtatgaccgtgtcttgctttatgtggacgaagcgcatgctgtcggggtgagaggagaacacgggctgggttgtgccgaagagcagggatgcatcggcgagattgactttctgtgcggaacgttcggcaaggcgttggcctcggtcggcggatatgtggtctgctccagaacggtgcatgattatctggtcaacaagatgcgtacacttatctttacgactgccctgccgcctgtcaatctgatgtggacgtactttatcattgaacgcctggcacagttccgcgacaggaggcaacacttgcagcgcctctcttttcagctgaaagaaggattgctcgccgccggatatgaatgtccttccaccagccatattattccgctgaccataggagaaagcggggcaactgtctggaaggccgaggagttgcagcgcaagggcttttacgcccttcccgtccgtccgcctacggtgcccgaaggcacttcgcgcattcgcttttcgctgacggcggcacttaccgaagacgagataagcaaactgataacaacgataggaaaacgatgaaatgaaacaatattttatagaacaacgccatttgccttcattgacactcttttttgccggatggggaatggacgaacggccttttttgcactatcaccccgcggacagggacttgcttgtctgctacgattaccgttcactcgacttcgatttctcattgccggaggggtacgaagacatccgtgtggtaggttggtcgatgggagtgtgggccgcttcccaagttttggaccgttcttgtcttcccattacagaaagtgtggcggtgaacgggacaatgacccctgtcgatgactccagaggcatccccaacgctatttatgaaggaacattgaaagggctgaatgacgttacgctgcgaaagttctttcgccggatgtgcggttccgccgtacttttggaagacttccttactagaagtcccggacgttctacggatgaagtgaaagaagagcttcttctgatagcaaagcaggcagaatgccttgcacctgcccgtttttgctggagtaaggccgtgataggtaaggacgatttgatttttgttccggcttgccaaaggaaagcgtggagcgaactccgtgtgccggcagaggaagaagacatggctcattattccgatgtgtttttacgagatatcgtgtgtcgataatgcagccttccgataaacaaaacagtaaaagaatatgataaataaacaattgataacgcgccggttctcacgtgccatagaaagttataaccgtgaggccacggcgcagaaacagatagccggtcgcctgaacgatatgttggcacattacctgccggcacgtccgcggcatgtgcttgagataggcagcggaaccggattcctgacccgtccgttgctccgcacctttcatcctgaaaagctgatattgaatgatatatgccacgagatgagcacttgctttgccgacttgctgtcggacaggcaggtgacttttatccccggagatgcggagcagctgtcttttccttcggggcaagacctgatagtttcctgttccgcccttcagtggttcgtctcgcccgaactgtttttcaagcgttgcaatgccttgctgtccggccacggatatttcgcgttcagcacgttcggcaaagagaacctaaaagagatagccgccgtcacaggaagcggattgcattattattctttggaggagttgaaaaagtccttgtccatgcattataatatagtcactgccggcgaggagcgcatccgcctgacattcgctactccgctcgatgtgctttatcatctcaagcatacgggggtgacagctgtctgccggcaggcatggaccaaaggggatttgcaggagttttgtgataagtatgcgaagctgttcagttgtggtaacgccgtcacgctgacttatcatcccctttacatcatcgcccgaaagaaaccttgatatagtaaacagataaaataatgaaaaagaatgtatattttgtcagcggcatagacaccaacatcggtaagagctatgccaccgcctaccttgcacgagtgtggcgagagaagggaataaacgtgataacacagaaattcatacaaacgggcaatcccgccggctattccgaagacatcgagcttcatcgccgtctgatggggttggaatacctgcccgaagatgaacaggggtggacgaagcctgagatattctcttatcctgcctcgcccgacttggcatcgcgcatcgacaaccgtgccgtggatttcgataagataaatcacgccacaagtgtgctgagtgaacgttttgatgccgtgctggtggaaggggcgggagggcttatggttccgcttacgccggactgtcttaccattgattatattcaacactccggctacccgttggtgtttgtcacctcaggtcgcctggggagtgtgaaccacactctgctcagctttgaggccatagagcgcagaggcatcagtctccatacggtgatgtataatctttatcccgaaggggaggacaagataatacaggaagatacggagaactatataaggcattatatggggaagcattttcccgaagcggagtttgttaaagtgccttgcctgtagacggaatactgccataatggaagcttcagggttcggtttaaaaccgtgggctttccgaaacggccgggttcttgtgggaagataatctcctttcacatataacgggacccggaagccttctatttatggactttctgcgtgaagggactgtccccctcaaaaaaacagtagagctatcatttacctttgaggacagcctcttttgtatttactcatttctactaaaacatcttacttttagaaatttaatccgaatacaaaataagtaccttctgttctgggattccacgtcaacttagcgaaaaccggcacagagaaagaccgggttatctttacatctttgccggcttgcagactgatgtcacttacggcaaagccatttgaaccattgcaatgaagttcttcggatgcattatagaaatcattggcccacggagtggcgcctatctcggctgtccagtccaaacctcccaatttgaaaggagcagtgacggaaacataagaggcataagctctgctaccttcattgtttacaccatcatatccggcaaaatttgtataccaattgacagccagaaaaccgaagtcatatccgacttgtgcttcaaaagtatgatttgtattgtcggaaccatagtggaagtatcccgacccaccgtcaaaccaatagtcggtgacggaaatgctgaatccgccgatcgtatatcctagtgtgaggtcaagttctttggtgtctttcccttcaaaccctacactgccccatgcactcaacgaaaatcctttgtaagatacagatagagttggttggatacttacattacccaaatcttgtccgcgccatatatacccactgaccaggtcggcactgatgtctgtttcaatattttcttgtgcaatgctgactgtgggtatggttattgacatgcccaatagcaacactgcttttttaaagttttctttcacgactctttacctttaaagttaataatggcaagtattgtatcctgtattgttttttttgttatcttattgattataacatccattttccgattctcttcatggcttcttcaaactcctcctgttcgtcaacgacagcgagacgaatgtatcatacgtttcggaaataaggaactgtttttctaatataggtccgattgacggcaaaattacatttatttttgattttaagcaaaggtgtgtctttctgattttatttataccgtttgactttctattttatggctcgtttgatagaatatgacaaattgggatggtattccttgtgtgatgttttaatttgtaattaatcatgtggttaaataaataaattatcatgccgttcgtttttttgcatttgaataagagaaggagaaatattctaaatttctttttcgcatgaaaaattatcctttttcgaacgaagtgatttaatctttttgtacttttgccgaaaatttataatataaagaaaaaaatcacatggagtcagtctttattacgacgcgtaaacaacgaatcatcagagaaatgagagattatatgatgatagctctcggtatgctgatgtatagtatcgggtggaccgtctttttgttgcctaacgacatcacgacaggtggtgtgccgggtattgcttctattgtatattgggcaaccggtgtgaatgtacagtatacttattttgccataaatggtgcattgttggtagcctccctgattattttgggatggaagttcagtgtaaaaactgtttttgccgtatttaccatgacgaccattcttcctattattcaaggagcaacagcagggctgcatttattgcatgaccagccttttatggcgtgtgttatcggtgcttctttctgtggcggtggtattggagtggcattttcggctaacggaagctccggaggaacggatattgttgccgctattattaataaatatcgtgatattaccttaggacgcgtgatattgatgacggatatggtgataatctcttccagttacctcgtattgcacgattgggaaaaggtggtatatggttttgctaccttatatatatgcagctttgtgcttgaccaggtggtgaacagtgctcgtcagtctgtgcagttctttatcatttcaaagaaacatgaagaaataggtcaccgcatcaataaagatttgcaccgtggagtgactttcattgatggtgtaggttgttatacaggcgcaggcgttaaaatgatgtttgtgctggcaaagaaacgtgaatcgactactattttccgtttgattaaagatattgatccgaatgctttcgtttcacagagtgccgttatcggtgtgtttggcgaaggatttgatagaattaaagtaaaataaccaaggagatagagcataaaaaaacaagggaaaggtatccgtatgattacggatgcctttttttgtttccttgcggaggattaagtaatttcctacggtcagctaaggtcttttaagcggaagattactacgtcccactacagtaggacatacgtcccattgcagtaggacgtacgttccactacagcaggacgtaatagcccgacgtataaaaagacttagcctgaaggatgaaaaggattagtccgaccgatgagataacttaggggggcgatatctgtatttcttttaataacccataagagaatataatgcgttgaactatcattatgatattttgttggcgtgtatattgcattatgatggcaaaaataaaactataaatttatatcagaatatattttgatatcaaaatgttagtttatacctttgctgtatgataaagaaataacatattaaaacaacctaatcatggaaacaaaacttacagaagaaacccgtgtggaaagtgacttaatcggtgcccgtgaaattccggccgctgccttgtatggcgtgcaaacgcttagaggtattgaaaattttcctatcagtaaattccaccttaatgaatatccgttgtttatcaacggccttgccattactaagatggctgctgcaatggctaactatgagttgggcctgcttactgaagaacaaaaagatgccattgtgcaggcttgccaggaaatcttgaacggtgaacatcacgaacagtttcctgtggacatgattcaaggtggtgcgggcacgacaaccaatatgaatgccaatgaagtaatagccaatcgtgcattggaaattatgggacacaagcgtggagaatatcaatattgttctcccaatgatcatgtaaactgttcacagtctaccaatgatgcttaccctactgccatccatatcggtatgtattatgaaaatcttcgtttccttccctatttggaatctgttatcggagcattccgcaagaaaggagaagaatttgctcatgtcattaagatgggacgtacacagttggaagatgctgtacctatgactttgggacaaacattcaatggttttgcaagcatattgaaagatgaaattctgcaccttaaccaagctgccgaggattttctgactgtcaatatgggagctactgccatcggtacaggtatttgtgccgaaccgggttatgcagagaaatgtgtggaggcattgagccggatcacaggattccatttcaaactgtctgccgatttggttggagcgacctcggacacatcatgcttggtgggttatgcatcagctttgaaaagagtggccgtgaaaatgaataagatatgtaatgacctgcgtttgcttgccagtggtccgcgttgcggattgggagaaatcaatctgccggccatgcaaccgggctcttccattatgccgggtaaggtgaatccggttattcccgaagtgatgaaccagatttgctataaagtaattggtaacgaattgtgtgtaaccatgtcaggcgaagctgctcagatggaactgaatgcgatggaacctgttatggcccaatgctgtttcgagtctgtcgacttgatgataaacggtatggagacattgcgtacacgttgcatcgaaggtatcacagccaatgaagagcattgcaaaatgaatgtgcatcacagtatcggggtagtaacagctttgaatcctgttatcggttataagaactcaactaagattgccaaagaagcgatggcaacaggcaagagtatttatgacctggtgttggaacatggaattttaaataaggaggaattggataccattctgagtcctgaaaatatgttgcatccggtgaaattggatatacagccaagacgttaattaagcattgttattttgaagtatcatgttgttttaaaaaggaaaagcgaagcaccgccattcacgggagcttcgcttttttatttatgccgtctgctttaaaacttccgataggtgagtcgggcatagtctgatttcagaatcattttgctgccggttgctttttccacttcgaaatgtgtgacggaagaattcagcccaaacctgttcaaatcctcttctgtaacggtagcctccatattatcctgatatttaaactcacccatcattactccgtcagcagaggaaaagtgtcctatcaatgtcaggggagtggtgcccttatccatcagttctactaaatggagctgaatactgcaatagatacgttcgcattctttgatgcttccgtcattgtattctattgtcattaattgccatctgccgtccaattttccgttgatgggcttcttgtcacaactgcataatacaccgagcagtaagcatacacataatatgatttgtttcatagtccttattttattaagcctgttttgcggatgacaagcatgccgcccgaattgtttcctagtaaattacctctgtccatagctcctgaaatgctgaagctccatccattccattttatgggtgaataggtgacttccagcagtgagctgaattgcttcttcacatcatcaaacggattgtcgtacgttccccagtttctggagtaggtgagcagtagccgatacgcccattccttgccgggagtgccgctaatgcccagatgatgtgcatttatacggttgttggcaaacattattctaccgtctttattgtagacaggaccggtaaacaacggatttcccatagccataccccagtgctgccatgcctgataaatatagtggttataataattatcttttgcactgacttgttcaaattctccccggaaaccttcgtagaagataggtcctgtctggtctttgctgcccatacattcatatacaagggcatcaatgaattgattttccggcagggtgacttctactcccagtagtccgtctttccagggaccgtaaccaaaaaacatttgtgattcgtcctcaaagaaatgttcatagtacgctttgattctccaatcctgtacatagccggtaagtccgatattccaactgcccacgtggttaccatacttgtttatctgctcaccttccatggcattgtcacttccgctcatcggaatcaatacgcggataaagtccataaaatctgacggcattttcataatgggttctttctgtccttctacatattgttttccaccgaactgggccgccatttgcagacctgcctcaaactccagtgggaaggattcttttttccctactttcataaagaaagatttgctatgataaagcacatccttggtgtatagatttccggagcgggcaaagtcttcttgccagttgttgtctgtgaaagttccgtaggcaagatgacctttgatgtgcagccaatgattcgttccgggaacagatatgtattgaggtatttcgatacgtacctgcggtacgggacgggcactgttcgattctaccagtcctccggtactcaatttcgggtttcttaattccggtgtacgttctttgcttccgatactgagattcagccatcggtaactcaggtcggcataggcttgctgaacaacgaaagaagaagtatagttataggcagtggctaaatccagtccggctttccatgtaaaatgtctacccaatgcctgtgaatggaaaattccggcgcgcagatatccgttttctgtttttacagaggataaaccctgccgattggctgtaaaccaaaatggactgtaatcgccatgtccggcaacaatacctgtttctactgcataatgagtggatggagtcgtggtttgtgcagtaagggtatataagggaacagatgataacaagccctgtaataaaaatagttgtattttcttcatttagtttttaattatgttgttttttccctattaaacatcttgttttaaaaccctgatttctttctggtttgactgaatcgttggtccgatcggattggacgatgaggctttgtgccactgtctgactcaatatgacaaaactgtctgatagttgcataaaaagggtcaattactattttgtttcaaaagtatataaaaaaaactatttggtagaacaaagccgacttaattttaagctttatcatttttcatccaactttttttgtaattttgcacaaaatccgtaaagagaagacacatgacaacaaatatagaaatagcccgtaaaatagccgaagttaattgcccgttgagtagggagagtgtacatgcattggctgagattgtggtgtgtaagaagtaccgtaaaggggaaattgtgttgaaggcaggagaagtgtgcaaggctatgttgtttattgaaaaaggattgctcagacagttttactataaatatgataaagatctgaccgaacatatcggctatgaaaacggaatgattatttgtattgaaagttattttaagcaagaacctacacgtctgatggtagagactttggaaccttctgtggtgtgggagcttcccaaggctcagatagaggaacttgcttctaaatatgatgatatcgaacagctttatcgcaaattcatagagcattcattgatagaatcgcagattaaagctgatgcacttcgatttgagccggctcatgaacggtataataaattgcttcgtctgcatcctgagattttaaaaagagctccgttggtatacattgcttctttgttgcaaatgacgcccgaaacactgagtcgtgtccgttcgtcattgctttaactgcttagaattggtataatagtcctacacgcgtttcgaaggttttgtattgtacatctttgtgatacgtgtagtgtgtatgtcggtagaaataagagatttccatgtttgctttaaagtggcggcttaagttcagttcgataagtggattgactacagccagcatcacgtttcctttgtctccctgtgcgttcagatagagcggattggtattttcgaggtctttgtgctcgtatcctttccaggtgaagatttggtagagatgcaggttgagtgcaaactgtccgtagcgtccgaagtcaagaagggttttgttttttacgctataaccgctacccatattgtaattacggtcgataacattataatagtcggtcaggctgccacccagcaggatagcactcagaaatacactttgttccaaattgacgagactgttcatgcgtggaaatttatagatgatgccggggcccacactggcagcttccgatattttatacggaatgcgccccgaaccgttaatgatttcttctgaatcgaaataattgaaatgctggaagacgccaaacatcatttccatgccggtactggttttcaacggaactccccataattttcctaaaagattaattttgctgataagcggttggttgggagaaagccccagtgtggctgtagcagtgaaataatcataaggagcatcatttattttatcgaaagggttgccgtagactgctcgaaattccaaatagggattgtgctctccgcgaaaaaggtaattgttatctgccaggtagcggtcaccggcactgatagagaattggatagggatgcgttcgtaatatttgtaatgagagcgtttcactttccacatgtcaccggttatcatgcggttgatgccacgcatgggacagatcagagttcccaagaattcacgggtaaatcgcccgaacccacgcttagagtcatccaacaccaatgaagacaggcggtgtgtcatttcgccaagtgcaatacctccaatggtggttgctatcaggtcattgatggcgggtggttctacttcggctgcaacttcccacatcagacttccggcaaaagcgtacggtgccgattcccaaaagttcaatccgttgctgcgggcagcgttgaagtagagattaccgtgataagggtgtgcaaacagattggtagagaactggtcattgtcccacacaaagccgtgtttgatattacgacggatactgttgatactgattttcgcaaaatcttcgttcatcacataccggtcgaatgcccatactcccacattcatgccgactgtttcggcagcagcacgccacggatactttttctgcatgtgagggtcggtgaaagtataaatggagtcggggtggtgaagtacttgtgccgccccgatgccattgcttaaagccaaaagacagactaatgcaatttgttggattttcatttcgttaggatttaggatgtaagccggatgtctccggacatttatagcactctgttagaatagaacgacgcctatttcaatgataggcttcttctcatagaacttattcttgtcgtaatatcgtgtcataccgtatccgcccgaagcaaatatgctgaacttgggtcttatcttgtactctaagttgacacgtgcctgcaaagaatacatacgttcgggagtttcggcatcttcgttttcaaagttttctatgtggaagtaaccaaggtcaccactgatttccaaatttccggcgatggggtagtgaagtccggcacggtagaatacacatcccgagaacttatcgttcaggtcaaggtagtgtgtaccgataccaagcagggtataagtggtgcggttcttgaagcggacggcggcattcattttactggtgttaccaccgaacaacatcagctggatgcgggttttggggttgatgttcactaatccgattttatgtgcggtagtatctttgctgtgattgataatgccaatctgtacacctttcacatgaccgccgcaaagattgagcaggccgatttgggcaccacttacttcaccggcatagttgccgggagcaaattgtatcccgctcagtttgccctgacatacattggtaatacccgatacttgcaatgcattctttgtttcaacagcaatattcacggctccgcagagttgcagtccttttatttttgcagcggcaatattactgatggcagaaagttgcataccattgacattgatacccacattgcctattgctgctatttgtgctcctcttgctgttcctccgctgatattcagtatactcgaaatctgtgctccgtccgttttctcggccgatacgttcatcaaaccgccaatggctataccgctttgcgactttccggcaatgttggcaagtccggctatttgtaaaccttgtgcctgatcatcggcaagattcattaatccaccgatggttacaccgcgtgaagtatttccggctatattccccaatcctgaaatctgtatgccgtttgcacggtttcctgccacgttcatcaaaccgctgagcatgactccattggcatttgcacctgctacattggcaataccgccgagctgtatacccgatgcatgacgaccggtgatgcttgccaggccggagacttgaaatcctgtcatgtcactttgcaccacactggatatggcattgatgcccacaccttgcaagcgatagatattagtgagcaaacctaaattcagataggtcgtttttatactgtcttttttggcggaaatattaagggaaatgttaggcccttttttaagtttgttctttttttgagcaatggcaggagttgtgagccctgcgcaacatcctaataagataattgctgcgatacgtttttttattttcatattgtttggttatttgcgcacaaatttaatcaaaaaaaacgaatgcgtctattgatataatgtgtaaatgtaccaaatattatcgtcccatggattgtgaggagagctccttacggccatgggacgatgaaatgtatgttctgtctttatttcacttcttgataaagaaaacgtttaatgctcttcttgggcgttttttcaaactcttcagggtaaatctttacgcgggtgatttgagaataggcgggaagttcggcattgagtgctatccggttctcttccatggcttgtgtaatggcatcattattcattccatgcgcaaaagcatcatcaaaatcaggatatattaaagctgccagtttaccatctgtttgctgaataataatactttcggctacgaacggcatattgttgagcttatcttctatttcttcggggtaaatattctgacctgaggcaccgagtagcatgttcttgctgcgtcctttgatggtgatattaccctctgcgtccataatacctaagtcaccggtgtgcaaccagccctccttgtctatgacttcggcggtggcttcggggtttttataatatcccagcattacgttcggtcccttgcagataatttctcctacaatattttcagggtcaggacttactattttcacttccatacgtggagcagctttgccgcaagaaccggttttaaagcgtttccaatcttcataacagatgataggggcacattcggtcattccataaccgacggtatagggaaaatcaatgctctttaagaattgttctatttcctgattgaaagctgctccgcctacaatgatttgatagaaattgccgccaaatgcctgtatcatctgttcgcgtacggtagccttaatcttatcattgataataggaactttcaacagtattttcatggccgggctttccagtttggggagcacgttcttcttaataatcttttcaataatcaaaggaacagccaccacgaggttgggcttgatatcggcaaatgcctgaaagataattttcggactgggcatgcgggtgaggaaatagatatggcaaccgacacagaattcatacaggaactcgaatgccaatccatacatatgcgccattggaagcatagataccagtttgtcaccgggcttcatggtcagtacatcaaaagcaaactgggtgttcgaccagagggcgcgatagggaatcatgactcccttagaatagctggtagttccggaagtataattgatgactgccaactcttcgggtttatcgcgacggtaacttacgtgttcgcgtctgaaattgcgaggaaacttctttccgaacagttcattcagatgatcgcgggcatagtcgagccgttcgctgcgagataccaatagagtaaaatcattcatcagcaatacgccttcaagcagaggcattgcattctcattcagattctcccataccatatcgcctactaataagaggcgtgcttcggaatgattgacgatgttatgaatattgtcggccttgaattcgtgaaggataggaacgatgacggctccgtatgtgatggtggccaggaaagtaacgccccaatgcgaactgttgcgaccgcagacggctattttatcacctttcttgatgccgctcagttcaaaaataatatgtagtttctctattttgcgggcaacatctttatattgcaatgtggctcctttatagtcggtgagggcatctaaatcccagtttttctgtatgctgtcttccaggaaggcaataaaactctgctccataatgttcttttcgttggtttatatttgcacattatttaatcaaatgtgcaaatataagcttttattataaggatacaaactaaaagggaagcaattttagtaaaacagaggaaaggaaaaagagggtgtgtcaaaactaaaccgggctatccaattgtcagctgtaggggcagggtttacctgctcaaagacacaaagcaaactgttttgggcgagcgggcctcgtccctacgaactaaacgacagcattatccacgttctgacacacccctttatacgaagagattttgttattctttgctactgaaatacttcataaactgagtacgttcgaaaggattactttcaccggtagacaaagcattcatttcacttttgaattcgctgatggtgttatatccttgttttttcatccattcacttaattcttcggtcatggattctatgaaattttcgcctttctgatagataacactacatacttctacagccgaagcacctgccagaattgcttttaccatcgctttgccatcgtgtacaccacccgaaatggcataatcaatttgtggtacttgtgctgaagcaatagctgtccagcgcaaaccgtttgccaggtccgaaggatggctgaacacttcccccgaagaataactcttggtttcgatattgatgtcgggctggtagaaacgattgaataacactactgctgcagctccattggcataaagttggttgattagcgcaatggggttggtaaggttagttcccagtttgatgatgacaggaatggatacatgcttttttacgctactcaggatatcgatgtgtcgttgctcgaacgccccgtattgatattccttttcggtttgcagcgagagaatattcaattccagagcatcggcaccggcatcttgcatggtacgtgcgaagtctgtccattccgagctgctgaaacagttgatactggcaatgatgggaatggtacagaggcgtttggtctcttgaatcaggtcaatatattctttgatggcatgcgaacgaacataggtactcaggtaatctcctgcttcgggagaatcataagtagccatgtgatgagcctgcatcatgatttgttcttcaaaaacagatttcaacacgatggctccggcaccggccaattctaactttttgtttttttcagcactgttagtcagactggaactgctgataataacaggattgcgtaaagacaatccggcaaaagaggtctttaattgagtcataaaatagtagttttaatagtttcgctctccaaagattttgctgcctactctgaccatcgtgcttccttcccggatagcgatgggatagtcgtgcgacatacccattgatatttccttgaaactctctgtatcagtaaaataggttcgctttatttctttgaagaatgtatttaaggaacaaaattctttcttaatttgttctgtgtcatcaatattggttgccatacccatgacgccgctgatttggatatgatgcagttctttccaatctcctttttggagcatttccctacattcatcaaagctgaaaccgaacttggtctcttcttcggcgatatggatttgtagcaggcatggaatgacacggctgcacttttgggcttgcttgttgacttcaaccaacaatttataagaatcaatgccgtgtatcatggctacgtatggagccatatacttgattttatttgtttgcaggtggccgatgaaatgccattcaatatctttgggcagcgtttcatatttctgagtcatttcctgcactttgctctcgccgaagatacgttgtccggcagtgtatgcttcttcaatcgcctcattgggatgaaacttggatacggctaccaggcggacaccggatgggaggtcggccagaacttcttttaaatttgcttgaatgctcatatataatctataatttggtctgtctgaataatctttattcggtttttcctgcgtcgggaaactccggtttgacgtttggctctccgtcataaggataaacatccatgagggctgtttcggcaacggatgcgataacgtaatcggccatggttcctttcatgccttcgtccagcttcttcactgcgtcacgcaaatcagcagcctgaacaagtacctgtgtagaagttttcttttcggctccgcttttctcgtccagcgtgatgaagaacagcttacatttaaaccagcggtcggcagcatcttcttcgcagaagaatagttcgctatagttggcacgcttgatgtccgacactgtaaactcaccgctgataaacggtgttatttcttcgatgatgcgtgcctctgcttcggtaaagctcagcgcatcaactaaataaggctctgttacttttttgttcatgccattttccatgactttttcgtaacgtatcttgcattcaaaccatgtatgcatcataagagtttaatgttttattaaaaattaaaataggacacaaagatactattttatttagtcttcgtcctccatttgctttaatttcttcatactttcggttgtcaattccgaaataatttcagaggagaggcgggtagtgaggatagggttcatgttaaattgttcgcttaactctctttgtatcttatttaaccggctgaaaccgtcaaggctttgttcctgaaatgctttttcactgatattcattttctgaggtgtgtacatagcggatatgatattctcagctctccgccgaaactcttttttgaatattctttctgccagtttgcgatgttcttcgggattgaattccaacgtgtcggtggggagcgggcgtatggaatctgaaggaagtgggatgctgtagcttctgtttctgttgtcggttgtttccaatgcctgacggttgatgtgttttacctcctctataaattgtaatgtttccttgtcggtcggttcttcccgtaatccatagtaagcaagcagaatgacggtaacggcagcaattccctttataacctgtaccgaccggtcaatgtaacgggaagcgccaaaggctttcttcatttcctctacattggtatatcgtttggtgggttcggggtgggtggctttaaaaatgacgtgccggataccggggctcagatgggagtaactgtaaaggtactccatgaccttgccaagcgaataaatatcacacgcgagtgtaggaacggtgttttctttaaagagttccggtgctgcatatttttctttaaagataaaaaaagaaggagtatatgatacgtatatattggctggatttgccaaaagcacatcatgcgtccctttagtaataaaaatattctcggggcggagatcaagatggcagatattccgagagtgaagataagcaacggcatccatcagttgattcatgatttgcttgaactcagtcactgtattaatttgtaacacaccatctaacaatgctctgttgagggggacggccggtgtgtattcaaaagtgatgtaccacccttgctcatccttttgcagactaatataatttaataagttggggtgagcccaacccattccttgcctagcttccgcggcaaaggcttcctgataggcagcaatgtcggcaaactttttacaaggtcgttttataaatatctttttcccttcattattggtgccgatactaatcgactctgttactttcattttttattctatttgtttacaactgtttaattgcatgaattcgtgtatcacttgctcgtggtcacccatcaaaacaatgtggtggttgcctaatggattacgtgtgaaataatcaacaggttttcccagacggatgcgtatttgtgtgcggcaggcattgatgtagttggtattctctgttaattgtccgcgtgatacaaaatattcatccaaacattctcctccgcatttcagtacagtgatttccccttcatgcaggattccctgaatggccacgcctgtttcactctcaaaatggttgcggataataaacctgtcggtcattttggtagcgatagtacagtgtgccacaaccagttcgttttgttcttcattgataaatgacgggtttgccataaaaccggtttgattggtcagcactttggcgatgagcatggtaaagatggattgcaaatcaccttcacaaccggcaggaatcccttcgtcgttcaataaagagagtgccagacagccggtggttcccaatttctctatcaatgaaaaacaggagagagtgactgcatcgagatgcttcttctcacaaatgattctgacggctttgtaaagcctcattgcttttagaaaatcttcgggagttgcttcacggcaggctactgcttgtttgaccaatacagatgccttatagccgatatcatcatcggtaatttgataatataaacaatatatttcttccatcgggatatcgatatactcaatcccccaacgtcgttttgccaataaataatctacattgctggcaacaagccatgatgaagggtatccgataacgccgattctttttccttttatttcacgtttggcagcaaaagcctgatgatgggataatatctgcttaaccatgtgcatcgggctaccgtgaataatacgtgctttcattcctttgttacgcatccaagtcgctatttcgagcgaagctgccaatgagttttgcagtccgtctgtaagcagcgtaatggggtaaggaagcaggtcaaagtgttgggtaactgttttttccacccctccagaggctataaaagccattttgtatgcgtcttccggaatcgtttctacctctttataatgtatcagatggagggtgaaatatttttcgatttccacaaataaatctttatggcaatcgtatacagattccattttgtttaggccggattgaaatgttatcaggtatagattcatttgatattttgctttgttttataggaacaaacatacgtgtttttttttaataaccctaaaaaagcgcttaaagataacatctctttaattaatttgctgtataaaaaccttcttagcaatatgttaaataattaaatccttaaaccatttttcttttcacttgtagtatggtaaataataaatagattagactatggcaaaagtaattgaaagaaatgttcccattgcagaagagaatgtgacattgtcgggccaaccggccacaaatatgtttgaagactggagtgaagagatgacggataaagcagaaaatccttatgatgaaaagagtgacgtacctcatgacaaggaagaaagaaaaaaacgcctgaaagaaatggataaaatagtaaaagacgatatcgcacagactgaataaggtacgaaccggttcttcattttctttgggaaaaacatttgttctcccaaagaaaatgtctgatggtctgatttcattaagaaagcagataaatatgtctccttttaaaccttcagaaaaattccccgcttatacataaaccatataatgacataaactgcaccgatattccacagcgtcatcaggaacgaataatagcttcccatatattgttccaatccataaaacaaagactcgccgatacatctgaagttgactacattagccagcatataggcaacaatagagttcatgccgtacactttcagccatgtgatgcccgaacggtgtcctttgtaatcaatccaataatagaaaagtcccatgagcagaaaacagtagccgctactgaccaataccattgagcttgtccaaatagttttgataaccggcatttggaaattccacaaccaacctgcaatgaccatagtgatccctgtaccgaagtagagtttcaattttttcttttcttctattttatctttggcaatatagccggcaaataatccggtaaggacagtcacaccgaaattgagactgctcaatatccatgtatagtgataccaatcggcaacgaccacttttccgtctatcacttgtgccgtgtcacgaaaccgtcccagcaccgtgttgtctatccattcggccagattgccttgcggggtgtaattcccgcctccatatccgtctaccgtaatgaactgcatggttgtccaatataccagcagtaacaccaccgcagtgataatttgtgttctgcggcttgtgaaaaggaaaagcaatgccgtaataagataaccggtagcaatggcttgtaaagtattcgaataaagataaatcgtgttagggtcaagtgccagcagattgccttggcacatcataccgaatatccacagcagcaatatacgttttgccaaccgtcgcaataaaggtcgcttgtcggatatggatttatagcgcgacaaagaaaacggcatcgaaatgcccgacataaagaggaaaagcggcataatcaaatcccatggagaaaacccttcccaagagacatgactgaatacccacatagactcattgagccactccacattggctgtccgtgccaatgagtgcatgagagggcctaatgcaacaagaaaaaagaggtcgaatccgcggagcgcatctaatgattccaaacgtttggaagaagaatgtgtatttttcatacgtgtctttttgagtttttagattgatttgtgcaaagatattcttttctttgtaattaatgtggcggagttgaaaaaatacggctatttatttaaatcataaaaacatctctttaaaatattaaccaaccttttgtttgcgtggttggaagctaaactctatctttgcattcagattaaataattttataacattatgccaacaatatccgtcagaggaactgaaatgcctgcttcgccgattcgtaaattggcaccgctggcagatgctgccaaacagagaggaattcatgtatatcacttgaatatcggtcagcctgacctgcctactccgcgagcggcccttgatgcgattcgcaatatagaccgtactgtcttggaatacagccccagtcagggataccgcagttatcgtgagaaactggtggggtattacaaaaaatacgatatcaatcttaatgccgatgatatcatcatcactacgggaggatcggaggccgtgctttttgcctttatgagttgccttaatccgggggatgaaattatagtacccgaaccggcttatgccaactatatggcgtttgccatttctgccggtgctgtaattcgcacagtgactaccaccattgaggaaggtttttcactacccaaggtggagaagttcgaagaattgataaacgagcgtaccaaggctatcctgatatgtaatccgaataatcctaccggttatttgtacacgcgtcgtgaaatgaatcagattcgtgatatggtgaagaagtatgatctttatctgttttctgatgaggtataccgtgagtttatttataccggttcaccttatatatctgcttgtcatttggaaggtatcgagcagaacgtcgtgctgatagattctgtgtccaagcgttattccgagtgtggcatccgcatcggggcgctcataacaaagaatcctgaagtgcgcggagccgtaatgaaattttgtcaggcgcgtttaagtcctcccttgattggtcagattgctgctgaagcttctttggatgagccggaagaatacgcacgcgaaacttatgatgaatatgtggagcgccgtaaatgcctgattgacggactaaaccgcatccccggtgtttattcgcccattcccatgggagctttctacactgtagccaagctaccggtagacgatagtgaaaagttttgcgcatggtgtttgtctgagttcaattacgaaggcgagacagtaatgatggctcctgctgccggattctatactactccgggagcagggcgcaatgaagtgcgtatcgcatatgtgctgaagaaagaagatttggttcgtgcactttttgtcttgcgaaaggcattagaggcttatcctggaagagtagaagagtaatatgaactggaaactctttattgccaagcgagtatatcgtagcaatgagggtggaaaagaggtgtctaaacctgctgtccgcattgccatgttgggcatagccatcgggctggccgtgatgattgtgtctgtagccgttgtaatcggtttcaaacatgaagtgcgcgataaagtgataggtttgggttctgatattatgattactaactttgatgcccggaaatctttcgagaccattcctattgtagtcaatgacagcttgctgaatgtgctttatgctacaaaaggggtaaagcatgtacagcgttattctaccaagcccggtatgattatgaccgacgacagctttcaggggatggtgctgaagggagttgccggtgactacgattgggactttttgaaacagcatttgctggagggtgaaattccggttttctccgacacggcttccaccaataaggtattggtatcgcgtagcattgccgacaagcttcacttgaagatggacgataaactatatacctattatatagaaggagagaacgtgcgcgcacgtcgtctttccgttgccggaatttaccagaccaatttttctgcatacgatgatttgttcctgataaccgacctctatacggtgaaccgtttgaataactggaaaccggagcaagtgagcggactggagttggaagtggccgatttaggttcaatgaacagcgtaaaagaggagattcgtgaacgggtggatacacaagtggatgaatatggcggaacctattacactcagacggtggaagaggccaatccgcagatattcgcgtggctcgatttgttggatatgaatgtgtgggttatactgatactgatgaccggagtagcgggtttcacgatgatttcgggcttactcattattatattagagcgtactaatatgataggcatcctgaaggcattgggagcagacaaccttgctatccgtaaggtatttctcagtttttctgtttttctaatcggaaaaggaatgttatgggggaatatcataggagtatcgttttgcctgttgcaatcccaattccatattttcaagctagaccctgccacttattatgtaaatcgagttcctattgaatttaatatttggatttatttgttgctgaatgtttgtaccttgttggtatcggtgctgatgcttatcggaccgtcttatttgataacacgcattcatccggcacggtctatacggtttgagtaatcgtaaaattgatttttatctctcactgctctcacccttattcctaaacaacgatgcacaggcgttttagggtgtgagagatgggggtgagaaatgctcaaagggtgagagcacatttctcagctttggcttaaaacgtattgaatttggtttgtttggtggaagtgcgttagaatccataattgttccggaaggagttgaatacataagtttctatgcttttggatattgcaaaggattgaggataatatatcttccatctacaattaaatcaatttgggtaatcctataatttatgttcctaaaggttcaaaagagctctatgagaatgcaaattattggaaaaattatgaaatacgagaagaatagacaatgaaattgatcaatgggttatgtcaggctgtatcttgatataactttaatattcattttaaaaggagttgaaatgtatacaattggttataaaacaaagccaccctattcgaagtggtatttctcaataaaagaaaaaccgtaataaatcagggcacgaacaagacattgcattacgagagattgatacagactacattatgttacatatctgaggctgtatataagtatgtagataatttgttgcaggagttatatgataaacattagcataaaataatgtttaaaaaaataataacagtgtcctaggcttgagggcctgcttgtaagataagtggttttcggttcttcgacactgttcaagttgttaatttttaatcgcatttcgttccatctccttgtttcatctttcttacaaatggaatatgaataaacgactttattgttgttatccggataaaagtgttgtgtgggtacacttttatccactaataccatacgatgtacatttcgatagaaagtaaacttactctacatatcctccatgctcagtccccgatattccacagaatacccatttagctctttttgaatggaagcccctttcagcatcaatgcatccatcttgatattctgtctgttccgcttgatttctgcaacaactgcctttttttcagtttcatctaaagcgatcaggtcgatttcatcctctccctttctattccaataacctcccaaagcggtaaattcgcctttctcgcgaaatctgcacttaaaatattcttccagagcatgaccactgaaggtaggatagtcccttatgatgatttcctgtagtttctctaatgcacccgcctcgatatagcgaatatatttatagaaaaaacggaaccagaagcggagaaaattgtcttctatttcgtatcgtacattgcggctttctgctttgctgaacatgggaatgcgtttctttatgatattgaaatcgttttccaaacgggttagatatcctccaatttcacgttgtaaatagctttctatgattgtcctagctgtgaagccgttggctatgcatgataagatagagaaatagatggtgtactctttgccaaattcttcgattaatatattcttgccttctgaaaggaaaggagaattttcctgacacatcaactttatcattttatgatgtgtcaaagctttgttatcaacgaataattctacatattttgctactccaccggtgaaggcatagaatgctaataaatcctcggaagtgtatccggggttattctctgataatatttgtttgagtgtgatggtactaaaaggcttcaggaaaatctgttgggtggctctgccgaataacggttcatgattgccttcaaaaattcgatgcattaatgaatagatggaaccgcataggaataaacaaatgtgactgtcgtctttatttctatcccaaagatgctgcatatcgctgtaaacagatggattgattgtataaaattcctgaaattcatcaatgactaaattgaatttcattgttttagaatagtccattagcagttggaatatagttttgaagtcttgaatttcaccataaatgggtaaccggagtactgaagttatttcatctataaagtcacggcacaataatggctcggctttacgggcaacgaagaaatatagggtaggagtatcttgagtggcatgaaatagaagtttcgttttcccaattcgtctgcgccccatcagggttaccatttgagcattctcgtctgcagcttcttgtatattagccagcaacttaatttctttttctcggttatagaacttcatattatcaatgttttaactattatcgaaatgtacagttccgaaatggacatttcggaactgtacatttcgatagttgcaaacatactaaaataaaaagagttcggcaacgtttggggatagaaatcggagtaatcctgttaaatttcgcaatgaatgttcttccgtttcttttgcaggcagtgattatgtggaggaggaactaccgtttgcatcacatttcctgccggataaaattaatccgggctttggcactattaagtccaaagcccggaactgtttgattgaattcaggaggggataccctcgaattagaattcaaatttttctaatttcatgttgcccaattcctgcaatttaggaaccaaagttacaaaatgtgctgctttttcgtgtgcatccagtgattcggcatctttccatgtctcgcaaatcataagtacatctttgcgtgttgcactctcgaaaacatcataagcaatacaaccattgtcatttaaagattgtgctaccaattcctttgccgtttctaaggcagcattacggttactttcgtttacttggataaaaacatttaatctgatcatattcgtattatttaataatataatgtatatctggtttcattctctttttattttctcataaactcatttttccgtctgagcttgcgttgtagtttaaataccccattccatatgggttgaagaaaatcgaatacagggagtaatgcacagaacttccgttcgccaaaggcttgggcggtttttctgaaaacaatcagttgcattacgaaacgtgctgcccacaacaaaatggcaatacccaaggtggtccattgatggagaagaataccggtgattatagtagcgatgatagccgcataaaacaacagtctgctgcaagtctcgaatcccatgatataacgagctgttcccttgaacaaccgactggtagccgcatagcttatcttctcttcacaccatatttttttatatttaggcattgcgattcgcatcaggctatcggagccggtctcgactcgtgtattgtgtgcatgggccgtttcattgatgaataaatcatcctctccgcgttgcagattcagatgggaggcaaatcctttttgtttgtagtacagtgttttccgataagccaggttccgtcctgtacccatatagggatgtccggatagggccatacctaaatagcgcatagagttcagcaacgtgtcgaaagtgattttcttattcagccatcccggtactttttcgtagttactgtatcctaaaacgatttcggtggcaggtgtgaaattgcgtgccatctgtttcagccattgattactttgcggacggcaattgggttcggtaaacaccagccattcatgacggctggctttgatgcccattgtaatgcccaattttttatggctgatatagcgggcactgtcggggataaaagtatgatagaggttaggatatttgtcttccagtaatttcaaggtatcgtcacaatcatctgccgagcggtcataaatcacaatcacttcaaattccagataatcttgctctaaaatgaatggaaggttttcctgtaattcatcagcagcatcttttgcaacgatgatgacagacagtggaggattttcggtatttacatcagtggtatatactgtttccttgttgtgaatgtatagtttgttatataatcccaaatggtaaatagcctgtgtgataaacaggattcctgaagcagccggtaagattgtatctatggtgaatagttccatgcttgatttgtattaaaaccatgcaaaaatacagcaaataattggattttgagagcatagatattcttcttttatccatttccttctttttaattataatttaatgttaaaagactaatcagatgaacatttctcaagaattattgctatattgggattacttaactataacaagtcctgactaacgggcaattattatgagaatacaatttgagattaaggaaagtttggccaatatacttgaccagcttacgcattctgatttttgggctacggagattaaagaagatgagtcaggaaagaaaattattaaaattaaagacttagcttataatttagaagccgtagcagaggtaggggataatgaaatatttatccgtacagctttgtctaagtatacttaccgtatatgccaagtaggggatgaatgctggtgcgaatatgtgggagcttatcgtggattgttggaacagaagcttttgcccatgattactcctaaggagaatttattggagtgtgaggtcttggaaagttcattgttaggaggtaagcccaagacattacgggaatatgcagaggataatttgaagttgaaaaaatttcgtgagcagaattttggaactaatggcttttctaaagccgatcatccgcgtcgggtatatgatgagtttattaaagaagatttcatccctgaggataaataaacaggaaaagagtttttgtgtcttcataattcactgaataaggctgtctcggaataaaataggagacagccttttctttaattgtatgttcatcttttataggatgtcactccgatgttataccaattcttccgatgtatatgcttgaggtaatgtgcggcaattataagccgaagccataatttcaccataagcacctgccgagcgaagagcaaacaaatcaccgcggtgaactttattcaagtcgatagctttgccgaatacgtcggaagactcgcagatggggcctaccacatcgtatgtttcgatagcttcatccgaagtgatgttttcaatcttatgatatgcttggtagagtgcagggcgaatcaggtctgtcatgcctgcatcaagaatggcaaattgtttgtttgttccttgttttacataaatcactttactgatgaggcttccacattgtcctacaacggcacgtcccagttcaaaatgcaaagtttgttgcggacgaagtttcagatgtttgtgataagtggagaagtactcggcaaagttgggaatcggctgacggttcgggtgagagtaatcaatgcctaagccaccgcccacattaatatgctctacaatgatttgacgtgcatataacttttcctgtaactcattcacacggttgcatagcgctacgaagtcgcccatatctactatctgagaaccgatgtgaaagtgtaagcctacaaactttacgttaggcagcgtttctgccatgtcgataactctgtccatatcttccatgctgataccgaacttattctctgccagtccggtggtgatattggcatgagtatgtgcacctacattggggttgatccggaaagctactctggctactttgcctttagcggcggctaattcgttgatgatttccagttcgggcacagattctacattgaaacagaaaatatcataatccagtcctagattgatttcccaatcagttttaccgacaccggcatatacgattttatttgtagggaaccctgctttgacggctgcacggatttcaccgccactcacacagtctgctcctaaaccattttcacggataatagtcagaatcttgtggttagcattggctttcactgcgtaatgcacgcagaagttgttgtatttgcctgcttctttattgatgcacgacagtgtttcgcgcagcacattgacgtcgtaatagtagaagggagtctccaactctctgaacttgtttacggggaatgttcctttcatattgtattttgttattattgagcaggggcgaattaaattcgcccgaaagtatctgctttttcagagtagagatacattcggacggattcaatccgccccttcgatagaaattatttattattgaataaatgatcgcttaatgattgtaaggccttatttttatcttccttgcgaattaagaaagaaatattgtaattgctgccaccaaatgaaatcatacgtacaggaatgtcgcgcatggcatcaagcgcttttgcttcaaagcctacgttttcccattccaaatcacctactacgcaaatgatacacatatcgtggtctacagttacagttccatatttcttcaggtcatccaagatttcgttcagatgtttggtgttatcgatggatacggaaacacctacttccgaagtacaaatcatatcaatggaagtctgatagctttcaaagatttcaaatactttgcgcaagaaaccgtaagctaacaacatacgacccgacttaatcttaatggcggtaatgttgtcttttgcagcaacagctttaatcttacctttttccgtatcgtttgaaatcagtgttcccggagctgtcggttccatcgtgttgagcagacgtaccggaatgtttgcgtatttggccggctgtacgcaggtggggtgcagaatcttggcaccgaaataagccaactcagcagcttcctcaaaatgcaattgacgaaccggggttgttttgtctacaatacgcgggtcattgtcatgcataccgtcgatgtctgtccaaatctggatttcagaagcattgacagccgcaccgattaatgaggcggtatagtcactacctccacgttgcaggttgtctatttcaccgtaagcattgcgacagataaaaccttgggtaatataaatttcggctcccggatgcatttccagttgggcagccagtttttctttaatgtaaaccgggtcaggttcggagttcttgtctgtacgcatgtattccaatgccgggagcaatacggcgttcacgccttgttcctgcaagtagttggtaaccatgttggtagagattaactcgccttgtgccaaaattactttttcttcaaacagggtgaagatatcttttgtatacgaacgaatataatcgaactgtgcttttataaattcctgtgttttctgtttatactcgtcagtagaataaagttcatcaacatgctgtttatatttagcttccagcttattaatgatttcattcgcaccttcgggattcttcttatacagataatccgaaatttcaaccaacgtgtttgtcgttcccgacattgccgagaggacaacgattttctgttcaccgtcagtaattaatttggctacttctttcattctttgtgcagaacctaccgaagtacctccaaactttaaaactttcatttttcgtttcgtattttaattgttcctataattgataattagcgtgcaaatatacgaataagactgcaaagaatcagtattttagcgataatatttatcatttatccatttattctgtggcttatatggtcacatttgttgttttttcctctgtttcttgttctttttctctttttattgcacggctgtattcgtttgtaacttctttgatttgatggttctcgaagcggtaaacgataccggggtattcagacagcagatgcaggttatgggtagtcatcatgatggcagaacccgatgcgcaaatagacttcagaagctctacaatctggcggccggtctcagaatccagatttcctgtcggttcatcggcaagaatgatttcaggacgattcaggatggcacgggcgataacgatacgttgttgttcacctcctgataactcattgggcattttataacctttgcccgtcatgcccacttgatccagcacttcatcaatgcgttcttttattgcaatcttattgctccatccggtggcgcgtagcacaaaactgagattggaatgtacattgcggtctgtcagcagttggaaatcctggaaaacgattcccaatcggcggcgtagttgggggatatgcttgcgcttgatattgctcatattgtaacctaatacttctgcgtcgcccgattgaatgtccaactcgccgtaaatggtttttagcaatgatgttttgccggaacctacttttccgatcaggtaaacaaattcacctttgttcagttccaggtttacatcttccaacacaccgagttcttgttgattgatgtttacgtttttatatcgaataagcggttcatccataaggcattaatgttttttccagttggcgctgtgacgttcttttagttcgcgtgccagatcttcgatgcggtatccttttgatgtcaggagaacgataaggtgatacagcagatcggaaccttcgtatatcaagcgttcattggttccgttgcaagcctcaataacggtttctacggcttcttcacctactttttgtgccattttgtttacgcccgattggaagaggctggttgtgtaagatccttcaggcatttcttcatgtcgcttgtcaataaagtcttgtaattcttttaagaacatgatgtcctgcttgttttcttctccccagcaagtatccgtacctgtatggcaaacaggacctgcaggactgacctttattaataaagtgtcattgtcgcagtcggctttgatagagattacttgcaagaagttcccgctctcttctcctttagtccaaaggcggttcttggtgcggctgaagaaagttacttttcctgtttctacggttttcttatatgcctcttcattcatgaagcccagcattaagactttttgtgtgtagtcgtcttgtataatggcaggaattaacccgttcattttcttaaaatccaattccatttgttttatattttaattctaattttataatctgacattgattccttgttggcaaagatactgttttaattcgggtattttgatttctccgaagtgaaaaacgctggctgcaagtgccgcatcagcttttccttcgataaaagtatccttgaaatgttccatttttcctgcgcctcccgatgcaataacaggaatagtgagtgagtcggagagggtggcaagtgctttgttggcgtagcctgtctttactccgtcgtggttcatgctggtaaaaagaatttctcctgctccccggttgtttacttcccgggcccactcggacagatatttgtctgtctctactcgtcccccgttcagataacatttccacccttggtctgtctgtttggcgtcaatagctactacacaaacttgcgaaccgaaatgtttggctatctcgtctatcagattgggattgcggatggcggatgagttgatggagactttatcggctccggcgctcaacaggcggtctacatcgctgagttcgttgatacctccgcccacagtaaacggaatgctgatattggctgccactcttttcaccaagtccgtaaaagtcttgcgaccctcgtggctggcagtgatatccaaaaagaccagttcatcagccccttgttcactataagcgcggcctaattcaacagggtcaccggcctgacgcaggtttacgaagttggttcccttgacggtctgtccgtccttgatgtcgaggcaaggaataattctttttgctaacataatttgtctttacataaaacggttcaactctttcaaggtaattttgccttcgtaaagagctttgccgaacactactgcaggtactttggctatctctaattgaatgatgtcctcgatgcaactaactccgccactggctatcaggtgcatatcaggaaattcagcaaggatttgtttgtataactctatcgagggaccttccagcataccgtcacgactgatatcggtacatagtactttgaatactccttcctttgtataatctttcaggaaaggcatcagctcttgtcggctttcttctttccatccgttgatggatattttattgtctttcacgtcggcaccaagaattattttttcgttgccgtattgagtcaaccattttttgaatagttccggttttttcacggcaacactgcccagggtcaccatttgggcaccgttatcaaatgcaatgattaaatcttcatcggttttgatacctccgccgaagtcaatgacaagcgatgtgcggctggcgatttggtcgagtacgcgataattgactacgtggtgcgaagcggctccgtccaaatcaactacatgcaagcggtgaatgccatgcgcttcaaactctttggctacttccacaggattttcgttatacaccttttgtgtgttataatctccttgtgacaggcggacacattttccgtcaatgatatcgatggcaggaattaattctatcataacttttttctttagtatataatataatgtatcatagttctaaaaagttccgcaatatccgttctcccactgttccgctcttttcggggtgaaactgtgtggcataaaaattatctttatgcaatgccgaactataggggaggatatatgtagtttgtgctgctgtaaactcatttagcgggacataaaaactgtgtacgaaatagacaaactcttctttggtgaatcccttgaataaatcgcttttcacatttgtcagtgtattccatcccatgtgaggaaccttgtctgtatgtcgttccgggtggaaaagcttgacgtcggtatcaaaaatacctaagcattctgcattaccttcttctgaatggcggcacatgagttgcattcccaaacaaatgcccaatacgggttgtttcaaatttttgattacttcatccagtttatgctgccggaggtaattcatggttgtggcagcttctccaacaccggggaagattattttatctgcgctcatcagcgtttccttatcggaagtaatgatagcttctacccccaaacgctttagtgcgtagtccacagagtagatatttcctgcattatattttacgacagcaattttcatcggtaaaagatcatcgttttatttttataaaccattccttttaattcaatatgtttctgcataatatgagaaaggatggtttttatctatgatatgtgcgcaaaaatagcgaattattgcagattagcttcattttataacaagaagtttgagaaaaagattaaaataatagcaatatcgtaaatcggacgaggtatcagtcggggagttctttgatttttttgtgcattttctaccgaaaagcttgcagattaaaaattaatgcgtacctttgcacccgcaatcgagagagatggtgaaataaagaaagacaaatctttgaaatattggtgcgctagttcagttggttagaatacatgcctgtcacgcatggggtcacgagttcgagcctcgtgcgcaccgcttataaaagctctaggattctttgagtcctagagcttttatttgttgtatgctcggcacgaacatattctaacgggtgcaagtcttcaatgtgccctgataacgagaagcatacagccaactgcaagagtaagctgttttttactgtcagccaaggctttttaaacggaagattattacagtccactataatagattgtacagtctgctgcaatggactgtacagtctacggcaacggactatacagtccattgcggaagactgtagtaattcgactgatggacgggtataatcgaaaggatgaacacgcttagtccggctaatgaaaaggcttagggagtgtcaaaactaaccgagctatcccatcgtgggctgtaggggcagggtttgcctgtccgaaggcacaaagtaaactgttttcgggcgagcgaacctcactcctgcgaattgaacgatagcattatccacgttttaggcaaccctcattttaaatgagaaaaagttgctgttttcttttttatatgctgttttttgtgtatattgagagcaaatcaaaacatatatatggaaatagaaacagtgggagaaaatgccggcaaagtctggcgcaacctgaatgaaaacagaggtgaaatatctattcaggaacttagtcggaaaatgaacctcagcgccattgatgtcgctattgcaataggttggttgtgtagagagaacaatattaatattcagaggaaaggtcatttactctatgtaagtcatttaggattctgattaatctctcaataataaacctgttggaaagaaaataacttgaaaggctgcctgtaatgaggtagccttttcaatgaaataaagaggtaaaagaacctggcttattgaagccaatgtttgtttttccaccaataaataatgaatcggattcctgtaccgattagtgcgagggaaagtcctgtatagaatacggcaatgaaagattcgggcaacagatggaacaggcgtgacaatatgccgattgtaatcataaacgccatcactatccatccttggacatcaaagaaagaaaaaggacaattcttttttttcttttgactgatgcgatgtgtgtgctttctgtatagtttccgaaaaatgaagccaaagaacaggagaaaaaccagagtagcttcgcatgctttaaacagccaataatgcgaatcgtttatccagcattccacgccgattcgcaatatattgatgccggctgtcaaccaaattatgccggcagtaatgagcaatgtatttttactgactccgtacttcatccttattgcttttctttttgatgcacgtatgccaatgctgcacccaaagcagttctgtattgggcatattccggtatcaggaaatggcattggtacatgtcttccatgatgggaaaaacttctttgcattgtggcagctttgccaggttgcctattaaaacgaagtctttgatggaactgttcaatgctgcgagtatcacggattgcccaatggattgcagtaccatgtgaataattcctgccgctacatcttctaaaaatgaattactgtctgcttttccgaaagtagatgcagtagcattcaatggaagtcccggcagggcagcattgcagatatcctttatctgtaaatctatgttttccactattcctttttgtgccatttctaccacttggtggatgtcgtgtgtctttagcaataatctggatagtccctgaatggttcctccaccgataccgatgccgccgatatgttgaatctttccgtcctccactttgacgaaagaagttcctgtgcccatacttacaacaatcagatttttcagctgcgaaccataatgtgcacctaatccattggctagaaactcatcggtatgttcggtaggcaatccgtaaagcggttggttgacataagcacttcccactcctgtgagcattactttttctattccgctcaaactaatgttgttgtcatatatatatttcccgaaagctccaaatagagaggtgatggggtctgtcgctttgacaatcatcggatgtttgattccttctccgtccacaccgataattttggtagtactcccacccacgtctatacctataaccattcccatagctatgtgttttttttagttttttgaaaatagagtgcaaatatagatatattcattataacaaaaagatcctttttcatagaaaaatagagataaccgggttttattaccaattgtctgtacggaaaggggctgtcggcaaaccggatagtccgtataaattcccatcgggattgtcagcccaattgtatctgacagctaccggatggggaacatcgggtgattctactattatttcttttttctggatagttactgtagccggatagaatatatggtctgcacctgcaatgataaaacctttgatggtgtctggtttcataaagccttttcccggattatcaaaaccgatgcgtattgtgtttccttctatacgatagcttttgaaaagaggtgattgtggcatccttttctttttatatgtttgtttcagggcaagttgggacaagcgcagtcctacttcctgcttgtttttgggatggatattattggcttcgcccaagtcggtggtcacggccatgccggtgttatttagataaagggcttttgattgtgcttctcttaatgcagcccattccgagtcgggttgtatctcctccttcttcagaaaattagccagttgtacgaagtagaaaggcatgtcaggctgtttccatttatcacgccaatcagatatcaatgacataaacaggtcggcatattcatcagcccggcctacattggcttctccctgataccaaatgactccccggataggaattttggtaatggggtgtaccattgcattgaagagggtagtggggtattgaggattggtcttgggcgaaggaggaagaggttctataccagccaatgaaaagccggataaatacttccaatttccagctaatgcgacaggatctttacccttgactgtcattgtcatattttccggtttcccgatgagtcccccttctccggcatagtttgtcacacgtacggtgagaacagcttttccccgttttactaactttttggggacagtgtaccggcgcacggcgtcacggttgcttcctcgtccaatttccacgccgttataatagactatgtcttcatcgcttatcttgcctaaattgattgttatcggttttctgtaccaagtgcgaggaatatctacagtctttctgaaccacattacaccatcaaaatcttttattccattactttcccaacttcccggtagattcatttctttccaattctcgtctgaataatcaggttcagcccatacttgatggtcatcacaccatcccatatcatgttcatacaaagcttgataccatgcttctctcttcttggcatactctgcatcaatcttttcgggttggaatcccaaagattccagcatatccatttcgtgctcaaactcttgtaagtgcttcaatccgttataactagtccatgcttcagcaggagttcctccccatgaacagtctataacaccaattggagtttttaacttctgttgtaactggcgggcaaagaagtatcccacagctgaaaagctatttacactttgaggagtgcattcctgccattctccttgtgtgggacttaagtcctccttcggtgtcagtgatgtctctttttttactttaaataaccgtatgtcaggataagtcgcttctcttatttcattttcatagttcaatacttttccccagtcgccgaccggcatttccatattggattgtcccgaacagagccaaagttcacctatcatgatgttgtgtagggtgagttcttctccatcacaaaaactaatttcgtagggtccgccggcagagggggtagagatttctgttttccaattcccttgcttgtctgtttgggccatatagatatgcttgtcccagccggttatcaccataacctcttttcggttcgtcgagtgcccgcgaaggattatatctgacttttgttgtagtaccatgttatctgtaaatagagcgggtaatgtcacttttgcctctgttgtacaaaatgttgcaaacatcccaagtgttatcattagttttttcatgtattttcaattattgttgcgttatttctataattaatacatcagtgattatagtctgtgttaatgagttctctgtctttaaatattgtttttaccagcctatatgccatttctgtcaatagaatgcccaatgcagctcctactatcacatctattatccaatggcgattattgagaatacgtgtcatgccggtaacaatagcagaagcgtatgcaactaaacttacccatattcttttaaatccatattctttgtaaagtagagtggctgtcatgaatgcagtagctgtgtgtcctgaaggaaaagagaaaaagttggactcgtcaggacgtaaaactccgcatgctaatttcagagaatttactaccagttgggtgaagataatggagagcacgataaaaataagaagtcgtttccattcgaatcttccttttaccccacctagttttaatccaatcaggagaatacccggtaacaattgcaggtaattatcatagctttgatgaaagagaggagcatgtgtattgcgtaattcgcgcacataaaggttgatattctcaatggcgggatgaaggaagccgtttgctccccatagctgtgcagctatgataatcagaataatcatataaaaggatatgaatatgaccggtctgtatcttttcatattttttctatctttaggtaatacttgtcctgtcagaatatgcctgaaaatatgtaattcttcctccttgcagtctttttgatacgttagagggttttatttatccagtaactttagatagtgtccgtatccttctgctgccattttttccttaggaatgaattttagggatgcactattgatgcaataacgcaagccgcctttatcggcaggtccatccggaaaaacatgccctagatgcgcattaccggttttgctccttacttcggtgcgaatcatctcgtgagtagtgtctgtcagttctttaactaatgtattgtcgataggtttggtaaagctaggccatccgcagccggaatcaaatttgtcggtagacacaaataagggctcaccggtagtaatatcgacataaatcccctctcgtgtttcgtcccaatattcattgtgaaatgggggttcggttgcattattttgggtgacagcgtattgttcaggtgacaatttgttgcgcagggtggcatcgcttggcttcttataggaagggatggcattggcacgtcgtgccaattcaaaaagtttaggattaaggtgacaatatccatcaggattcttatccaaatagttctgatgatattcttcagcattatagaaattcttcaaaggttctacttcaagggcgagcggacgtgaatactctttggccaattcgcagacggcattttggatgatggttaaatcagctttatcggtgtaatagataccggtacggtattgagtgccttggtcgtgtccctgcctattgatgctggtagggtcaattgtttgaaaataaagattgagtaacagttcaagactgacctctcgcggattatacacaaccttcacagtttcggcaaatcctgttttatccgtacaaacttctttgtaagtcgggcttgcagtgttaccattggcataacctacttcggtgtgttttactcctctgatttgttttaggaaatgttcggttccccaaaaacaacctcctgccaggtatatttcactcgttttttccattttagtttttggtatttggcttataaaaagcatgaaaacaaaaataacatatttcatacaatggctataacaatcggatgcattttattgttgtagtctattgagtttctaatgcaaagttagaactaaattcacagaacattgttatttttaagactaaatgtttttactattatgaaaaagatattgatcggcgcactgttattgacaggatgtgcattgccggtaatggcttgtaccggtatttcggcgactgcaaaggatggtggttatgtacaggcgcgcactatagagtggggggatagctatctgcctagtcagtatgtggtaattccatgcggacatgaaatgatatcctatactcccaaaggaatgaatggggcaaagtttcgtgcacgatatggtgttgtgggactttccattgtattgaaggattttgttgttgagggtttaaatgaagcaggactttcagcaggactgttttattttccccattacggaaattatcctgtttatgacgcaaagcagaatacacggacagtggccgatttacagttggtagcgtggatgctttctcaattttcgacaatagaggaaataaaggctgcaatgcaggatatacgtgtagtgtctgtagatactaccggagcgagttccacagtacattggcgaataggcgatgcaaacggtcggcaggttgtgttggaatttgtagatggtgttccttgtttttatgagaatgaaattggcgtattgaccaattcgcccggtttcccttggcagatgaccaatttaaacaattatgtgaatctttatccgggtggggcagaggcacatcaattaggtggtgtaactatctttccatttggtgcaggtagtgggtttcaaggaatccccggagatgtaactcctccttcgcgttttgttcgtgctgcattttataaagcaactgctccacagtgtgctactgcctatgatgctgtattgcaaagttttcacattttgaataattttgatatccctatcggtatagaacatgcagctgggcatgcgcctatgattcctagtgctactcaatggacttctgtcattgatctgacaaatcgtaaagtctattatcgtacagcatataatagtaatattcgttgtattgatatgaaacagattgatttcagtaaggtaaaatatcaggcttttcctttagacaaggagttagtacagccgatagaagagataattgtaaaatgagaagcgaagaataaaagctatctttttagaaaaaaagtttgggaaatgtttgcaaattcaaaaataagccttacctttgcactcgcaattcggaagaatagcaataacaaaggattgattcgctagctcagcaggtagagcacaacacttttaatgttggggtcctgggttcgagccccag

SEQ ID NO: 6655 - DNA, 43333 bp, Unknown
  gut microbiota DNA sequence
aattcccccaagttttcaaactgagccataacaaagtccgggctttgtacataaaaaaagattgtgtcaaaatactgacacaatcttctttttaattcttttttttgtaggggaccgaattatgcttccacagccggaatgatagatactgatctcttatcttcacgacctactttaaaacatactgtaccatctaccaaagcgaaaagagtgtggtcacgacccataccgatgttgttgcccggatggaattctgtacctctctgacgaacgatgatgtttcctgctttacaagcttgtccaccaaatatcttaacgcctaatctcttacttgctgattcacggccgttcttagaactacctacaccttttttatgtgccatttcttcttaaaattttaaatgattaagcaataacttgtttaatagttaactctgtaaactgctgacgatgaccgttcagttttctgtaaccttttcttctctttttgtggaatacgagtactttgtcgccttttaccagcggagaaactacttcacaaactactttagcaccatcaacagtaggagcacctacagttactgttccattgttgtctaccaacaaaactttttcaaactcaacagtttttccgctttctgcatcctgaatgtggtgtacaaacagctttttgccttcttcagctttgaactgctgaccgttaatttctacaattacgtacatgttatttttatattaaacgggttttctccgtaaggtggacatcatctctgaagtctcttttcgacctccacggactaaatcgggcacaaaattactgatattattttgaacttcaaaaactttctgctctttttttattcaaatcatatactcatctttttagtatcgcctatctgaggtaggcaattgttgcaagtaatgtgatgaataaggttgccgccaatagcataatcaatgcacaatagcagaacatgacggtagttcgtttgaagcttttccaccatgacaggttgaacagctgccgatagtcccatacgaacaggaggaagatggcttcatagctcaaatcgaagatgtcattcaggtgggcttcccgggtgaaaggcaggatgagaagggatatccagagtatctgacaggcaatatatacctgtgcaaagaattgttcggtcaggttaaaccgatgaccgacaagagatttgcggaaactccatcggcttgccaatgtgaaaaccggtagtaaaagcagtatactgaaagctttatttccatgaatccaacttctcattaaattgtaaacggctgaaatatatttgttttcgcttaggaagttctctttatattcgtctaatgctacaccgacagctataccggcctctgttaaatcgtcaacaatgtcatcgttgtcgtcggttgcggttcttgtattatccggcttgtctttcaattttacgtttattttatcttccatggtgatgtcggtatccgctattcgggcgctgtcggcatagagcagactttgtcccaaatatatccgggcactgtctttgatggcatattctttctgctctttgatattgtctatcagttgttcgtatgtgggagtttctttgtattctttatctctgtttttcagtgcctccgggtctatcagctggacaaacatgatataaagggcagccagtacaaacaggctttggaatggtttgaagtaatgcactcgttttccatctatataatctcttatcatatatccgggacggtagagaaattccagcaggttgcggctgaatccattatcgatattgaaaaatccgcttaatatgttctggaaggcgttgcgaatagtgaagcgtggcgtattttgtgtctgtccgcaatcgggacagaagttgccttgaaacgtctttctgcagttcttgcatgtgtggggttgttggtctttgggcagttctttctttcctctgatttgtttttgatgaagaagccggtaatagatgagggctttatggggcaccaaccgctgaagaaggggaggcgtggtctccttgtttatcagcggcagcagggtgaggtcgggcagaatctgccggtgtcggtattcggcaagttcttcgcgcgtggtcatgccgttcagtacgcctacgaagtctactccggctaatagggcggtttgtgcgtcgatgatgctgtcacctatatataatgtgtcttttttcttgcgatgcaggcagcgtagtgctttcagaagtccttgagggcttggctttgcctttttcacatcctctccgccgatgatgatgtcgaagaatttgtttgggaaatgctggtccaccatttcatggatgcggtagcgatatttggtggagatgataccaatttgggctcctctctttttcagggctttcagcactgcaacggtttcggggaagaacttggtattggcggtcatatgtatgtccgcttctttcacatattcttttttataggagatgagtgtatttttgtcggtgatgccggtcaggatgctgaatgagtcttcaagtgtttttccgatggtgcgtttgatactttcatcggttatatcggtgtgtccgtggcgtgttaacacattgcggaagcaaattacgattccacgtgatgagtcggccaaagtatagtcgaagtcaaataaataagtcttgtattccattttgcgcttttcaggcaaagatatggaattaatagatgaattttaaaatttttcggaggaaataattgtttattttataccggatacccgaccgcctgaaagccagtgcttgcgataatactcttcattcaggctactgacaatcactccgcgactggtacttgcatggataaatttattatctttcaggtagactcccacgtggctggcagttcttttcttgcgtccgttgtggaaaaacaccaagtctccttcgcgtagtttgcttttgcttaccttacggcagtttttggtacgctggtcgtcagagttgcgttccaacttcttgcgatagacttttttgtataaatgcgaagtcaatcccgaacagtctatgcctcttttattgttgcctcctcctcgatagggaactcccaaccactttgctgattctacatacaaccgatggttatctttcatgtctatatctatgtttagacgtatagaggcacgtgccagttctttgtagttatagcttggggcagatgtgccacatgaagccagtagtacggctagtatgttcagtatcagcaaatgggagaggagtttcttcattgttctattcttcttttatattaaaatagtcttccaattctttttcggcagagtaatcgtgattatcaatgtcacgaataatctttccgttttcaagtaatgcgatgcgtggacagatatcgactgtatgattcaggttatgacttgaaatcagaatagtcgctccggtttcttcatggtaggctttcaggatatgtttgattaccgattgtgaagtgggatcgagaaaattaaacggttcatccaatatcaatacttgcggttgatgcaacatcgcggagataatacctattttctgcttgttgcctgccgagtagttgcggataagtttcttctgtccgatcacttctccattcataaagcggttgaacttactaatccgttcatctacttcatcttttttcagaccatacattttccctacgaaatggaaatattcttcgggagtgagataatcaatcaaaaaactgtcatcgataaatgctccggtcacgtttttccattcttcactcttgctcacattgaaattgccgatgcatatgcttccgctgtctgctttcagcaagtccagtatcagtcggaacagggttgtttttccggcaccgttgttgcctaccaagcccagcatgtcaccgctttggatggtatagttttctatatctgcggctactttcgctccgaagttcttttttagttgctctattgtgatattcatatattatttattttatcgggaatcacgaaaaccttccatattgtcatagcggcgtttcatgaaacggttatagatattctttatccaaatggtatgggttacagtcaatgtcagtcctatgagcatcatgatgataaatgccgtgttctgctccaagaaagtggtcaatgtagagttgactatcagtggcatgaagagggcacatgagataaggaagctttggaatagcgaactgcctctgttgctgcgcattacattggcgttcagtgggagcgttttcttattgtagactgccagttggagcagggtaaagaatactgctcctacggtgaagagcagataagataccgccatcaagggggatattttcccccggatgattgggataatcatgatgagggaaggaatcaacagaatcaggcagttcaaatagtatttagcccgtaacaaattgtatatggattctttgcggctcatcagaccatccagataattcccttcgaaacacatcacttgtcccaatgtcatgacgggcaggatggcaaaattgtagatgcagataaaattggtcattctgtcgtagacatcggtgaaggcaagcacgcatgagaaagcaatcatgatgataaatcccatgcggaactgtgtctttaccgttttgttgcggagatacaacttcagttccaaacgaatgtattcgcctatctcaccataacggtccagaaatttatattctgatacgtgttttatcttcgtatcttccaccttggatatttcgctatagagcaaacgaatttgcaaagtacggttgatgaatatcattagcaggataaggataatgacactcagataggccggcagacttccttcgataaatccttctcccagattcatggtgaaagtgctgatgggattgccttcgggaatgaattcagctatggccaacagactatatacagccaacggaagcaataagtacacggtcttttcgttgagcagcatcttgcataacagataccaataattgttcaatatcatgagtaaccatatacctgtcaggtagcacatcattccggtcattccataaaagcggaagatggaaagaaaagcgaaaggtacgaaaaggaaaaaccaaaagaggttgtaaaggcttgttgccgactgaagcaatagggtgtctatcagtttttttttcttgaccggcataagcagataaggcttgatttcgtgagaagtggcggtttgaatcacaaaacgcactagaaagtcagttattaacacatatattaatccttgattgaggatgtgataaggctccatgcttggagctgccgattcaaaagctgagggcagcgttacccccatcaataagaggagcgctgcccaatatgctaccatgaaatagattaaaaacttggcaaagcggttcttgtcgaacatcggactccgctttgcggcaagtttttcatttcttcttataatcgtaaaaagcataggcaagaacgattattttgtttcaccggaagtcatgctgacttcaatgcaattgttttgttccagcagggctttggcaaactgcttgacatcttcgggggtgatactttccaccacttgttggaagttgctgtccatatcggctttataccaataatattggttcagtatattcaaccaataaccgttttctttcatttgctcggtatgtttcttcagcataaactcttttgttttgtttatgtgttcggcagccggaccatcctgtgctatcttttgcagttcgttcatgatgatttgtgtcatcttttcacgtttggctggatcagtatcgaaatagatttgcaggaaagcttcatcatcattcggataacggctgagttgtccgtagacactcacaccatatgaaccgccttctttttcgcgaacgctctccagatacactttatccaatgattgggtgaggaaagacatcagcacatcgttctttaatgtgtattcgcatttgccactggcgattatcaatacgctggctaatggagtttccagttttttactgaatacgttggtgtatttgcctttgcggatatccatttttgtgtcgcggaaattttcggtacgatggatagttggtaatccgcccagataagtttcaataagtggtttggcttcatccaaggttatgtttccgacaaagaggaaagtaaaatcaccggcatctttgaagcggtctttatacatttccatgattcgcttgtagtcaattttgtcaatcatatccgctttgacgcgcaatgctctcggatggttcatatacattgctttctgcagtgagtcagacaatgcgatttgtggattggcttcctgattggcaagtgcggctttagtgcggcttttgtatgattcaaatgcattttgatccatacgtggagcggtgaaactcagataaaccaactgtagtagggtctctaaatccttaggtgagcagcttccgttcattccttcgctcaggccgtttacggcagtactgatactggcttttttcccggctaacactttttccaagtctacattgctgaagttacccagtccgcccaatccggctacatcgttcagtacttttatctgaagaatttcattgtcggggaacaaggagttaccaccgggactgaatgcgcgcatacgaatttcgtctgctttgaaatctgttgttttcaagatgacacgtacaccgtttgataaagtgagtacggtagaaccgaacggaccttcttccgttttcacaatggtgccggccttcggttgttcagctatcagtggctcatcagataccttatcttcatacgcagtgagtttctctgctttcactttgttgagcacatccataatttcttgttcggtaggatatttcatgccttctttttcagggcagaagatattgaccacaatgttgctgtcatttaccagtgatgggatgaatgagttaattgcttctaccggaatgttaggggcaatttgattcatgatggcatattctgcatcaattcccggaataggctcgttgtcaatgaagtggcgcacatattcgttcacatatgcgttattttttactttatcgcgttcattataggctgattccaattggcgcagatagtcagctttggcacgtgcatattcggaagcagtgaaaccgaattggcgtacacgttctatttcacgtgtcaatgcagagagtgctgtgtctattccgtcttccttgcttacggcaatgccggtaaaggcatccttcgtcttggacaggaagaagtttccgtcttcagttacagcgtagatgaaaggaggttgcggagtttctttcaattcgtttaaacgggcgttgagcatattgtttatcatagacttcatatagttcatgaccagatagtccatattcttcttggcctcgttgggaacgatgtcatgtttatgccagagataaataattgtgttagtttgttctttatccttggcgatagttacgattgcttctttgttgtcaggtacagggaagtacttgcgctcggccgggttttccggcattttgatgggagagaaaatttctttaatcttggcttccactttgtctacatcgatatcaccgacgatcatgataccttgttggtcgggacgataccatttctcataatagtcacgtaatgcctgatgaggaaaattgtccactacttccatcgttccgatgggtaaacggtgaccatatttactgtccggataggctgtgggaagtattttttcgtacatgcgcatcatggctcccgtgcgtgtgcgccattcttcatggataacaccgcgctcgttgtcaatttcttttgggtcgagtgtcagtccgtctgcccaatcgtgcaggataagcagacaggaatctataattccatcgcggatgacaggcacgttgtcaatgttgtaaacagtttcgtctacggcagtataagcattcagattttcaccgaaacgtacaccgatactttccaaatagctgattaatgtttttcctgggaagttctctgtcccgttgaagcacatatgttccaagaagtgcgccagaccgcgctgattgtcatcttccaaaatggaaccgactttttgagcgatgtagaaatcagctcttttttcgggcagattgttatggcggatgtaatacgtcagcccgttctctaatttaccgatgcggacattggcgtccgtagggataggtggcatttgctgggcaaatcccaccgcaacgctgcctagaatgaaccaggcagccactagcttcttaagaaagtgtgtcatagtgttgtttgttgtgggttattgttttttataaaagctcgttggcagagaggtatctttctacctcgatagcggctttgcagccacttcctgctgcggtgatagcctgacgataatgcgggtcggccacgtctcctgccgcaaatactccgggaactttggtgcggggagtaccgttttcggtaatgatataacctacttcgtctgtatcaatgtatggtttgaatatgtcagagttgggcttatgaccgatagccaggaagaaaccgtcgataggaaggtcgtaatgctcttcgttgcattcgcctgcacgtttcaccaaatggacgccttctacaccgttttcaccatatagacctgttgcattgtgctcaaacagcactttaatgttcggatggttcattacgcgtgcttgcatgattttggaagcgcgcaagaagggtttacgtacaatcagataaacttgtttggctagaccggccaaataaactgcttcttcacaggctgtatcgccaccacctaccacggcaactgtttttttgcggtaaaagaatccgtcgcaagtggcacatgcactgactcccatacctgcatatttcttttcatcgtccagtcctaaatatttggcagtggctcctgtagagatgataaccgtttctgtctcgattaccttttcgttatcaatggtgatgcggtaaggacgtttgctcaggtcggcagaagtggcaatacctgtgcggatatctgcgccgaagcgttctgcctgtttgcgtaagtcttccattaattgtggaccactgataccttcgggatagccggggaaattttctacatcggtagtagtagtgagctgtccgcccggctgaagtccttcataaaggacaggagcaatgttggcacgtcctgtatagatggcggcagtataacctgcagggcctgaaccgataatcaggcattttactttctctgtactcataattatttctttcgttactttatatttgttagtttcttaaatcaatcacttcggcatccggatattttcttttatcaaacctgaatgatgcatcatccaatggctggtgggtttgataagaagatacgattatctcgttgaccgttttgttactttgcagtatcttgatatataacggttcgtatgtttttgacacaaataaggtgatggaggtcacgttctgttcttgttcaggagtcaggatgacttcatacccttgcttgccattatgttttttaactcctgtatacttatagttgtaaccgtttttataaagtgacaacaaggagtaaggattaattccttgcaattcctccggggtagggctgcttatgttcacctcgccactgctttccaaataactccattgtgttttcccatcaaaccaactttgtacacctccgctgttcaaatagaattgttctccttttagcagtaatgtaccgttggatgtaccaccgaatacagcacgtattcctccggcatttttcatagccgcggctgtcttgtccagcacttcgcgggcttgtttgtccttttgggcaaacacaccggtcgaaaggcagaatgccaacaccaataaatatatctttttaaatttaagcatgattctactaaacaatttattgttgcagattgttcaatttcatttccaagtcagtctcgtccatgcaaagtacatcacgtgctttacttccttgagtgggacctacgatacctgctttctctaattgatccatgatacgtccggcacggttgtaaccgatagagaatttacgctgaatcagtgaggtagaaccctgttggtgaatgactacgagacgggctgcatcttcaaacatcgggtcaaggcggttcatgtccacttctcctatgctgctttcactttcttcacccacatattcgggaagcatgaaggctgtgggatatccttgttgtttgctgatatagtttgcgatgcgttccacctcgggagtatcaacgaaagcacattgtacacgtacggggtcattgccttgtaagtaaagcatatcacctttaccaatcaactgttgtgcacccgaacggtcgaggatggtgcgggagtccatcatggcagccacacggaaggcgacacgggccgggaagttggctttgatagtaccggtgatgatatttgttgtcgggcgctgggtagcgatgatggcatgaatacctactgcacgtgccaattgcgcgattcgacaaataggcaattccacttctttgccggcagtcataatcaagtcaccgaactcatcgatgataattacgatgtaaggcatgaaacgatgccctttttcaggatttagctgacgactgatgaacttggcattatattctttaatattacggcatccggccttgcgcagcaaatcgtaacgtgtatccatttctatacagagcgagttcagtgtttgcaccacctttgatacatcggtgatgatagcatcttctccgtcaggtagtttagcaaggaagtgtctttctatcggggtataaacagagaattccactttcttcgggtctacgatgacaaatttcagctctgccggatgtttcttatataataaggaagtaacaatggcattcaaccctacggacttaccttgtcccgtagcaccggccaccagcatatgcggtgctttagccaggtctaccataaatacttcattggtgattgtttttcccaatgctatcggtagttccatggtggtttcctgaaatttcttgctgttgaggatagattgcatcggcacaatgcgcggattggcattcggaacttctataccgatagtacctttacccggtatgggggcaatgatacggatacccaatgcagacaaactcagtgctatgtcatcttccagattacggattttagagatacgcacgccttctgccggagtgatttcatacaatgtaatagtaggtcccacactggctttgatagaacttatttcaatgccaaaactgcgcaatactttgataatgcgatccttgttggcattctgttcttccatgtcgatattaggtccattatcttcatattgattcagcagatcgagagtgggaaacttatagttttccagatcgaggcgcggattataaggctgcaaggcaggacctttatattctgcatcctcttctgatgtatcatcggatacggtaaagtcaggttcgtcattgtcttcctcttcttcttcatttgcctctgtaggcatagggcgttgaggctcactcgtctgtttttcctcaaaagggaatggagtgttggatacttcttcctctttgctgccgacttccactttcatgggttgttccaattcaaagtctaccacggcaggttgtggattggagtattctttcttttcttcccttttaggtttgatactggtatcattgttctcattgtcggttgctgtggcggtatctttcttcttccttctgaaattgggatgaagtgccttacgaatcatattgatagtctcactgctcagatagacaaagaagagaagggctgttatcagcaaaagcagtcctaaaccgggcataccgatttgagaaaccaaccatgcgcttacattatgcccgtgcagccctccggggtagataaaactgtcgctgaacgttccgtcgaaaataaatcccagtgtaatggagaaccaaacgagtaggatagaacaggacataaaccatttccacacacggaactggtaagcttttatcattttcattcctgcaacagcgaggaaaagaatgataaaacaggcggcaattccaaaacattcgttgatgagaaactctgccagttgtgcaccgcgtgctccggcatagttctttacatgattggtggtttgcatcagttcgcccggttgttggttgtccaatatgctttggtctgccgctcctgtgaagaagaaggaaataaaggccagcaataagtaaacggaaaatatcacactgatgagtcctataacaaaatgtgtcgtctcactcttgaaaaatgtagtaaaccgatttttcgaaatctttttaggttcggtctctttatctgtttttttcttagccatatttattaatgcaatttattatttcgcaaatgtacatgaaaatcattaattattggcttaattaatctcttttttcttacctttgcgattcaattttaatgttatggaaaagtatagtcaggtgatatttgacaaaaatacagtggagtttgtgacggtagctgccgaatattgcggctttttggaaagaacacgtgatgccaagcggggcatatttgtagacaccgccctcaagattcttccgttgctttatttaaaagcatccatgatacctccttgcgaacgaataggggagtttgaccccgaagcattcgtaacagaagaagattatgaactgatacgtatggctgtagctgaagtgttgggctctaaagatgactatctggaagtctttttgcctgatatggcatatagtgatacacctataaaaaaatgtatttccgaagatttggctgatatttatcaggacttgaaagattttatcagtgtatttcaattgggactgaatgagacgatgaatgattcactagtgatctgtaaagagcattttgaagaattttggggacaacgtttggtgaatactatgcgtgccttacacgatgtgaaatataattctaccgaagaagacgtaatggatgaaggctattcggaaatggaagatgagaaccgattattatgaagctaataaaaaaaagtataagtaaagcagaaatagctgcaatgcccaaagtgcttttcccgggacgtatattcgtagtttataccgaaagtgatgccgaaaaagcagtggcctatcttaaagaccagcgtatagtgggggtggatacggaaactcgtccctcattcaaacggggaaccacccacaaggtggcattattgcaaatttctactcaggacacttgttttctgttcaggcttaaccgtattggcatgcctgattcgttgcaggagtttctgatgagtgataccctcaagataggtctgtcactgaaagatgatttcaactcattgcgtaaacgccaggatatgcatcctgatcgtggaaattggatagaattgcaagaatatgtaggtaagttcggtattgaggacaggagtttgcaaaagatatatgctaatcttttcggtgagaagatttcaaaaaatcagcgtctctccaattgggaagctgatgtgctgagtgaagggcagaaactatatgccgctactgatgcatgggcttgtgtggaaatttacaactgcctgtccgaattggaaagcacgggcaattatgagataatacaaaatgaaccaatagaatcaacagtaactatcgatggcttataaaaaagtatacctgaaaccgggtaaagaagaatcgttgaaacgttttcacccttgggtgttttcgggggctatccatcacatagagggagaacccgaagaaggcgaaatcgtagatgtatatacatcaaagaaagaatttattgcttgcggacatttccaaatcggaagtattgccgtgcgtgtgcttacttttagacagaaggaaattgaccatgatttttgggaacatcgtttggaagtagcatatgatttgcgccggagcttgggattggcaggtaatccaatcaataatacttatcgtctggtacatggagaaggagataatttgccgggacttattatagatgtatatgaccatacggcagtaatgcaggcacactctgcaggtatgcacgtttaccgcatggaaatagccgaagctttgtcggaagtgatgggagatgttgttcagaatatttattataagtcggaaaccactttaccgtttaaagcggatttggaacctgaaaatggttttattaaaggaggaagtcccgagaatattgctatggaatatggcttgaagtttcatgtggattggttaaaaggacagaagacaggtttctttgtcgatcaacgcgagaatcgtcatttgttggaacgttactccaaaggtcgcaatgtgctgaatatgttttgttacaccggagggttttctttttatgccatgcgcggaggtgcaaacctggtacattcggtagacagttctgccaaagccatcgatttgacaaatatgaatgtagagcttaattttcccggtgattctcgtcatcaggcttatgctgaagatgctttcaagtacttggatcgtatgggggatcagtatgacttgattatccttgatccaccggcttttgctaagcataaagatgcgcttcgaaatgctttgcgcggatataccaagctgaatgctaaagcatttgagaaaattaaaccgggaggaattttgtttactttctcttgttcgcaggtagtggataaaatgaatttccgtaatgctgtgtttactgctgctgctcaaagcggacgtagtgtgcgtattttgcatcaacttacacaaccgggtgaccatcctgttaatatttaccaccctgaaggtgaatacctgaaagggttggtactgtatgtcgaataatgtattgtctgtattcgggtgtaggttttatacccgaatacagttataagtatatatagctactgcttatgactgaagttagcttaagatataaaaatggttaaataaaagaggaaggttgttcgtttattatgtttgataacataaaacctatacctttgcactgtgtttttcatggtattagatttaaggttaatgaagattgggtgtctgggatagatacccttctttttttatatccctttttcttatatgaatatgcttaactatagctgcgattaatgaattcccactgattccggatcaagtcaaaaagtgtgtgggcataatgttttgaaaaaaatcgggtcacttattattcttggggattttaatatcatatcacaagcaaagggaagaataagccgtttccacgggtcagccaagttcttttaaacggaagattattacagtctgcggcaatggactgtacagtccactgtagcagactgtacggtccactgcaatgaatcatacagtccactgccggagactgtagtaatccgacggacaaacaggcataaccgaaaggacgaaaacgcttggtccggctaatgaaacggcttaggaaactcgaaaatgcatgcaggggttgaaaaccggagcagacaacatcaggacaggtatttgattgatatgttaaatcccaaagaataatgactgaactcttatcatccacagggttttcggactgttcccggttctctactgtcccattattttcaagaaatgaaatattatcgtttttatttttgtaaacctgattttaatgtttatctttgtcatgtcgttcagtgtgaacattgtttcttggaacgataaaagcgaatgcattaagacttcatttttgtcaagacttgggagattgtttccatgaataatagatggatgcccttgtttgatgtggtgtgtgtcttaaaacttatgtgaatgcctgttctggtttttagataatggtattgtgcaatttgatatattgatatgttaatgatatgacgagccgaacgtaatgttcggaaaaggacgaaaacaagtcagattgaatgatgctgtgaagcatcattcaatcgcaactccaattttaccgtgctcgaattccttattaataagaggatggttctcacacggaatcccccatgaacagaaggtttcatacttgttatgtgtgaaaaaagattatatcagccaaactgacggacaaaattctctcatcggtattattttatcttttccctgaaaggacttgatctttccggaaaatctcttgaactttttacaacatctcaggctcttttttgaaaagactcaggtttttctgaaagcacaaatatagttctgaatcatatcagggaaatgaaatattcttcaatgatttttgtggttaagcaataggaatatattaatttatacattcataagaaatgaaatataataggttgtatgctgcatttatttttgcttttttggcaggatgtagcggtgacggacaatataaagaggcactactgccccaaattgatgttaataaggtgtatcccgagaaggaaatatttcttcaggatgtggctgacattgaatatataccattggaaacaaatgaggaaatgttgtttcagggtacaatagctgccgtttccgacaagggaatacttggcgtgagccaacaaggaggtaagttgtttttgtttgaccgtgacggcaaggcgaaaaatcttatttgccgaaaaggtgacggtcccgaagaatataatgtcattcagcgtgttgatgtggattggcaacgtggtgaggtctatgtgttaggttcgcctactaaagtatatgtttatgcattcgatggtacttacaaacagacattggatacaaaagctaatatccgacaaggggatatgtttaacttttcggccgataaacttattctgtttaaggaaaaggccaatgtcggtaaggaaggagaaatgatcgcatattgtcctatcatgttgttggacaagtcaggtggaaacattgattcattacaatatgtaaagacatgggatgccagcttatctattgtgatagagggtaatgagaatatgaaagcatatctgtggtgtgaagttatgctggggcaaggtggggaaacttatctgaatgatattgcctcagatactatttatcggataaacaaaaagacaaatgggttattccccatattgttacgtactccttctgtcagagactcggaaggtggaaaatattatttgcgtttggagggagttacttcacgttattatttcctgaaatgccagatttcgtctctggatatgacagatatggttataaaggatgataagagttattcgttggtttatgatcggcagacaggagagatattccgccccacatttagaaacaaagactttccatctgaagaatggagttacacgatacgaagtaatggcgagaaagattgtgtctatcagacgctggagtcgtttgctctgaaagaagcattggaagaaggacagttggaaggttcgttgaagactgttgcgcaaggattggatgaggatgataatccggtaatcatggttgtcagatttcgataaatagagtttttgcgttatcctttttataagaaatatcctgtttgattcgaagtttttacttacatttgccgttataaaataaattgtaagtgaaaaacatgagaaaacaactatctgtaacattggcttgtttccttctggcttcggttagtgcatccgctcaaggctggaaagcttatgaagaggctgctcaaggaaaggcttatgaaaagtccgattgcgtgactttgctggacagtacattagtgtctgtccaacctaccggacagggctcttttgccgtatgtaaagtaataaaagtacaaactccgaaaggagccgtatccaatcggattattaagtatgactatgacccgctcacagcccatgccgagtttaaacgggtgactgtctaccgtgcagacggaaaagtggagaaccttgatgtgacaaagacctgcgattatgctgctcctgcacgtgccatttattggggggcgcgtcagattatgcttgaagttggtgctttgcaacccggcgatattgttgattatgagatagcaaagaaaggtttcacttatgcattgctggctgctacacaagaagatgattccaaattcattcctcctatgcgtggacagttctacgatattgttcctttctggagcagtcatcctacagtgagaaaagtctataaagtggttgttccgatggagaaggagatgcagttccagttctatcagggtgaatgtgcctcttccatgcgttatgaagacggtcgcaaggcatatacctttgccatgaacgatatgatgccttttggcagagagccgaatatggtagacctttttgacgctgctcccaaactgatgatgtcttccactccccaatggcaggataaatcattatggttcaataaggtgaatgaagactatggcagttttgctccattgcctgaagctcagaagaaggtggatgaacttattaaaggcaagaagactgaaatggaaaagattgctgtacttacccattgggtggcagataatatccgctatgccggcatctcgatgggtaaaggggagggatataccttgcataatacgaaaatgaattacactgaccgatgtggtgtatgtaaggatattgccggaaccttgatttcattcctccgtatggcgggctttgaggcttatcccgcaatgacaatggctggaagccgtgtagaaagtattcctgccgatcactttaaccactgcgtggcagtagtgaaattgagtaacggtacttatatgcctcttgatccgacttgggtgcctttctgtcgtgaattgtggagtagcgccgaacaacaacagaattacttgccgggtgttcccgaaggttcggacctgtgcctgacacctgtttccgctcccgaaaatcattatttccgcatcaaggcggacaatcgtctggatgccgacggtaccttgcgtggcactttcactgtgactgccgaaggacagagcgacagcaatatccgtcgtatattcactaccggttttcagagtgaatggaagaatacgatggaacgtcagttgcttgccgtttctccgaaagcccggttgctcagtgtggattatggacggaatcccaaagattatcaatcagctcctataaaaataacttttcgttatgaaattccggattatgctctgaaaggaaaagatatgttgtgtttccatccgatggtgatgaacaatctttataaccaggtgcgttcgtatctgcgaatagataccggagtaaaagaacgtaaatatggttttaaagatgcttgttcacggctggtggaattagacgaaacgattcagcttcctgccggatataagatggcaaattcagatagaaacgacaatgtggaaggttgcagtgctgattttgaaggctcgttggcacaaaaaggaaataagatattcctgtacaacaagcttgctttgaagaaacgggtttatgaggcttcggattgggacaattatcgtgatgctgtgaatgctcataagacatatggagattatttagtgattaaaaagtaaggcagaatgaagaaaagatattattatatatgtatgttgtctgtgctattattaatgttagtacttccaacaaaagctgcttccgaagcagaattcggtaagctggtcaaatcttacacacttcgtacggatggcagtcaggagatgcgtgtacagaaagaattgactttgtttactcatgcagctatgaatggtctgtatggagagagttttatcatttacaatcctgcttatcaggaactgaagatacatgaatcgtacactcgtcagaaagatggaagtatagtaaagactcccgataatgcttttgtagaggtacttccctcggctgctgccgatgctccggcttacaatggcttgaaagagatggttgtggtgcataccggacttgaattgggggccactatctatttggattattctgttatcactcgtccgggttaccttcccgaattggatatctgtgagtcggtagaggagttgtctccgataaaagaatatgtactttcactgtctgtacccgacaataaacctttgcattacgaattgttgaacggtaaaatgactcctgttgtgaaaactgttgccggtatgaaaactgtaacctggacactcaaaaatgttcaacctcgtcctcgtatgctggaagtttctgttccggcgggaaatatgcaggctgttgtagcttctacttatggttcgaaagccaatgctttgaaagtactcaaaaagcagtttccggttgccgatgataaagtagtggctgagttagctcaaaaactgacagcagatgccaagactaccgatgaaaaagtgcaccgattggaaacttatatccgtagcttgggtacttgtcgtttgtcattgcttcaaacagggtatcgtttgcgtcctgcatcggaagtgattcgttcggcgtatggaacaatagaggaaaaaagtgtgttgcaggctgcgttgcaacaagcagcaggtattccgacagaagtgaaagcggcatttttaaaagcaaccgatgaggatgctgtgggattgtctgctctgaatggtttgtttgtagaaaatcaggcaatagcagatttgagagatttctatgccattgtgaacatggatgcacatcctgtgcaaccggcagtcaagccgcatgctatttcaaggacagatacgttgaaaataactcctgaaggaggtaaggttttggcgggcggttatcgaatgtatacgttgccgcaagcatctgaagggtgggctgcttacgaagggcggatgactacgcttaattcgcagcgtcctgtgaatcttcttctttcttatctgcctgacgagacatatacctgtattgtagaaacaacaggcggaatggttcctgtagcccttccggtcgttaaaaagattgataataatatcggtacggtagaagtggcggtgaagaaaaccggagataagatagaaatatttcgatctctgaagttgaaaaaacaattgattactccgacagaatatccgatttattatcgcttgatgacggaatggatggatactgccgctacgactttattattttgaagtttggaaacttattttccgtggagatagattcaggtatgtatcctgaaatgcaggagtttcgtaagcgtgaagattaattaaagaaaaagagaaatgcgaatattcaggattcggtcccggatattcgcgttttttattctttttccacagatttattcgggatacaaaaggaatttgatgaaccattctttcaagtaaaaaatacgttagggagtgtttcaaaaccaaaccgggctatcctatcgtcagttgtaggggcagggtttgtctgcccgaagacacaaagcaaactgttttcgggcgagcaacctcgcccctacgagctaaacgacagcattatccacgttttgacacaaccccgtgtaaaagcgtgctctctgacgcggaatgaaactccccaaaaaagttcactgaacctaaaaaaagatgtctttgatgtaacatttacggtgtgtctgtgtcttaatagtgaacatggaacaaaatgaatttgaaatagaggcaaaacgaatgcgaccggccttactcagaatggccactcgttatctggaagattccgacgatgcagaagatgtagtacaggatgtgctattgaagctttggtttctgcgtggaaagttggacaaataccgcagcgtagatgcacttgccattgttataaccaagcatttatgcattaactgcataaggggagcccggatagaaaaagtggaattggaagaaggtgtccgtataggcagtggggataatccggaaatgaagttggtggcagaagagaatatgcaagagattcttgattctatatccactttacccaatctccagcaagccattctcaggatgaagcacattgaaggtttcgaagtggaagagatagcccgaatgacaggcagtacaccggtagctgtgcgaactaatctgtcgcgggcaagaaagaaagtacgtgaacaatttatgatacataatagatgatggaactgacgaataagaacatagaagaatacatcaatcgtttcttggatggtgaaacgaccaatgccgaagaacaggccatttatcgttttttctgcacaggcaatgtgcccgctcacctgaaagaatatgcaccgatgtttgcctggtatgagggaggtatgcagggggaacctaagccacaagctatggaagatacaaaagtagaaaagagaaaaaccttcagtcttcgtattcccgtaacggcatggagtgcagggattgcagcgatggtagtagttacattggggctggggttactggttttctcaggacaaaatctagcaaaaaatcataagtggtcttgctatgatggtagttatatagaagtgaatggcaaacgcataaccgatgtgaaaaagattatgccgtgtattatcgaaacattggaatatgccaatgaggtagaacaattggcacggcaacggatagatgaaattcatcgttcggaacaggaaataaaggaaaaggaagatttggtcaataactaaaatattagatagatatgaaaaagaaaacattgttgagattggtcatggtctgtttattgttgggctgtggcgtgagtggaataaaagcgcaaataacaatcgataagatggcaaatgaacttgaaaaaagggatgatgtggctatcaattcagtgaccaagcgggatcctaaaacacgcaaggtaataaaggtggtaaaaacttattctgtcaaagacactaaattgggtaagcgccttatcgatgcttttgagaaggatgaagaatatgctgaaacagccataaaggatatgcccaaaggacgaaatgcaggacaaaaggctaattttacttttatctttcgtactgatgatgaaaaacgtacttatacattgacgacgaatgaaagtggcaatgtgtcgtttaccattattatcagtccattgaagaatggtagggaggtaaccggtgtggattggataattgagaataccaatcagcagttttgtcagaccactaccactattgataagaacggagatgtatacctgaatggaaaacgggtgacaggtatcaggaaggctaaaaacgtacaaatcaataatggtagagtgtacgttgatggtaaactggtgaaagataatgattaagtataaagtgttttcataataacacactctctctttgagattagaattaactttttaatcgtgtttatacccatcggttattgtgaaatagccggtgggtttttcttttttggtccattttccgcaaaaaatagaatagttttatatctttgcaggtattataaaaaaaacacacattaaaaagaaagatgaaaaacgaaatcaccggaacgaaattcagattgattgtcatgaatttcttgcagtttgctgtatggggcgcatatctgacttctatgggtacttatctatataacattgggttgggtgaaaaaatcggtctgttttatgctatgcaaggcattgtgtcattatttatgccggctgttatgggaatcattgccgaccgttgggtacctgctcaaaagcttttgggattctgccattttatgggagctgtctttatgattgctgccggttattatggaatggcatcgggagataatacggagtttgtgtccctttttactctgtactctttcagtgtggcattttatatgcctacactggcactctctaattctgtggcatatacagcattggataaagtgaaactggatccggtgattgcattcccacccattcgtatttttggtacaattggctttatctgttctatgttgctcacagatgtactgggctttcaagccaattatatgcagttcttttcgtgcgcttgtttcgggttattgctggcagtttattcatttacattgccgaactgtcctgtgaataaaggaaatgaaaagaagtcgttggtagatgcgatgggactacgtgcttttttactattcaaacgtaaaaaaatggctatatttttcgtgttctctatgttgttgggtgtttctttgcagataaccaacggatttgccaatcccttccttagtagtttcgataagattcccgaatatgcgaatacctttggcgtgcagcatgccaatgcattgatatctttgtcacaggtttcggaaacgttgtgtattctgcttattccttttgcgttgaagcattttggaattaagcgtgtaatgttaattgctatgctggcatgggtattgcgtttcggattattcggactgggcaatccgggatcgggagtatggatgttcgttttatctatgattgtatatggcgtggcattcgatttcttcaacatttcaggctcgctctttgttaataaagaaacagatttggctatccgttccagtgcacaaggattgttcgttattatgacaaatggtatcggtgcaacagtaggaacactgagtgctcagatggtagtgaatcattttgtagatttcggcagtgacgcaccacaggtagccggatggagcagtgcatggtttgtatttgcgggatacgctttggtagtggctgtgctgtttgctctaatattcaggtataagcacactcccgaagaaatatgattaaataataagtaggtattgtccgtatcgggcatataatgagattggattatggatgaaatagagttgaagttgcatgacatgtcttctaccttgcagcctgtagatgcgtatgcattagtgctggaagaagtgaatggcaatagaaaattgcctgtcattatcggttctctagaggcgaaggctattagaattaagatgttgaattataaattgccacgtccgtggacgcatgatttattcttgtcactgacgagggagttgggagtaactctgaaaaagattttaatatataaggtagaagatggaatttactattcttatcttttcttcgataatgcaggagaggagataaagattgattcgcgtacctcggatgcagtggcattggcgttgcgatataaatgccctatatataccactgcacaaattatggatgaagagcatttgcgggaagagagtgacagttcattctctgtaactgtcaatatggtaggcatttctgtattgaaagaagcgctgacaaaagctatcgcagaagaaaattatgaacaggcctctcgcttgagagatgaaataaggcggcgtgaggagctgaagaaacaatataaagaatagaattatgcacgtattttatgcacccgacatagccataaatcctgagcttcctgaagaggaagccgggcattgtttgcgagttttgcgtctatcgataggagacgaagtgacattgactgacggaataggaaatttttataaggctgtaattagtgcaaccggtggtaaacgttgtcaagtgaaagtaacagaaaccataccacaggaaaaagggtggaatggttatctgcatgtggctatggcaccaactaaaaatatggatcgcaccgaatggtttgtggaaaaagcaaccgaaataggattcgacgaactgaccttccttaactgtcgttattccgaacggaaagttattaaaacagaacgcatagaaaagatattggtctctgctgtcaaacaatcactaaaggcgaccaaacctgtcttgaacgagatgacagatttcaataaatttattactcgtgattttgaaggacagaagtttatagctcattgttatgagggtgataaacctttgttgaaagatgtgatttgtccgggtgaagatgctcttgttttaatcgggcccgaaggagatttcagcgaggaagaagtcaagaaagctatagctaatggatttcagtcaattagtttgggaaaatcgcgtcttcgtactgagaccgcagcactggtggcttgtcataccatgaatttattaaaccaaaaataagcgtatgagaaaaacaatttggggatttgccctgctggtaataatggcattcctggcttcatgctcagagagcagtgaatatacgaatgctattcccaaagatgcggcaatggtggtgtcattggattttaagtcgatggcacaaaaaagtggtatcaatggtaaagaaggagagtcggtagtaacaaaactgacggatgtcttgaaaagtggactggaaggcgaagcttatgctacagccgagaagatagtgaagaatcctgccgaaacagggctttcactaacagatagagtgtatttgtttgttacttctaattccaatacttttgcagttgtggcaaaggtatcgagtgaaagtaaggtgagatctctgatgcaatctttaaaggagcagggattatgttcggatttgaaaagcgaaagcgggtgtacttggactattttgggcaatggtttgtgtgcctataataatggtacatttctgttggtaggaactctttacggtaatcctgaggggatgaaagatacattgttggcgtggatgcgtcaggatacagcaaacagttatgcttctactttggattttgcaaaactaagagacgccaaaggtgatattaatatagttgccaatatgtctgtgttaccacgtgaggcaactatgcaaatgcgtatggggatgccggccgatttaaggctggaagatattaaatgtttgctttctactacgtttgagaagggaaaagttgtggtagattttgaatcgttgattgagaataaagaattgattgcgttgtatgagaagcagacacaaacttctacgccgttgaaaggaacatatatggaatattttccggcaaatacactactatgggcaagtgccaattttaatggtgaggcaatttataacttactttgtgaaaatcctaccatcaaacaatcattggataatccgatgttaccaatagatctgaaaaccatattttctgccattcacggtgatatagctattggttttagttcgttggtaaataatgatttactggtgtatgcagatgttacgaataaagagttcttgaaagcatttgaagagcttcgtcccttgttggcattgtcgggtggtcaaatgaagttgaattctaccggtacagatcaatatgaattccgtatgtatgaccaaagcatttggttcggagtaaaagataatttgttttatttatccaacaatgagcaaatggctgatgaagcgggccgacgttatggtgtttctttgcagaacactccttgggcggctgaagtgaccaagaaccgtagtttcatggttttcaatacagtggaattggtgaaggagcttggtgctgctcctcgtatttcgcggatattgggaggagagactgtcatgattatgaataatctcttcggaccgtgtgaatacgttgatgtgatggcgcccgattggaagaacggacaaatgaatattgtaatgaaagataagagtacaaacgtactgcaacttatagtacatgcattggataatttatgaatagcatagaattacaacaaacccttcctgctgtttttgcaggaagggattttattgtttccgatgtgtggcatcagtcattgcaactgaaacgtggtgaagcgtatctgatagaagcggcatcgggcacgggcaagtcatcactttgcagctacatatatggatatcgaaacgactatcaggggattgtcagttttgacggtaagaatattcgtaatttctctgtaactgactgggtggagattcgcaagcattcgattagcatgttgtttcaggaattacgtcttttcactgaactcacagcttgggagaatattcaactcaagaattctctcacaggatataaatcaaagcaagaaattaaggcttggcttgagatgtttggcatagctgataaatgggatactccggtgggtaaaatgtcttttgggcaacaacagcgtgtcgcgcttgtccgtgctctttgccaaccattcgactttatttttcttgatgagcctatcagtcacttggatgaagaaaacggacgtcttatgtcgaagatattagtggaagagacagataaacaaggtgccggaatcattgtaacttctattggaaaacatttggagttgaactacacaaaaatattgagactatgagcttggtttggaaattactgcgtcagcatatcagtttacctcaattggcgggtttcttctttgccaatttgtgtggtatggtgattgtgttgttgagtgttcagttttataaagatattttgccggtatttacggaaggagatagttttatcaaaaaggattatatcattgtcagtaaaaaggtaagtacactgggggcatttgtaggaaaaagcaatactttttcggataaggatatagctgatattaaggcacagtcgtttaccaaagaggtaggagcctttactccttcacagttcaaagtatcggcgggaatgggtatggaaaaagtcggtttgcagatgtctacggatatgtttttcgaatctgttcctgatgggtttgtagatgtgaatcttgataagtgggtgtttaatgagaacgagccggtgattcccattatcattccacgtaattatttgaatttatataatttcggatttgctcaaagccgtagcttgccacaactttcggaaggggtgatgggaatggtaaatcttgatatccgtattagcggtgacgggcgcagagaagtctttaaaggaaatattgtcggtttctccaatcgtctgaatacgattcttgttcctgaaacttttatgagatgggcgaatgagagctttgcacccggaaccaagagcgaaccttcacgtcttattgtagaagttaataatccgactgacgaccgtattgctaaatattttaaggataaaggctatgatacggaaggtgataaattggatgccggaaagactacttggtttctaaaagttattgtaggaattgtactttctgtcggattgcttatcagtgtattgtcattttatattctaatgttgagtatctatctgttgttgcagaagaatacgactaagctggagaatttattgctgataggatacagcccggctaaggtagcattgttttatcaactccttactttaggcttgaatgccattgtgctggtgctttctataagtatcgtattgtatgtgcgtggaagctacatggaatggattggaaaactgtttccacagttggacgaaggaagtgtgtggcaggcaatgctggtgggagttttgctgtttgccggtgtgtcggtgttcaatgtgattgcagtgcgaaaaaaggtcgcttctatttggatgcataaaagttaagaagaaaggggagaagataatttctcccttttctctttgataataaaagaattagtgtatatttgcatttgagcagttacacattctaagcaagttaattatggacagagaacttctttttgaccggttttctcagcaagcacttcataccttgcaccggtatcgtgctgttatgtttagtccaaccattttggtgtctcagctatttcggtgattttttaatccttatttcttacacacattataacatgagtatattatggacaacagaccgactatcgctgaagtacaggaatgggtactgaggttgtataacacatgtgaacaaaccatcacagatgaagaacgtaaagagcagcataaatatgctattatggtgcaacgtccgcaagacaagaagtttttggtgaagatgttggatgagtcttcccaaattcgtgaccgtaagaaattggctgagcgcattaagaagttgatagaccgttacggtgtacctgagtttcttaataagcgtgatgccttcctttttaaaatgtatcaggcatttggatatcattttgattttatagctattcccattataaagaaacgtctccgttccgatacctctaaggtgattcttgatgaggcccgtcctcaattgacggaacatcttgccactcgtttcagacagaaaatcgggcagaacgtaaacttgctgggggaggtcgtattgggtaacggagaagctgaccatcgttatcatcattatctggaagcattggaagctcctgacatcaattatatttccgttaaaatttcgggtatctatgcccaaacgcatgcactgaactatgctgaaagttttccggagctggtgaaacgtatgtctgctctttaccaaaaggcgatggattatccttatgtggatgaaaacggagtgaaacgtgccaagtttgtcaatctggacatggaggaatataaagatgcccatttcaccttgcgcttatttaaggaggtactgaataagccggaatttaaaaattattcggcaggtattgtagttcaagcctatctgcctgatgcctatgagtttcaaacagaattgttggattttgccagagaacgcgtggcaagaggtggagctccggtaaaaatgcgtttggtgaaaggttgcaatttggagatggaaactgtgatttcctctttgcgtggatggcctaatccggtgcgaacttctaaaactgaagttgatgccaattatcttcatattttggaacgtgctttacagcccgggaatgctaaagtattgcatgtaggggtggcttctcacaatctgtttacaatagcttatgcttatttactgagtcagaaattgggtagtgccgaatatatgacttttgagatgctggagggtatggcagaccatgtgtggcgtgcacagtctcagcttggcaatcatgtgattctttatgctccggtggtaaaagacgagcattttctcaatgctgtttcctatttggtgcggcgtatggacgaaaatacggctcccgacaatttccttactcactcgtttaacttgaagcccggtaccgatacttggcgtttcttgcagaaccagtttgaagaagcctatcggatgaaggatagtattacccatattccgacacggacacagaatcgtatgcaccgttatactcctgttccacccactgatgagatgagaaacgagccggataccgactttgatctcgtcaaaaatcaggaatgggtgcgcggtatctttgccggatggaaaaaatccatattggattctcctcggattattcctttgcaggtaggcaaagagatggtgatttgtgataaacgtcatcgctatatggatcgttgtcaagatgatgaggtatgcgtttgtgaaatgtctcaggcaaatgtggaacagataagtcgaatcattgagatagccgggagtgaccctgcaggatggagaaagactacgcttgaggagcgtcataagataatgtatgaagcggctaatcggttgggtgaaatgcgaggtgacttgataggttgtatgtgtgctattaccgggaagacggtagtggagggggatgtggaagtttcggaaggaattgattatgcccgtttctataccactagtatgaagctgttcgctgatttgcctgatgtggatattacaccggaaggtactgtattggttatctctccgtggaattttccttgtgccattcctattggcggaattgtagcggctcttgccggagggaatactgttattctgaagccggcaactgttgctgctcctgtggcgtggttgtttgcccaagctttttgggatgcaggagttcctaaagaggctttgcaagtgattattactgatcgtgatgcattgaaggtactcacttctgctcctgctatcaaacatatcattttgacaggcggtacggacacagcacaaaacatcgctcgcagtaatccttctactccgttgtctgcagagacagggggcaagaacgctataattctgacagcttccggagatcgtgaccatgccattatgaatgtcgtagcttctgctttcggcaatgccggacaaaagtgttccgcttgctcgttattactggtggagcgttcggtatatgaggataagaattttagggaaaagctgaaggatgccgcaaccagcatgaaggtgggaagtgtatggaatcctggtaatgttgttggtccgatgattaccaatggaaatgacaaattgctgaaagcattggagttggaacaaggagaatcttggcttgttccgcctcagttccttgataagaataagtatgtcttggccccaacagtgaagtggggagtgagaccgggaagttattctttccgaacggagttgttcggtcccatgcttagtgtggtttgcatagagaacttacagcaaggtattgaactggttaatagcttggactatggactgacttccggtttgcagagtttggatgaagaagaacaacggttatggaagaactctattatggcgggtaatttatatatcaatcgtggtataacaggagctatagtaaatcgtcagccttttggcggtatgaaactttccgcatttggtggtggtgtgaaagccggaggtcccaattattgtgcttgctttgtgaagatttccgataagcccggaagtaccacagattataaacagagttatccgaaggcatacgaacaggaatttgctcatgcacgtgatattaataatctgtatggtgagcaaaacgtttttcgttacttgccattgcgtaatatggtactccgtcttttcccgggtgatactaatgaagatgcgcaaatgattgcatttgcagctaagatttgtcatacccctctgactattagttttgagcctggcgatgaccgtacgacagcattggcttctcttggttgttctttgaagaaagaatctttgcaagagttcttgaagagtatgccagagtatgaacgtattcgtacttgtggggtggatattccgatggagatgtatgaggaggcagctcgtactgataaatatattgcaacagccaaacctgtgaagaatggtcgtgtggaacttattcattatattaaggagcagagtatttcatttgagtatcaccgttatggaagtattttagagattccgccggtagaataattgttataatggttttaccttgtttccatagaggtttgccttggttagatatagtatagagtttggaacattcatcattgggtggatgttccttttttatattctgatagatgcagagacaagatacataaagtcttttttattgttaataacgctattaaactaaaatattatagttaataactaataatgatagtattaaaactaatattattagttgcttattgattttaattagttatatttgcttcagaactttaaaccactagtatttatgaaacgtttatcccctaaagaagaagagattatgcggatgttctggagtaaaggtcctatgtttgtccgtgatttgctcgaattgtataatgaaccgaagccgcattataatactgtgtccacattggtgcgcgggctggaagaaaaaggttttgtgggatacaaagtttatgggaatacatatcagtaccatcctgttataagcgagtctgaatacaaaggttctgcattaaacgaagttgtctcccaattttatgataattcttatataaatgtggtatctcaattaatagaagaagaacggatgccactggatgaattaaaggacttgatagcccgaatagaaaaaggcagaaagtaaggaggtgattatgggaacttttttgtttttcattctgaagagtagtgtctgcttgtttctttttacaattctatatatcacattgttgaagaacatcactcattttcgttttagccgttgggctttctgggtggggacactgctttgttggctcatccctttgattcctgtatcggttagtattctctcacctattcaacaatcggtcatgatggtaggggagatatttgaagaaatgccatcagacggaaaggttgctaccggatttctggcagaaaacggatgggatgcaagagcggaacatttaccgtttcagcaaggaaaatcagaaggaatatgtggtctgtctttgttgaccgttataagcctcttttatacgatgggagctgtcggtgtattcttgttttttgtttattctttcgggcggttgtggcatcttatccatggcaagccggtgcagagggaaggaagcttccgattagtgattcttcccggaaaagtatgttcttttagttggtggaaatatattgtgatgtctgaagaagactatcggcaggatggttcacttgttctgatacacgaaaaaatgcatttatcttactatcacacattggatttgggatggatgcattgtctgcttatttttcattggtttaacccgatgacatgggtattgtggcaggagttgcgtgacttgcacgaatatgaagccgatgaaggagtaatttcttcaggtgtaaatatggttcaataccagttgttattagtaaaaaaagctgttggtacaaggctctactctatggccaatggcttcgatcatagtaaacttaaaaatcgtattggcatgatgcttaaaaaaagaagtaacggatgggtacggctgcgtatgttgctggctgttcccgtggcagcaggggtggtatatgcttttgcacagcccgaaatgagtgaaaaacaagtgttgttgcaaatggaacttatgacacaggatgcactgcttcaggactcgattgcagaaagcaaactgaccgaagagattgcttcgatgaaacaattctttaaagagaaatcggatgcgtggtggaagcatcatcgtactccggaggggcgctatgtatggcgtacaacgcagacgcacaggctctatatgaatggcagtaatgaagtaatgttcgatacggttgtttataaaatcttgaccgatccccgtcaagtgatagccgggcggcttcgttcggctcgtgaagcagacagattggaaaagaaaaaggacgaacctcgttttttatatatggtgtatgatgtgaattcggataagcgacaggtgcttgggatgctaaaagagataaaattggcttttgatgatctgcgtgcggaatatgtggcaaaaggagcaagtgatgtggacgaggtttgtccttatatggtctatgtatacggtccgcggaaatatggtgtgaatggtgccgagttgttgataggtgctgccggagctgaaccgcaagaaagaatccacgatattacggggaataggttgaaatcctatcaaggacgatatgggaagaatgcttcggttttacttcgcgtagataattcagtaagcgagagagggtatatcgaaatgtgcaaaagggttaaacgctatttccctgctgcaaaaaccgagcatgaaaagtaatgtgacttggggttgccccgaaaagttctgatggtgctatgaggcaaccccggctttcagtagtttagccaaagtttgaatgaagaaagtttttcctcactgatggtgatttgtgatttgtaaggaggaagaacacttattgctattttgccgttaaaataaggctcggcgtggtctatggaatcaatgctgattatgacctgacggttggcgcgaaagaatagttcagggtctaattgttccatcagtttgtttagggacaggtcgataatgtgttcctgtcctttcttggttacagcaaaggttattttgttttcagaatagaaataggctatatctgttacctggagagaccaaaaacggtcggctccataaatgaggaaacgggtacggtaacgtctttctttatgttgcagggtgtccaataaagtattcagatattcttgggggtggggtattcctttgttttgtaaagtctcgtatttaatgatggcatcaagcagacgtgtttcatcaataggtttcagtatataatctatgctgtttacggtaaatgcacgtatggcatattggtcataggcggtggtgaagataatgacagaagaaggttggacggtagaaagaaaatcgaaagcgttaccgtctgccagttgaatatcaagaaagataaggtcgggctgtgggttttctttaaaccaggatgcagcttcatccacactgcccggtacgatggttagtgtccactgagggcgcaaacgggtaatcatggaatgtagcaggcgtgctgcaggtatttcatcttctataatgattgcgtttagtttattcatatcctaaaggtacttttacggtgaatgaattgttttctttgatgacaatgatttcttcaccgagcattagtttgcagcggttggaaagattgttcaaacctactcccgatgaggagtcattactttttttaggttggataggattacttactatcaggtaattattttctatatcgatgtggattcgcataggcttaccggaagtgatggagttgtgcttgatgacattttccaccagcagttgcaaagtcaggggtggaagcatagcgtcagaataatcatcggggacgaggcattcacagctgatacagtttcccagtcgcacttcatgcaggaagagataggatttcataaaatccaattcttcatttaagggaactaaggttttatcctgactttggagaacataacggtagacgctggacaaatgcttggtgaaacggacagcgttgcttggattgtattctatctcggcaatcagtgtgttgaggctgttgaatagaaagtgcggattgagttggttttgcaaggcagcataacgggctgtgttgttttccttttgcagttcggcagcctcctgttgcagtttcaatgtgttttgaatggagcgattggagagaagtaaccctacgattactaattctaccagccacaccaaaatgaggatgcgccagccaccgttagggaagataaagatattataggaacccactaaaagctttccgataatcaataaactgtaattgagtaaaaagaatagaagagttacagctatatagatagtgatgattttccaacgtttgcgaaggttcagtgcgtactggttgtttaaccatgaactgagtcgcagggtggaataaccgaggatattgaaagcggagataaaaaagataaaagctcctttagaatagagtatatctgacacctgagggggtaactcagaataattagccagcaggagataggaaaaaactcctaatccggaaaacagaagaccatatagtacaacattccatttcatgtgaacaaagctacaatattttacagaataatatagagtaaagagggataaaattaggagatgacaccggagatacagataaacaaaaacatgtttcacacataatatgaggataatgtattgttttacagtgatttggtgtgaaatgtgcatgttgtcatgaagtaataagttaaacttatgatatgccatctgttatttcagggtaataaccgttataataaaaaaaagaggaaggatttgttgttgccattgtttctccggaaaaagatcaaggtcttttttgaaaactcttccggctttttaaaaaacctcaaggtcttttttgaaaacctcaaggtctttttaaaagattcttccacctttttcagcagtcctcttttttagtatctgttcaatgccttcagtaatgcggaatagtgtccttgtgcggaaactttagcttgtacataattggtttgtgagacttgccgatagttttgggcctctattacttccactaccgacacttttccttccgcatatctttccaatgccatacgttcgttttcgcgagctttgtccaatgagtttccggttaattgtacctgttccattgcttgagataatgatacacgggctgtctggacttccaggtttacatggtcacttacttgatggagattatcagtagctgcaccgacttggaaagaagatgcctgtttctcattgcgccgttttccccattcgaaaataggaaccgacagtttggcataaacagcataattagggtcgaggtcggatttgaagttatacccgggcgaggaataactaccctctataccgacataaagttgcggcttatattttgagtctgtcagtttctttgaacttttggcaatgttgatttggtcgtatgccatttttaattccggtcggttgcatccatccaagttccataattcttcattcataactatggaaggaatgctgtcttccacttctgttgttttattgagttccatgccaatcagtgagttgagtgccattcttccggtttcaagattgctttttgcctgaagcaattggtattctgcttcatttagctttacttctgccatgagtaggtcttgcgggtctaccaagcctgcttccactcgttcacggatggttttggcgagcgaagcaatggaatttcgatagtcggtggcaacctgtaatagttcggcacgggccacggtgttccaatattgcatatcagtttggtagcacacggcggaacggaaatattccgcctgatgtgctgccagactatgttgatgttttgccattcggatggtttccagcagccgaccgcctgtatagaccggttgtagcaacgtgagggaagtgccatatttcatgtcttttccttcgaaagtcaatggattctgcatgctgggcaggtttagagtgagccggataggattaccggtatattgaaagttggcgtcacccgataacttgggacgtaaatccttttgggcggctttttccaattcgatacttgcagaaatgtgtttatccgccgccttcaggtcgtggttgtattccacagccatcgacctgtacttttccaataaatcactttgttgggcgaaagtagcggacggaacactaaaaataaagataaacagtatattaatttttttcatgagttatatctattttgagggttatatttaccataggagattgtccgaaaaagatatattgcactatttttttactttgtcattctgagaacaacggagaatctgtaaacacacaatgaaagtattcagattcttcacattgttcagaatgacggaatgattgagcagttgaacttttgggacagcctcgataacatgattacttaattttataaaacatggcatacagtgttggtgttataaataatgtcaacaatgtggcgaatgtcaatccgaaaataatggtggctgccatacctccgaatgctatatcgaacaacagaggaaccattcccagaattgtagtggtagctgccatcaatacaggacgtgttctggatactgtggcttctacaacggctgtgtagggagctactccgtttcgacgttgtatatttatctcatccagcagtacaatcacatttttaataatcatacccagtagtcccaaccatccggcaatggggaagaagccgaaatcaaatcctgtgagtaacattcctacggcaacaccgataagagacaatgggagtatgcatagaataatgatcggttggcggaaattgccgaataatgcaaccagaatcactaccagcattaaaaatgccagaggaaagaatttggcaatagcctgcatcgcttcaccttggtctttgtattgggcatcccaaaagaaactatacccttcaggcaattctattgcttctatctcttctcgtatttctccatgcacttcggccatggtgtgtcccggcttcactccacacatggctgccatggacaactggcggttgtatgtgcgtatctgtggaaactcccaagtggtttcaatcttttccgtcacttgcgatagaggtgctgaatgctctccgttccaaacagggaaatcacctaaagactggacatccgtaatatggactccttctgattttagcaatacgggtactttcttttcgttatcccgataaattcctatgggagttccatcactgacagatttgacagattgcatcatctgggctttggtgatacccagtgcaccggcttttacagggtcgtagacagggcgaatcatcaaggacatatttccccattcgttgcgggcatctgcgactttaggattgcgacgcattatttcgattgcttttcctgtcagtgaatccagtacagcggggtccggtcctaagaagcgggcttcgataaccgcttccgtcagggggctaagctcgaacttatttacttttatcagtggttcggggtatttctgacggatggagtcttgcagcaaggtatgtaattttcttgattcttgagaggtcttgcattttaccaatatctgtgcatagttggactgaggcccgaaagctacattagacagatagtaacggggcggagtgcggcctatgtaggtagaaaccatttcagtttcttcgtgtccgcggatatagtttgccaggttgcttgccatgcggtctgtttcattgatgtttgttccttcgggtaaccacatatctaccgtaaagtattgtttgtctagcgcaggtacaaaaactttaggtataaatttaaaactccaggcagaaagtatcagcataactaccagtgaaccgatagtaaccgatcgatggcagagtacccagtgcagggagttgcggaaacgattataatattttccgtcgaataaagcggctttcaattcctcgggacgcgggcgacggacaaattcttgtataaagaaaggagtctgcgtcagtgcgaacacccaactgaacatcaatgacactccgataaccacgactagtgaagatagcagttcacctgtgatatgtggtgaataatagatagggaggaaggtaagaatagcgatgacagttgccgccaataagggcaaagctgtagctgagcaggcgcgcatgatggcgacacgcttccgcattccgcgttccatattgattaaggcggagtctgaaacgacgatggcattgtccaccagcattcccatggcgataatgatggcagcaagtgacattcgctgaagcgcgatgccgcaagccatcatgacaatgagcgtggcaaagatggagaaaatcagtccgctgccaatcaaagtaccattcttgaatccgatgaaaaataacagaatggctataacggttagaacggaaatgatgaggttcaagataaagccttgattggcaacgtctgattcatatccttggtcatagatggaggtcagttcatatccttcgggcatggattgggatagtttatcaatccgatccttcacggcttttgccatatccactacgtttccggtaggtacggtagagatggcaatgcctatggccggctgggcattgatgcgcatcaggttgctggcaggtgtttgatagctttcttctatttgtgctatatcggcgaggcggaaatgttcgcctgagcgtgaaacgatagtcaggtttctgatgtcgtccaatgaatagaaatttccggttgactcgatgcgtaggcggttctgtccggcatcaattcctccggcatccaccaccttgttctgtgcttcgaatgcacggactatgtcggaagtggtaattccgctttgcgccatgacggatgggctgacagacacatcgatggtgggtgtctgtactccgtagatttccactttagctacatcttttactttcagaagctcattcttgatgattttagcctcgtcttccagttcccgataggtatggccatttccggtaagcccatagaaaacacccaatacatctccaaagtcgtcattgacaaccgaaggtcctgctccatcaggaagcttactttgtacatcgtttaccttgcggcgtaatttgtcccatagttgttgcatctcgtctgcccgggtttcttttttcacatagacggtgattttggagagcccggcgcgattctctgttttcagataatagagttcgctcaaagactgaatggattcttctaggatatcggttacttgagattgtacttcggagggagatgctccggggtagggagtcagtacgagtgcctgtttgatggtgaaaggagcgtcttccagttttcccattttgatgtaggagaataggccgcccgccaatatcaataccaatagcaggagggtgactgacttcttttgcaggaagtatttaactaatttcataactgtttgcttctttgatattatttgttatctgcatttattttcattccgtccgacaagaagcggagtccgctggttgctacagtttcatcgggacgtagaccttcggtaatggttacatatccgtccggtaacaaatctcctttttttactttccttaagttcacctgttgggtgttggcatccactacccacagataatcgccttctgtaggacgatggcaaagagccgtttgggggatggctactccattggtaatatccggtgttttcgaaggatgattcaattttgctttgccggacatgcctgccagtaattttccttctttattggggagtaaagcagttaacagataggagagattgttgcgggtagttcctttggaaatttccgctatctgtgccttatatatcttatcgggttgtgcgtcaaatcgtacttgtattgtatccatggcttgcgctgtataagcaatgtcttgagtgacgtaaatttccagtttaagttggtcgatatcaataaaagaaatgacgggttgcgtagccttcacatcctgaaatttctctatatatacctcacctacataaccgttgaatggggcgataaggcgtgtatcttccagttcgtatgaagcggtatcgaaagctgttttggcagtggtatagtctgcttttgctttttcgtaagtacttgcggagatgtttcctttatcatatagcttttgtatacgttcaaactctgtttttgcctgatggtagattgcttcggcacgttctttacgaatgcggaaatcacgcgggtctatttcggctatgatgctgccttgtttgtatcggttaccggcatatacatcgaaacggtcaatgggaccgcccacccgaaaggataattcggaagtgcggaaaggctgggcaataaaggagaattctttctctccttgatgtaaaaccgggacagcttgtgttgtctttacaataaagtcttgttttttgtcattgccttcggtggcacaggaagaaagtagtgcggcaaggctgaataaaaaatgagtatttacaactaattattcctcaatattttat

SEQ ID NO: 6656 - DNA, 39929 bp, Unknown
  gut microbiota DNA sequence
tttctttgtagcgggacccgggattgaaccggggacctcatgattatgaatcatgcgctctaaccagctgagctatcccgccatcatttctgatttgcgggtgcaaagatagagcttaattttgaatttcacaagcctattctaaactttttcttcataataatgttttttatctcaataaatactacatttcagacaattaaaaagcaaaaaaacaatgtatttattatgtgaatatagaaaatttggtttattttgcctgcagaaactttaaataagctaacacctatgggaaaagaaaaaattcgtttagaatacatgttgaaagccggctccggtaatgtcgtctggtccataataagcaccccatcaggcttagagacttggtttgcagataaaataacattcaaagataaagtattcaccttcaaatggggtaaaacggaaagtcgcgaagcagaagtaataaacttcagaacgaacagtttcatacggtttcattggctggatgatgaagagccgaaagcttacttcgaactgaaaatggtatataacgaactgaccggagactatatgctggaagttacagattgggcagaacccgatgaaaaagaggacgttaaagaactgtgggactctgaaatagaaaagttgaaacgagtaagtggactgtaattctttaaaaatattcaaaacataactctgctctccattttttatgctaattttgtaccttgatagttgcacaaaatggaataatgctacgcataaaaaaattagatatatttatccttaagagctttttgatgctctttattggaacttttttcatttgtctcttcatcttcatgatgcagttcttatggcgatatgtagatgaattggtgggaaaaggtctggagatgagtgtattggctcagttctttttttactcggcccttacattgatacccttgtcattacccttagccatcctgttggctgcactgatgacattcggcaatttcggagaacgctatgaattgctatctatgaaagcagcaggtatccctctgctgcgaattatccgtcccctcgtatttttctgtctgtttctcagttgtatctctttctactttcagaatgtagttgcgccaaaagcccagatgaaattgtggacattattggtatccatgaagcagacttcaccagaacttgacatcccggaaggagtcttttatgatgaaatcgaaggatataatatatatgtaaagcagaaagaccgcaaaacaggaatgttgaaagatatactcatctacaacttctccgatggatttgagaatgcacatatcatttgggcttcagaaggcaagatggagatgactgccgacaaacagcatctttatcttcatttatataatggtgaacagtttgagaatttgaaatcgcaaagcatttcttcgaataatgttccctaccgacgcgaaactttcagagaaaaacatactattattgaattcgacggaggtttcaacatggttgacggaagtttccttagcgaccgttcggacagcaaaaacatggtagaaatcagtcattctattgactctttgacttttcggggagacagtatcggacgaagcctctattcggaaattaaatcgtctgcttaccgagacattgatttgaccaagaaggactctgtcaaaatgatagaaagccacatgaccattattaacgcagacagtttattcagctcgtatactttatccgaaaaggataaaacgctgggcaatgctgccgagagagctgaatctcttgcttcggaatggaacatgaaaagttaccctaccacggatgtagacaacaatatccgcaagcacaaagcagactggcacaagaaaatcactctttcacttagttgtatgattttctttttcatcggcgcaccattgggagctattatccgaaaaggcggattgggtatgccggtggttatttccgtattgatcttcgtaatctattatatcattgactccggtgctacgcgtgtggcaaaaagtggtgaaatggatatggtattgggagtatggatgagtacgctggttttggcaccattaggtgctttcttcacctacaagtccaataatgattctgtggtgttcaatgccgaagtatatatcaacttcttccgcatgctgttggggttacgtccgtcacgccatgtatttaaaaaagaagttatcatagaagacccggattatccgaatatcctggcccggctcgatgacttgtgtaatgaatgtcagatatatgacaccgaacataaattgtcaggtgctcccaattattatcgtatattcaccaatagcggacatgacgataaaattgccagaatcagcgagaaaatggagcatctcatagaagaactttcgaatagtaaagacggcacattgctgaactttatgaataaataccccatcctgtctactaaggctcacaagagtccgttcgacaaccgatggctgaacttgccggcaggtctcatattcccaataggtgtattcttttatttccgtatctggcgcttccgcctgagactggacaaagatttgaagaatatcataaagaccagccgcgaaattcaagatagaataaaaaatgaatcatttataatttgactatggaagatttcaaactgaataccattgaagaagcaatagcagacttccgtgaaggtaaatttatcattgtagtagacgatgaagaccgtgaaaacgaaggtgacttcattatcgctgccgaaaagataactcccgaaaaagtgaacttcatgctaaaagaaggtcgcggtgtgctatgcgcccctattacattggagcgttgcgccgagttggaacttgaaaaacaagttagtaataatacctctatattaggaactcctttcacagtcaccatcgacaaattggaaggctgcacaaccggcgtctcggctcatgaccgtgccgctacgattcaggcattggctgacccaaattcaacttccgctactttcggacgtccgggacatatcaatcctttgtatgcacaaaataaaggtgtattgagacgtgcgggacatactgaagcggctgtcgacatggcacgtctggcaggacttcagcctgctgcagcccttatcgagataatgaacgaagacggctcgatggctcgtatgcctcaactgattgaaaaggcccgaaagtttgacctgaaaatcattgccatccgtgacctcattgcttatcgcctgaaaagtgaatccctggtagaaaaaggtgtagaagtagacatgcctaccgaatacggtcacttccgtctgattcctttccgtcagaaaagcaacggcttggaacatattgccatcattaaaggcgaaataaaagaaggagaaccggtattggtacgcgtacactcttcatgcgctaccggtgatattttcggttccatgcgttgcgattgcggcgagcagctgcacaaggctctccaaatgatagaaaaagaaggcaaaggagcagtagtgtatctgaatcaggaaggaagaggaatcggcctgatggaaaagatgaaagcttataaactgcaagaagacggtatggacaccgtggatgccaatatctgtcttgggcatcaggccgacgaacgcgactatggtgtaggagccgaaatactacgcagcatcggcatcaccagaatgcgtcttctcactaataatcccgtaaaacgagtcggtttggaatcctacggcttatctgtagtagaaaacatccccatcgaaacaacgcccaataaatacaatgaacgatatctgaaaacaaaaaaagacagaatggggcacactttacactttagcaaataatatttctacatatcgggcaaaatcatatcttttttaatatgattttgcccgattcactttcataattgagatataataacttattttgcagcaagtaaacttaaacacataaaaaacaatagcaatgaaccaattatcagaccgcctgaatcgtttgtctccatcagcaacgctggcaatgtcacaaaaaagtagtgagttaaaagctcaaggagttgatgtaattaacctgagcgtgggtgaaccggatttcaatacccccgaccatatcaaagaagcagcgaagaaagcagtagatgataacttctcaagatactctcccgtgccgggatatcctgcacttcgcaatgctattgtggccaagctgaaaaatgaaaacggactggactatactgcaacgcaaatttcttgtgccaacggagccaagcaatcggtttgcaacaccatcatggctttagtcaacagcggtgacgaggttatcgttccggctccttattgggtaagttatcctgaaatggtaaaactggcagacggtactcctgtgattgtagcagccggtatcgaacaagactttaaaatcactccggctcaactcgaaacagctattacccccaagaccaaagctattattctttgttcaccgtctaatccgacaggctctgtttacagcaaagaagagttggccggtttggcagcagtattggcaaagcatcctcaggtatatgtgatagcagatgaaatctacgagcacatcaattacatcggcaagcacgaaagcattgcccaattccctgaaatccatgaccgtgtgattatcgtgaacggtgtgtcgaaggcgtatgcaatgaccggatggagaatcggtttcattgccggccccgaatggctggtcaaagcagtgaataaactgcaaggacagtacacatcaggtccttgctctgtttctcagaaagctgccgaagctgcatacacaggaactcaagctccggtggaagaaatgcgtaaagcattcgaacgccgtcgtgacctgattgtaaagttggctaaagaaataccgggatttgaagtaaacaacccacaaggtgctttctacctgttcccaaaatgtgattcattctttggaaaagcagcgggtgaccgacaaatcaacaattcggatgatttagccatgtatctgctcgaagtgggtcatgtggcttgtgtaggcggtgcttcattcggtgctcccgaatgtattcgtatgagctatgccacttccgatgaaaatatcgttgaagcaatgcgccgcattaaagaagcattggctgaactgaaataaccgttcatatccccatcaaataaaatggctgctctcattgagaacagccatttttctttttaaaccttgacggattgtattatccctggctaatagcttctgaagggcatacatcagcgcaagttccgcattctgtacacatgtcaggattgatagaatacttatcaccttcagaaattgctcctaccgggcattcatcgatacaagtaccgcaagcgatacaatcgtcactaattacgtaagccattttctttaaatattaaattattagtactaattgatggaacaaatatacagcttttatccattagttgtcatatagacattacaatattacactaatttgtatttaatctaaatacgtttactttgtcattgcctgatacataacttgttggatacgtggacgaatatttaacctcatcaactgtttatggtcaaagggacggggataaatacgattactcagaaaaacaaagactaatttattcttcggatcagcccatgcacatgtacccgtaaaaccggtgtgtcccactacctctgccggagcctcggcagcacaaggactctttgcctcatttttcttgtcaggtttgtcaaatccgagtcctctacgacttatcttagaagtgtgagtaaggaacaagtcacaagtttccttgctcagatagcgtactccttcatatactccaccgtctatcagcatctgatacaccttagccacatcaccggccgtagaaaacaatccggcattacccgataccccgcccaagaatgctgccgactcatcatgcacatacccctgcaacatacctcctttacgcagataatcagctttcacagtaggcactatttcatctttagcaaaacggcgcaaaggcagaaataaagtatgctccatcttcatcggtttataaaattctttttgaagaaaaatattcatcggtatctttgttatattctccactatctctctcagcaatatgaaattcaaatcactataacgatacctcctgtctttcaaaggcactccggctatttgttgcaacaccgaatcacgaaaagaacgatgcagatacatactatctgacaccaataaaggataatccgatgaaaaaactttcgacaccagttctttcttatatccgaaatgatcaatgacaaacaggcgtgtatctatctgtctatgatggccggcatccggtctcgtcctataaaaagctcccgtatagctttcttcatctatcgctttcttatagaacggccaaaatgcaggcagcccggactgatgcatcaataattcttcaatagtgatacgctccttacctgtccccttcagcacaggaatataatctgagacacgatcagtcaatccgaacttcccgttatcatacagtttcatgacagccaacagagtggcggtagttttggtcagcgaagccaaatcatataaattatcagcctcaacttccttagacttttcataagtaaaggttccgaaacatttatcatataccggcaccccatctttcaaaatcaaaatctgacaaccgggataagccttcgctttgattccctcaagggctatctcgtctattcccttcaatacagcagagctcatgccataatcttcaggtttgtaaatgcgagaaaccttaggactcatggttactccgtcacccggtttgaataaatcggaaactgccacagacagacgtccgtccgccacggctcttcccgccattacatctgccacctgacgctgaatttcaagctcatccgtatgtcccaacacaactgctgctgcttttttccaacatacctccatatccgacatagtcttcaaaggcatcagatatacataaacaacaggcaggctgtcgggcagtttttccaacatcggcttatacttattataatcattagagttaatgactacaatgacacgctggctgtttaccaactctttcctaatagctgacatcgaatcggatgttgccataatacgcctcagaggtaaatactgtttcaagcgactgtagaactcaagtccggaggaaggctttccgatattcaatactgtagtgccgcgcaacttggcatccagaggcaaaaccccgccggtattattgacaacggtaatggctgctttctgcaaacggctaattaattctgccacttccgtacgattcaatcgtttatcaagtcccgatatctgaacatgaggcttcgtctttagccctaaagcatatttataagttaataccttgcgacatttctctgttatctccttttcagaaagccagccactttttacggcttccaatactccgttcagttctcttttcagattgcgaggagccaacaacaaatcattacccgccttcaacgctttagcacacaggttctcattttgagaaacccctttcatttcgagtgcatctgtaaacaccaatcctcggaaacccaactcccgacaaagcagattgtcaataacatgagcagacaatgaagccggattctttcccaattcaggaacttccagatgaccggccataatccctcccaatccggcatggatcacctccttaaacgggtaaagttcaatactgtccaaacgggcacggtcaaaattcagcacaggcaacgccttatgagaatccacttccgtatctccatgtcccggaaaatgcttggctacagaaagtactcctccatcctccaatccacgagaatatgcaaccactttttgagcaacgtttttaggatcaccgccaaaagagcgagtattgatgacagggttgcgcggattaatatccacatcggcaacaggagcaaaattaatctgtacacctatttctttgcactgacgggcaacttccttaccatattcataaagcaattgattatcctgaatacagcccaataccctgttgcggggaaaacggggagtattcttcagcctcatcgccaatccccattcgccgtcaaaagcaataaacaaaggtactttcgataattcttgtgcgtagttggtcagtattgcctgattccccacctgtccgccggagaacagcaaaccgcccaccttatattccttaacagcattatatatgttcgcccggttagactgcgtattgagaggagcgactgtatgtataaataactgtcctattttctctttcaaactcatttccgacaattgcttctccacccattcacgacattccgcactgtcagccccacctcttctcaaaacattaggcacttgctgggcatacaaagaaagcccgaatatacataatacatatagtaaaatgattttcttcattcgattacagttaagtcactctttttttattatttcacattcttctttactctacgcttttaaagcgtttattgcccaaatgtactcaaaaaagaaaaagctgccaactatatcagataaaaatatatgaaattatatttggttgtatggtgaaaaaccactaattttgcaccgctttcgcgcaatcgctgtcaaagaagagttacttgatatgttgcgttgtaacgataaacaatttaaaatcaaaagaaatggatttaattaaaattgctgaagaagcatttgctactggcaaacagcatccttcattcaaagctggtgatactattacagtagcataccgtatcgttgaaggtagcaaggaacgtgtacagttgtaccgtggtgttgttatcaaaatcgccggacatggtgacaaaaaacgtttcaccgttcgtaaaatgtctggaactgtaggtgttgaacgtatcttccctatcgaatctccggctatcgacagtattactgttaacaaagttggtaaagttcgtcgcgctaaattgtattatttacgtgctcttaccggtaagaaggctagaattcaagaaaaaagagttaacgcgtaagacttattatccctacataaaaaaggaacgtttccatcaggagcgttccttttttatttcatataactaaatctctttagcagtgcatgaaacatcaaggcataaaaaaaggagcaacgccttgctccaacctttgttaaccttaaatctaatactatgaaaaacacagtgcaaaggtacggacttttatgaaataagcaaataaaacaagaaaaaaagtatgctttctaacatgttttaatgtatttcaccacttttattaagaagtattttcatgtcaggcaacaggtgccaatattacagttttatttctaaatttatattaaacggaagccattttcaatattaaaagttaaaacaacaatataaaaagcatgttgcaaaacatattttgctcatttggtgttatctttgcagagtaataaaagaaaagaaaaaggttttaaggattaaccagttctccaaacgggagaacacaaaagacgtaattatggaaatgaaaagaacaaatgacacaatcgagatgttgcagtatcagttgaaaagatacaaagcaatgagaaagggagctgcatgccaatctttgcagtacaaacttcacaaattaatgagccaacaggctaatgcctaatggctttaccattgagaacacaagtttataatttataataatgaaaagaatgtttcctcatttcaggggaaacattctttttttatatctatcccattgatccaataagaaactcagtcagaccggagaaagcataaataaggcacaaacaaaagagaccatcctgaattcatattcagaacagcctcctctccataaagtatacgttaaatatatattatttataaagatggaacatccgatccatcaactgccatttttcagctgaagaagctccgggttctgcctgttgaaaaacagacatatagttttcccattcttcctgacggggcaatgtggccattttagccatagctgtatcccaatcgaaatcaagcggagtctccactatcataaacaaactagtgccatggatataaatctccatttccagaatacccacctcacggattgctgccaaagtctccggccacacctcttcttcagagtgacgtttccgatattctgcaatcaatgccgggtcatctttcaaattcaacatctggcaataacgcttcaccggaccgtgatattcccgaattttatatccttgtgttttgttttccatcagatatctcttacttcccaacctaatgcacttgctcccaaaacagcagcatcagcatctttcaattctgaaatcaacagcttagtctttccggcataaattttcaggatattatcatcaatagccttttgaataggtttcatgatataatcacccgactttgccaaaccaccaaacagaataattgcttcggggctggagaatgcaatgaaatcagccaaagcctcacccaaaatgcgtccggtatattcaaagatatcctgtgccagtttatcacctcttacggcagcgtcaaatacgtctttcgacacaatttcttcagccggaatatctcttaacaaagaaggttcgggacgtgcaaccaagaattcacgagctgtgcgtgccacaccggtagctgagcaataagtttccaagcaacctttacgaccgcaaccgcattggcgtccgttttcacgacgcacgataacatgtccgagctcgcctgcaaaaccatcatgtccatacaccaactgaccatttactacaataccactacctacaccggtacccaaagtaatcatgatgaaatctttcataccacgggcagcaccgtatgtcatttcaccgatagcagcggcattagcatcattggtcagggctgtgggaacacctattttttcttcaaacaaagcagccaaaggtataacacctctccaaggcaaattgggagcaaattcaatggtaccattgtagtaatttccgttaggagcacctacacccatacctttgattttctctactccgccaaaagattcgattaaggggcgtaactttgtacatacagcttctacataatcttctatcttggagtatgactgtgttttaactgaatcggtagccaatacgttaccacgtgaatctacaacaccaaaaactgtattagtcccgccgatgtccatacctacaacgtagggtttttccatgcctgttaccatgatatgtataatttagggttagttattgggaacaaatgtactgaatgcgaaaaaagggagcaaattttttttcaattatttcgtgtatccatgcaacttttcacagagcaggtacgtctaactattcaaacacgaataaatttcatcggttatgatacatttagagaatatcaacaaaacctatcacaacggagcgcctttgcacgttttgaaaggcatcaacctcgatataaaaagaggtgagtttgtgtctattatgggcgcctccggttccggtaaatctaccttattaaatatattggggattttagacaactatgattcaggcaattactacctgaatgatgtattgattaagaaccttagtgaaacaaaaagcgcggaataccggaatcgcatgattggtttcatattccagtctttcaaccttatttcttttaagaatgcaatggaaaatgtagctctcccattattctatcaaggcatgagtcgaaaaaaaagaaaccagcttgccatggaatatttggaaaaactcggactgaaagaatgggcacatcacatgcctaacgaactttcgggaggacagaaacaacgtgtagccatcgcccgcgcattgatttcaaaaccgcaaatcattctggcagacgaacccacaggagcactcgacagtaagacatcggtagaggtgatgcagatattaaaggatttacatgaaaaagagggcttaaccatcgtggttgtcacccacgagagtggcgttgccaaccaaaccgacaagattatccatatcaaagacggtcttatcgaacgcatcgaagaaaatctcaaccatgattcttccccttttgggaagaacggtttcatgaaataacagcacacacatatgatagaccttattcaagaaatatacggaaccataaagcgcaacaaactgcgcacgttcctcaccggttttgccgtagcgtggggcatcttcatgctcattgtgctgctgggagccggcaatggactaatcaatgcctttgagagcaacgccggcggacgggcgctgaactccatgaaagtctacccgggatggactaacaaaccttttgacgggttaaaggaaggcagaagtatcaagctgacagaaaaggatatggagattacaggcaactttaaagacaatgttactgccgtaggtgccaccatagagcaaagcagcgtaaacttaagttacggagaagatcacgtctctcttttgctggaaggcgtaacgcccgaatatctgcatatcgatgccatctctataaagacaggacgtttcatcaacgcccccgatatcaaagaaaaacggaaagtaatccttttgcatgagaagacggtagaaatgcttttcggtaagaaagatgcaaatgtcatcggaaagtatgtaaacgccagtggcctggcctaccaagtaataggagtctatacagatatgggcaactactctccctcagcctacattccattcacaactctgcaactgatatacaataaaggcgataaattggaaactttagtattcctgacacaaaacttacccaccgaaaaagccaacgaagatttcgagaagcaataccggcaagccatcggcaaccatcagcgctttgacccgacagaccgcggagcaatatggatttccaaccggttcactcaatatttacagcaacagaagggcaacaacattttgcacactgctatttgggtaatcggcatcttcaccctgttgagcggaattgtgggtgtaagcaacatcatgctgattacagtcaaagaacgtacccgcgagttcggcatacgcaaggcattgggagccaaaccagtctctatcctctggctgattattgcagaaagcgtagctatcaccactttctttggatatataggcatggtggcaggtattgccgttaccgaatacatgaatgcggtagcaggagagcaagtgatggacatcggtgtagcttcggctaccgtattcctgaaccccaccgtggggttgaatattgctattcaggccacccttaccctgataatagccggcacattggcgggattcttcccggcacgtaaagccgttatgattcgtcctattgaagcacttagagcagattaatatgataagaatagacatagacagatgggaggaaatactcatcaccatcacgagaaacaaaacaagaagcctgttgaccgccttcggtgttttttggggcatttttatgttagttgccctgatgggcggcagtcagggaatgcaggacatgctggcatcccagttcgacggattcgctaccaattccggttttatgggaaccaaccaaaccagcaaggcttataaaggcttccgaaaaggacgctggtgggatttagaaaacaaagatgtagagcgcgttcgccgggcaatccctgaaattgacgtagtaacccccaccatagccaaatggggcatgacagcactttataaagaaaataagattaattgtaccctcaaaggcgtatatcccgaatatacgaatatagaggaaccggtcatcgtacaaggacgttttatcaatatggtagatgtaaaagagcgtagaaaagtttgtgtcatcggcaagcgtatccacgaaactttattcccgaaaggtgataatccatgtggcaagttcctgagcattaacggaatttactatcaaataatcggaatcagcaccactgccggcaatatgagtctgcagggaaatgcacttaccagcatcaccattcctttcaccaccatacagcagaactataacttcggacagaaaatccaattactatgctacacggccaaaccgggatattccatttccgagatagagaagaaggtagataaagtgataaaacaagcacaccttatccatcccgatgacaaacaagccttggtgactgtaaatgcagaagcaatgttcagcatgatagacaacctgtttaaaggcatcaagattttgagctggatggtcggattgggaacattattggcaggcgccatcggtgtaagtaatattatgatggtgacagtcaaagaacgtacgaccgagataggcattcgccgtgccatcggtgccaagcccagagacattatgaaccaaattctttccgaaagtatggtattgaccatcattgccggcatgtcgggcatctgttttgccgtgtttatcttgcaaatgatggagataggaactgcccattcggacacgccggcgcatttccagattagtttctggatggccatcggagcctgcatcctgttgatgatcctcggcacactggcaggactggcacctgcctaccgcgccatggccatcaaaccgatagaagctatccgggacgaataatctgcccgacaacccgacacataaataaatccaatgaagtaaaaacaataaaacaaacagatatgaaaaagtatgtaaagattgcgttactagccatcgtagccctcattttcttgggaacttttgtcttcctctatcagaagtcacaacccaaagaaactgtgtacaacacagaaaaagccgaaatagccgacttaaagagaaccaccgttgccaccggtaagatagaaccgagagatgaaatcttgattaaaccgcagatttcgggcatcatcgacgaggtatataaagaagccggacaaacagtaaagaagggtgaagtaatagccaaagtaaaggttattcccgaactgggacaactgaactctgccgaaagccgggtgcgtctggcagaaatcaatgccaaacagggagaaatagattttgcccgcatgcagaagctatataccgacaaactgataagcagcgaagaatttgaaaagagcgaagtggctgtcaaacaagtgcgcgaagaacttcaaacggccaaagataatcttgaaatcattaaagaaggcatcactaagaacagtgcttcattcagcagcacactcatccgttccaccatcgacggattgattctggatgtgcccgtaaaagcaggaaactcagttatcatgagtaataccttcaatgacggtacaacgattgctaccgttgccaacatgaacgacttaatcttccgcggaaacatagacgaaacagaagtaggccgtctacgcgaaggaattccagtcaaaattacgctaggcgccttgcagaatatgatttttgatgcacaactggagtatatttccccgaaaggtgtagaggaaaatggcgccaaccagtttgaaataaaagcagccatcaccgtccccgacagcgttaccgttcgttcgggctatagcgccaatgccgaaatcgtattgcagcacgccgacaaagttctggctgtgcccgaaagtaccgtcgaattcagcagagactctacattcgtgtatgtactgaccgacagcgttccgcaacagacattcacccgcaagcaggtgactaccggaatgagtgacggaataaagatagaaatcaaaaacggcttgcaggccaatgatatcgtacgtggaactaaaaaagacaaataaggatgaaagctaaaatactgaccctgatagtggctaccgcatcttgcctcccctctttcgcacaagaggaatgggacttgcggaaatgcattgactatgccatcgaacacaatttaagcattaaacaacaggaagccacacgcgaccagaatgctgtggaactgaacactgcccgatggagccgtctgcccaacctcaacggaaatgtgggacaatcattcaacttcggccgagctcttcaggcggacaacacttatggcaaccgcaacacccaaaacaccaatttctcattgggaaccaatgtaccgttattcaccggtttgcagatacccaacaacatagctctctgtaagctgaacctgaaagctgccattgaagacttgaataaagccaaggaagatatcagcatacaggttacttcctcttatcttcaagttctctttgatgaagaactggcaaagatagcacacagccaagtggaactgagccgtgagcaattgaaactgaagaccgctttctttgagaatggcaaagcatccgaagcagaagtatatgatgcacgctcacgtgtggcacaagacgagatgtctgccgtataagctgacaataattaccggttagctcttctggatttaagccaactattggagcttcccacaccggacggtttccgcatcgcatctcccaaggtagatgataatttcaattcgctttcgctgcctgaagatatctacgccgatgccgttctcaccaagccgggcataaaagctgcacaatatcgcttgcaaggtgcatccaagaatatacgcattgcccaaagcaactggtatccgcaattaagtttcggagccggactgggtaccagttattataagattgccggagaagaaaatgtttctttcaacagtcaatggcaccaaaacttcaataaatatttccagttctcgctcagcatcccgttgttcaaccgctttgagacccgcaaccgagtaaagatggcacgcatccaacgcactgccctgtcatggaaactggaagaaagcaagaaattattattcaaagaaatccagcaggcctattacaatgccgtagccgccgaaagtaaattcaagagtagccgcacggcaaccgaatccgccgaagcctctttccgactgatgagtgaaaaatatgccaatggaaaagcaactgccacggaatacaatgagatgcgtaccaattggatgaaagccacatcggatatggtacaagccaaatatgactatctgttcaggagcaaaatcctggacttctataaaggaataccgctgacactggaataattcgaattcatccacaaacaatccatattctgccacctacgctaacaaaaagcaaaatatggattgttttcataattttaccttcccaatttatccgatcgtgtactctagggacatatctaacttatcattcaacaggacatccgccataagcccgcaggtatatatgtattcatatccaaattcatcgggttggtatgaacaagatcagtgcaactgcaagcagaagcccggtcagcacaaaagcccatatattcattacccgtgactcggcctgtaaccggtaattatctgccaacacccgataggcatccactttccataccagcattccatcttcggccgatactgtattggaagagagcagttctcccggcatagacagttcaaactttatctgatattcaaataattgtgtagcgatgcatttttcttcaaacaattgctccatctgccgggcatagtctttatataagttgccgaaaacggcagtctgataccttttgtccagcaatctgcatatatactccggcgagcattccatttctttcttcctattcccatcgctgcggaagatttcctctttgtccttctccagtctcgacagataggtcaattcagccggggtctttttcagaaagtgttctactatcccatagctcatttcaaactgagtatgatagaaccattcaaggaaacgctgctctgtgtcttccaagctgtttatcagctccactccattcattcctgcataaccgtccgcttttccctgcaacaaaaagagctgttcggctttactcaggtacttatccatcggtataggtcctttatcttttatctcctgaaaatcacaggtataagtatagtaagtataaaaccaacgaaaatgtttttccagtttttcctccggaactgccaatggacgcatccacttttcctttgccgaaaagaaatccatgccttccaagccgttccgtgttttgcatgccttaagattcagttttccggtttccccaaagaagtccgtctcgatgcatgaatccaattcttccacttcccaatcttttcccaaccgaaacaaaaacggattatggttactgtctccggccaagaaagcagaatcggcgagtgcccatacttccttttccaccgttccgtccttgtgaacgcgcgtcaccatttgataattggtggaacatgatgccaatatcgtcaataaggctaccattactatgttcattctctttttcatatcgcactcattttaatggttgttactcataaattgatgtatcaatcgcttttgtccgtgttgcttagccttccgtgctttccacatttcggacagacaggcactcttttcctttaggctcatatctgcgttccggtctgccggccattctgataaacggcggtacaaaggagaagcatttaacacggcatcccgtgtgcctgcattggaagaaacggaatagaagacagtctcatgcaccataaagcaaagcaagaaaccggcagccacggccgaagcccaagccatgaattttctgtgctcctttctttttcggggagtccgggctactttttggagaatattccgagtcaagtcatccggtcttgtcagtatcggttgcgtctttctcacctgctgcaaccattgttcatatcgttcgttttcctcttgtctcataagtctgtctctatttgatggattttagctcttatttgttttcgtgcctgataaagattatgctttatctgttcggcggtcatcccggtgatgcttattacttctgcaacatccagttcttcaatgtcacgcaatgtaaacaccagcttctgtttaggaggcagatctcctgtgaaacggagaatcaaatcctgcaattccttattgaccaaagcttcttctatgttttcctccgacttccaattctcattcgccggagcaaaatcggatgagaaagccgaaggcgaacgttgcagcacacgcaaacggtcatagcatgtattacaggttatcttgtacatccaggtagtaaaccggcatcttccgtcatacttatccaacgaaagccagattttgacgaatatttcctgcaccatatccctcgtttcgtcctcattgcaaagcaaacgaaaagccagtctgaacaccatcgtctgaaattcagaaaccaactgagcgaaagcaatcgtatcgttctgtctgctacggtcaataagttcctctatctgttcttgattcatcatgctatgttcgtttattatatgatacgtgagaaaacgttgccggtcgaatgcaagttacaaaaaaaaacaggcaaactccggttgtggtatattaaaaccgaaatttgcctgtttgctgctttttatatcatagccattaaattacactgtgcgagcgtgtgttgcacttcttcctccggattgattcgaattcttgtcattccttttattctctttctttgaatctcttttcggagagacggaacgcctgttttcacgacggtctttatcaggacgggaattatattcacggcgtgaaggacgctcctcgtgcttatggttgttatcccttcccggtcttctgcccggccgtgcctgaggcgtggcaggacggtgattgtctttcttcggcggacggacgttgacctgaaaatcacggcggcgatgattgtcataagtcaccctatcatgacggatgcgataatgtccatcgtagatatcgtggtgatagcggttatggaaatgggtgcgataataactgacattattaaaatgagtacgataatgaccgccgcaatatgaagcataatgatgcggttttccgaaatagaaaaagttgacgttattgtaaaccatataaatacggaactgccatttattgttttgcgcgtaaataggacggtagaaatattccgctttcaggaagcgacgatactgagaaccggaaagtatccagcgaaggtcgtcattgcggacatcaagaaaatcgtaataacgctccaaagcataatcataccctcttaccacatcatccatcagataacggacattgttgataaagtcataattcacttcgtatacatcatcatactgttgaggactgagtttcaactcatatgccatacggtcggtaaggaaacgcgtgttctgtctcatcttgctgatactcattgctcccaacgcgggaaccgacacgcccagcatcataatcattatccatagtgtggtccatttcttcataatcataccgtttttagtttgttaattcttatggcacaaaaataggggaaatccctttcccccacaattgaaactccccatttattcatagggtttttcctatatttgatagggaaaactcccgtcaggcaagacggatccccccttcttccagcactatcaaacgctttttatacaaatcgccaactgcttttttgaatgtcttcttgctcacgccaaaagcactatagatttcttctgccgcactcttgtcattcaacggagtaaaaccatcattatctttaatatatttcaataagacttccgaaaaatcttccaccttcttcacaccgtcctgttgcaacgccaagtctatcttaccgtcttcacgcacttgtttcacataagcccggagctgcatacctgtctcgacgggctggaatatctcattctgataaagcaatccgctgaacttgttctcgacaatcgctttaaaacccaaatcggttttctgccatatcaaaatattcacttcctgtccctggtgatagtcaggatgctctttggataagtaacgctctaccttggcggaaccgacaatgcgatagctgtcttcgtctatatgtgcatgtatcacatacttacgtccttgctgcatcttcattttctgttcgcggaaaggtacaaacaagtccttcatcagtccccagttcaggaaagctccaaattcattgacccatgccacctccagacaagcgaactcacctacctgaaccaacggttgcagggtagtggctattaatctctcttcgttatccaaatagataaacacattgagcacgtcatccggtttgcaaccatcgggcacgtaacgggccggcaacagtatttcaccatcatcgtctccatccagatagactccaaagtctacttctttcacaacctttaattgattgtattttccgagttttacgttcattagctaaaatttttatcaaagataaagaaaaaaccctatctttacgttctaaacaatagaaaacccaataaagattatgaataatttcattttttacaaccctacccgactccttttcggtaaaggaatgataaaccaactgactcagcaaattcctgccgacaagcgtatcatgattacctttggaggaggaagtgtcaaaacaaacggagtttacgaacaggtaacccaagcactcgaaggacgtgattataccgagttttggggaattgaggccaatcccgatatagacacactgaaaaaggcaattgccataggcaaggaaaagaatatagatttcctgcttgccgtaggcggtggttcggtcattgatggcaccaaactgatttccgcaggtatcccatacgagggagacgcctgggaactggtgaaaaaaggaagctcacaagtgactattccattgggaacagtgctgactatccctgccaccggttccgaaatgaacaacggagccgtgatttcacgccgggaaactcatgagaagtatcctttttatgccgactatcccgtcttttccattctcgacccgaccgtcactttctctcttcccgatttccagattgcctgtggactggctgacacttttgttcatgtcatggaacaatatatgacgaaaagcaatgaatcatacctgatggatcgctggagcgaaagtattttgagaaccctcgtacagatagcccctctcatcaaagagaataaacaggattatcacttgatgagcgaattcatgatgtcggctaccatggcattgaacggtttcattgccatgggtgtatcccaagactgggctacccacatgattggccatgaactgactgccctgcacggcatgacccacggacagacccttgccatcgtatttcccggaacactacgcacacttgcggataaaaaacgagacaagatactacaatacggagaacgtatctggggggtgacttccggtgtgccgagcgcacgtatcgcactcaccatcgacaaaaccgaggaattctttaaaagcctggggctgaagactcgtctgggcgaagccggaatcggtgacgataccatcgaagaaattgcacgtcgctttgatgagcgaggtgctgcattcggtgaagacggtgacgtgacgggagaagtagctcgccggattttgcagaattgcaaataatatttccaaaacatttaatattaggaggaaacaaatgatgaaaacaattattcttactaccttttacaacaatgtgcaagcgcacatgttgcaagacctcttgagaaacgaaggcatagagtcgatgctccaaggagaattgtccgcccaagtgatagcctcttatattccgggtctgggtatacaggttctggtctttgaaaaggattacgaacgggcacgggaaattttgaaaaccagttttccggaggaagtagaaggataactttctcccctctatattcaaactttctcatttgcatcttgttatagggattattaaacctaaacccgagatgtatatgagaaagtttttatttttacctttattgtcattactcgcttcgtgtgcaaaagacgatgactgtagccctgccaacgtcaatccggacaatctagtgtctccggcactttatgcaaccctcgaacagcatagcaccgacccctataccggaccgttggaggtacttccctgccaacccgatggcagtatctatgtaggcaactatactccgacaggacggcaagtccctttccccgcttactatgccatcaacaatggtatcggccagtcaaagaattatccgttaaggcttccggtaggtacctataatataatctattggggatatcccaattactataataccacagacgcttacatagccgaccctatcctcatcgttggtgaagagctgcacggaacttctttgggactgcgcaaggttcctgccgacaccgtctgttatccggttcacgatttagtgtacggcactcagagcataaacataggagaagaggagctgcaggctcatttgagacgtgcttcggcagctttggaagtcgttgccacggagacaaacggcaatgctttcggcaatggcattgattccatgtgggtgtacatcggaggaatttatagtgatttaaattatttctctgcgcaaccggaaggaactttcaagacggttgaattcggcatgagccccagtaccgaccgtaaacaatggagcaaagaattcgtttctgtctttccatccggcccgactccgcctttccagatatttgtccgaatgaaaaacggtaaagtcaaacggtatcagcagaaactgtccacccaactcaccgcaggcaccaaaaccaccatcaatctaagcatggacggagttttgctggaagaaggaaatacaggcggattccaagttgataaatggaaagagcagaacgaaaatatccatataccattacgctaacggtctatggatatcctgccgtcaaccatgtgaatagtacggtcggtcaatttggcaagcgtctcatcatgggtaactataacaaaagtctgccctaacttatcccgcaaatcaaaaaacaactgatgaagttcttctttgttacgagtatccagactgcccgacggttcatctgcaaggataaccgccgggctgtttatcaatgcgcgcgccacagcaacgcgctgcttctctcctcccgacagctccgccggcttatgagaagctcgttcggcaagccccagaaaatccaatgtttctttggcacgcttcatcgcatctcccgaagaagctccggatatgaatgccggtatcatcacattctccaatgctgtaaattccggcaataactgatgaaactgaaaaacaaagcctatctgctgattgcgaaaagccgacagttctttttccttcaaccggttaacctccgtaccattcagtatcaccgtacctgcatccgccttgtccaatgttcccattatctgaagcagcgtcgtttttccggctccgctgggtcccacaatactgactatttcgccttttcctatcagcaaatctattcctttcagcacttgcaacgtgccaaagctcttggttattccacttaattctatcataattacaattttcttatcacatactctgccaagtaacatccaaacacggcaggcatataactcactgttccggctgtggatttcttgttcttttcatcatccaccaaaataaccgcatccgcatttgcctgctctgtactgaaaacaaccggtaacttgcgcttcatacccattttctgcaagcgcttgcgcacagccttacttaaaccgcaatgataagtttcccacaaatcagcaaatctgatttgggttatatccgatttcgcacccgctcccatactgctcacaataggcagatgacgttgaagcgcattatatataaggtaacatttgggagctaccgtatcaatagcatcaatcacaaaatcaaactcagcactatccagcaattccggaatgcgttcatctctcaaatattccgacaacacattcagtttcaaatcgggattgatatctttgaaacgctctgccaatacttccgccttcggccgtcccagtgtggaatgcaaagccggcaactggcggttgatattgcttggctgcaccgtgtcggcatccacaatcgtcatttgtcccacaccggcacgacaaatcatttcggcagcatacgctcctactcctcccaaacccacaacaagcacatgggaatttcgcaaacgtagcatcttatcctctcccagcaacaattccgtgcgttgctgccattccgtatcagttccgttcatcacctttcttaaaccatttataaaaccacttaccaacattatcatacatccgggtctccgactgtccgcgcggatcggagaaagacacaatctcctgcggatcgcccagctgatcggaatatatgattaacaagctggcatctgcaaaatatttactaacctgagacggcaaccgctcaaaagaagtctgataggatatagagcccttacgagccgaaacaacgacaaataaatggtcaaaattaacctgaccggtcagcaacagtaaatcatcccactcctctaatacagaaaactccgtaaacgtatttgcttcctgcttctctaccaccgcacgcaagtgtctcagggtatcctccgttgcaaaaaaatgtacacggcatcccagtaacttacccatacggcacaactgcaccacccatttcatgaatccaacctcatattctgctttttcgggtacagccactacaatacgcctaagcgtattaaccggcatcaacagcttggcaatcataatttgccggtgagtgcctttcaacaaattctccgtcattgtaccaaagaatgaatccatcagattagtctttcggtgcaaaccgataaccacatccgtcaccgcatattccttcagcgtatgaataatgccttgtgcaatattcaaatcataacggagcaccgtcttgaccgaagcatcggcagcagcagcaaccattgccgtacgttccagattccgtttacctatcagttccttcgtttccgaagcgttattatcatttatcacactaagagccaccaacggttccttctgtttaggatgcctcatcatcagcgccattcccaccaatccttctatcgtatcagggtttgccacaggtatgagaatccgttcttgctccttattatttttatcatcattgccggtcaggttttcttgtgtaaccatccggcgcgctgccctctccgtcgcaaccgaactgatgatgcaggtaaacaatatcattaccaccgttccgtttaacacatcatcattcaataagcgctctccgttttccatgataatttcatgtccaatcaacacggctgccaacgtagctgccgcctgcgcgttactcaatccgaatatcagactgcgttccaccttctgcatgccatatattttttgagtaatccatgccgcaagccatttgctgaatgtagcaaccactgtcatgacaaccgccaccttaagtgcttcaccctgcgtaaacagacagcgtacatcaataatcattcctacaccaatcaaaaaataaggaatgaaaagcgcattacctacaaactccaaccgattcatcaacggagaaacatgaggaacaaaacggttcagtaccaaaccggcaagaaaagcacccaaaataccttccattcctaccagctccatcagtccaccccctaagaacaccatagccaagacaaagacaaactgcattaccgcatcctcgtatgttctgaaaaaccaccgactgatgcgaggcataagaaaaataatcaagccgaacaatgcaagaacctttcccagcaaaatggcccaaaacaatcctcccacatcctctcctttatacatacctccaatcacggcaagcaccatcaaggccaatacgacagtcaccgccgttcccccaatcgttatgctcaccgtacgctgccgggacaaaccgtaacgactgataatgggataagctatcaaagtatgactggcatacatactggccaacaggatggaagtgacaagtccgtaatccaataaactcatactgctccatataccaagcgccatcggtatcaggaaagtgaacagcccaaagaccaatccctttgttttgttctttttaaagtcatccatatccatctccagccccgccagaaacatgatataatacaatcccacttttccgaataactcgaaactgctatctcgctccaaaatattaaaaccatatttgccaaccaatacaccggcaagaatcataccgatgatatgaggaatgcgcaaacgccccaatatcatgggagcaaacaagataataataagtaccaggaagaatatccaagtagggtcagtaaccggaaaatgaatatttaaaccgaataattccattgcttttatttgagggttataccataatatcgacaaaattacgaaaaaagtttcttttttactgatttatattccaaaatgttctaattttgcaatctgaacctgctcgcttggcaggtaaacagattaagtattactaatttataaaataaaaaagcaaaatgaaagtagcaattgttggtgcgagcggagctgtaggacaagagttcctgcgtgtgctcgatgaaagaaacttcccgttggatgagttgatgttgttcggttcttcacgcagtgcaggacgaaaatacactttccgcggtaaagagatagaagtaaaactccttcagcacaacgatgactttaaaggtgttgacatcgctttcacatcggcaggtgccggaaccacaaaagaattttgtgaaaccatcaccaaacatggtgccgtattaatcgacaattccagcgcataccgtatggatgaagatgtacccttggttgtgccagaagtgaacccggaagacgcattaaaccgtccacgcaatgtgatagccaatcccaattgtacaacaatccaaatggtagtcgccttgaaagccatcgaaaacctttcacacattaagcgtgtgcatgtagctacttatcaggctgccagcggcgcaggtgcagcagccatggacgaattgtacgaacaatatcgccaggtattggctaatgaacccgtcactgtagataaatttgcttatcagttggcattcaatctgattccccaaattgatgtatttaccgacaacggttataccaaggaagaaatgaagatgtttaacgagacacgtaaaattatgcactctgacattcaggtaagtgccatgtgtgtacgtgttcctgctctccgctctcactctgaaagcatctgggtagaaacagaacgtcccatctctcccgaagaagcccgcgaagcatttgccaaaggagaaggtttggtattgatggataatccagagaagaaagaatatcccatgccattgttcctggcaggtaaagatcctgtttacgttggccgcattcgcaaggacttggccaatgagaacggactgactttctggattgtaggcgatcaaatcaagaaaggcgcagcactgaatgccgtacagattgcagaatacctgattaaagtgggaaatgtgaaataatccgctgctcacacaagctttaattctttaatattataatctttatctttgcgtcaatctcctttctaaggggtagaccaagataaagattatttttttagaaccaagcctcttcttgcccaaagctaagcactttcatacctcagattaaccctttttatacggagaaccagtacgtcctacaacggtgggacgtacgtcctgctacagtgggacgtatatcctgctatagtgggacgtacgttctgttgcagtgggacgtactaaccggacgtagaaaaaagcttggccatatacagaaaaagggttagccttggggcatgcaaggcttagcccgacaaacggatagccaaacatgaaacagcctttgctgaacatattccataaaaaaaagagtatcacagaagaactgcaatactctttcaaatcttttatgataaccgcttattcagtatccaaagccgattctgcacttttaccattcgatgccaaaggaataagtttcaccaaatccacatcaaaaaacaaagtagaatagcccggtatcgaaccgcttccggcttcttcataagcaagttcggaaggaatataaagttcccatctggagcctacggtcatattcataagagctgttgtccacccgacaatcacatcgcctaccggaaattcgaccggaacagcaatgctcggattcaattctcctttatagctttggtcaaaaacagttccgtttattaacttaccccgataattaaccgccacagtatccgtaaacagaggtctttctccttctccgttgtttattatcttacaataaacatactcattcacctttccctgctcattcaagcccaaaggaggaagtttataggaacggacaactttccattcacccggattcgcctttgcctcagccgcaatggaatccaaatatttctgattacgctcctgccagtttgcataaggattttcttctccatccgattcactacatgaaacaattgcaaatgaagcggcaaacaacaggctaatcagccaaagaatacttttattcatacactattaattattgcaaagtcttcaacagacttgttatacttactttatcggcaatgatattgttcaattccgaaatagcgacacgctcctgctgcatggtatcgcggttgcgcaatgtcacacaattatcttcgagtgtctgatgatccacagtgatgcaataaggagtaccgatggcatcctgacggcgataacgcttaccgatgctgtccttttcatcatattggcaatggaagtgaaacttcagattatccatgatttcacgcgctttttcaggcaaaccgtccttcttgaccaaaggcatgacagccagttttacgggagccaatgctgcgggcaatttcagaacgacacgagtttcaccgttgtccaacttttcttccgtataagcagcactcatgatgctcaggaacatacggtctacaccgatggatgtttcaataacatacggagtataactttcgttcaattccgggtcgaaatatttaatactcttgcctgagaatttctcgtgctgacttaagtcaaagttagtacggctatgaataccttctacttccttgaatccgaaaggcatcaagaactcgatatccgttgcagcattcgcataatgtgccaatttatcatggtcatgataacgataatggtcatcgccaaatcctaatgctttatgccatttcaaacgggtttccttccaggttttaaaccaatcaagctcggtacccggtttaacaaagaactgcatctccatttgttcaaactcacgcatacggaagataaactgacgggcaacgatttcgttacggaacgccttaccaatctgagcaataccgaaaggtattttcatacgaccggtcttctgcacattcaggtaattcacgaaaataccctgtgccgtctctggacggagataaatcttcatagaaccgtcggcagtagagcccatttcggtagtaaacatcaggttgaactgacgcacttccgtccagttcttcgtacccgaaataggacagacgatttcctcatccaagataatctgacgaagttcattcaaatcattatcattcaatgcttttgcaaaacgttcgtgaagtgcatcgcgtttagcctgatgctccagcacacgtgcattggtgctgcggaactgtgcttcatcaaaagcttctccgaactttttggcggctttggcaacttccttgttgattttatcatcgtatttagccaattggtcctcaatcaaaacatcggcacgatagcgtttcttagagtcgcggttgtcaatcaaggggtcattgaaagcgtcaacgtgtcccgatgccttccagatagtagggtgcataaaaattgccgaatcgatacccacgatattttcgtgcaacagcaccatgctctgccaccaatattgtttgatgttattcttcaactccactcccatctggccgtaatcatagacagcacccaatccgtcataaatatcacttgacggaaatacaaaaccatactctttacagtgagaaactaatttcttaaaaacatcttcttgtgccattttccttttatgtttattcttacacttttgttgtttttcctgttgtcatcccttaattaggacgaaataatgtgcaaagtaaatgatttttttcaataaaaatcgtatttttgcgtgcatatcagcagaacattaaggaatttaaatatatatgagcgaagatattatcgataaagaagaacagaacgatgaaaatactcccgtagcggaaaaccaacattcagactataagcccgcagataccaaaaatgaatctgtcaagcatcaattaagcggtatgtaccaaaactggtttctggattatgcctcttatgttattttggaacgtgccgttccgcacatcaatgacggacttaagccggttcaaaggcgtattcttcacagtatgaagcgattggatgacggacgatataataaagtggccaacattgtaggtcataccatgcaattccatcctcacggtgacgcttctatcggtgacgcactggtacaattaggacaaaaagacttgttgatagactgtcagggaaactggggtaacattctgaccggcgacggtgcggcagctccccgttacattgaagcccggctttcgaagtttgccctcgacgtggtctttaatcccaaaaccaccgaatggcaatcttcatacgacggacgaaacaaagaacccataacactaccggtcaagtttccgcttcttctcgctcagggagtggaaggcatcgccgtaggactttcttcaaagattcttccgcataactttaatgatttatgcaacgcatctattgcctatctgcgcaaagaagagttcaaattataccctgatttccaaaccggagggtctatcgatgtatcccgttataatgacggagagcgcggcggtgtggtaaaagtacgcgccaaaataaacaagctggataacaagacgctggccatcaccgaaattccttatggaaagacaacctcgtcactgatagaatccattttgaaagcagttgaaaaagggaagataaaagtccgtaaggtagatgataacacagcagagaaagtagagatattggtgcatctcgctcccggagtatcttccgacaaaacactggatgccttatatgcatttacagactgtgaggtgagcatatcacctaactgttgcgtgattgatgcacgcaagccacactttctcactgtcagtgacgtattgaaaaaatctgtaaacaatacattgtccctgcttcgtcaggaattggaaatacgcaaaggagagcttctggagaatcttcattttgcctctcttgaaaagatattcatcgaagaacgcatttataaagacgtaagattcgaacaatctgaaaatatggatgcggcctgtgcacacatcgacgaacgtttgaccccattctatccgcaatttatcagggaagtaacgaaagaagatatcctgaaattgatggaaatcaaaatggcacgtattctgaaattcaataaagataaagcagacgaaaacatcgcccgcatcaaagaagaaatagaagacattaatgataaactggcgcatatcatcgattataccataaactggtatgagatgctgaaggaaaaatatggcaagaattatccgagacgcaccgagctgcgcaatttcgataccatagaagcagcaaaggtagtcgaagctaacgagaagctttatatcaaccgcgaagaaggttttatcggcacaagcctgaagaaagacgagtttgtggccaattgctcggacattgatgatgtgattattttctataaagacggaaaatacaaagtggttcgtgtaaccgacaagatgtttgtcggcaaaaacgtactgtatgtaaacgttttcaaaaagaacgacaaacgtaccatttacaatgtggtgtatcgcgacggaaaagaaggatttcattatataaagcgattcaatatcacttcgattacccgtgaccgcgaatacgatgtcactcagggaactcccggttcgcgtatcgtctatttcacggctaaccccaacggtgaggcagaagtcatcaagataacactaaaaccgaacccgcgtatcaaaaagataatctatgaaaaagatttcagtgatatcaatatcaaaggacgccagtccatgggaaatatcctgagcaaatatgaagtgcataagattgccctgaagcaacgcggaggctctactttgggaggacgcaaagtatggtttgaccatgatgttctacgactgaattatgacgaacgcggccagtaccttggagaattccaaagcgatgaccttatcttgatagttcaagaaaacggagaattctataccaccaactttgacttgaataatcattatgacccgggaatttgtgtgattgaaaaattcaatgccaacaaagtatggtcggcagcactctatgacgctgaccaacagggatatccttatttaaagcgattcacctttgaagcaacttccaaaaagctcaattatctaggtgagaataaggacagccgtcctattctgctgaccagcatcgtctatccgcgggtacaagttatctttggcggtcacgacagcttccgcgaggccttggaaattgatgtcgatgagtttatcggtgtgaaaagctataaagcaaaaggaaaacgaataaccacgtatgctgtggaatctatcaacgagctaccccctgtccgttttcccgacgaatcctcttcggcagaagaagataacgaaaaagagaatgatgatgacaatgaaaaagaggcaatgatagaagatcctgaccatggcaagagtgagacagatatcatagatgagataaccgggcaaatgaaactgttttaatccatgaagaaaatattcttactattattgttgcttccctttgtccttgggggtaaagcacaagaagacagcctgcagacaaaccgatacgtcatgcgggctaccctttatggagcaggctataccaatatccttgatacttatctgtctccgatggaatataccggtcccgaaatccgtattctcagagagagtatgagaatgaccaaattgctgaacggcaacgtatctgcgcaaagtctgtttcagataaacctgtcactgacagacaataaagccgagacaggcagtgaactggctggattaatcaattggaattatgcttggcactatcagttcaggctggcagagaacttgaaaatccttgccggacccatgattgacttaaacggaggatttgtatacaacacaagaaattccaataatcctgcgcaagccaaagcgtatgtaaatattgcagggtccggtatggtcatctaccgtttccgtatcggaaactatcccctgatagcacgctatcaggccaacctacctttaatgggagttatgttttcacccgaatacggacaatcttattatgagattttcagtttgaaacatggaggaaaaaatatccttttcacctctttacacaatcagccggcgcttcgtcaactgctcacactcgactttcctgtaggcaatatgaatgtgcgggcaggatatatttgtgatatccagcaggctaaagtcaaccacttaaaaagtcacacgtggtctcacgtattcatgctgggctttgtgaaaaacttctatctgataaaaaacaaaaagaaagtaggaatgtccccaaaggtcagtccatattaaatcgtatatgataaagaaaatattcaaaaaaacagccatcttccttttgatgattctctcaggcacttcctgcatcaccgaagatactttcaatgattctcccgatggaaacttcgaagctttatggaaaatcatcgatgaacactattgtttcctagaatataagaatcaggaatacggattagattggaataaaatccattctgattataagaagcggttaacttccggtatgagtaatgaacaactctttgatgtcttatcggaaatgctgaacgaactgcgggacggacatgtcaatttggtttcaaaagatcgtacttcccaataccgagagtggtacgacaattatccgcgcaattttgatgacagcatacaaagccgctatttgggaaaggattataataccgcttcaggacttaaatatcagattttagaagataatatagcctatgtatattgtggaagcttccagtcgggtatcggttccggcaacctagatcagattctcagcaaattggccatttgcaacggattaattcttgatgtccgcaataacggaggcggcaacctcactactgccgagaaactggcagaacgcttcactaacgagaaaaagctgattggctacatgtcctacaaaaccggtcccggccataatgagttttccactcccgaagctgtttatcttgagccacccatggatcgtgtacgctggcagaaacataccgtagtattaacaaaccgccggtcttatagtgccaccaacgattttgtgaaccgaatgaaacaattagacagagttaccgttatcggcgacaaaaccggtggcggttcagggctccccttctcttccgaactccccaatggttggtctgtccgcttttctgcaagcccgatgtatgatcctgatatgaaacatctggaattcggtatcgaaccggataaaaaagtagatatcacttccgaagattacaacaaaggcattgatactattattgaagcggcacgtgaatatttacataatcacaaacaataaaggattatatgcattttataatgaaataatttggttatttcagaagtaagcattacctttgcaaccgcttaccgaaaggattgccgcgcctgtggcgtaattggtagccgcgccagacttaggatctggtgtcgtgagacgtgtaggttcgagtcctatcaggcgcacacaacattacatgttgaaaaacaaagaggctatttcaaaatatactttgagatagccttttttatgtctgcaaaaattagaaaaaccgagccttgagtcaacgcaaaagaacgaacgcaaggctcaacgtaaaaacattaatgctatgacatcaaatatacactgtttttttcctcactacaacaaataggatgacaaggtacttcaatccaaaatttacttcctgcattcaactccgattcaactcctatacaacctcccatttgttctactatcgatttacaaatagacaatccaataccaattccctgaacaaaagagtctgctttttcaaaacggtcaaacaccttatttaatttatcagaaggaattccgcaaccggtatctgtaacacttaatataactgctgcttccttcacttcataagtaatttcaatatatccctgcgaagtatactttaatgcattcatcacaaaatgctccagaacttgagttatacgctttttatctaattcagcccaataatcattctccggtttttttactataattttcacctcatcactcactctggattcacatttcatagcaatctcccgcacaagttccgaaagactaaaagaggaagtatgcaaacaaagataaccagactcaatctttgctaaatctaatatattatcaaccaaattaagcaacaattcattatttgcactgattatttgtgcatattgtctcctctctgaaacatcttttgactctatcaacaaattagagaacccgacaatggcattcagaggagtgcgtatctcatgacttatattagccaagaaagccgccttgagttgattcactttttctttcctttcctttgctgcatttttctcgatagccaactctcgccttaattggatattttctttttccaatttatccatttttactacataagagtggtattcaagcagcgtcttatctaattctaaacgataccgccgatattctttaacaaaataagtaaaaattataattaagaataatatgaataatagactcagataccacataattcattttctacatctaataaggttatacatagtttctgatgcaaaaaaacataatcatgtacgaaaaatatgcttagaaagacatactctttataaagatttgttcaaaagatataaataaaagttcttttctactgataaccaatatattatatgacctattctttttgtacacttttaaactcaaaaggagtcatccctgttttcttcttaaagagattattaaaagtaggcatactgttgaagcctgaatcttctgctatcgccttcatcgtataattaggatgctcatttaacaactgaatagcatgattcaaacgcaaattatttatatatccacttaagttaccacccgtattttcttttatcatcctggcaaaacgagcataattcaaatgtacgatcctcaccaaatcatctcttgataaattcggtgacaaatataatttctcatgaagaatagtttcattcaatttactaaacagctctctgttctctgcccattccataccattttccgataaaatatcctcttcccggtttgcacccggtaaagactcagacacgacatcagtattctcttttggagataattgttcatttataaggcgtacaagtactttattctttgacctgataatacgattatacttccagcttttccaaaggaaaaaagacatcaacaaaataaacccaattgcaaaaagaagaaatatgccatgcatctttaatcgaaagtcctgcttcgctatctgcttatccctttcgttcactttataaactgcatccaactccaaagctgcattccttacttcatctctatacatgtgagtaacaatattaagaattgattcacgtaattctgctactttcttaaagttattcaaacctgaataggccgctacttctttttgaagaacacttaaatattgttgattaagagtatcctgacttctcaagacattcttaaagtcttcacatttttctaatacctccttataacgcttagtcaataacaaataaggagccgcatcacatttaccatcgggagtcaaagctgcctttgttgaactatatttcctgaaatagttatcagcctcttcatattttcgcaatttaaatgctacataggcaagtttaatgtatacatacgaatattgcaagtcaatatatgaatccggatattttcgggaatcagccatttcatgtatcaacttttcacgctccaatcctataaaaagaacttcatcaaaacaaccatcagaaagaagataattcattttcaatccataaaaataagaaagtatttgcatggaaagcatatcactctctccttttatcaaatctattgcttggtcaaaataagcataaccttctcttttaagcccaagcaccttcttattttctcccaaacaaaacaataatttagcttccgatcccttatttccatttttacgcgctaaagcaattccttctgtagcatatttaacactctgctcaaatcgacttaacaagaaagatatttccgctaaatctattgtcatttctaaaagatgagaaggatcagtaccttgaatagaatcaatgacataggcttttcgggcataaacaaaagcagatttattcatatacatattccgataagtcctactacgcaaatcatttatcatattcgatggcatgcagttcaagttctctgcttcgtcaagcaattgtaaagcacgtttaggctcttcaatataaattttcgcaatatattcctcagtataatattcgtgagtcggcaatacattttcttgtgcaacaacagattgcgcacctgcaaagaaccatgcatacacaagtattattaagtaatagtagttcatttgatgatgttagattctgagacaaagataaaatataatccactatacaacaaatgtgctaaagttattatataaaaaatcttcttgcaaaaatatatcattactttattgggctatctaacaattaaaaactacatttgcatataacctaaaaaatcacactcatggatacacttttaccgtatgcattgctatgctttacttcctttttcacattaaccaacccattgggtaccatgccggtatttttaacaatgactaaaggaatgtctgatgaagaacgacaacacatcgtcaaacgtgctaccatcatttcgtttataaccctccttgcctttactttctccgggcaattcctctttaagttcttcggtatatccaccaatggttttcgaattgcagcaggatttataatattaaagattggttacgatatgcttcaggcccgtttcactaatacaaagctaaaggatgaagaaatcaagacctacgcaaatgatatatccataactcccctttctatccccatgttatgtggtccgggtgcgatagcaaatggtatcatgctaatggatgatgccaatacctggagtatgaaaggtatattaataggaatgattgctttgatttatttcatcacctaccttatattaagagcttcaactcgattagtcaatattttaggagaaacaggtaacaatgttatgatgcgtttaatgggacttatcctaatggttattgccgtagaatgttttgtaagtggattacgccctatattaatcgatattatacagttgagtagagtataaacacaaaaaagcctccgaatcatttgactgactcggaggctt

SEQ ID NO: 6657 - DNA, 5810 bp, Unknown
  gut microbiota DNA sequence
ttatatgacagatccaatcgcagattatctcaccagattgagaaatgcaattagtgcaaagcacagagtagtagaagtgcctgcctcaaatttgaaaaaggaaatcactaagattcttttcgaaaaaggctacattctgaactacaaattcgtagaagatggtcctcaaggaactatcaaggtggctttgaagtatgacacagtaaacaaagtaaacgcaatcaagaagttgattagagtttcttctccgggtttgcgtcagtatactggttacaaagacatgccgagagtaattaatggtttaggtattgctataatatctacttccaaaggtgtaatgactaacaaagaagctgctgaactgaaaattggtggtgaagttctttgttacgtatattaataggaggataagcaatgtcaagaataggaaaattacccattagtattcccgctggagtaacagttactctgaaggacaatgtagttactgtaaaaggtcctaaaggcgaattaagccaatttgttgatccctctatcaatgttgctgttgaagatggacatgtggtgttgacagaaaatgaaaatgcgatgttggataacacaaagcagagacatgctttccacggcttgtatcgctcattggttaacaacatggttgttggtgtttctgaaggttacaaaaaagaactggaacttgtcggtgtaggttaccgtgcttcaaacaatggtaatattattgatttcgcattaggttatactcataacatctttatgcagttgcctcctgaaatcaaagtagaaactaagtcagaaagaaataagaaccctcttattatattggaatcttgtgacaaacagttgttaggtcaggtttgttcaaaaatacgttctttccgtaagccggaaccttataaaggtaaaggtattaagtttgttggcgaagaaattcgtagaaagtctggtaagtcagccggtgctaaataatttacataaaattgtattatcatgacaacaaaattagaaagacgaatcaagatcaaatatagagtacgcaataagatttcaggtactactgaacgtccgcgtatgagtgtgtttagaagtaacaagcagatttacgttcaagttatcgatgacttgtctggtagaactttggctgcagcttcatctttgggaatggaagctatgcctaagaaagaacaggctgctaaagttggtgaactgattgccaagaaggctcaggaagctggtattacgactgtcgtattcgaccgtaatggttacttgtatcatgggagaataaaagaagtagctgatgctgctcgtaacggtggacttaaattttaatcaattatggcagttaataatagagttaagataactaacgatatagagttaaaagacagattggttgctatcaaccgtgttacaaaggtaacaaagggtggtagaacattcagcttctctgcaattgtagttgttggaaacgaagacggtattattggttggggtcttggtaaggcaggtgaagttacagctgctattgctaaaggcgtagaagcagctaaaaagaaccttactcgtgttcccgttctgaaaggcacagttcctcacgaacaatctgctagattcggcggtgccgaagtattcatcaaaccggcttctaccggtactggtgttgtggcaggtggcgctatgcgtgctgttttggaaagtgttggtattacagacgttttggctaagtcaaaaggttcttctaacccgcacaacttggtaaaagctacaattctggctttgggtgaaatgagagatgctcgcatggtagctcagaacagaggtgtaagtatggaaaaagtatttagaggataaggaggaaatatgtcaactattaagattaaacaagtaaaaagtagaattggtgctcctgctgatcagaaaagagtactcgatgcactgggacttcgcaaaatgaatcgtgtggttgaacacgaagcaactccttcaattcttggaatggtaaataaggttaaacacttggttgccatcgttaagtaattcattgttaataaaaaaaactaattacgatatgaatttaagtaatttgaaacctgcagaaggatctacaaagaccagaaaaagagttggccgtggtgccggttctggcttaggcggtacttctacaagaggtcataaaggagctaagtcaagatcaggctattcaaagaagatcggttttgaaggtggtcagatgcctcttcaacgtcgtgttccgaagtttggttttaagaatatcaaccgtgtagaatacaaagcaatcaatcttgaaactattcagaaattggctgaagctaaaaatctgactaaagtgggaatgaatgactttatcgaagctggttacatttcttctaatcaattggtaaaggtactaggtaacggtagtttaactactaaactcgatgtagaagcaaatgctttctcaaagagtgcagtagctgcaatcgaagctgttggtggtaatgcagtaaaactctgattcaatgagaaaatctattgaaacattaaagaatatatggaaaattgaggatctgagacaaaggatcctcattactatattatttgttgcaatatacaggtttggttcttacgtggttcttccaggtattaacccggctatgttaactcagttgcataaacaaacgagtgaaggtttgttagccttgttaaacatgttctctggaggagcgttctcaaatgcatctatttttgcattgggaattatgccatatatttcggcatcaattgtgattcagcttttagcgattgctgttccctactttcagaaaatccaacgtgaaggtgaaagtggtagacgaaaaatcaatcagtatactcgtatattgacaattgctatcttgattttccaggctccctcatatctgattaacttaaagatgcaggctggcccatcacttaatgcttcattagattggacattctttattattacttctaccatcattttggcagcaggaagtatgtttatcctgtggcttggagaaagaatcactgataaaggtatcggtaatggtatttcattcattatcctgattggtattattgctcgtttaccgcaatctttgttccaggaagttgtttcccgtttgtcttctccgggtgccggtggtatcgttatgttcttattggaaatagtattcttactattcgttattgcaggagccattcttttggttcagggagttcgtaagattcctgtacaatatgcaaaacgtattgtaggcaataagcaatatgggggtgccagacaatatattcctttgaaagtgaatgctgcgaatgtaatgcctatcatttttgctcaggcaattatgtttattcctattacattggtaggcttttctaatgctgctacagcaagtggtattgtacgtgcatttgtagatcatactagcttctggtataactttgtttttgcaatattgattattgtatttacatatttctatactgcaattacaataaacccgaaccagatggcagaagatatgaagagaaataatggttttattccgggaataaaaccaggtaagaatacagctgagtatatagatgcgattatgtctcgtattactctgccgggttctattttcttggctattattgctattttccctgcttttgcaggtgtattcggagtaaaggctgagtttgcccagttctttggtggtacatcgttattgattcttgttggtgttgtcttggatactctccaacaggttgagagtcatttattgatgcgccattatgatggattattgaattccggaagaattaagggtcgctcaggtaatgtcgctgcatattaatttagtctgaagatgatatttcttaagacagatgatgagatagagctgcttcgtcagagtaacctacttgtaggtaaaactctggctgaagttgctaaattgataaaaccaggtgtaacaaccaaggaactggataaggtagcagaagagtttattagagataatggtgctattcctacttttaaaggttttccaaatcaaaatggtgatccatttcccagtacattatgtacttctgtaaatgatcaggttgtacacggcattccgaatgatattcctttaaaagaaggtgatattgtttctgttgattgtggtacttacatgaatggtttctgtggtgattcagcctatacattttgtgttggtgaagttgacccggaaataaggaaacttttgaaaacaacaaaggaagctctttatttaggcattgagaatgccattcatgggaagcgattgggtgatataggttatgcgattcagcagtattgcgaatcaaatacttatggtgtggtaagagagtttgtgggacacggcatcggtaaagatatgcatgaagatccacaagtacccaattatggtaaaagaggatatggcactctattgaaaaaaggaatgtgcattgccattgaaccaatgattacgttgggctctcgtcagatagtaatggagagagatggatggacagtacgcacgagagataggaaatgtgctgctcactttgaacatactgttgcaataggagtaggaaaagcagatattttatcctcatttgaatatgtcgaacaagtattaggagataaagcaatttaatatggcaaagcaatccgcaatagaacaagatggagttatcgtagaagcattgtcaaatgcaatgtttcgtgttgagttggaaaatgggcatgagattaccgctcatatctctggcaaaatgagaatgcattacattaaaatattacccggggataaggtcagagtagagatgtctccttatgacttatctaaaggaagaatcgtttttagatacaagtaaaaaagaaataagatatgaaagtaagagcatcattaaagaaacgtacgccggaatgcaaaatcgttagacgaaatggccgtttgtatgttattaacaagaaaaatcctaagtataaacaacgtcaaggataatttattatttttgcaaaaaaaataatttagtatatggctataagaatagttggtgtagatttgcctcagaataagagaggcgagattgcgttgacctatgtatatggtatcggacgcagcagttcagcaaaaatcttggataaggctggtgttgacagagatcttaaagtaaaagattggacagatgaccaagcagctaaaatccgtgaaatcatcggtgctgaatacaaagtagaaggtgatcttcgttcagaagtgcaattgaacattaagcgattaatggatattggttgctatcgtggtgtgcgtcatcgtattggtctgccggttcgcggtcagagtacaaagaacaacgcccgtacacgtaagggaagaaagaaaacagttgcaaataagaaaaaagctactaaataataattgttgatatggcaaaaaaaacagtcgcagctaagaagagaaatgtgaaggttgatgctaatggacagttgcatgttcattcttcattcaacaacatcattgtatctctggcaaacagtgaaggtcagattatctcatggtcttctgcaggtaagatgggatttagaggttctaagaagaatactccttatgcagcacagatggctgcacaagattgcgctaaagttgcgtttgatcttggcctgagaaaggtgaaagcttacgttaagggtcctggaaacggacgtgagtctgctatcagaactatccacggagctggtattgaagttactgaaattatcgatgtaa

SEQ ID NO: 6658 - DNA, 6387 bp, Unknown
  gut microbiota DNA sequence
atataatataaataataatatatctccttcggagaattcttctgaaaatcctgccggaacgcctcacggcgatgaagctccaaaagcttcttcatctgccaaagagttctttcacaagctcaacgccactcctgaagagaagcaggcagtactggtgccgattatcgaccgtatcgttgccggttaccgctacacccgaccgcgcgcactggatgcgctggtcgttctggtgaacgaattcctgattcctcacttcgatgcccagtccaattttgccaaaacaccgcacaacggacgcatcatctggctgcaaaaccttatcaagacccgccatggggagaacctgatacagcaagccacacaaaaactgggcgaaacactgctgaaggaactggaagaacaacgcaaaaaactccgtgaattccgtcccgtctcgccattcgaatggaaggatgccgacaaagatatccgatactatgacgaccccatagacggaaaagtggaaataccggcggatgcaccgccacggtcctccgatgaagccatctggaacatcctctcacaaaaatgggtggacaccgacggtcaacactccgggtcctgaagcagttccctgtcaaccatgaatttttattttttacattctaattttaaaattgatatgaagccttattattctctttcagacttccccgaccgcaaaagcgcgggaaagaattttgttgccgtatgccccaaatgcggaacaccccatctgtccatctccaaagcaaaaggtgtgtaccactgcttctacgcaggatgtaacttcaacggcatactgaccgacttctgcaaggcagaccgccccatgtttccgcaatatgccgcgggagctgccggatatgccccgacccgcagcggcaacagatacaagaccgcccgaaacgatgctcaaagcacgttgggcgaagtgcccatgctgccctcggactacaagcccctgaccgccgaagtgatgcagaaaatcaaacccctcaccgactcgcccgactgtaccgaccccgaccagctcgccgcgcgccgctacctcctggaccaaggcatctccctcgccaccgccatcacagcccggataggctgcctgcgccattactgcatcaccaaggacagcgagaacaagagcgaacaggcatccaacgtgttcccctgcatcgcctacgtgaactatgtggacggacaccccgtcaacgccaagtaccgctcgtgcagtccatcgccctcggccaggcaggaagagggaaaacccaccgtctacagcaagttctggggacaggactcacccaccacgccttgcgccccctacaacatcgactgcctcaatccgctgctcgtggaggaagaaaccattccgcgggtcatcgtggtagaaggcgaaaaagacacgctggtgctggcagaagccggctaccgatatgtcatcagcgtaccatcgggagccgcaagcgacttgggcaaatccttcgaagcgtttctcccatggctggaacaggtggaccacatcgtggtctgcggtgacaccgacctgcccggccgcacactcaccaagcggctgtcggactacttcaacgcccgctgcctcttcgtcaccctgcccggcggatgcaaggacataggcgacgtgatgctgcaatacggcatcgaagtggtgcgcagtgtcatcgacggagcaagcgtacgccacaccaccgatatcatcaccgtggcggagcgaagggatgaagtcatccgtgtgctccacggcgaatatgaccacggttacagcgtgggctacggcccgctgaccgaccgcatcttccatcccaccgacatcggcgggctcatcatcgtaaccggcatgcccaacagcggcaagaccgattttctgaacgacctgacctgccgcatcatgcagcagaccgaccggtttgtatgctatctttcctttgaggttcccgacaagaacaagcacatcgcccggctggtgagcctgatgctgggcaaagccaacaccaccgcttataccgacggacaactgacgccctatcttgactttctggatacccacatgattcatctggatatgcacgaagtaccgcccacgcccgaaaacatcctgaaccgtgccgaccgggtgcgccgcacacatccgttgaaatatctggtggtagacccctatcttttcatcgaaacacaaagcggcaacggcgaaaccgaaacgcagagcatcaaggcaatgctcaccaagtttcagacatggggacgtgtaaaccacatctgggtggtcatcgtggcgcatccgcgcgggctgaagaccgtgaacggccggaacgaactggaagccatcaatatgtacaccatatcgggcagtgcgaactgggcaaacctggcagatttcatcctcaccgtctcgcgtatatcggagcccgaccgcgcctttacgcgcatagacatgctgaaggtacgcgaccaggagctttgccgcacaggaaccgtgtattacacccgccgtccctgcggacgctatgaagagcacgaaagcgaagaggaatgccgcgcggaataaaggccgtccacacgaacgtatgcatcgcctcatgcgaacgtatgtgtggggctgcgcatatatatgtgtgaggctgcacgtatatacgtgtaagctcatgcatacgtccgcgtttccaaccatacggggatgccaacagacagacaccggatctgtccctacggccttcccaaataccggaaaatcagctccacctgtaccgaattgaacatccgctgccggtcggtataccccgaatccgccaaagcacggtaaagcaccttgtggtgatgcacccatgacgacagacggttaagtgcagccaccggagtgatatcgggagcgtatgccaccgccaagtctcgtttgtaataaggtttcaccggccatccttccctctcgtcttctctctgattcatatcatttttctatttgattaatagaacaaatgtaatgaaaatcaaccatatagccaactatataaagtgctttaattcatcttaattcatactctgtcatactttgccacagcacttcacaggcattcatagcttttcatttttccgttcctccgcaatgctatctttgtcatgttcaattaatattaatcttttaaaaacagtaacattatggcattaaattacagtgtttcattacgccccaatccgttggaaagggaagcatctccaaaggcttacgccacggctcagatgaacggtgaactttcgttgaaacagctcagcagacgtgtgtcctcacagaccaccgtgagccgcgccgatgtagtggcagttcttaccgccaccgtagacaatctgctggaagccctgaaagaaggcaaacaggtagacttcggcgatttaggcaagttccgtcttcaaatcaccagtcgcggagccgacagtctggagaagtttaccgcctcgtgtatcaccggcatcaacatccagtacgtccccggagaagacctgaagaccattttcggcaatctggaattccagcccgttgccagccgttccgcacaagcagccgcactgcgtgccgagaaagaaggcaaagtggtggaagacctgctcaagtccaaggaagaaccggctgtctagaccgtagggggcggacccgtgtgtccgccctaatacaaaaaattatgtatcattttaaaccccactgttatggaaaaaccaaaaggaaaatcaacctggagcatcattatcaaagtaattattgcagtagccaccgccataggcggtgtgctgggtattcaaagttgtatctgatttttaatccttaataaaaatgacttacgacaacatcagttcacagtatcaaaactaccggcgcattgccttgatagtagttcactgttctgccacgcgcgccgaccgcagcttcccggtggaagctctccgccgttgtcacgtgcaggaacgcggatttgccgatatcggctatcacttctacatcacccgcgacggtatcacccatgtctgccgcccgatagaccatatcggcgcccatgcccgctgtttcaacgaccacagcatcggagtgtgttacgaaggcggtctggacgaacagggacaacctgccgacacacggaccatggaacagaaaatcgcgctgatagcactgttgcggcaacttcggctggattatcccgaagcccgcattgcgggacacaatgaactctctacgaatgttcacaaggcatgcccttgtttcaaggcaagccgggaatataaggatttataaaattgtttctattagtggaaggcttccggtgtatgccgggagccttttatgattacttgccataaattctacttctgcggactcgtcaacaaaacaagtatatttagactatctttaaatcatccatcatccgcgttatcactcgatgtaattgtgggatgtcttcttggcaaatacgataaatttcatcagcatctacatcaaaataatgatgtacaattatatcacgtatacccatcacgtgtttccatggaatttccggatattgaatcaataattctctatttgttactttatccaaattctttatactttcacctatcgcagtcagtttcatacagatactgtctaatttcatcataccactttcactcattagaaaatcatcagagcatgatattccggaaaagcgaagacatattttatttaaagattcctgtattagctctagcgtatggaaagcaatcaacgtatcatacataaaccccctccttttgtatcttttcacgtaaaaaagaatccatcttatcgcgtaaccgcactatgtctactttacaatcaagcaattcttctaattcttgctttatacctgccaaagcgaaaaatccgtggagctttccttctacataaatatcaacatcacttgtgggtgtatgttcattgcgagctaccgagccaaaaattcccatacgcaaaataccatattttgacgcattttgctgcatatagctatgcaataaggtaatgtattccggtaatgttttcattatagctttattctttgcaacaaagaaacgaattccttttcagatttcctatcacaacaacattttttaatcaaaagagcttcacagtcagcatctaaataactgtctctatccttataagacttccggtgtatgccgggaacctttattttttaaaggcaagtgtcgtaaaaatcatataaacacttgtgcacaaacccctgctcataccttgaagcaatccacttacgggcattctttgcaaggatatcgcgatagccggcatcaagcatacgcttcatggcatcataaagagcattcgcatcttttgatggaacaatcgtaccatttacaccttctacgattatctcgttagcaccattaatatcagtcacaacctgtgggagccccattgctccggcttcaatgaccacattcggaaaaccctcgcggtacgaagcaagtacagccacatcggatgcagcaaaccaaggacgcacatcactctgagaacctacactttcaatggcatcattatttttaatgagagagagcgtttcaggtttaagaggatcaagcttttcctcataaccacccacaagaatcaaacgtgtatcagtattttccctgttcaatttgacaaaagcttccaccaattcattgatacccttatctcccactatacgacctacagcaataaaagtacaaacaccctctttacgcaaccgaccggcctgttccataacctccggtgtcctgtcaaaacgtttcaaatctattccgcgacagtttccgtagcccaatactttaattggcttctttgtaattccattattcaaaagatcgttttttactccttctccttcaggaataatatgtgtggcacaggcacaagtaagccggtctgtcatcataagaatcttccttttgcctccaacagccgtaggaaacaccaatccggtaaaggtatgcacacgtacaggcacacccgccatccacgcagccatcatacagagcaaccctgctttgggagtcatggaatgtaccatctgtggtttttccctacggaatgtacgccataactgccacaaagactttatatctttaatcggtgaaatatggcgttccatattcacttctatacactttatatcgggatgggacttatatattctttcccattcgggaccgggagatgacaataaaactacttcatatttcttttgcaaatcggaaagcatacctgcaacaaaacctaaagactgaggcactgtacaggcacgaattattttaatactagtagtttgcatttaattatccttttct

SEQ ID NO: 6659 - DNA, 26401 bp, Unknown
  gut microbiota DNA sequence
aagaactgaaacaaagccttatcaccaatgtagtgacaggcaagattaaagtaagctgatacattatagaatataagaccatgaaagcaagcaataacaaggaagaaaaacctcatttcgtaaagcgagataaatttgccataaccgcagaatataagcaatggtttgccgatatcaaatctcgtttgcgaaacagtcagataaaagcagccatcaaagtaaacggtacactgctggaattctattggagcttaggtcgtgacattgtaaagatgaaagcggaacaagcatggggaagtggtgttttgcaacagctcagctttgatttgcgagatgagtttcctgatatgaaaggattgtcatacaccaacttgcgatatgcggcacagtggttcagattctatacaagtgataatgagtcaatttgccaacaacttgttggcgaattatccatgccacaaaaattcgctcttgtgccttggggacatcacattgaaatcatggccaagagtaagagcgtggacgaagcattgttctatataaacgaagtgattgccgacaactggagtcgcgccaccctgatgaatatgcagaaagcaggcctttatgaaagacgaggaagagcgcaaaccaatttcaacaacaagttgccacaaccgcaagatgaactggcacaagaaatattgaaagacccttataactttgatttccttacgttgcgagaaccatataatgaacacatgcttgaagaagccttagaacacaatatccgtcggtttctgctagaattaggtacaggttttgcatacgttgggagccagatggaactccgtatgcctggtggaaccagctactttccggatatggtattctatcatacaaaactgaaatgctatgtcgtgcttgagcttaaagtcgtggaatttgaacctgagtttgccggtaaactcaacttctatgtatcggcggcagaccatcttttaaaagatgacaatgacaaccccagtataggattgctggtatgcaagtcgaaaaacgagaccgtggtaaagtgggcttttgaaggcattgaccgcccgttgggagtagcaacctatgaacttgatgaagtactgaaaaagacactggcagagaaactgccaagtattgaagacatagaaaatgcaatagaagagtaaattgtgcggaaacactgcacggttatacacgagctttgcaatcataaaacgaaaaatatgaaccgatatgtttgaactactaaacgaaactctctttgagaaacatatggcagaataccttgcaggaagcaagatgtacaatcaacgcacaccaaaggatttcaatattcaaaagttggtggactcagatatgcttttacaattcttacgcgagcaacctatatggcagaaacttattaatcaaggttttgcagacgaacaagatgcgctcaacattgtgattgaaaccatcaatacgaaaattaatcgtggtgagagtttgctatcactgttgaaaaacggcttcatgctgcaaggtcgacgcatccgattggcggctttcaaaccggagatgactctcgatgatgatgccgaccacctctaccagaaaaatatcttcagcgtggttcatcagatgaagtacagcaccctgggcttcgataaggagaatgaactcgacctctgcatcctgttaaacggtctgcctatcattactctggagttgaagaacgaagctaccggtcagactgtggtgaacgccatgcaccaatatcagaccaaccgtcacccacaaaaccgtatgcttcgcacctgtctggttcacttcgccatggataacaaccgggtgatgatgaccaccaagctggccggcaataatacacagttcctcccattcaacaaggaaacagtgaatccacaagtagagggagattatccgacctgctatatgtggaaagaagtgttacaagctgattctttactaaatctcattcagcatttcattaaacgcattacacctaagaaaggtgaaccgttctatatattcccccgctatcaccaattgcgttgcgttcgtaatatcattagcgacgtgcgagagaaaggcgtaggtcaaacctatcttgtgcagcactcagcaggttcaggcaaaacaaagagcatgtcatggctggccttccaactggcaaaccttcagaatgcagataacaccccggtgttcgattcggttatcatgataaccgaccgtattgtactcgaccggaacattgccgatgaaataaagggaatggaagaagtagccggtactgtaaaagacatccgcaaaggttcacgtaatctggcaaaagcattagcagaaggcggtcaccgcatcatcatctccactgaacaaaagttcagctttgcattacctaagttgaaggaggctgccggttcacactttgctgtcatcatagacgaggcgcatacagcctttggcaagcaagcgtcgcacgatgtgcgtcaagttctcaccgacaagagtgagcttcgcgaaacggtagaagagttcggtattgagagtcgtgaagccgaaaacaatatgcaagaccaaatgttggccgaactgcaagctgcccgcagcatcaatagcggtcatatcagttactttgctttcacagccacgccaaagtcacagacttttgcactctatggccgtaacggaaaggcattcgacacctattccatgaaacaagccattgaggaaggctttatccttgacgtgctgaaaaactataccaccttccaaaccatgtttgagctggtaagtaaggtagatcttcctgaagacacacctgaatacgaaaagcagaatgcactccgcttgatgatgcaatatgtgaaccagcacccatacgtcatcaactacaaagccaatatgatggtagactacttcatgcagcactctgcccaaaagatgaaagggcaggcaaaagccattgtagtgacttccagccgcgccaacgccatattgttccaccaagccatcacacgccggttgaaagagaagtacaatggcgaggtaaaagcccttgtagcattcagcggtgaagtagaaatcaatggtaacaaatataccgaggaaaaaataaacggcttcggaatcaaagacaatggcattgccgttgaattcaaacaacctaatcaaagattcttggtcgtagccgataagttccagaccggattcgaccagcctttactccataccatgtttgtagacaggaagttaggcggtgtgcagtgcatccaaacactaagtcgtttgaaccgctgtcatcccgacaagcaagataccctgattatcgacttcgtaaacaaacacgaggacataaaggcagcgttcgaagactattacgatgccacatggttacaaggaaactacaacccatcaaacatctatgaatataagaatgacattgagcgcaggaaactctttacacagagcgatgtagataaggttgtaaccttattgctatgcggagatgaacaacagatagtcggcattccatctatcttaggacaactggtaaacgaatatgtgaagcctttacctgaagaagaacaggaactcatccgcaaagaggtgaaccgttacatccgccagtacggattgcttgctcagctaatgaaattccttgaccctgacttggaacgtttctacatgttctgcaagctctactacaaatatctgccttataccaaggagactttgccactggacatcttggaaaagattgaccttgacaagtatcgtattcaattagcagaacagggctgtatcacattagagggagaaggtggcaaactgacacctccaagtactgccagcattagcggtggggagaaggagtttgacaatctcgatcatctcatccacatgataaatgagccttatgaaggtttcctcaacgaaaatgaccaaataatccttgagttgctgcgtcagttgaggaatgacccgaacgtgaagcaagcattcagcgcagaaaactcccactccagcctgttgaagatggtagaaaaggagttcaacaaaaaagtcgcgacacagttaggcaagtatattaatttgaaaaaactgctcaatagcaatcaagctttcaatgaggaattcttaaacatgctagtaaccttcctggggcaaagtttccatacaggtaaggtgcttgaatataatgaggagttgcttaaagatgtgatgtttgagaaacttgaagatactttcagtgaactctgcgggcatggctatcgtgaacttgaagaagtgctcgattgtcttttcgccatcttgaagacccacactgtaaagaacttggatgggctgaacaccatgattccaaatcaactgaacaagttctatcgtggcgagaacgagccggtagacttgaaagtgatattcggagcattgttgcctaagtatgaggcattcctccgcaaactctattacttgaaagagggagaactctttgtgtctaccaaaggtacagatggttgggtggccatcgtaaagactttccatgaaatagataacctctattataatcatggcaaaaatccgaagttgaacacttttgaaacctactataagtgcatttcaaagtggagaaacgagaacgttcaccttgctccggaactacccgatgcagaggttgctccagccatccacatggtggtcagcatgtatatctatgccgtaatggtcagcattacagacttggaaatggcaggttgtgaacttgacaattcgggagttactgctcctgatgtatgtccttccactcctataatcccttataaaatgactacaatggctgatttgggcagagatgattctaaagaccaaaaggtagcggatcatcctattgacaagatgaacgaggcaaaaaagatggacctcttgaagcgcagtattctgaaagcacaaagttacactccgctattcaccaaaaagcgtcattggatatcaatttacaaaatggcagcacacaagaacatcatcatcgatggcgactacgcacacttcgtacagcgtatcggcatgatggatctgaaaaatatgcctagcggtttatctgaaaacaatctaagccgcatgaacaaaggcgttttcgctgatgatctcagcgagtggacaagcattggcttgagcggcataaaactctctgagttcaccgatatcaaggaaaccgcagagaaattcggtaaaatcatcgacgaaattaactataaggaataagcctggaaactagtttaaacaaaaaagatggcaacaaataaaaatgcgattgttcgatacagagctttggataaatgctttagtagtagaactaggaaatattacatgaacgacctcattgaggcttgtcgtatggcacttgaacgccagaatggtgatagcggttcaaaaggtgccgaaggagtacaacgtcgtcaaatctttgacgatatgaacgacatggaactgatgtacggagtcactatcgacagaatccaagacggtcataaaaaatattaccgctacgcagtcgactcaaaaacaatggccgaggcgggtccttctcaagaagaaatggattgcatacttgaggctgccgccatcatgaaacgctttgaaggaattcctcagttcgactggctggacgatctggaaaagaaactttatacaacttcaaaactaggtagtgcaactctaaaggcagttagcttccagcacaaccaataccttacaggtatagacaagtggtacaagcctatatttgaagctattgtagcaaagaaagtaatagaaataagttaccatccgtttggtaaagatgttagaacagttgtggtgagcccttatcatttgaaacagtacaacaatcgttggttcttgatagcgaaacgcaaggacttcgacaaaatgtccaactatgcgatagaccgaattaaagagataaaggaaacgaccaaagtgtttgaacccctagacgatgactttgatttcgaagagttctttagtgacgtggtgggcgtttccgtgcttgaaggcgcacccgtggaaaatgttattctgcacgttaccgacaaggcgtggaattacattacaacaaagccgctgcatgagtctcaatcagtactaaacagcaaacaagccgacggtaaatgggaggttcgactgaaggtacaagacaactatgaattacgttcgcttctacgttcctttggcgacagtgttgaggttatagctccagccaccttacgccaagaaatgaaagaaatggcccggcgtgttttccaaatgtataacgactaaatctatgtactatgaaagacactatacctgtaaacgccatctatcactatccgacttcttatagtcttgaataataatcaacttaaaacaaatctaaaaaacctcccatagtacctgctatggctatatttctaaaaagcgacagtctattagatagaatttatttactttatgtcactaaacatatccattaattcatagtatctcagttgttttactatctttgtgacaaaacacctgaatgctatgactgtcaccttatctaacgaacttcctgcctatcctacttttgtggaaggcatccgccgtgcgcccgacagaggttatcgtctgacaccggcacaaacagaaaccgcactgaggaatgcactacgttacattcccgaagaacttcacgcccgactcgccccggaatttatggatgaactgcttacccggggaaaaatctatggctaccgtttccggccgcaaggcgatttgaaagcaaagcctattgacgaatataaaggaaactgcatcgaaggaaaagcatttcaagtaatgatagacaacaacctttcatttgatattgccttgtatccttacgaactggtcacttacggtgaaacaggacaagtatgccaaaactggatgcaataccggctcattaaacaatatctggaagtaatgactgacgaacagactttggtagtggaaagcggacatccccttggtctgttcaagtcaaagcccgaagcaccgcgtgttattatcactaattccatgatggtaggcatgttcgacaaccagcgtgactgggaaattgctgcacagatgggcgttgccaattacggtcagatgacagcaggcggatggatgtacatcggtccgcaaggcattgtacacggcacattcaataccttattgaatgccggccgcatgaaattaggagtaccgcaggatggaaatcttaacgggcatctctttgtttcttccggtttgggcggaatgagcggcgcacagcctaaagccgccgaaatagcaggagccgccgccatcattgccgaagtagatgcctcacgcatcgaaacacggtatcgccaaggatgggtgcagcacgtcactgccgacttgaaagaagcctatacccttgctgccgaagccatgaggctacgcaagccttgttccattgcttatcacggaaatgtagtagatttgctggagcatgctttgaatcaccatatagatattgaactgctgagcgaccaaacctcgtgccatgccgtgtacgaaggaggatactgtccggcaggcatcactttcgatgaacgtacccgcctgttgaaagacgaccgtgtacgatttgaaaagcttgtaaatgcttcactacgccgccatttcaatgccattaaagcactggtggaacgcggtacttattttttcgattacggcaattcgtttatgaaagccatttatgatgcaggagtaaaggaaatctcacgcaatggcattgatgaaaaagacggcttcatctggccttcttatgtggaagatattatgggaccgcaactttttgattacggctacggacctttccgctgggtttgtctcagcggtaaacatgaagatttgataaaaaccgaccatgccgccatggagtgtatccccaaagaacgacgcggacaggacatggataattggatatggatacgtgatgccgaaaagaacaatctggtagtcggcactcaggcacgcatcctctatcaggacgcactcggtcgcatgaatatcgccttgcgttttaacgaaatggtacgcaaaggagaagtaggtcccattatgttgggacgagaccaccatgatgtgagtggaaccgattctcctttccgtgaaacatcgaacatcaaggacggtagcaatgtgatggcagatatggcagtccagtgctttgcaggcaactgtgcacgcggcatgagtctggtcgccctgcacaatggcggaggcgtaggtatcggcaaagccgtcaacggcggattcggaatggtgtgcgacggtagtgatcgagtagacgccattttacgctcgtccatgctatgggatgtcatgggcggtgtggcacgacgctcatgggcacgtaatccgcatgccatggaaacatccgaagaatttaaccatactcatcgggaacagggctatcatatcaccatgccgcatctggcagaagatgcattaatcgacagagtattaaaagaaaaaggtataaaacatcaataacattacgaattatgagctggacaaaaatcatggaatgcgttcccaactttagcgaaggacgcgacttgcagaaaatagatcagatagtatctcccttccgtgcacgcgccggggtaaaactgctcgactatagcaatgatgaagaccataatcgtcttgtggtcaccgtagtgggagaacctgatgctttaaaagaagcggtgatagaagccatcggcatagcagtaaagctgattgacctcaaccatcatcaaggacagcacccgcgaatgggagcggtagatgtagtaccgttcattcctatcaaaggatgtaccatggaagaagccatcgccatctctaaagaagtagcgcaacgggtagcctctcaatatgaccttccggtcttcctctatgagaaatcagcaagcgctcctcatcgcgaaaatcttgccgccatccgtaaaggagaattcgaaggcatgaaggaaaagattcaccaacccgaatggcatcccgatttcggtcccgaagaacggcatcccactgccggaaccgttgccatcggagctcgcatgccgttagtggcttataatatcaatctgaacacccccagtctggagattgcacatgatattgccaagaaaatccgttttatcggaggcgggctgcgcttttgcaaagccatgggtgtggaactgaaggaccgaggtatcacccaggtgtccatgaacctgacagactacagcaagactgccctctatcgggcttttgagatggtgcgtttcgaagcccgccgctacggagtaagcatcatcggcagcgaaattgtgggcctggttcccatggaagctctgattgacacagcctcttattatttgggactggaaaacttctccatgcagcaagtactggaagcgcagattatggaataataagaaatctatcgtcatgaacaacaatcttatcatcaagaatgcccgcatcatcaccccgcttggcacctctgccctaaaaggtaaagagatgaaccaactgctggatctcaccggaggaaccgtaaaagtaaccgacggagtgattacctatgcaggtccatcccgtcctacatgtgaagaaccagaagaaggctacgagattctggatgccgaaggacgagtgttgcttcccggattcatcgactcacatacccacctggtattcggaggctatcgccccgaagaatttatttggcgcatgaatggcgaaagctatatgagcatcatgcaacgcggaggaggtatcgtcaacacggtacatgccactcgtgaagcgacaccggaggaattgaaatgcaaagccgaatggttcatcgatgtcatgagccgcatgggggtcactacagtggaagggaaaagcggttacggacttgaccgcgatacggagcttaagcaactggaagtgatgcgttccatcaatctctctccgcaacgcaaagtagatatagccgccacctttctcggtgcacatgcattgcctcccgaatatcagggcagagccgaccaatacattgattttctcatccatgaaatgcttcctttggtccgtgaaaagcaacttgccgagaattgcgacattttttgcgagcaaggtgtctttaccgtagcacaatcccggcgactcctgcaagccgcacaggaactgggactcggtgccaagatacatgccgatgagatagtaagcttcggcggtgccgaacttgccggtgaaataaaagcgctcagcgccgatcatttgctgcacgcttcggataccggcatccgtgcaatggcagaaaataaggttgtcgccacactcctgcctctgaccgcctttacgcttcgtgaaccttatgcacgaggacgtgacatgatagacagcggttgtgccgtagccctcgccaccgacctcaatccgggcagttgttgttccggctccatcccactgacatttgcactggcttgcctatatatgcatctcacattggaagaagctatcacagccatgacattaaacggagctgccgcactgggttatgcccaccggacaggaagtatcgaagtaggcaaacagggagattttgtcctgctggacaccgataccccggctgtactcgtttactataccggcatgaactccgtgcaacacaccatcaaaggaggacgtattctattctaaaatattcatctaactaaaaaacataataccatgttaacagaactcactatcaaagaatttattcataaagtcatcagcaacgatcctgttcccggtggcggaagcgtatccgccttcaatggtgctttggcaacctccctcgccgcaatggttgccaacctgaccatcggacggaagaaatacgccgaagtaaatgaagttatggaagacctttccgcccgttttgaggaactggcacgtcaactcattattgatgtagaccgtgactcggatgcgtataaccgcgtatttgccgcattcaaacttcccaaagaaacagaagaagagaaaaacatccgcagcgaagcgattcaaaaagaaaccaaatatgcagccgaagtaccgatggaagtggcacgtatcgtccattccatcctgccgatgattgacgtagtggcacgaaaaggaaacagcaatgccgtgaccgatgcttgtgtggctatgatgtgtgcacgaaccgctatactgggcgcattgctgaatgtccgcatcaatctcacttctatcaaagacgagaaatttgtaaaagaaatgactgaagaagcggatatgatagaaaagacaacgattgccgaagaacaaaagatactggactatgtgaaaaccgttttctaaaaaagaagattatgaataacgtatatcaaataggttccggcgaactcacattcgatattatcgaacgtatcatcaatgagaacctgaaactggaactggcgtccgaagcacgggagcgcattcagaagtgcagggactatctggataaaaagatagccaattccgacacaccgctttatggtattaccaccggattcggctcgctgtgcaaccgcaatatctcgtctgacgaactgagcaccttacaagagaatctggtgaaaagccatgcttgcagtgtgggcgaagagatgccgcatgtcatagtaaaactgatgtttctgctcaaggcacatgccctttcgttgggacatagcggtgtgcaagtcattactgtacaacgcatcatcgacttcttcaacaatgatgtaatgcccattgtatatgaccgtggctcgttaggtgcatccggcgatcttgctccgcttgccaaccttttcctgccgcttatcggtgtgggagatgtatattataaaggtaagcgatgcgaagccatcagtgtactcgatgaatttggctgggagcctgtaaaactgaaaagtaaagaaggactggctttgctgaacggtacacaattcatgagcgccaacggtgtttatgccatcttgaaagcgttccgactgagcaagaaagccgacctcattgccgctatttctcttgaagctttcgacggacgtcttgatccattcatgaattgtatccagcagatgcgaccgcaccaaggtcagatagagacaggagccgcattccgccgtatactggaaggaagtgaaatcataactcagcccaagacacatgtgcaagacccctactcattccgttgtattccccaagtacacggcgctaccaaagatgccattcgccatgccgcgtccgttttgctgaccgagatcaactctgtcaccgacaatcccaccatcttccccgatgaagacctgattatatcgggcggaaacttccatggacaacctctggcactcgtctatgattatctcgccatcgctttggccgaactggggaatatatccgagcgtcgtgtggcccagcttattatgggacttcgcggactgcccgaattccttgttgccaatcccggactgaattcaggctttatgattccccaatatgcagcagcctctatggtaagccaaaataaaatgtattgctactccgccagcagtgattccattgtatccagcaacggacaagaagaccatgtgagcatgggggccaatgctgccaccaaactgtttaagataatggacaatctggaacatatacttgccatcgaactgatgaatgcagctcaaggtatcgacttccggcgtccgctcagaagctctccatacattgaaaaattcctctcggtttatcgcaaggaagtacctttcatccgcgaagacatagtgatgtacaaagaaatacataagactgtggcttttttgaaacgtcaccaggtggattattaagttattatttcactatctttgcaggcaaaaaagaacaaagtatgaatagcgacaataaagaagaaatgtttcccattgtggatgaacagggaaatattgtgggagctgccacacgaggcgaatgtcatgacggcagtaaaaaacttcatccggtagtgcacctccacgtattcaacagcaaaggtgaactttacctgcaaaaacgaccggaatggaaagatatccaacccggcaaatgggatacttcagtaggtggtcatgtcgatttgggcgaaagcgtagaaatggcactccaccgtgaagtgaaagaagaactcggaattaccgacttcacccccgaactgctgactaattatgtttttgagtccactcgcgaaaaagaactggtattctcacacaaaaccgtttatgatggtcccattacccccagtgaggaactggccggaggacgcttttggacattagacgaaattagagccaatatgggaaaagatatttttacacccaacttcgaaaacgagttccgtaaattgggcttctgaaacttctttttcataaaaaggggcaaattcttgacctgtatcaagaatttgtccctttagtgtatattttgacctcataagtatacaacagaaaacaaaagcacgtaattttgtgttgtaaaacatagaaagaaaggataacgagattatgaaaaaggtaaaaagtattgtgatgaaagtcctggctatgatgggtgaaaacgaagtaagagcttggggcataggcattaaataatataaatgccatcattttaatcaacaaagaaaggataacattatgaaaaagttaaaagaaatcattaagacaggtcttattgatatgggaaatggtgccctacgtgcttggggatacgaaatcaagtaactgtcatacttgattagagaactttatttaaacctcaatagtataaaggagagtaatccaatggattattttccttttttatttatcagatatcttatttactacaaataattaggaaatgcgataagtattttaagaacttatcctatttgtcagaagtagctacaggtggtatttattgtgaaaaagagctttttttagcttcttgttttctaccttttatataccgtaatgatgctttattacataaagataaagtgtgaaaaattatagaaacagcataggataattaagatagtgaaacggggatgagataattttatctttttgagcttaataatagtgaataaatcaataatattattatctttgccgctgttagtgaatgaagaaaataggataagttcttaaaatacttagcaaatactccttaattcattagcctttcaaatctattatagtattattaactctatgaaacacttatgaaaattaagactttaacccaaagaggtaagtacacattattagccggtgtacttggaatgagttcaattccttcctctgccattcctaccggtatggctgatgtttcactcccaaccgtagcacaacagacagccaaaatcaaaggaaaagttttggatgccagaaccggagaaccggttatcggtgccaatgtcgttgtaaaaggaacgacaaacggtagtatcaccaattttgatggcgaatatgaattgacagcaccgattggctctactctcagtatctcttttattggttacaaatcaatagaagtgaaagcaaccggtggcttgcaaacaatcaaattggacgaagactctgaagcgctggatgaagtcatagtagtaggttacacaactcagcgcaaagaaagtttaaccggttctatgaataacatcaaaagcgagaagttgaaggacataaccacaccatcggtagaaaatttattgaatggtaaagttccgggagtatatgtggctccgggatcaggccaacccggttccagtggtgcggtagttatccgtggacaagccacacttaacggtacgacttctccactctgggttattgacggtgttatagtaggctcggacgccggacaattaaatcctgcggatattgaaagtatgactattttaaaagatgccgcctccactgccatttacggttctcaaggtgcaaatggtgtcattgtagttacaaccaaaagcggacgagccgaaaaaatgactatcgaagcttctgtaaaattgggggtcagctcactgaataatggaaatttggaagtaatgaatggtgcagaactttatgactattatgcttccttccaaaatgccaatgaaatttcttttccacgatggaacaaggacctgcgtgacagtaatttcagttggtgggatttagctacccaaaacggactcacacaggagtataatgtatctttacgcggtggtaacgaaaagatgcaatcttatctatctgtaggatattatgatgaagaaggtgccgtgaaaggatatgattacagtcggtacaacttccgcttgaagactacatacaaaccatttgactggttgacaatcaaacccgcactcagcggttcacttcgaaatattgatgaccgccaatattctgtcacagctatgtattccatgctcccatgggatagtccctatgacaaagacggcaacttggttcctcaccgctacagtggttgggtaaacactcagcaaaccaactacctatacgatttacaatggaactattcagagtccaaatattacgaatttatgggaagtttagattttgacattaaaataacagactggctgacattctcatctgtcaacaactataaatacatcaactctacttctcacggctatagtgatccgcgctcaagcagtggcgaaaatgtaaacgggcgtctcacagagtggagagcagaagtaacccgccgttataccaaccagaaattattaataaacaaagacttcggcaagcactctatcagcggattgatagcttacgaatttaatgattattattataagaatctagatgtctatggtaccggatttgtacccggatttgaagttctggatgtagtatccaagcccgagcgtactaaaggcggtatcagcgaatgggctactcagtcttatttcactcaatggaaatatgtatatgatggtaagtatatcgccgaagcctctatccgccgggacggtgcatccaacttaggtacgaatgctaaatacggcaatcttctgtcaggtagtgtgggatggattatcagccgcgaggactggtttgatgtagattggatcgataaccttaaattacgtggaggttatggtacagtaggtaaccgtccttcttcactttacccacaatacgacctgtattcggtatcttccagttataatgaaaactcaggtgcacttatcagtgttatcggcaacaaagacttgacatgggaaaaaacttacaccacaagcatcggtcttgacgctgcattgtttaataaccgtctgcgctttacttttgatttctattcaaaagacacagacaacattctttataatgtgcctgttacagggcttaccggagtgaccagtgtttacaggaatatcggcaaaatgaagaacaccggatatgaaatctcattaggcggtgatatcatcagtacaaaagactggttctggaacgtagaattaaatataggtcacaatagtaataaattaaaagatctctataaacaaaaagatacagacggaagctatgtggtaaaacccgttatcatcagtgatggaagtagcattgccggtacagcgcaacgcatcctcgaaatcggttatccggtagatacttattatttaaaggaatgggcaggtgtaaatcctgaaaacggtgctccaatgtggtacaaagataccaaagatagcgaaggcaatgtcacaggaagagaaacaacctctaactatgcagaagcaggatactataaatgcggttcagcagctcccgatttgttcggaggtttctctacaactttaacatggaaaggttttgacttgaatgccgtattcggttactctatcggcggaaagatttataactattcacgtcaagaatatgactccgacggaacttataccgaccgcaatcaaatgaaactgaaagacggctggaatcgttgggaaaaaccgggagatattgccactcatcccgttgccaaatataataatcaagataaaggaaactctgcatcttcccgctatctggaagacagcgactacctgaaattacgttctctgaccctggggtacaactttaagctaccacaatggggtattcaaaatttacgcgtattcatgaacgcagaaaacctgtttacaatcacagattattcaggcgtagaccctgaaattccggccagtgacggttcggtaatgggtactgccggccctgccgtttatccgtctgtacgtaaatatatgttcggtttaaatcttaccttttaatcagtagaaacaacaatgaaaaagatattgaccttattattggcagcggcatcattgaccgcttgcgacatagatcgtttaccatacaattctatggctgcagaacaaatcaccaacgacccttccgcatcgttggaatctctaatgaacggtatgtatgcccagttaaagacatggtcagaccccatgcaccgttgtggtgaatatgccggtgacaatatgatgattcgtggttcatcaacagatgccttctatgaattcatttctttctcccgtactccggtaaactaccgcttacagaacttttgggattatggttacaaagccgttgcccaagcctcgaacatcatcaaaatgatagaagaaggacagagtgccgaaatagacaaccagttgggcgaatgctattatgtgcgcggtatgatgtatttctacttatgtcgtgcttatggacgtccttactatcaggcccccgacaagaatttaggcgtacctattgtcaatggtactcccgatgatattatgggagacctgctgttgcctgaccgttctacagtaaaagaaacgtatgagcaagctatcagtgacttgaaaaaggcagaagagatgatgactatcaacaaaggcgctgcttatgcctcaaaagaagctgctcaggcaatgctgtcacgcgtatatctgtatatgagtggaacgtatgaaaaccccaaccgggaatatgcccaactggcagttgactacgcggacaaagttatcaattcgggcaactactcattattacctcgcgaggagtttatgaaatacaacactcttactcccgaaaataatgacgaatccatctttgtcgtaaaacgtgttgcttccgaattctccggctatgaccactactacggtattggcggtatgtatgccaatatcggcggtatgggttggggagaaatgtatgccagtgccaaatatattgatttactgaatgagacaggacgtaatgactggcgtccggatcattacaaaatcgtagacgcacgtgctgcatttatcgagccgacatacactgatgatcataaagaagtattccgctttatcaaacaagactctgaaacggtactaaattatgaacagttgactgtaatcaaaaaaggagcaacagtgatctgccaaaagaccaaagaagtagatggaaaagatgtaccggacggtccggaatatacactgactcctgtagatgccgaacaagaaatttattctatcacttaccaggatggcaagacttatacgggtgtgttagactattacatctctctcaaccgtgtatatccacaattctacatcactaaatgttctcgcgaaggagaagattcacatttacattcaccgattatcagtcgtttgagtgaaatttatctgaatcgtgcagaagcctatgccaaattgggcaactattctgctgctttagccgacctaaatactattcgcgaacgttctatcatcggtggtggatacgcttcattggatgcaacaaacgccagcgaaagaattgataaagagcgccaactggaattagcctatcaagcagaacgcagctatgatgtgttccgcaacggcaagcctttgacacgtcgctatccgggacctcaccaacaatttgaagacattcccgcatcagactaccgtgtcatttattacattcctcagaatgcaataaatgcttatccgggcactctgactcaaaacccaactgataacagcggagttattctgaattagagctctcttttcaataacatattagttttttatggagttgtgtcaaaacgtggataatgctgtcgtttagttcgtaggggcgaggttcgctcgcccaaaaacagtttgctttgcgtcttcgggcaggcaaacccttcccctacagctgacgatgggataggcccggtttagttttgacacactccttttttataaacacagaagcacaaacctttcatttataagccattcggcagcatttacttcttttttattcgtccgttccgaagattttatgtaattttgcatcaaacaactattaatccaataaaactttatcagaaaaaaccatgattaaaaaactatctaccttggtagccggtttagcgttgatatgcttgaccggatgcacttcaccccaaaaaggaacagcacagaatgatgtgttttctcctattgaagtagcagttcccgaacgtcccgcaggacaacaggatgtaatccaactgaccactcctaaactcgacactgttcgtgttggatttatcggactcggaatgagaggccccggagctgtggaacgctggacacatatccccggaacaaagattgtcgcactctgcgatttacttcccgaaaatgcagaaagagcacaaaaaatcgccaccaatgcaggaatggaagcaccggtactgtattccggttcggaagatgcatggaagcaattgtgcgaacgtaatgatatcgaccttgtttatattgccaccgactggaagcatcatgccgaaatgggtgtttatgccatggaacacggaaaacatgttgccatcgaagttccgtctgccatgacactggacgaaatctgggcgttaatcaatacttcggaaaagactcgcaagcactgtatgcagttggaaaactgtgtatatgacttcttcgaactgactacactgaacatggctcaacagggattgttcggcgaagtgctgcacgtagaaggtgcttatatccacaacctcgaagaattctggccctactattggaataactggcgtttggattacaataacgaaaaccgtggagacgtttatgccactcacggtcttggccctgcctgccagttgctggacattcaccgtggcgaccgcatgaagactttggtagctatggacaccaaggctgcaaccggtcctgaactgggtaagagatatggtttggcaaacgattctatcgaattccagaacggtgaccacaccatgaccttcatccgcacagaaaacggtaagacaattcttatccaacacgatgtaatgaatccccgtccttacagccgtatgtatcagctgacaggtactgatggttttgccaacaaatatcctatcgaagaatattgcctgcgccccgaccaggttgacgctaaagaagtgcccaaccacgagaacctgaatatgcacgctgctgttcccgaaaacgtaaaagaagccttgatggagaaatacaaacacccgattcaccgggaattggaagaaacagccaagaaggtaggcggtcacggtggtatggactacatcatggattaccgtctggtttactgtctgcgcaacggtttgcctttggatatggatgtatacgatttggctgaatggtgctgcatggcagaccttacccgtctttctatcgaaaacggtaatgctccggtagctgtacccgactttacccgcggcagctggaacaaggtgaaaggttatcgtcacgcatttgccaaataagaaacagtgaattcttaaaacaacaataacttatgattggagaaacctacacacagacaactccaatcataagttattttttatgtccctatttgaaaagaaagtttaagaactcagcgctattcccgaccggcaacgtaacatcgagtttataaaagcactgactcccctatgccgacatgaacattatccatgaatttgaataagacagtagcttaatgctttccatctgcaagaagcaaaaaaacggtcacatcactccacattcactttagtcagcttccctgtcaccgaatcaatgatgaatccatagaccttgatatcagaaggtatcaacggatgattgacaatggcatgcacagtgccgcgcacagatttctcagtatcttcaaatccgtccagccatgacgcaaagtccacaccgcaatagtgaatcatatcaattgtttcctgcttgatgccgcgtgccttcatgtgctctatcatttcaccactattcatgtggcaggcaccgcaatcggaatgggctatgaccatcacttcttttacacccaactcatatatagctaccatcaaactgcgaatcacactcccgaaaggatgcgagatgacacctcctgcattttttatcattttcacatcgccattcttgatgcccaaggcggccggcaacaactcggtcagtcgggtatccatgcatgaaagaatagcgattttcttatcaggatatttattggtgatatacttttcataccctttgtttgctacaaactgtttattgaattcaagaatttcatctaacatggctttgcgtttttatgtttcccgcaaacatacgaaaaaaacaaatgaagcggtacattcccgcctgagaattttaatgaacacccgactttttacagtccaataatgtaagcacaaaccatatcagaaaaagcatagataataaaggattgctgcaataagaaaagaccagcaccataaacgcaaccacagcatgtgtgatacgcatcacatgacctgtactaactttctcacctaaatagagtgagaacaaattggcataagcatctgcccagcccgctacgaagagtttgacgcgtcccaacagggataaacgaattgaaagttcttttttcatgactgttccttattttatgatggcacaaagaaacagtcctgttttgacagaatacgtcaatcctgaattttttcactgatattctgcactttttcttttaaataaagaacaaaatcaggagagttaattatttcaatgtcctcaaacagaccaagaacaaaacgcccgattccctcatacttacatacttctgtatgaaaaagccaatgagcatcatcttctctctccatatacttctcggccaatggaaattcctctatcaacagattggcagcagtcatgcccaaacggagagtgacaggcaaacgtcggtcactgctgatatgaaaaacatcagtatacccttcttcatgagactcctcaaattgccaaccggtctccaacacctccaccgaagttatccgggacactttaaaaagtttattcttaccgcttgccggctcgtagcaccatatttcattattattggcagtaaaagcaaacggctccaccaccctgtccgtcacagcatggctgttcgatgacttatactcatgaaacgccacttgtctcttatctttcactgcctcataaagattatgcacattgtcagcaatgccgctacggacaactatctcggaaagaatctcataatcatatactttatatagtttctctttcaaattttgtttgagtgaagtattcccatctacactttcgatggcacgttttaaaatataagcctcttcctcggtgaaatgcaccaaagtggaaatatccttaaaataaggagaagatttatcgagtgaataacagccgtttgtcttgcggacaataaaccctgccattttgaacgcctcaatatatcgatagacgtttcgcgaactcatatccaaccgttttccaagttcttccaaggtgtatttacggttttgtgtcagcaacatcatcaggcgaagctgacgctcaaacttgtgtagttccatactatcgaattagccgtttatctttttctgctttcccagtcctgcacggatgcggctcaatgactgcggagtaatccacagataagaagcaatatgcttcaacggaacatattgcaaaagttcgggattctcttccaacaaagcaagataacgctctttggcacgaggactccctccgctgataagccaattctccaaaccgagaagttgctgttcgaaaagccttcttccgaagttggccaattcagcagatgaagcataaaaagactccaattttgccttagaaataccataaagttcactgtcacacatggcctctatggaaaccaatgaaggagtattttctatgtagccccaagacgaaaaaaccgcctctccctcggaagcaaaccaaacggagacatctgccccatcattcaggtaatgcccccgccagattcccttgcttataatatagaaattcgaattccgttccccctcctgcaccagaaaatctcctttgcgaaaactaaacttttccattttctccaataactgtaagctcacggttatgggcaaactgtatttttcacaaaacttccgaacaaacgcatccatacttctctgttgatttaataccgcaaaggtaacaaatcatccccgaaccgactgatgtttacgccaataaattatggttatcactaaaaaagtaagtacctcagccaacggaactgccagccaaatacccggcactttaaacagtaagggcagcccgagaaggcagataaccatgaatacgaatccgcgcaacaccgtaaccaccattgccgggcgcgcacgctccacactttgaaaatagccgatggacacgatattcacggcaaagaaaacaaatcccgaagcaaacaaaggcaatcctgacactgcaatatcgtatgccggataagaacgatcaataaacattgccactatttgatgattgaatatcgctgtaagagcaaagaatacaagtccgcaaatcacagctgtcgccaatgccagacgaaaagccgaacgcacacgtgcttcatcaccggctccgaaattatagctcaagatgggttgtgccgactgtccaatagcattatacaccataaatataatagggaaaaaatagcaggcaatgctgaaagctgccaccccgtcttctcccagatacgaaataaacacatagttaccggcaaacatcatacaggcaattgctccctcacacaaaaacgtggatgctcccaaccggcacatatatttcacattacgccaagtgagctgcatactctttctgctgagcttcacgcggcagaaatggataacatttttcttacggctcaaatatatgattatcatagcagccccaaccacataacctaaactggtggcaagtgccgcacccatcatttcccaaccgaaaataaagatgaacacataatcgagcacaatattaatcactgccggaatagcattgcaccacatggcataattaggagacccatccaatcgcacaaaaaacatacccgaactgagcagtgcgctgaacaccaaaaagggaagaaaccaatgcatatattctaccgccaaaggcaacaagcgttccgaacttcccagcaatcgtaccacttgaggtgcaaacatacacaccaccccccatagcaacgccaagaacaaagaagaaaccaccactgcctgcgttacattaatacgcgctgatttctgcttaccctgtgacaaatgaatggaagcaaccacagacgcccccactccaaacatcagcccgatgcctgtacttatcaaaaacagtggagccgtaatatttaccgctgccaatgcatcacttccaatccccttacctacgaatattccgtctgttataacaaacacagccgaaaataccatccccaacacagtaggtatcagcaatttccgaaacaacttcggaatctccatgctaccaaaatcaatactatctttcatacctatatcaatttatttttccggttgcaaagataggatgttattttagggtaaaaattaccatttggtaatttcagtcactttttcattagccagactaagcgttttcatcctttcgactatgcctgtctgtctgtcgaattactacagtcttcggcagtggactgtatagtccattgcagtggaccgtacagtctgctacggtggactgtacagtctgttgccgaagactataatattcttccgtttaaaaggccttgaccacccctatgaaacggcttatgcttccctttgtaggtgatatgatataaggagataaaacaaggattaaatcccaaaggaaacaatgtgttccactttttacaacaaaaagtttgtgagttaaaaagaaatcactacctttgcacccgcaaaacaaaagcattgcctctttagctcagttggccagagcacgtgatttgtaatctcggggtcgttggttcgaatccgacaagaggctcacaaaaagaaagccgcttctgaaattcagaaacggctttctttttaattgtatcttttttccaaaaaaacaaggggcatcgtttgcgaaagttgttatgatggcatccgaacagacaaaccacgcaacatcatccacatcgacatcaccagtgaacctcccacgatgattactcctcctaataacaattgtattgcattgggttctgtaatacttgaaaattcacgaagttctgaaaagagagagagtgagaagaaaagagaacacatcagaaaaagaatccccataaaaacacttattgccccattccttcgaattaattgtttaactaaaattcctgtaaccgataaaaggaatacgcccaacacgattcctacggtgtgccacgcaccgaacaacatagtgctcatgagcccgccccagcctaacaacaaaatagccaggaaccacacatccggcaagtaactgaaaagcttcttcttatcccggtgagtcaatagtgtattcataatattaaaatattgattttcgcaaagatagagattatttccaaataaaaaaactcctcactgactttttatcgccagtaaggagtttcaatcatttatggggcaaagattacatcatgccgcccatgccacccattccgggagcacccatcggcatttcaggtttatcttctttcttttctactattacacattctgtagtaaggaacatacccgcaatagaagcagcattttccaaagctacacgagttaccttagcaggatctaccacaccggcagcatgcaagttttcgtaaacgtcggtacgggcattgtaaccgaagtcacctttaccttcgcgtactttctgtactactactgcaccttccttacctgcattggcaacaatctgacgaagcggttcctcgatggc

SEQ ID NO: 6660 - DNA, 1386 bp, Unknown
  gut microbiota DNA sequence
ccaagtatctccatacgcttgcaacgttccgcatcctccggtccccagccatagaaatgttgattttctccgccatacttgatataaacattcttattgaccaaaaacgcacctcctaccgagttcggtccgtgagccaatacatattcatatatcttctgacagcattcctccatgttcatttcccgtttcttcagcagcagactgtcttcctgcggaagcatataaaatcttccgtcgtatggaaaactcatgaccgcattcccttttcttatggcatcaacagcttccagtatttgctctttcggaagcagcacatcggtatcccatataccgacaatcgctccctcagcttcctgcatcagttggttcagatatttggttctgtggaagacgggggaggcatccctcacaaaagtcttgtgtatatgttcatcgctgattttcaattcataatgcggatgttcatcggcctcaagaattcttatctccatccggatggactctttcaaagccattagctgctctactaccaggtccagattctgtgccctttcgggcgagtccacacggacgggaatgacaaaggaaaccttccgattcgattgcaatgcggataaagaaagtatatcgaaagttgtttcggggcatattcctatttggtgtaaggcttccacctccccgacagtctgtttgtccaatacgccccctttacggacatgacgcaaaatgcagtccaggaaatagagggtatattgccggagtgcaagccggtaggtcactctgttttctgcacagtgtccggttatgcgcaaccggaagtagcgcagccacccttgccggtcaatatcttcatcctctgcaaaatgaagtatcttccgaaaagccatatcgtcgatgcaggaaagaatttcatcctcatcgccttccaccatcctgtttctaagcaaataaatcaatccgcagcccaacccgaacaagccattgtccaggcaaaagggcatctcgtaggatacattctcaaacttatcatccaacagggcatccgcccgctcttccatctcctgatttccatatttccttgccaatgtgtaacaagcgataatacggcccatgttgtaatagcagatgtcggcctcggccacaggttcctgaccggctgaaatattctcattgatgacgcgtacccggtcacttggggctgcatcttcagtaaatagtttcagaaacagttcttcatctttcataaggcataaacattacatgttgtgactcccataaactcttattttaaattcagcaacctgctgagcaggcttttttccttcgtgacgatggatgccgttcccgtcatggtctttatcaaaggcagttctttgccatagc

SEQ ID NO: 6661 - DNA, 84246 bp, Unknown
  gut microbiota DNA sequence
ctaaaagccttaattacctgtaagttatggctcagtttgaaaacttggggggaattagggtgtctgtaagaacagacattatttgctattgattgaagatagaagtattcaagcagcatagagccactaatgattgttctcatgaaactcccattgttcccacgaatttacatctttttgaaagacatttcaatatgaactgctttgtgacaaagttccggtagcctttaaatattccacataattcaaatacagacggaaatgagcatccacttgtacacaataagcctgttgccataaagtttgagcttcaagataatccgataaagtttctaaacccacctcatactgcttcttactcaccctcatattctcttctgcctgttgcaaagaacggtcggaaagttcactttctaagcgagcctcatccaaattgttagcagccaaagtcaattccaacagcattttctcattcatatcagcctgctccaaacgagtctgttccaacttagctttggcggcatgcactttgttgatacgctctccaaagtgaaaaagaggaacgctgacattcaataagactgaaaatcctcctttatacaaaaatgtttcatcatttacttccaaaccatgaatataattatatgagcctttaacaccaaccttaggcaacagttcgctacgattcaatttcacttgctgttttgccatagctacttgtttatttaaaatgccatattcaggacgagccgtaatatccgatacctgcatcattatattctctttcacttcaggatagtctcccgacacctgtatatctgcaattaaaggtttaccaataaaatgacacaaattcattgttgccaagcgcaatgcgttctctgctttgcgcatattgagttcactttcattcaattttacctgcactttcagcacgtcattctgaggctttaacccatgacgatatgcactttccacattcttatgcaactcaaccagcacagtatgatacctatcggccacattcttcatttccctagctttaactacttgggcatatgccttatcggtattcaaaataactgtggtagccgtcagggtttcattcatttgcgccatctccttgcccaatacagacattttataagccgccgtaatttttccacccatatagagaggttgttcaacttccactcctcccatataaataagcccgattttatactttaaatcaattcccgggaaataagagaaaccgccattgggcagaaattgaccggatgaattaggcataaacaccggcagatttcctccttctataccataatgtccactggcactgctataaataccggtcccactcgccgtaaaattcggaaagaaatttcctttataacttttagccatatatcgcgcgctttctgtctgccggacagaagctgccatttctttattatattgaagagccatctcacgacattgcttcaagctcaacacctcttgagaaaataaagctgatgagcaaaataaagcaccaatcaaaatagatatctttttcatttgtcagtctgttttatatgaaaaaataatgcataaagaacaggtataaacagtaatgttatgagtgtaccaaacagtaatcctcccatgatggcggctgccaatgaaccaaacatggcatctgtcagcaaaggaatcatacctaagatggtagtcagagaagccatcatcacaggacgtaaacgactttgcgaactatcgattaatgctgctgtcggttcaactccccggtttatctgcaacgttatttcatccatcaacacaataccatttttaatcaacatacctatcaatcccagcgtccccactatcgcaacaaaattgaaagtctttccagtgagtagcatgactgccaccactcccacaaagacaagaggaatacaacagaaaataataatcggtttgcgataatctttaaacaacataatcaggatagcaatcatcaggataatagccaatggaaaattcttgaataaatatttcatagaatccgtactggctattttttctccttgccaacacaatgtataaccttcgggcaaaggaatattttctatctgcgaagcaacagccaaacgtgcttgttctgtttcaagtcccggagccggtgagcactgcacacgctggcttctctgtccgttataacgcggaaccaccgggtcttcccaccttacgtccactcctttactaatttgtttcaatggagtgctgcccataataccttccactagttcttcttttgacagtgaacccgatttcaactttaccatcatttcttcattcagcagaccattgagtgacggtatagaagaaaacacctgtgtattacctaaatcttctatcggattcccttcttcattcaaacatttcaaatagattgtattggcatgaattccctcataaaatgaaccgatgggaattcctccggtagctgtcagtaaagagagactgacatcgttgcggctcaaccccaaagcacgtgcggccggctggtcatattctattgtcaacaccggaacctgcggctcccaatctgtcgtcacaaggcgtacctcaggagtattttccataatatgacgtgcactgtctgccaaacggtgcaacaccgccgggtcgggtcccataaactgtgcctcaataggatacttcttgaacatcaggttataacgctttaaattgacatacgcatcaggatatgcctgcgacagataagactgaatctcgtccatattatccaccaattcttccggtgaagtaaagtctataatcagttccccataagaaagagaaggattagcaatactccgcaccaaattataacgtccgggagttccgccaacagaagtcgtaacatgggttatttccttcctgctcttcaaatacgtctctattttccgcaaatcatggacaactcgcgtcgaattagtcccttcaggcaatttatactccatataaagctgattgtagaccatatcggggaagaatccttgtttcatataaccatatccccaaagagagagccccaataaaccaaccatggcaaatacaaagctccagcgatgagacaagccaaagtaaagagcagctctcagataagcatagacacgccctttatacacacgggcattcgtttctcctgttgacatttcactcttcagtctcctgtttgccatcagaggaacatgaattaacgccaatacccaactcaacaatagcgataccgccaatacgataaagagatcgcgcgtatagactcctgctgtatccggtgacatataaataggcaggaaagcaatgatggcaatcagagtggcccccaataacggcatcgccgtttgtcttccgatggctgtcatcgcctccatacgaggtttacctgccttcagatcgaccaagataccatcgataattacaatggcattatctaccagcatccccattgccagcacaaatgccgccaaggacacacgctgcatcgtgccgccggcagacagcaagaacagaaatgaaccaaataccgttaccaccaggctgattccaatgataaccccactcttgaagcccattgccaacatcagaatgagtacaactataaccacagactctattaagttgataacaaatgtacccaacgaatcacccacacgctccggctgataaaacactttatgacactccactcctgccggtaagcggcttcctttcaaatcgtcaagcttctttgccaccgcactgcctaccttgatgatatccgtaccgctggaagcagctaccaacagtcccaaagcctgctcaccatcataaaacaattcattacgtgtaggattctcataactcttttctattcgcgctatatcacgcaaacgtaactgatcatcatcgtgtccctgaataagcatttttccgatatcatctaccgtcttaaacttatcgttgaccgttacacgaatacgattatctccattctcataataccccgtataagtcgttttgttctgcccgttcaatgtggcaagcacttcggcaggcttcactcccaaatttgccatccggtcttgcaacaaagagatattgatacattccggtcttgtgccgtagagttctaccctgtccaccccctcaaggtcactaacttccctcttgataagttcggcataatcagacaactccctatccgtcaacccatctccggtcaaagcataaaacatgccatatacattgccaaagtcatctttcaccattggtgcgcttgcccccggaggaagcgaagcacaggcatctcccactttgcgacgcaacatatcccaacattgctccacatcctcatccttcaccgtactcaacaattctatctgaataatagataagtcattataagaataactctccacattatctatattacccatggtacggatatttttctccaacacatccgttacttccaactccacctgatgcgccgatgctcccggataagtggtaaccaccatcgccaatttcactttaacctccgggtcttccagcttactcatctcatagcaggaataaacacctcccaaaagaaggacagccaccaagaaataaaccagattacggttttgaaatgcccacttactaatatccattataacagccctcctacattagttgatgtaataggcggcaacggtttcaccacctcgccatcctctatatgatgcactcccgatgacacgacaagttctcccggctgcaatgcatccgaagttatcacactgcgtccattggtcagcagtctgagtacagtcacttcacaacttctcaccgttcctttcgacgggtcataaacaaagactgctgcctttccattcttttgcaaaacagccccgcttgacactgacagagaatgcatatcacctgcactgcaaaaaacagtaaccatagtattcattcccggggacggagaaggcttaccatcctgcactattctcaatctcatagaatataactgattggcatttgccttgggggtgatactgatacattccaacggataaaacttgcccggataaatatcaaatgtagcatgataacgggtaaactgtgtacgacgaatatattctgctgccggcagatttatttccacttccggtgctccttggctgatcatcgaaataaccggcatccccgcccccaccgtttcatgttcatcaaacaaatgcttttgtacgaatccgtcaaacggagcatagagattagtatattccaactgatccttgtggtgttgatacttggcagttatctgcttcagcccatacacagccttgtcattggcattgggagtcgttccattatccttataaagagccatcacacgttctgcctcagccttaacctgctgatattcggcctcggtagcttccagctgaatccgataatcggtaggatcaagttgtgccaacaactgacctttccttacccgggctccgtcttccacacaaattttgcctatcgttccgcttactctgaaagacaaattaacgtcctgagcagcttttaccttccccggaaactgcaaaggagtttgcccttcgacagaaaaaactgtgtctatttttactgtctgcattcttctagtctctttgctattatgactgcaagaagccgacattaccataaacgcacctaaaataatacaacaaaataatttcatagatttaagttttagtgttttcctgcaaatgtactctacttaaatgaagtaacaaaggtctatataccaaattaactgttctatttatcaatttcttctataaattaatacagaacagaaagaaagtttttccgatttacctgttctattttacgcttttaaatataaataataccgataacttggtcatctttagaataataaatacctttgcgaccctaattttaaaagcaatgaaaatcgatataactagacatactcatctaaccattctttttatactgttcctttccatttgcagaactacccttgcacaagaagcaaacagcgattctatcgtaatcagctacctgcaagaatcaggcatccccatcacccaaaacaatcgcctgaaactgttaaaaagcggacataccaaatttatcgacctctttgaagaaataagaaaagccaagcatcacattcatttggaatactttaacttccgtaatgactcaattgctaatgccctgttcgatttattaggcgaaaaggtaaaagaaggagtggaggtacgagccatgttcgatgcatttggcaacctctcaaacaacaagcctctgaaaaaagagcatctgaaagccatacgcaaaaaaggaattgaaatagtgaagtttgatccttttaaatttccgtatattaaccatgccctgcatcgtgaccatcgcaaaatagtggtaatagacggcaaagtgggctataccggaggaatgaatatagccaattattacattaaaggtctgcctgaaataggtgattggagagatatgcatgtccgcatcgaaggtgatgccgtaaacaatcttcaggatatcttccttacaatgtggaataaaagcaccaaacagcatatcggaggagcaatgtactaccctttgcgaaatgattccattgataccggtggcaagacggtagcaatagtcgaccgagtaccgcggaaaagccccaaaataatgcgccgtatgtatgttaagtcattagacgccgcacaacataaagtgcagattgtaaatccctatttcacacccacccacagtataaagaaagctatcagacgagcattgaaacgtggagtagaggtggaaataatgattcccggcaaatcagacatcccctttacccctgatgcagctttttacacttcaaacaaactcagaaaaaaaggagctgaaatctatatctataacggagggttccaccattctaaaatcatgatggtagatagtttgttttgtaccgtgggcagcacaaatttaaatagccggagtttgcgttacgattacgaagtaaatgcctttatctttgacaaagaaacaacccacgaattgagcagcatgtttgaagatgacaagaaagacagcacattgctcaccaaggaagaatacaaaaagcgttccgcatggaaacgctttgttggctggttcgccaatatgtttacacccttcctttaaataaacagttttttactttggcaaaaacacggttttacatcaatgaaagttttttcctgccttatggttttcaccttattataaggcagagaaaaaataaatcctcttttcacctccttaaactacaatatttttcttatttttgccccaatatgtaattttgccgtagaaggcacaagagacgagatataagaatgagagtagttgacttaataaaaagcaccgataaaacggcgttttcttttgagatattgccccctttgaaaggaacgggcattgagaagctttataagacggtggatacattgcgtgaatttgaccctaagtacatcaatatcaccacccatcgcagcgaatatgtatacaaggaccttggaaatggtctttaccaacgcgcacgtatgcgccgccgtcccggaacggttgccgtagctgccgcactgcaaaacaaatacaatataacaactgtgccacatatcctatgcagcggatttacccgcgaggatacggaatatgtattgctggacttacagttcttgggcattaccgacttgttggtattacgcggtgacaaagccaaacacgaatccgcatttgtccccgaaggaaacggatacagccatgcattggaactggaaggacaaattaatgatttcaataagggactattcgtcgatggttctcccatcaaggtgacaggaacaccgttcagctatggagtggcctgctaccctgagaaacacgaagaatcacccaatatggaacaagatatttattggctaaagaaaaaagtggaagccggtgcggaatatgccgtgacacaaatgttctatgacaaccgtaagtactttgagtttgtggaaagggtgcataaagaaggtatcaatgtacctatcataccggggatcaaacctttcggcaaattatctcaattgagcatgataccgaaaacattcaagattgatcttccacaagaattggcctcagaagccatgaaatgcaaaaccgatgaagaagcacgcgccctcggagtggaatggtgcatccaccaatgccgcgaattgatagcatacggcgtgccaagtatccacttctatacggtgagtgccgtagaaagcgtaaaagaagtagcaaaagtaatatattaatataggctgatgttttttaaagatgtaataggacaagaagaagcaaagcaacggcttattgccgaagtgaaagagggaagaatcccccatgcccaactgatttgcggtcccgaaggtactggaaagttacctttggcgatagcatatgcccgttacatttgttgtgaaaaccgtggagagcatgatgcttgcggcgtatgccccagttgcaccaagttcaacaaactggcacatcccgattttcatttcgttttccctgtcatcaagaaaaaagccggaaaagatacaatatgcgatgacttcatatcggagtggcggcaatttgtaatgaataatccttatttcaaccttaaccattggttaaaagagatgggagcagagaatcagcaagcgcagatatttgtcaaagaaagcgatgaaattatgcgcaaactcagtttgaaatccagtcagggaggttataaagtaatgattatctggctgcccgaaaaaatgaacgtagaatgcagtaataagctacttaaactattagaagaaccgccggtacaaaccgttttccttcttgtatcggaagaaccggatgcactcttgcaaacaattcaaagccgtacccaacgattcaacattcatggaattgatgaagcagaaatagcccaagtgctgcaaagcaaatacggattgcaagcgcaagatgccaatgatattgcccaccgctctgaaggtaattttttgaaagcactggaaaccattcatctgagtgaagagaacaaactgtttttcgaactatttgtcagtttgatgcgtctgtcctaccagcgcaagatacgcgatatgaaacgatggagcgaaggagtggcaagcatgggacgcgaacgacaaaaaaacttccttacttattgccagcgcatgatacgtgaaaatttcatattcaattttcaccgacgagacctggtatatatgagcaatgaagaacaaaacttttctactcgtttcgctccgtttgtcaacgaacgaaacgtaatgggaataatgaatgaactaagtgaagcacagcaacatatagaacagaacgtaaatgccaagatggtattttttgatttctcgcttaaaatgattgtgctgctggtgcagaaataacatatatataacaacactatgaataatgagtttaaattaaagaacggaagcggctgtttgtattgcaaaggctgcggacgacaggataaacagctgaatacttacgactggctggctgatattcccggaaatgccgaggaacaggagatggttgaagttcagttcaagaatacgcgcaaaggatatttcaagaacagcaacaaattgaagctggacaaaggcgatattgttgccgtggaagcaagtcccggacatgatatcggagtagtgacactgaccggacgactcgttccactgcaaatgcgcaaagcaaacctgaaaccggatgtcgaaattaaacgaatctaccgcaaagtaaaaccggtagatatggaaaagtatgaagaagcaaaagccaaagaacatgatacgatgattcgttcacgccaaattgcgctgaacctgaatctgaacatgaagattggtgatgtggaatatcagggggacggcaacaaagccatcttctactatattgccgatgaacgcgttgacttccgtcagctaattaaagtattggcagagactttccgcgtgcgtatcgagatgaagcagatcggtgcacggcaggaggccggacgcatcgggggaatcggtccctgcggtcgcgaactgtgttgtgccacatggatgaccaactttgtttctgtttctaccagtgcggctcgctatcaggacatctcactcaacccgcagaaactggcaggacaatgcgccaaactgaaatgctgcctcaactatgaagtggacgcatacgtggaagcacaaaaacgactcccgagtaaagaaatcacattggaaaccgtcgacggcactttctacttcttcaaggctgatatactaaaaggttccattacctactccaccgacaaaaatttcatggcaaacattgtgacaatccctgcacgacgagcctttgaaatcatcaatatgaacagacgtggcgaaaaaccggaaaacttgctggaaaccatcaagaaaaacgaaccgcaacaaccggttgatttagtggaacaggaaagcctaacccgttttgacaaacgcaaaggcaataacaacaatcgtaaaaagaaaagaaaaggagaaaccaacggcaataacgaaggtactaccaacggtaacaagcctcaacagctcaaagataaccagccgaagggcgaaggacgtccacccaaaggggaaaacagagctcccaaaggagaaaacagagcttcgaaaggagaaggccgcccacccaaaggggaaggaagacctccacgcgaaaataaagaaaacagagcagagggaaaacgcaaccgtgaagacggccgcgagcgcaaccgtaaccggcgtccaggcaatggcgagaacaccgcttctaccaacaataaaaatggaaataataacggtaacaatgcccaaacaactcagaacaacaattccaagccacaagctcctgtggctgataaagaataaaatagcttgcctgccgataatatatttactattgacagcatgtcacagtaatacggtttatcactcttatcaatccatccctacaacgggatggagtaagagtgatactcttgtttatacccttccggcttcaatacctgcgggaacgtatgaaatgactatcggcatcaggcatcaggaaagctatccgtatcgtgatttatggatgaatatcagcacaaatgtaaaagacacatccacctataccacagatacactgcaattattccttgccgataaaacaggaaactggaacggaaatggtcccggcggactatatcaatttaccaagctctatacaccctcttttacaatcgcccaagacagtgcttccagaaatatccgcatcgttcatatcatgacagacaatccactgaaaggaatcagtgatgtcggaatccgtttggaaaaaccttaatgacttcctcgtgccgaatcaatgcgcaaaaatacaaaaagcaggatggtgaaaccccataaagaagagcctccataactgaagaaaggcaatggaataccgattaccggtgttaatccgagtaccattcctatattgataaagagatgaaacaggaagatgctcagcaccgagtaaccatatacacgtccaaagcgtgtgtgttgtctttcggcaataactatcaaccttaaaatcagagtcataaacagcagtaacacaatagcagaacccaggaaaccttcctcctcacccaccgtacagaaaataaaatccgtatcctgttcgggaacatatttcaacttcgtctgcgtcccattcaggaacccctttcccaacagtcctcccgaaccgattgcaatcttgctttgattcacattatacccggcccctgccaagtcctcctccattcccagtaccacttttatacgtacttgttgatgaggttcaagcacgttttcaaatacatagttggcagaaaaaaggaaacccacagagccaatagcaaacagagcaatataaaaataatcacgcatacgctcgcgcatggaaaggaatatgagataaaaaaccaatgccacacacagtccgtactgaaaccacgtaatatcgaaaggaatcacataataagaaaagagcaacgccagtaaggtccctccagaaccgaaaccgagaatataccacaccaccggcttcttcttacaataagaattaaccaacaaggcagacagtatcgttatcaacagcaagaccgaaaattccccgaccgatgtacagtcatctgccatcatctcctgactaaaacgaatgccaaccacaaaataaaccacagcacaaatcccggcaaacagaatggagccgggcattccttccctgtacagcatgaagaaaaaagccagatagaccaatgcagaacctgtttcacgctgtaatataataagcaacatgggcagtaatatcatccccgttaccggaagagaatacttcagcttactcatggtgaatccataaacattcataaatttagccaaagccaaagccgtagcaaacttggcaaactcagccggctgcaaactgacaggtccaaacttaatccatgaataagaacctttcgtatcctcggccaaaaaaggagtgacaagcaatagcaacatcattgccccataaaaaatataggcaaacatatcataaagcttatcttcgagcatcaacaaaataaatcccaaccccaatgaacaggaaatccacaccaactgcttaccggcacgtgtatcgaaactgaagaaatctatttcaccatagtcataactggccccgcatacactgaaccagccgaagataaccaatgctaaatagatgcaaatagttatccagtctatcgacttcaacatattatcgctcgtgtatgccataatctatcctcctgttttgtatatcattagctttcacctcactgtcaggagacaatcctcctttcaaatactgttccatcatcagtgctccgataggcaccccatataccgcaccaaatcctccattctccacataaactgcaatagctatcttcggattattcatcggagcaaaccccataaaagcagaatggtctttacctctattctgtgccgtaccggttttaccacaaacttctataccgggaatattggctccccggcatgtaccacccaatacagctgcacgcatcccctgcaccaccgtttcataatgccggctactcaccttcgtataatgtttcgtactatacaaagtatccaacggctcatcttccacttcttttaccacatggggagtaacatagtaaccacgattggctattgtcgctcccaaattggcaatctgtaacggagtcaatgtcacctctccctgtccgatggcaatactgataatagtcaaaccattccaagagccccgataattcttgtcataatactctgcattcggaatcattccccgcttctctcccggaagatctacacccaacggatatccaaaccccatcgaaaccatatagtcacgccaggtagacatcgcattctgtaccgaaccgtattttttcttggctcctatcatgtgatacagtccccagcaaaaataagcattacatgaagtagcaatagccggaaccaatgccagaggagagccatgggcatgacaacctacacgaaggcctgcgtgtacaaatccatgataacaggaataaggcgtctcgggcacaataataccttcctcaagaaaagtaagggcttgtgatgtcttaaaggtagaccccggcggaaactgtcccataatagcacggttcaacaaaggtttccaactatcgcgtgccaaatccaagtgattctttccccgttggcgtcccaccatcagcctagggtcgaaagtaggtgaagataccatacataatatctctcctgtttcgggttcgatagcaacaatacttcctattttcccttccaagagtcgttctccaagcatttgaagctcaacatcaatccccaatttcaaattcttgcccggtacaggagtcttgtcatattttccgtccatatagcgtccctgaatacgcccgcgagcatcacggagcaatatttccactcctttttctccacgcaattgtttctcataagagcgctccaccccctgtttaccgataaaatctccacgcacataataatcatccgcctctatatcccgtttggaaacttcggcaatatcacctaaaacatgagcagctgaattataattatactgtcggatggtacgtctctggatataaaatccggggaatttaaacagtttctcctgaaacactccacattcttcggcagaaagctgggtcataaagacctgatgagtataaggagaataacccggattagagcggcgatctttcatttcacgaatacgccttttaaagtattccggagtaatattcaacgtccggcacaaatcaagtgtatcaagatttaccacctctttcatcaccatagtgacatcgtatgccggttggttgtaaaccaataatttcccattacggtcatacatcacaccacgactgggatattgtgtcttattcagaaaagcgttgctgtctgcattctttttatagtcttcgctcataatctgcaaggtaaaaagacgtatcaggtaaatcagtacaataacaacaaccgatccaccaatcacatatttccgcttctccagattataatctctttccacttatttcttcctccttattgcctcggcacataatatacaaacaattgtaatggaggcatctgtcaatattttcaataataatacaggcagattaaaaaacgagaaagtatctatcaccatcaaaatgctacaaaacaggaatgtacacaacagaatataccgaaagtaaggagaaatccccatactcttgatgcccggctcaaagtcttcggcactgtcgcgtaacgtcaccagcctgaggataggctcacgcataaaagccaataacgtagcggcggcggcgttcattccgggagtattactgaaaatatcaactgtcaatccgagtaaaaacgaccacaccatcaatgtgttacgacttacacccgaattatacttcagaataaaataaataaaaaagaaaggagtggcatatccattcatatgcatacgatttaataccagcacttgcaacagtaccagcccgataaaccactctattctttgcagataagtaatcatcagtctactctacttattcgttttaacctgtttttctaattccagctgttcctcttgccctttctccgcaataacgcgaacatcattcagacgagcaaaatctgtaaagagcttgactctaagcaagtaagacagaccatcatgactgtcggctatatcgtctactgtccctatcggaattcctgaaggaaatacggcactgtgtccgcttgtcacaatggtatctcccaaagagaataatgaatgacgaggcatatcttttacgtaagcatattcagacgaaccaccgtcccatttcaagaaaccgaaataatcactcttctttattttacagctgatactgcttttagaattcaaaacgggaataacgatggaatgatgagaagaagtaagataaacaatacctaccacaccacttccgttcactacccccatttcactgcgcacaccgtctgccgtacctttatttatagtaatataattatcggcatgagtaatgctattattgataacactcgccttgaagatgtcatacccctgcaaggcttcctgtttcatctgctcgataccactgctgtctcccgtcgcttccgtcaaggcttcacgaaggcgttccacttgcagttccagttctacattcttttgtaccaattcatcattgatggttttcaagtgaaaatatccggtgacattattggctgcgtcatacaccgcaccggcaacccggttggctgaggtaaagaatgcacttccctgataactgttgaaacggaataataaagcaaaactgattacctccagtaaaacaaagaggaaccagtaattatactttaaaaagaaattcagcagatttctcatctttatttcttcattaatatcttatcgcatcaagaatgagaaacggtctacattcttcagtgcaatacctgtacctttggctacactcagcaaaggatcttcggctatatgaaacggaatattaatcttatcggtaagacgcttgtccaaaccgcgtaacaaagcaccgccacctgccagataaataccattcaacacaatatcggcatacaactcgggaggagtctgctccaatgcgctcaagatagcagtttcaatcttggcaatactcttttccaaacaatgtgccacttcctgataattgacaggtacttccatagggagagcagtaatacgattaggaccacgaacaatataatcttcgggagcatcatcgcctaaatcagtcaatgccgcacctacatggattttaatacgttctgccatacgttcactcacctttacattatgctgacgactcatatactcctgaatatcagccgttaaatcgtcaccggcaatacgaatcgagttattcgacacgataccgcccaatgaaataacagcaatctcggtagaaccaccacctatatcgacaatcatatttccttcgggtgcttccacatcaataccgataccgatagcagcagccataggttcaaaaatcaaatatacatcacgtccgccggcatgttctgcactatcgcgaacggcacggagttcaacttccgtactgcctgaaggcacaccgataaccatacgtaatgaaggagagaagaaacgattacccatattcaccttcttaatcagcccgcgcatcatctgttcgcaagcattaaaatcggcaatcacaccgtcacgcaaaggacgcacagtacgaatattcgggttctctttctcatacatcattttagcccgctcgcctacggcaatcatcttgtcagtgcgacggtcgagtgcaacgaccgaaggttcgtccactacaatctttccgttattcaatatgatggtattggcagtgccaaggtccatcgcaatctcttgtgtaaaggagaataatcccataatttttatttaattgacaggtataatgagaagatgtgtcaaagccggaatcggttatcttcctttgacacaccctctcaaactattatattagtgtttaaaatgacggataccggtagtaaccatggctactccatgctcattgcaatactggaacgtcaattcatcttttacagagcctcccggctggataacagctttcacaccttccttatcagcgatttccacacagtcggggaaggggaagaaagcatcacttgccatcactgcgccatgcaggtcaaattcaaacgatttggctttctcgattgcctgcttcagggcatccacacgtgaagtctgacccacaccgcttgccagcaattgtttgtttttagccaaaacgatagcattgctcttactgttctttacaatcttgttggcaaacaacatatcttccacttcggcagccgtcggagctttctcgcttacttgtttcaaatcggcagcagtttccacatccaagtctctctcctgaaccaacaccccattcaataaagagcggaactgcttcttgggcaacttggcttctttacgcaccaaaataatgcggttcttcttctgccccagaatttccaatgcatccacatcataatcaggagctatgataacctcaaagaagagtttattgatttcttctgctgtttccttgtcgataaccgcattagtaaccaatacaccaccgaaagcagaaacaggatcacctgccaaggcatctttccatgcttcaagaacagtaggacgtgaagccaggccacaggcattattatgtttcagaatagcaaaagtaatttcatcaaattcatcaatcaaatcaacggcagcattgatatccaacaagttgttataagaaatttcttttccgtggatttggtcaaacatcgcgtccaaattaccatagaaataacctttctgatgcggattttctccataacgaagctgcttttgatcttccattgcacaacggaaagcagagccttccccaccgtcaaagtaattaaagatagccgaatcataatgagatgaaacagcaaatgcttctttggcaaaccaacggcgctcttctcttgaagtagtggcaccatgttccagcaacatatcgcggaacggtttgtattgtgcctgactggcaataataaccacatcattgaaattctttgcagcagcacgtatcaatgagataccgcctatatctattttttcgataatagcctgttcttccgcaccgctggctacagttgcctcaaacggatacaaatctacgatgaccaagtctatttcaggaatttcgtatttctcaatctgttgcatatcctgttccagaccgcgacggcacaaaatacctccgaaaaccttcggatgcagtgtctttacacgtccgcccagaatagaggggtaagtagtcaggtcttctaccgctttgcacgggaaacccaatgattcaataaactgtcgtgttccgcctgttgagaggaactctactccttcttcgtgtagtttggtaataatctcatccaaaccttccttgtgataaaccgataccaatgcggtttttattctcttagcctctgacattttttatagattaagtatttgggctacaaaggtatgaattttcagtttatatcttccacacaaaaaggtgaaatattatttatcggttcatatttgtcctaaaacccggattgtaacacaaatgtaacatatatgacatttcatcataacatagctcttctacctttgcgcccattaaaaatagagtgaacaaaatttatggaaacaatgtttttgggaatcgtcgtattcctctttctgctagccatattcgatttggtagtaggcgtcagtaacgacgcagtaaacttcatgaactccgctatcggtgccaaagcagcatcattcaaaaccattatcgccatcgccgcccttggtatctttattggcgccacactgagcaatggtatgatggacatcgcacgtcacggtatcttccgccctgaacaattttactttcaggagctgatgtgtatctttctggctgttatggtaacggatgtcgtcttactggacattttcaactctttaggaatgcctacctcaactactgtatctatggtgtttgaactgctgggaggtacttttgtattagccctcatcaagatagcaggagacgaaaccggcatgttgggctttgccgacctgctgaatacagaaaaagccttgtccgtcattttgggtattttcctctcggtagccgtagccttcttcttcggtacattggtacaatacctctcacgccttctctttacctttaattataccaagaaactgaaatacaccattggtttgtttggcggtgttgccgtaacagccattatctatttcatgctgataaaaggactgaaagactcttcctttatgacccctgacaacaagcattggattcaagagaacactctgatgttggtaagttgcagttttgtattcttcaccattctgatgcaagtactgcactggtgcaaaatcaatgtatttaaagtggtcgttatgttgggtacttttgctttagccatggcttttgccggcaatgacctggtgaactttatcggtgtgcccttagccggtttctccgcatataccgacttcatggcgaatggcaatggtaatccgatgggttatctgatggattcactgaatggtcccgccactaccccattcttattcttatttttagcaggagtcattatggtatatgccctgataacctcgaagaaagcgcaaaatgttgtaaaaacgtcggtagacctttcacgccaggatgaaggcgatgaaatgttcggttcatcagccgtggcacgtagtattgtccgttccaccatgaccgcttcagaaaacatatccaaggtattgcccgacaacttgaaacgttgggccgacagccgcttctgcaaagatgttatgatcatggaaaacggtgctgcattcgacttgatacgcgcctcagtcaatctggtattggcaggtctgctcattgctttgggtacttctctgaaacttcctctttctaccacttatgttacctttatggttgccatgggtagctcgttagccgaccgtgcatggagccgcgacagtgctgtctatcgcatcaccggcgttctttccgtcatcggtggttggttcattactgccggagctgccttcactatttgttttgtggtaacactcattatgtattacggcggcacatttgctatgctggctttgattgcactcgccatattcctattggtgcgtagcaatatcaactacagcaagaaacagaaagataaaggtaaagacgatatattcgcacgcctcattaccagcaaagacaaagaagaacgttggacattgctccgccagcacgttaataatacattggtagccgaaatgacatttaccaacgaaacttatcgtcaaataaccgacggattcatcaacgagaatttgaaagccctgcgtaaagccgtaagcaatactgacagccagaaggaaatgctgaaaaaaatacgccgcaaagagattctgggtctgcgccgcatagacaactttaccgccatcgaaaagaacacctggttccatttgggtagtaatagctgcgaacaaatgctctactgtctgaaacgtatctgtgacccttgcaaagagcacgtagacaataaattcactccgttatcagaacgcgccaccaatgaatttatccctgtccgcgacgaaatgaccgcactgatggctcgcgctacagaagtgcttgccaataaggattacactcaaaccgatgctttgctgcgtgaaggagctttgttgaaaaataagatttccaccctgcgaaaacagcaaatggaccgcatacaggaacgtgacgtgaacgtaaaagcctccatggtataccttaacgtgctacaagaatcacaggaattggtatcctgctggcgtcatttactgcgcgcagaccgtatgttccaaactgatttgaagaaataacacacctattcttataataaataataaaattgtgatagcttcttttccttatttaaggagaagaagctatctttgtctcattataatccgtgattattcataattattacaataacaatctatggaaaacctcaatcaaattatcaagcaattccccgaggtgggcgaagtaaaagaagtaaaagcactgacttcagggctgatcaaccaaacttatttagtaaaaactgtcgatccccaagaagctgattacgtattacaacgtatcaaccatcagatatttaccgacatcgacatgttacagcacaacatcgaagtggtgacaggtcatatccgcaaaaagctggaagcacagaacgaaacagacatcgaccgcaaagtgctccgtttccttccggctaccgatggaaagaccttttattatgatggcgaaggctattggcgcgtatcagtattcattccccgttcacagactttggaagctgtcactcccgactcttcttatttggcaggtttgaaattcggcgaattccaagctatgttggccgatgtgcccgaacagctgggtgaaattattcctgatttccacaacatggaattccgcatgaaacagttgcgcgaagccgttgccaccaatgcagccggcagactgagcgaagtgcaggacatcgttgatgccattgaaaaagatgccgacgaaatgtgcagtgccgaaagactgttccgcgaaggcaaacttccgaaacgtatctgccactgcgatactaaagtcagcaacatgttgtttgatgaagacggtaaagtgctttgcgttatcgacctcgacactgtcatgcccagcttcatcttctccgatttcggtgacttccttcgttcggcagccaatacaggcaaagaagacgaaaaggatttgaacaatgtccgttttaatatggagattttcaaggcattcgccaaaggatacattgaatcagcccgttcgttcctgactccggttgaaattgagatgttgccatacgctgccaccttgttcccatatatgcaggctgtacgtttcttggccgactatatcaacggtgatacgtattaccagaccaaatacgaaggtcacaatttggtacgcacaaaagcccaatataaattatatctggaagcaaaagctgccgtgcccgaaatgaaggcttacattgcaggtctgctgtaatagatattttttcattgcaggggctcaagaactgagtccctgcaatgtataatcttcactaacgtttgggaatatccacagacttctcactctttcctttcagatgttctgagaaataatccaccagtctccaatagaaatattcattcatgtcaccgaatccgtggcgctgctgcggtaaaatcagcatatcaaagcgtttgccggcacggatcaatgcatcaaccacgcgcagtgtattacccggatgcacattgttatcaatatcaccgtgaatcagcagcaaattgcctttcagctgtttagcaatctgaggattggtcgctatcttgtaaacaaaggtagtatctcccttttcgcttaccacttcctttactccgtgatgcgtttcgctccaccaacggttataaatattattatcatggtttccggcacatgaaacggcaaccttaaagaagtcaggatattgacacatggcagccgtactcataaatccgcctcctgaatgtccgtgaatacccactttatctatatctatataattataacgcattgccaactgctcgatagcatatttgtggtcggccaagggataatcgcgcatattgccatatccatagttatgataccacttggaacggcttggatgtccgccacgttgtcctaccgaaatgacgatgaaaccggcttgtgccaatcggtctgtacgcggagtcatacgagtaaacggataaaccgtaccttcaacctgcggccccggataaacatagtctacaataggatatacctttgtagaatcgaaattaaacggtttatacatcacaccataaaggtcggtcactccatcggcagctttcaccttaaaaggttcgggaaacttgtaaccggcagcaaaaagctgcgagaaatcactttcctgaatcgtcatcactttattaccgttcgtatccagcaagtcggcacaaggcactgtattgacacgtgaaaagttatccaccacaaaacgagcctcatcatccacttccacgcggtggaaataatccccctttgaaagttgcttcagtccgctaccatccaaattcacccgatacaagtgctcataatacgggttctcgttcgggttcataccattggcagtgaaataaatgacacgcgctttattgtctactttcaatatttcttccacatgccaaggtccctttgtgatacggtttttcagattacctttatcatcatataaataaagatgcgcccaaccgtcgcgttcactccactgtatcagttcttttccattgctcaaaagatgcaaaggacgcgtttcctgataagtattcatacgctctttaataacaggaacaatagaatcctgccccacagtgtaagaacaaatatctatccgatgcaagtcacggcttttacgtgaaagatagaaacgtttattgtcacccagccagattgaaggctgatcttccatatcacgctgtttctgtagccacggactgtaagagagtcccaaagtctgatctttataagcgtccacctttatttctttccggctgttgtcactcatatcaaacaaatacaaatgttctatcggagcttctttttcaccgggcatctgatatttataagtttccagggtaggacgcggttgtgccatagagttaatcacccacaactcttttacggcccggtcatcggaaacggtcattgcaaaatgacgggagtcgggcgaccacaccccatacaccctgcgacgcttgccattacacagcgtatcagtgttgagcgtactgtaaggaataccgtagccaaaatcttccacaccgtctttggtcagctgaatttcgacaatagtactgtccttttcattcttctttgccttctcataatcttcacggctcatacgataaagattcaggtctttggcataaaccaccgtctttccgtcaggagagattgatccccatctgattttcttgggttctttttctttatctttcagatgagtgagcttacgggtgggataatcgtaggaaaaataaaagacttctttctcggtcttgccttttttatcttttttctccttatcctccttcttgggcttggcatcctgagaagataccacctcaaaagtaaaagtacgaccgtcttcctgagctttcaagttcctgatgggaagatgacgcgcttcaaaagggtcttttacaatttcggtcagctgcgaggccatttcatcacggtcgaaaagctgcttcttactgcgtgccgaagggtctaccacataccaaaaggtaccttcacttgttttatactgaaaccagaagttattccctttctgaaaccaatgagggtctaccacagtagagaacaacatggtgttcagtttctcctgagtaaatttttccgcctgtaagtactccggcaacctttcttgtgcctgtactacgggtgtagttgtacataatccacctaccaacaaggtgaacaatagcattttcttcataatattcatttgttatcgtgttagtttcttctttattatatcttgtggaagtatgctgcttaaaacgtaactcttatcatcctttataagcccgacaggtatcaaaccggtctgttttttcaagttcttgaaaagactactgtaaaaatcagagatatatgttctttcatgtaacagatactcaataaaataacggttcaaaagtacataaaaacagcatacccaacaaatatcagaacataaaaacagtattttaaaaagggaaaattacgaaaagatgcagctgtttccaaaatagaaacaacctctcatcccgatgggtctttggcacaatgtttcccaaacaacaaggctttacgcttcgcggcttggtttaccaatagcgatgaaaccattgacggcaagagtagatcaaaagcatacttgagatttcaaggatttctccctttctcctttcattagtcgttgaaacgccctattgatgggggtccggtagtgaatgaacattgtgtcaccaccctttcatcctcctttcattcgtaaaacttcttccggcaggataaaggctgaaggcagcttgtgaagggacttgggaagcacggctgaaaggaggatgaagggatgtcctgtcattcttaacaatctgattatccgcacatttcggctaaaatgaaaggatgaacggagaagaaggaataaccgacttggtgaggggatgcattctgcccttacaggaaaaacatgccgagctttttaaaaaagaaggtggtgttttcaaaaaagaccttgatgtttttaaaaatcctcaaggtctttttgcaacatacagtgcaagctgcctatttgtaaaatgtgtacgtacgcatcgggccacacatacggtggcataagcccacacgtatatacgcatcgggctacacgtacgtacgcatgaacctgcatgtatatatgtcattgtgacaccaccaagggaaaattgtatatcgcatcaatcaaattcaataaaaaatcgggaagtgaatagaatccgttaccgaagatattcacttcccgattgaatgggatataattctcaactgagaatgagaagccgcctcccactaaagaggaggcagactcaaattattcagttttttattactttgttttcagagtgatagtaaatggaacagtcatcgtcttattccaagcatctactacaataagttgcatttcaaccggtgcagattctgctacaccttccgacaacttatcaacagctgtaataattgtgctgcctgtaaagtcattaagattcttagttccatcgaagttttctacatccttaatcaaagcttttgcatattcaggatcaactactttcagataaactcctgcaatcttagcatcggctgctgttgctgctgtttttccaactgttatgtccttcactactgcaaagttaaccttgcctgcataagttgtaaataagtcataaacagctttatcttcagctgcaacttttacaggtgcattattttcatatttacgaacgtaataaccagtatgcccacttgcttctacataatatttgcccaaaacagaagagttgctagtccaaatgtcagcaagagttttaacgtctacatattctttagaatccgcatcatcttcggttgcatcatttttagccaacaaataatatttagctgttccttgctgtgctttcaagattgcgtcagacttaaatccgaaggccttcatatccgcaacagcaatttcaatcatcatatcattcgcatcaacagcaaactcaagtttaccatctgcactggctactgaaggaatagtaccatattgataaccattaaccttaatgtcaccacctttgacagcaaacaagttataagtcttacccttatcagaacccgcaacaaatacattgctctttatagctttagttatgtcaatctgattagtcttgtccttaccgccatatacagcagacaatttatcttcattcataacaattgctttagaagcatcttcgctataaacctctgatttaacgataacctcaaaatcaaaatctacggtattcttgtcattaccaaacaatggataagtagcacgaactttacgtaccttgtacatttgttgagcagcatccgttacgtcttcatcatcactccacttattagctttcaatgtcggagaagtttcaatccagttcgggaatgcaaaatgagtgttatcactaccaccttcttcttcataattagcatgatccaagtcggtaaatactactgaattaataccatctgtaatataagtcttatcgacaatgataccatcggttaatgtataattcacttcagaatcagtagcaattgacttaccaccggtgatttgcagaattccattttctacgaaagcaggattcaatttaatagcagtagtcggattagaaactgtcaatgtagcttctgcagagaagataacagtgttaccgttggtagaagtcaatgtcaatacatattctttcggcaagaacttttctgctgtataaccggtaagtgttgcactttcagctgtagcatccaaattaaatccgaatgtcactgcatcgccattatcccatttagagtcatcactaatgtaagtagtctccttacccttagcattatagaatgtgacagcttggttataagctacatatttagcatctgcttcagcatcataacgagttgcagtcaacttcacattagccccattactattcaagaagttatccagctgaacagcactcagaccaaggtctgcaatgttccatctcaatgcagcatctgcaggtttagcagccaaagtaaccgacttgtcagccaattcgcctgttgcttccacaccttgagaaatagtgaatgtttcttctttagaaagaacagaaccattcaaaccaagagctgtcaatttcaatgttacaggaatagaaaggtcactgctcggcatcttagcaatagtcagcttgctgccttcaatagacaatccgtatttctcaacctgaacagcgttggttgcttcaagaacaaagtaaccgtcatactgattagccaaagcaaacatagcactttctgtagccgatggcttttcaaacacatcaattgttgctgcatattttgccgatgcagggctggcaggagtaatacttacatcgccgctaatatctttagaagccacttgataagcaaaggcagttcttaccactgttccttttgcattttccaccagcaaagaagcatcttcaacttgcgcataagtctttttaacagcatcaaaggcaggttctaccttcaaagtccaaagacaatcgttagcaccggctgctcttgtttgcattactccgtccttaaaagtagtaccttcgggcaagcccttagaaggagtagaaacaataatatcggctactttacccttcacatccaacaaactgtatgagaaattgtcagtcagttcaactgtggcaggagtaacaatcaaaggcagattgccaccttgttttacagtttcattcttcttaatgtcagcaattcccgggaaagccttcagcaatgctttagactcatcttttgtagcgttccatttagtccacttcgctgtttcaaattccaccttcaccttggcagccgcagcttccactacaaatgcatcagaagtggcaggcaatgtaatatcctgaaacttacctgtttcgtcagcgatatggagcacatagacaccatctttttccactacgtatgcactggttccctgagccggaatttcagtagtcttttctacgaattcgcctttggcagcatcccattcgtaaactacccacatgccgttggcatcgattttgggagaaggagctgttacgcctgcttttccgtcttcacctacagccttagaagtggtcttttcaccgtccttataccaaaaaccatcttcaccgatagtccattcggtaccgttcttaccgtcagcacctttgataccggttattgtctgagtactaccatcgctcatggttacagtgaaaccattttcaacaggagagatattggttacccattttccttctcctaccagtttctgcaaagctgcaatagcatccttgttagagttgatttgtccttgcaaattctcgatgtcatcgtcgtaatccttacaagacacaaatgttcctgttgacgaaaccattaaggctccgaacaggattgcacttaaaaactttttgttcataatagaaaaactttaaatttataaatttaaaaaactaaaattggttatacataatttattgattctgagtgctgtgctctcatttcatatttcatataacgtttgggagaaacacccgtcacctttttaaaagcagcataaaaagcacttcgcgacaagaacccgcagcgttgaggcagctcctccggcagacacttgcccgaacggagcagttccttggcatattccacccgatacgtatttaccaactctttcagatggcaaccgaagtagcggttgaccacattggataaataggtttggttcgtctcaatcatatcgctcagctttttcagtgagagcttcgggtcaagaaacacttggcgcacttccaaataatacaatacatatttatatagctcacaatcgacttttcttgctttctccggttcgcgtccttcatacttctgctcccaataaagccgggcagcccggaaaagcagattcttctgcctttcggaagtaaaagtgcgcttgtcgcggtgtagaaacaggtagtccattgtagtttctttttattgtctctatttcagataattactcacttttcaaacccttaaaaagaggttgcgttctgtgcatctcttagtaagagatacacagaacgcacataaacactttattattagtcgtttaagcccataaaaaagcgtcctaaaacttaagactaaagatatttttgcatttatcttgtgatttttcttctcaaaaagttttaattatcaaaactttgtgtaaatttgcagcgaaaagtgtatctcttactaagagatgcactttttttcttttctctcccaaaatcttatccatcacattatcaatcgattaaatacaaaccaacatcttctttcctttcaaaaagcaagcattaaaagttgtaaaggtattataaataaagaacttaggattgtttagaaaagaatggattgttccgaaaggagacttaagggtttttcaaaaacgctttccggcctatccgaaaatgtacatttgttcatcaaacacttttaaccatacacaatagaagagcaaccaccggcaatccagatacaataaaattacagataaatttactttccatatagttgttttgccttaataacagaccttctatcttttataaaacaaaagttattgttaccaagaaaagcactgtgttactctaaataaagagaatacatcattcggtttttcgtgtgcgaaaacaataaaatcgtgcgcgataacaataaaaagtgtacaaaattgtccattttactaataattaaggttttcccgtttgattaattgagaaaaggttttatttttggggcagtttttaatttatactattgtagaaacacgttcatttaactattaaatcacaagagaatggaagaagttttcagttatatcatcggtctgggtgcagctgtgatgatgcctattatctttacaatcttaggagtttgtatcggtattaaattaagcaaagcattaaaaagtggtttgttggtcggagtaggttttgtaggattatcagttgttacagccttgttgaccagcagcctcggacccgctttaagtaaagttgtcgaaatatacggccttcaattaaaggtattcgatatgggctggcctgctgccgccgctgttgcttataacacttccgtaggtgcatttatcattccggtttgcctgggtgtcaacatattgatgttattaacaaagactacccgtactgttaatatcgacttatggaactattggcattttgcctttatcggagcagtagtttattttgcgacaaacagcattctgtggggattctttgctgccattatctgctacatcatcaccttgattttggcagactatacagcagacaagtttcagggcttttatgaaaagatggaaggtatctccattcctcagcctttctgtgcaggatttgttccattcgctattattatcaataaagtattggacaaaatacccggattcaataaactgaatattgatgccgaaggcatgaagaagagattcggtttattgggtgaaccgttgttcttaggtattctggtaggttgtggcattggcgcactgtcttgtaaaaacggacaggaaatggtagacaagattccttatattttaggcttaggcattaagatgggagctgttatggaattgattccacgcatcaccggtttgtttattgaaggtttgaaacctatttctgacgctacccgcgaaatgattgcaaagaagtttaaaggtgcagtgggtcttaacataggtatgagccctgctttggtcattggtcatcctgcaactctggttgtatccctgctattgattcctgttactctgttattggcagtagtactccccggcaatgaattcttacctttggcatcattggcaggtatgttctatgtattcccattgatattgcccattacgaaaggcaacgtatttaaaacctttattatcggattcattgtattggccatcggtttatatttcgttaccgatttggctccttattttacccaagccgcacaagacgtttatgccaaaactcaagatgcagccgtaaatatccctcaaggttttgaaggtggtgcattggactttgcatccagccccttctcttgggctatattccacatgacttatacattcaaaattatcggttctgctattctggtattaataaccctgtttctgatggtattaaaccgtcgtgccatcatcaaatatcagcaatcggtaaaaaatgcccaataataaaacagaaaataagataactaataaataagaacgaaaatgaaaaaattagcaattgcaatgatgctgggcgtttctgctttgacagcttctgcccaagtaaattacaaagtacagacagcttgccatccgcaagatgtaaaacactatgatacagaacgtctgcgcaactcattcatgatggagaaagttatggcgccggatgaaatcaatgtcacttatacactttatgaccgcctcatctacggaggtgccatgccggtaaacaaagtcctgaagttggaaacattccgcgaactgggcccggaaatcacttacttcctcgaacgccgcgaactgggcgtaatcaacataggtggtgacggagtagtgaccgtagatggtaaagaatatcctatgaaatacaaagaggcactttatgtgggttgcggcaacaaagaggttacttttaagagcaacgatgctaccaaacctgctaagttctatatcaattcagcaccggcttataaaccatatgtcacccaattgattacaaccgatgccaaactccaaaaggcaaatcccaagaaatatgctttagctatatctgaccactacggtaaaatggaggatagcaacgaccgtattgtaaaccagttgattgtgaaagatgtattggaaagagtaaaagacggtggtacaaaccaactgcaaatgggacttaccgaacttgctccgggttctgtatggaataccatgccggcacatacccacacacgccgtatggaagcctatttctatttcaatctgcccgaaggaaatgccatctgccacctaatgggtgaaccgcaagaagagcgtctggtgtggctgcacaacgaacaggctattacttctcccgaatggtctatccatgcagcagccggaaccagcaactatacctttatttggggtatggcaggcgagaacctgaaatacagtgacaaggatgaaatcaaatatacagaaatgaaataaacagattctactctcgtctgattctcattgatgtttgtcattctgaatgtgatgaagagctttcattattatgattaagattcttcggcacttttggaatgacaaatttgttttttattattgttgaccgaataatacttacttttgtgccattaagaaaaacataatctactaaatctattattatgagtacatctcaaagttctaccgggaaaatgacaaacttcagatggataatctgtgccatgttattcttcgccactaccgtcaactatttggacagacaggtactgtcgttgacgtggaaagatttcatcgctcccgaattccattggacagattcaaactatggagatatcgcagctattttttctcttgtatatgccattgccaacttatttgccgggcgtttcattgactggatgggtaccaaaaaaggttatctctgggctatcgctgtatggtcgttgggggcctgtatgcatgcactttgcggttgggcaaccgaacagacactgggtatacacaatgcaggagaaatgatctccgccaccggagctgttgcttctaccattgccatcaccagcgtgtattatttcattgcggcacgcatcgtgctgggaataggtgaagccggcaacttccctgccgccatcaaagtaactgctgaatattttcctaagaaagaccgcgcttattctacttccatttttaatgccggagctactatcggagctttagccgcccccgttaccatcccgacattagcacgctatttccagaatatcggtattggcaatggatgggaaatggcatttgttgtcattggcggattgggatttatctggatgggatgctggatgttcctttacaaaaaaccggcagccaacccacgcgtcaatacagcagaacttgaatacatcgaacaagacaataacgacgaaaaccagacaaccgaacaacaggcaagcgccaatgaattcgacaataagaaaatccctttctggacttgtttcaaataccctcaaacatgggccgtattcattggcaagttcatgaccgacggtgtgtggtggttctttctcttttgggcgcctgcctatatttcggacgtatatggatttgcttccgacaccggcacggcacaactgttgattttcgttttatatgccatcaccatgttgtctatctatggcggcaaactgcctaccatcattatcaataaaaccggaaaggacccgtatgccgcccgcatgcaggcgatgtttatctttgccttattccctttactggcattatttgcacaaccgctcggcaactattcctattggtatccgattattatcatcggcattgcgggagcggcccatcagtcttggtctgccaacatttattccgtagtaggcgatatgtttcccaaaagcaccattgccactattgtaggtatcggcggtatggcaggcggcatcagctcattccttattaatatgggatcgggcagattattcgactatgccgcacaaaccaatatgaagtttatgggatttgaaggaaaacctgccggttatttcattatcttctgcatctgtgcagtagcctatctgctaggttggataataatgaaaatattagtaccgaaatataaacctgtcgatgcttaacattcaatcggccgattcatgatgctcaataataaatgaggggtatgccaaaacgtggatgatgctgtcattttacccgtaggggcgaggttcgctcgcccggaaacagcttgctttgtgtattactcccaaagttgtaaccgccggttcgggcaggcaaaccctgcccctacagttgactatttaatagaccattttactttcggccccctcattttctgtttagttttagtgttgcattctctgatttatagtcttttacatgatatacgtcctgtccagcagtttctctgcccaagtgtgctcaccggcaatccattgtgcatcttcctgagtatggggttgctgatacattgcgttcaacatgtcctggtattcatgcaacaaatgaacggcatccgcctgtttgttttccctgagcaacaataatatcttcatcttgcaaatattcacattggttatcttagacgtctcatccgccttattcagatactccagacattcagcattgctttccttgctattggatagtttcataatgctgcgtgccaccatcagataatcatccgaacaagccatcgcattattgatattcttcatagccaaacgccttgattcattatatttcttattataatccatcataccggcttcatagctgaccactgtagaagttttctttaaatagttccggtcttcatccaatggagtaaacttacccagcttccctaccctttcgggcaatgaaccatacgcaccatacttggataatgcttctacatctttattacgctgatagtattgattgattttactcaaagcggaaaccattgcatccttgttctttttcatcagcaccataaagttcatgactatatggtcggcttctttctcttgtttttccgaataatccaaccccatacgattggcaatgttatcattcaccaatgcctgaacgacatcattcgttgcaaagaccaacccgggaacataataatcataacgatcgtacagatattcctctgtagcggcaaccactccgtccgctacagctccccagaactgtgcacgcttggcacgggcaatattcttgttcacggtgataatggcatgatcgagtacataatgggctacttcacggctcatcactgcatataattcctcttcgctgtccaaagcagtcaacattcccgtagaaaccagcagacagtcgttacccaacatcaacatatcgggagccggagatttcaatacacgcaccaacggagttccttcacgcaggacagccatcttttcgggaatgatacttaacagcatacattgcaaataatcctctattgcagcatcatcataaaaaagcttagcgtgctccagttctttcatataatcatccgcttcacgagcctgctcttgccgcattcccccttggtagcctttcttttcataataagagattaaatcgtttgacagctgtgcagtctgccaaaatgaagtcttatctgcgggaataagcttcagtacatccaattcctccataggaatgcctacctgcaccccgccgaccaccaccactgcctgtaatgtagactcttcctgaccaatcggctttttcaacttgataacgcgctgcaaaatacaagccgtacctttcttcacatctttatagtcccgcttaaactcacccgaaatattcagcatcggactcaatggccggttattctgcgaaaacatgattccgcattccagcattgcaactaagagaaaaagaatgtatcgtttcatagtgccttgattttagaacactacaaaaataggaaaagaaaaaaatacattaaaaggaaaagccctacaaacaggtagggatttccctaattaattgcctgtatcagacgacgatatatcaggttatggctcaatatatcgggcactcccgttatatacaactgccttcgggcacgcgtcaatgccacatttaatttacgatctatccatactccgttctcttccgtcagattaggcaagaacttcaactgataaagataattcacacaaaaagaataaatgattacatcgcgttcacttccctgataacgctccaccgtatcaaccgatatttcattcaaagccgatattcccaatgcctgaatttctttccgaatcaatgcaatctgactacgataaggagtgatcactcccaaggtgcggttgacctcgaaagtctccttatacagatgatacacatcagcagccaattgagcaacaatgcgcgcttcattccggttcgtcttccccgaaacactttccgtatcccgctctgaaggaataaaccgaaccggagcatcgacattctccaactgatgcggcaaacccagtgcttctaactttccggcataaaactctcgattaggaaatgatgccactccggggtgcatgcgtccctgacggcaaagcatatccaccgcccggcaatgctcttcctgcaaatgaaaacgataaagccgttcaaaaagagaatctttcaggttataaagccctatccgccgcaacccttcatcatgcacctcagactgttcattactctgcaacaccacagccggcaattgtttatgatcaccaatcaggataaacttccctattccgttacgtccgtccttaaaccgcgcacaaaggattcccaacaactgaggctccaatatttgtgtagcctcatcaacaattgccacatcaaaatgcttcagtttgaacagttccggtttagatgcaatagatgcaactgttcccacataaatacggcaatctgccatgcggatgtttacctcccgacgattgttgcattctgccagcacattttccaacagatgtttgcggaaacgcgcatcacaagacaattcacttcccacccgtatatagtccacttgcggcaaaatggcagaaagcgaccggcatatctcgtccaccgcccgattagtataagccagcaacagcacttgtgtggaaggacaagcataaaaatgctccaccatccgcctcaaggcacgcgaagtctttccggttcccggaggtcccaccaacaagaaatagtcacaggcagcctccgctttcagcgccacccgttcaaagtcatcggtcgtccgggctatcctgtcttcataagccatatcaaaacgaggaggacgctgccccaacaacaactccctgcgctcagggttcgcgtccataaaggaagacaatcccaaatacatgcttcggaaagtagtatccatcgtatcatgctccacggcataacggctgttctctggaaacaccaacggattctgctgtgccgcccgaagacgaatgcgcaattcattatcggttatggattctatatttcccttgaataccattttgttggtcacattatccataccattattgcgttcatagagcaccaccacgtctccattacgaaaattaggcagaaaagtttcttcatattgaggaatagacaaaataataaaagccttatgagcctgcgatgcatggttctcaacaatagtaagatcgtataaaatttctcctgcatcccgcttttcatccagcgtactgagccataaagcagaagcgcccgtcctgctttcacaattcacatcacccgacttggaggtataaagttcttttgtgataaagttataaagcgtataaaaataagtacgttccagaggagtaagcagttccatgcgctcaccgaaacgggagatggaaggcttcaagtactgttcccaaaatcgcccctgcaaccctttttgattgagaacagaaggattgatctgtgccaacagccgttgggtaaacgaaggatgattatgcaactgcacaccatactccgaagccacaatgcagttgcgcaaattaatgatacgccgcacttgtgcccaagatgcacgtgccggataaagcaacggataacgagtatacaacaagtagggatgcatactgcgacgctcttgccccatgctatactccagcaacgccatataaagcaacatctgtacacgattattctctttcggctccaacctgccctgcatggcatattcgtctgctttgcccgacttcatttctataaagctgctcatgtcacgctgcatatagtctaaacgaccctgaatgccaagtgcctcacaaatataagaaggttccagcacagcatcattcttatcaaggttatatcccggttgtaaaaatgtcttctgcaccgtttcacggatatgttcgaaatgcattctacagtcttgcgcaaactctttctccttctgaggatttcgaagttcctcacaagctgccagttcgataggatactgccgaaaagcctttttcatacattcagtgtaatcaggttctttctctcctgcatatatccattcatccagaaacagattggctatatttcccaacaataagggacgggcattctcaatagggaccaaacgactcagaaaataattggcgggatgactgccataatccttataacactctgccaatgagctgatatccaacagataatcaggttcaagtactataaaagaaggagtataaactccattatcatcgacagttacatccaacaaattcaattgggcataccgccaaagctcatccaccgtatctttaaattcctcattcacaccgggcttgttataattcacctttaccggttcttcttcaagcacatctatcggccggacatacagatagctttcatccgcatagtcaaagcacacccggatacgacgaatccgagtctctttctccctctttaccgcaggagtcgtttcctgcttgggaagcaacgtataaagtttcggtgggatatcctcatgaaaaatcttccgataggcataagccacagcgcggagatcccgcaagaattcctgttcggacggctccttgcggtgattcagaatgtcattcgaagtcaggcggaatgtatgcaattggttctgctcccggccatccaatgcaaattgagtcgccacataattgatacgggcagccaaatctgtagcttgcaagcctgttcccatcatttgttgcctcatcacccgctccaatgcttcacgcaactgtctgtaacggcgcgccaaaggttgttcttgttcaacggcacacagattatatagttcttcgtaatattctgctatttcttcattcatgctttttttgatttgctctctcgaatacaaaggtagtaaaatgaaagcaaatcaccccctatactcatccggaatcgtcaggcagatgaagcaattccttactaaaggctaagaccttttgaacggcagattatcggtgtcaaaacgtggataatgctgtcgtttagtacataggggcgaggttcgctcgcccgaaaacagtttgctttgtgtattcgggcaggcaaaccctgcccctacagctgacgatgggatagaccggtttggttttgacacactcccacgttctactgtggcagggactaataatctaccgcataaaacggcttaacagaaaggaagaaaacgcttagtcctgcaagctaatatccttcccacgacttggcttccttggcattctttaccttggcacgcattttcttgctgaatatgatgcccaagagtttatccgcgttaaaagtggtgctgataccggctcccaccatcaaagcactaggagtgaactttcctgccgatgccggttcgagccgcggatcataacctgccagatattccttattaagcggaatctccacatagatcttttcttcttcaggagattcaaaaggaccataaggcaaaagacggatatacccacggccgtcaaccgtatctacttgggaaatgtaatatcggggaagttctgtctcaaacttcatattctttttagggaaaggagtagatttcattttccacttctcaggattaaacaagcggtctatctcctgctgagtttcatcatcgatgacgatttccacttgtccattcaacaactgctgcaaacgcaaggaatcttgccgggtcaattgccttgactctcctgctttctgggcaaaggagaaaaacggcaaacacagacatgctaaaaggaagaatatacgtttcatggcattctgtttttggtttctccaaatatacagaaaagaaacgtaaattcttccttcttcttaagattattaaggtctctttttcgttaatcctggtaataaactcttttcacccgattagaaacacttgtcaatatctcataaggaatggttcccaaaatttcagccaagaccgttacaggtaaatcatcaccgaatatcactgccttgtctccttctttgcagtcaatatccgtcacatctatcatacacacatccatacatatattacctacatacggtgctttctgtccgttcaccaagcagtaagcatttccattgcccaatttacggtttaatccgtcggcgtatccgataggaatggcagctatgcgggaatcgcgttccaaatgccccttccggctgtatcccactgtttcttccttgggaacatcatgtatctgaagaatcgttgttttcagtgtacttacattatgaataattttattggtaaaaggatctacgccatacaatcctattcccaaacgaaccatatcaaactgtgcgccgggataacgctcgatacccgccgtattacagatgtggcgcaatatcttatgcggaaaagcctcctgcaactcctgcgatgcctgctcaaaagcctctatctggcgacgcgtaaaggaatcaaactgttcggcatcacttcccaccaaatgcgagaatacggaacgaggaataacagccgtctgctttttcaggcgctctatcaactccggtatctcatccggtgtaaagccgagccgatgcatgccggtatccagtttgatgtgaatggggaaattggtcactccttctttttcggcagcctttatcaattcattcagtaaatgaaaactataaacttcaggttcgagcttataatcgaacatcgttttgaaggcagtcaattccggattcatgatgataatggaactggttataccggcttttctcaagtccgagccttcgtcggcaaccgctacagccaaataatccaccctgtggtcttgaagggttttggctatctcatacgaaccggctccataagccgatgccttcaccatgcacaccatctttgtctccggtttcagtttactacgataataattcaaattatcaaccaatgcattcaatttgatttccagaattgtctcatgtactttcaactccaagcgttccgaaatatcatcgaaatgaaagctgcgtgaaccttttatcaagaccacctcattacgcagattgggcaacaggtcggatttcaacaagtcttctgtgctatgaaaaaaatacttctctaactcaaaccgggaagaagccgtacgaatctcgtcgcctaccccgataatcttttccacaccacgactatgaaccagttcggccacctgacggtaaagcaacttactgctttgccccgtttccagcatatccgaaagaatcaatgtgcgttttttacctttatcttccgaacggcgcgacatgaaatcaagtgcaatatccaaagaggccaaatccgaattatagctgtcgttgataataacacacccattttttccttctttcacttccaaacgcatggctatttgctccagatgcgccatacgctctgcaatgtcctcggcaggcaccatcatatacaaggctactgccagacaatgcaatgaattttcaatcgatgcatcatcgataaacggtatcttatattcattcggcatccccaaataacgatatttcacagtggtggaatcctcacccttacaaatagattctataaataaaggacgttcattgtctttcttagaccaggctatctcacgcgaagtaaaaagagacttgctgacgcaagagctgataagttcattatcaccgtcatagataatcacatcacaatccttaaaaagcgtcagtttctccatacatttctcctgaacagagaaaaaattctcttggtgagcaccaccgatatttgtcaatataccgatagtgggacggataatgctttgcaaagcctccatctcacccatttcagaaataccggcttcaaaaatagccaactgggtttcttcgttcatcaaccatacagaaagcggcactccgatttgtgaattataactgcggggagagcgggtaaccacgcgatccgggctgagcaattggtataaccattctttcactaccgtcttaccgttgctgccggtaatgccgaccaccggaataagaaattgttctctatgcttttctgccagtttttgcagtccctttaacggattggccaattgcaggaaattggcggcagtataagcttccttgttctcaggcagttcactcactacaaaattacgcaccccgcgctcatacaaatcaggaatatatttatgcccgtcgttgcgtttggttttcaaagcgaagaataaagtttcttcggggaagcataacgagcggctatcagttaaaatccaatcaatctgtgcattgtggtcgccaaagcgtttggcacccaaagcctttactatattttcaattgagcttgacattgttctaattctttttgaagttcaaaatacgggaacttttctttcatcctgcttatctttaacactatttgagttaaaaaactacggtatgcttccgaacggacatcaaaaggtttatgattcaaccctttgcgtatttcttcccactctttcattatctgccgtgtctgactgctgaaataagtatctccgaaacacttccatatataagatacagccatgggcgaaggatgaaacatatcatccgcataaaagcggtaatcgcgaagttcgtccatcataatttcataagaagggaaataatggcacatcggataatggtgttgcagagtgtctatcgccaataatagagtagatttgcttatctgattgccatgcatcccgtctttggcgtgccggatgggactgacggtgaacagcaccttcagattagggttcagctcctgcaacattttcaacaagtcaaaatattcaacaactatctcctctaccgaaagaagcctgcgcgtaaacagtttatccggttgcttatggcagttgcccacaaccttaccattctctttcaaagaataaacccatgccgttccccatgttatcatcagccagtcggtttgcggcaattccgcggcggctctccccagcctttcgttaatccgcaacaaacattcttctgccgaattgcctgaaaaagagccatgatgcataaagctatgccatcccgccctatcgcaaaacaaatccgcctcattgtaagttttataagagagagtttgacggatagcctctgccacagataaaggattatagagaatcccaaaagggttcacatcacaccgaaacttatttgccagcaacaaatttccgatattttcggcaaaacaggaaccaaatagcataattcggtcagaatgacggatttctgtttcctctttaggcagttctacttgcgttctgaaattcatatcaataagagtctatctattttttaaggacaaatgtaatcataatacacataaatatgctatttttgcaagatatttatcatatcataggaatggaacaggatacttcatatatgttgctgaaaagtttagatacaccggaagatttgcgccgattagaggcagacaaactgcccgaagtatgtaaagagctgaggcaaaaaataatagatgagctctcacgcaatccgggacattttggttccagtctgggagtggtagaactgaccgtagccttacattatgtatttaatacgccttatgaccgcatcgtatgggacgtaggtcatcaggcatacggccataagatattgacaggccgcagggatactttctgtacaaaccgcaaattacacggtctgtgcccttttccttctcctcacgaaagtgaatatgacacttttacgtgcggacatgcctccaactctatttcggcagcgctcggaatggctgtcgcagctaagaagaatggagaaaacaaccgccatgtggtagccgtcatcggtgatggatcaatgagtggcggtctggcatttgaaggattgaacaatgcttcctctacacccaataatctcttaatcatcctgaatgataataatatggctatcgaccgcagtgtgggtgggatgaaacagtatcttctaaacctccagatgtctgaaggttataataaaatacgatataagctctcaaaaatgttctataaatggggcatattgaatgaagagcgccgaaagagcctgattcgtttcaataacagcctgaaatccatgctcgtacagcaacaaaatgtgttcgaaggaatgaatatccgctatttcggtcctattgacggacacgatgtcaataatctggcacgtgtcttgaaagaaataaaagatatgcagggtcccaagttgctccatatccataccaccaaaggcaaaggattcggtccggctgaaaaagcagctaccatatggcatgcaccgggaattttcgacaaagaaaccggagaacgcattgtgatagataccgacggacttccccctttgtttcaggatgtgtttggcaatacgttgttggaactggcacagcaaaacgacaaaatagtaggagtaaccccggcaatgccgtcaggatgctccatgaatatattaatgaaagcaatgcccgaccggggatttgatgtaggcattgcagaagggcatgccgtaaccttctccggcggtatggcaaaagacggattaataccgttctgcaacatctattcgtctttcatgcagcgtgcatacgacaatgttatccacgatgtcgccattcaaaagttgaatgtcgttctttgccttgaccgggcaggaattgtgggcgaggacggtcctacccatcatggtgcattcgatttggcatatatgcgccccatccctaacctgacggtggcatccccttatgatgaacatgagctgcgcaatctgatgtacaccgcacaactgcccgataaaggaccttttgtgattcgttaccccagaggaagaggggtgctggtggactggaaatcttcttttgaagaaatacaaataggcaaagggcggaaactgaaagacggaaaagacatggcagtcatcaccatcggtccgattggcaatacggcacgaaaggcaattacccgtgcagaagccgaaagcaaaatgagcattgcccattatgacttacgctttctaaaaccgttggatgaagaaatgctacacgaaataggaaagaatttctgccgaatagtcaccattgaagacggtgtgttgaaaggcggaatgggcagtgctatcctggagtttatggcagacaacagatatactcccactgttcgccgcatcggtttaccggataagtttgtagaacacggcccggtaaaagacttgcatcgtttatgcggcatggatgaagaaggtatttataaggtattggtatcattctaaaagagaaagataaaaatgaagattattatcgcaggggcaggagccgtaggcactcatttggccaaactgctctcaggtgaaaaacaagatattatcctgatggatgaaaacgaggagaagttgagtaaattagattccaacttcgacttgatgacagtcaatgcatccccgacttccatttccggtctgaagaatgccggtgtagcgggagccgatctttttatcggagtcatgccggaagaaagccgtaacatgacggcatgtatgctggccaccaatttgggagccaaaaagaccgtagcccgtattgataattacgaatacctattgcctaaacataaggaattcttttcacatctgggtgttcattcactgatctatcccgaaatgctggctgcaaaagaaattgtagacgccatcaaaatgagctggatacgccaatggtgggagttctgtggcggcgcattggtactgattggtacaaaaatgcgtgaaacggcagaaattctgaatgtgcctctgcacgaactgggcggacgtaatattccattccacattgtagcgataaaaaggggcaatgaaacaattatcccacgtggagatgatactatcaagctacatgatattgtttattttaccactacaaaaaaatatattccttatatccgtaaaatagccggaaaggaaaattatgccgatgtgcgtaatgtaatgatcatgggaggcagccgtatagccgtccgtacaacccaatatgtacctgaatatatgcaggtcaaaataatcgaaaacgatatcaaccgctgtaaccggctgacagaagtagtagacgataaagtcatgattatcaatggagatggtcgggatatggatttgctattggaagaaggacttcgcaacaccgaagcatttgtcgcattgacagataattcggaaacaaatattctggcatgcctcgccgccaaaagaatgggtgttaccaagacggttgccgaggtggaaaacattgattatatcagtatggcagaaagtctggatatcggcacggtcatcaataaaaagatgattgctgccagccatatttaccaaatgatgctggatgccgacgtatccaatgtaaaatgtctgacttttgccaatgcagatgttgccgaatttacagtaaaagccggttcacgtattacaaaagacgccattaaggacatgggacttcccaaaggggttaccatcggcggactaatccgaaatggagaaggtatcttggtaacaggtaatacaatcatccaaccggaagaccatgtagtggtattctgtttgggaatgatgattaagaaagcagaaaaattcttcaactgatgattaactctaaaatgatatgcaaaatcatgggttcccttttcttcattgaagcgggattcttgattttatgcgcattactcgccatatattacaaggaaacagatttaaccgcattcctttcttccgctgctatcacagcaggggcaggtattgttttctctatcttcggaaagaacgccgaaaggaaaatcagccgtcgcgatggctatgtagtagtatctcttgcttggatcttcttttccctgttcggaatgttgccgttttatctgagcggatacattcccagcatcaccgatgccttttttgaaaccatgtcgggattcaccactaccggagcaagcattctggataatatcgaatcattgccccacggattacttttctggcgaagcatgacccaatggattggaggactggggattgtattctttaccatcgccgtgttacccattttcggagtaggcggtgtacagctatttgcagccgaagctacaggtcccacccatgacaaggtacatccccgtatcggtgtgaccgccaaatggatttggagcatttatttgggactgaccatagcagaagtattcttattactgctgggtggaatggatgtgttcgacagcgtgtgccattcattaacaactactgctacaggcggatattctaccaagcaaaacagcattgctgcttttcattctccctatatagaatatgtaatcacgctcttcatgtttttgtcgggtatcaactttaccctgctgtttctattctttctgaaaggaaagttcaaacggttgattgagaataccgagttccattggtatttgggcactgtaggttgttttaccctgttcaccaccgtcacactggttcttaccagcccgatgggaatagaagaatcattccggaaagctatttttcaagtagtctcattacagaccaccaccggatttatttctgctgattacatgacctgggttccggtactatggacattgatgtgcatcatcatgcttttcggagcatgtgcaggctccacttccggaggtataaaatgtattcgtattgccatcatgagccgtgtatcaagaaacgaattcaaacgaatcatccatcctaatgcagtcttgccggtccgcatcaaccgtcaggtaatttcttctacaaccaaatcggctatattggcatttactttcctttatatagctattgtctttattggttggctattgcttatgatattaggagtaggatttgaagaagcatacagtgtcgtaatttccagtttaggcaatgtcggaccgggtataggcaagtgcggaccttcttattcatggagcggattacccgatatggccaaatggatcagtgcgttacttatgctcatcggccgtttggagttatttaccgtcttactgttgtttactcccggattctggaagaaacactaagaagtacggaaatccctctccattcacgagaagagaaaaaaaacaatttataatgatagaattccaaatttatggctaactttgcgacctctaaataaaaatcatcattatgaacaatatactgaagatctttatttctcttttatttttcctgctcttgataacaacagcgggacaagaagagtatgcgtcagtaaagagttcattctttcagaaatcaaacgtaacctcttcttatcagcaaacacaaagtccgtgtaaaaagaccatggatttcctgtttatcaaccgttttgccgatatgccacaagtagcaattgctcttgacaatccggatttgacttccaaatccaaatgtgctctccgtctgcttgctacactgaatgatttctggaaacaagagctacaaacaaacaacatacattttcattcatccatttcacattactcgcatgccgtagattactatatctatgcactacggcgaatcattatttaattttataaagccttcaagctaaaagccaaaacaaagtatcttgcattaagcgttatgtaagtgggctttgtgttcattcactttttgtctaatcaaaaaaaagtttagatatgtattttacactattagttgtcgttatcctgacggcaattgcactggttgccgtggctttgggtattgcccgtgccatttctccccgttcgtacaatccgcaaaaaggagaggcttacgaatgtggtatccccacccggggacagtcatggatgcaatttaaggtaggttactatctgtttgccattctatttctcatgtttgatgttgaaacggtatttctctttccgtgggcggcagtcgttcaggatttaggagtgtacggtttagtcagcatcttcttctttattgtagtactcatattaggcctggcatacgcctggaagaaaggagcattggaatggaaataaagaaaccggtcataaaatctatcccttatgaagatttcaaagataatgagtatctggagaacatggtcaaacaacttaatgaaggaggtacaaaagtacttatcggttgtttggacgaccttatcaactggggacgcagcaactcgctgtggccgcttacctttgcaaccagttgctgcggaattgagtttatggcagtcggtgctgcccggtatgactttgcccgtttcgggtttgaagtagcccgcgccagtccgcgccaggcagatatgattatggtagccggaaccatcacacacaaaatggcaccggtattaaaacgtctttatgaccaaatggcagaccccaaatatgtgattgcagtgggcggatgcgccatcagcggaggtccgtttaaaaaatcctaccatgtgctgaacggagttgacaaaatattaccggtagacgtttatattcccggatgccccccacggcccgaagccttattatatggcatgatgcaactgcaacgtaaagtaaaactggaaaaattctttggcggagtaaaccgcaaggaagaagaaccccaaaaggaataacttatggatgatattatcaaaatagaacctaacgaactccgcaccgagatgcaaaagttacgcgcggaaggctatgactttatgcgttcactcaccggaatggactggggagaagaaggattgggagtagtctaccatctggaaaagacagctaccggcgagaacaaagtaattaaagctgtcactgccaaccgcgagaaagctgaattgcctacagtctgcgatatttggaaaggcgcagaattcaacgagcgtgaagtgtatgattacttcggcatccgttttgtgggacaccccgacatgcgccgcttgttcctgcgtgaagactggataggccatccgcttcgcaaagattatgacgaaagcctcaacccgctgcggatgaccaacgaagagccggtcgataccacccaatacatggaagtacagcatgacggcagcgtaattgaaaaacgagaaaccatcttcgacgaagatgaatacattattaatataggtccgcagcatccggcaactcacggagtgctccgctttcgcgtgtcactggaaggtgagattataaagaaactggatgtacactgcggatatatccaccgcggcatcgaaaagatgtgcgaaagtctgacatatccccaaacactcgccttaaccgaccggttggattatttaggcgcacaccaaaaccgccatgcactctgcatgtgtatcgaaaaggcaatgggtgtggaagtgagtgaacgtgtacagtatatccgcactatcatggacgagctgcaacgcattgattcacatctgcttttcttttcttgtctgtgcatggacttgggcgcgctaactgccttcttttacggattccgcgaccgcgaaaagattctggacatcttcgaagcaaccaccggcggtcgcttaatccagaactataataccatcggcggtgtgcaggccgatatcgcgccggactttgtgcaaaaggtaaaagactttatcgcttatctccgtccgacattaaaagagtatcatgaagtcttcaccggcaatgtcatcgcacaggaacgtatgaaaggtgtaggagtgctcagtcgtgaagacgccatctctttcggtgcaacggggggaacagggcgcgccagcggttgggcttgcgatactcgcaaacgccacccctactctatgtatggaaaagtcgacttcaaagaaattgtccataccgaaggcgattcattcgcacgctacatggtacgtatggaagaaatcatggaaagtatgaacatcatcgaacagttgattgataatattcctgaaggagcatttcagcaaaagatgaaaccgattatccgtgtgcccgaaggttcttattatgctgcggtggaaggcagccgtggagagttcggcgtctttttggaaagtcgtggagataaatatccttaccgtctgaagttccgtgccaccggactgccattggtttcggcaatggaaaccatgtgccgcggtgccaagatagccgacctcattgccatcggcggaacagtggattacgtggtaccggacatagacagataagattaataataaaacgaaacgaaataatatatgtttgattttagtatagtaacccaatggatacactcaatgcttacctccttcatgcccgaagggttggcggtatttatagagtgtgtggctatcggcgtatgcatcatgcttgcctacgcagtgattgctatcattatgatattcatggagcgaaaagtctgtgcagcattccagtgtcgcctaggaccgatgcgcgtaggaccttggggcaccatacaggtctttgccgatgtattcaagatgttgataaaagaaatcatcaccattcgtcacgccgacaatttcctttataacctcgctccctatattgtgatactggcatctatcctgtcattcagttgtttgcctttcagcaaagggatggaagtgctcgacttcaatgtcggcatctttttcctgatggcagcctccagcatcggtgtggtaggtatcctgcttgccggatggagttccaacaacaagtactcactaatcggtgccatgcgaagcggtgcacagatgatcagttatgaactgtctgtcggactgagcattctcaccattgtcgtattgaccgataccatgcaattttcagaaatcgtagaacgccaggccgacggctggttccttttcaaaggccatatcccggcaatgattgcctttatcatctatctgatagccggcaatgcagaggtaaaccgtggtccattcgacttgcccgaagccgaaagtgagctgacagccggatatcacaccgaatattcgggtatgcacttcggtttattctatgtggcagagtttgtcaacctgttcattattgccggagtagccgccactatcttcctgggcggctggatgccgttgcatattcccggcttggacggcttcaataccgtcatggactatattcccggatttgtatggttctttgcaaagtcattctttattgtctggctgctgatgtggataaaatggactttccctcgtttacgtatcgaccagattcttacactggaatggaaatacctggtaccgataggtctttgcaatttgttgctgatggttattattgttgtatttaaattgcatttctaatgaaagaagaaaaacgttcatatataggaggactgttgcacggtatcggtacactgctcaccggaatgaaaatcaccggacgggaatttttcactccgaaagtaaccgagcagtatcccgagaaccgtgctacactggaaatctctccccgttttcgcgggcgtctcgtcatgccggcagacgaaaacgggaacaataaatgtattgcctgcgggctttgccaaatggcctgtcccaacgacaccattcatatcaccagcgaaacacagactgatgaagaaacaggtaagaagaaaaaaacattggtgaaatatgaatatgatttgggcgcctgcatgttctgtcaactctgcgtcaatgcgtgtccgcacgatgccatctgttttgatacggaatttgaaaatgcagtgttcgaccgcagcaaattggttctcaccctgaataagaaataaaaaaacaaacgatattatgacactacaactaattgtattcattgtgctggcattgtttatcgctgtctgttcggtactggcggtcaccacatcacgcattctgcgcgcagcgacctatttgctgtttgtactattcggcacggcaggcatttacttccagctcaattattcgtttttgggagccgtccaattgctgatttatgccggcggcatcacggtactttatgttttcagtattctgctgacctcctcacaaggagacaagtccgaacggctgaaaaacggtaaaatggtggcaggagttgtttccacccttgccgggctgggcatctgcctgtttgttatgttgaaaaacgagtttctcccctcccacttcactcccggcgaactgcatgtgcagaccatcggccacaccctgatgggaatgggaaaatatcaatatgtactgcctttcgaagtcatcagcatattgttgctggcttgtattgtgggaggtataatgattgcacgtaaaagataagtctgattatggtacacatggaatattacctggtggtttccacctttatgatgtttgcaggcatctatggcttctttacccgccgcaacctgctcgccatgctaattagtgtggaactgattttgaactccgtcgatatcaacttcgccgtgttcaaccgctacctcttccccaacgaactggaaggagtgttcttcgccctgttcgccatcggagtgagtgctgcggaaacagcggtagctattgccattatcatcaatatctatcgtaacatccgaaacatacaagtgaagaacttaaacgaaatgaaaaattgattatggaatatactattctaatcctcatccttcctttcctcagttttctgatactgggactggcaggtatgcgcatgaagaacagcgtggcaggtgccatcggcacagcttcactgacaggagtggcattgctttcctacctcaccgcctttcactatttcacaggcggccgtacggcagcaggcaccttccccaccctcatgccctacaactttgaatggttgccgttcacagccgaccttcatatcaatatgggcattttgctcgatcctatttccatcatgatgctggttgtgatttctaccgtgtcactgatggtacacatctactccttcggctatatgaaaggtgaaaaaggcttccagcgctattatgcttttctgagtcttttcaccatgtcaatgctgggactggtagtagcaaccaatattttccaaatgtacgtcttttgggaattggtgggcgtcagctcttacctgctcatcggtttctattataccaagaaagaagccatcgcagccagcaaaaaagcatttatcgtcacccgttttgccgacctcggttttctgattggtatcctcatctacggctactacgcagaaacattctctttcactcctgccgcaagcgctctggttgcagcaggaacaatgattccactggcattggggctgatgtttgtcggcggagccggaaaaagcgccatgttcccattacacatctggctgcccgatgccatggaaggccctactccggtcagtgccctgattcatgccgccaccatggtggtagccggtgtatatctggtagcccgtatgttcccgttgttcatcggttacgctcccgaagtactccactggacagcctacatcggtgctttcacagcattctatgctgccagtgtagcctgtgtgcaaagcgatatcaaacgtgtacttgctttctccaccatttcacagataggctttatgattgttgccttgggcgtttgcacctcaataaatccccacgaaggaggattgggctacatggcctccatgttccatctgttcactcacgccatgttcaaggcattactcttcttgggggcaggatgcatcattcatgccgtacacagcaatgaaatgagcgcgatgggcgggttgcgcaaatacatgcctgtcacccacatcacatttctgatagcctgccttgccatttcgggcatttggcctttctcgggattcttctccaaagacgaaatcctgaccgcctgcttccggttcagcccggtcatgggctggataatgacaggtatagctgcgatgaccgcattctatatgttccgtctgtattatggcattttctggggcacggaaaacaaaaccctccacgctgcacatactccgcatgaagcaccgcttaccatgactttcccgttactgtttttggcagccgtgacctgtgtggcgggattcatcccgttcggtaatttaatcagcagcaacggagaggcttataccatccacctggatatgcaggtagccacaacaagtatcattattgcactgttgtccatcggtcttgccacatggatgtatgcaggtcccaaacagcctgtcgccgacaagctggcacacaccttcagccgtttgcacacagctgcctatcaccgcttctacatggacgaagtctggatgttcttcaccaagaagattatatttcggtgcatcagtactccgatagcatggtgggaccgtcacgtcatcgaccagttcttcaacttcaccgcctggagcacccacgccacagctgatgagatacgtgatatgcaaagcggaaatgtacagcaatacagtatttggttcctcgcaggagccttgatactgacgctgatactattagtttaaccagccaaacgaataattaagtatacaaatgaacatactaagttttttcatcatagttcctttattgatgctcgcggggctttgggcttcgcgcagcgtcaatcaagtacgtggcgtgatggttaccggagcttccctgctgctggcactgtctgtctacctcaccattgattatataggactccgccaagccggtgccatggaagaaatgctgtttaccgacagtatatcctggtatgcccccttacatatatgttactccatcggagtggacggtatctccgtagccatgttactactgagcgctatcattgtcttcaccggaacatttgcatcatggaaacttcagcccctcaccaaagagtatttcctatggttcacactgctgagtttgggagtgttcggattctttatctcaacagacctgttcaccatgtttatgttctatgaagtagcgcttatcccgatgtacctgctgattggtatatggggaagcggccgtaaagaatatgcagccatgaaacttaccctgatgctgatgggcggttctgctttcctgctaataggtattctgggtatcttctatggagcaggaggcgagacaatgaatctgctcgagatagccagacttcatattcccgatacgatgcagcacctgttcttcccgcttattttcctgggattcggtgtgctgggcgcactattcccattccacacatggagtcccgacggccatgcatctgctccgactgccgtcagtatgcttcatgccggtgtactgatgaagttgggaggctacggctgttttcgtgttgccatgtatctgatgcccgaaggagcagccatgtggggtgatgtattcctcgtgctgaccaccatttctgtggtttacggtgcgttcagcgctgtggtacagaccgacttgaaatatatcaatgcctattcatccgtatcgcattgcggactggtgcttttcgctcttctgatgatgacacgcaccagttgtacgggagccatcctccaaatgctgagccacggtctgatgacagctttgttctttgccctgatcggtatgatttacggccgcacccatacacgcgatgtacgcctgatgggaggactgatgaaaatcatgccatttctggctgtgggctatgtcattgcgggtcttgccaatctggggttgccgggattgagtggatttgtggcagaaatgaccgtctttgtcggctcgttccaaaacaacgataccttccaccgtgtatgcacgctgatagctacgacaagtatcgtgattactgcggtttatattctgcgtgtagtaggtaagattctatatggcaaggtactgaaccccgaccatctgaaacttaccgatgcaacttgggatgaaagagtggcagtaatcttcctgatagcctgcgtagccggactgggacttgccccattctggataagcaacctgattagtaacagtgtagaaccgattatcactcaattaatacaataacatacgattatggacattacatctattttgcaaatgcatcaggagctgagcctcaccgccgtatttctgttgatgtttgtactcgaccttttccttcccgtgcgtcttcgccactggttacgcccattggcctgcgccctgttgggaattgagttacttgccaatatatggcccgatgaagtcatccttttcggagggatgtatcattccactccgatggcctccatcatgaaaagtgttctcactttgggcaccatccttgtattcctgcaatccacccattggctgcgtcgtccggacactcgtcacaaaatgggagaattctatacactcacactgagcacgttactgggaatgtacttcatggtgagcgcaggtcactttctcctgttctttttaggactggaactggctaccgttcctatggcatgcctcgttgccttcgacaaatacaaaggccacagtgcagaagccggagcaaaattcattttatccgcactcttctccagcggtatattcctctatggcatctcaatgatttacggaaccgtaggtacgctctatttcgaggacatccctgccggcatcaccggaagcccgcttcaaatactggcattggtatttttcttctccggtatggcctttaagttgagccttgtgcctttccatttgtggactgccgacacctatcagggagcgcctaccacagttgccgcttacctgtcggttatctcgaaaggtgcagccgcctttgcgctgatggccattttggtcaaagtattcggttccatgaccgcccaatggagtgaaatgctgtgcgtggtcattgtcgctaccatcaccattgccaacttgtttgccatccgccaaagcaacttaaagcgctttatggcattcagcagtatatcacaggcaggatatatcatgctggcagtcctggcaggcactccgcagggaatggcgtcattagtttattatatcattgtatacattgcagccaatcttgccgtattcggggtaatcaacgccatcgagcaacacacccacggaatggttgagcgcgaagattacaacggactctacaaaaccaatccccgtctgacaatgatgatgacacttgcccttttctctttggcaggtatcccgccatttgccgggttcttcagtaaattctttgtatttgcagcagctttccaaagtggatattatctgatagtgtttattgcattggtaaacaccattatttcactttactattatctgctgattgtaaaagctatgttcattacccccaatgatgaaccaatcgccaccttcaaaaccggtatcgccatgcgtacctgtttgttgatttgtgtggcaggcatcttcatattgggcatcgccagcagcatttaccaactgctgaacgatacagctgcactttattgagaaagaaaagggagtgtgtcaaaaccaaaccggcctatccaatcgtcagctgtagaggcaggggtcgcctgcccgaagacacaaagcaaactgttttcgggcgagcgaacctcccccctacgaaccagacgataacattatccacgttttgacaaccccatcttataccccctcaataatgggcattgtttatgaagattgttaccattatttgctaaaactctctccattgttgatgaaaaatctcaagaggtctaaaaaacttcaccagcttttcagaaaacttcaccagctttttcaaaaactccaccaacttttttgaaaagaccaaagtgttttgacacgagcaaaacgccttttgaaaacactttcttccgagttttcctactgattgaatgaatgaaccgaaccccgaaagaaaattgataaaacttcctttcacatttcacaaatatcgtaaaccacctgttcataggggtttccgcgtgaaagcaacaaatttcctcttaacagcttctttcacgcaaaaagccgatgaataaagggtttcagtgggtgaaacgtgtgaaagcaacttgttatcaactttttcgtggaaaacatttttgtctatttagacaagacaagaaagcgactctttatgtttacaaatatatttgcgccatactatcaaatacagcttaaacaaaaaaagagcaccccgaaggatgcccttttatattagctaatcattaagatgaatgattattttttcacagtcaaagaaactttctgagcaggaagttcaacaccccacttatcagtaatgttcaagtcgaatgtgatagtagctccgttttggatagctgtgttcggtttaagagcaattgtccaacctaccaattcgccatcagtctctgtaccatctacaagctcatcaccttcaagcttcttataaaccggagttacatcaaatgcacctgcattttcacctgtagcaaccaattcgatatcagcaattcttgcatccattacatccttctgagcagcaggtgtatcattagttccagcagtaaatgagttcaataacttgtatgccttgttgaatgcatccttaccggcaacgtctgcgctcaagaatgagtctgaaccggttgcaaggtcaagagtagtcttgctaacagtgattgtaccatctttaatcgggctttgacctgtgatatagatagtttcagtagcagcattgtaagttgcattttcaaagtgcttgtaagaaacttcaaacttctgagtttcagtatacaacttatccagaggaatattaactgtgctaccattaactgtccatttatctttgtctgcttttgctgttacagtaaagtctactgctttatcagcattgttataagctgtttttacatcatacaacagattttctccagtcggaacagcaccataagcagccagcttatcaccatcaaagtacatcggaattctgcttacagcagatgtcgggttagtcaatgtcaactctacagttgcaggtaaagtcaatgtcttagactgaccgtctacatcattaccagtaacaacaaactgaatcaaagcactataaacatcagcagttacattttcctgttcagggtcaacagtaatagccaaataagctgcctcacttaacttagttgcagcagttttcttatctgatttaactaaagtaaagccacccaattcagtatctttagcaattttcaaattagccggagtagcaccatacttcttgctagaagtcaacgcaaatccgtcagcaggagtattgttagcaacagtcttataagtgaatgcattagcattattccatacaatcttatcaccggcagcagttacagaagcagccaagtcagccaatggcaagtaaacagtattcttatcagttgacaatacatgagatgccttcagagtaacacctgctgttacagcagccttttgaacagttactttcaagtttgcagattgaatactatttttggcaactgaagcactattagtatatttcacagtaaaggtaatttctttaccataagcagcttcattagagatagtgaagttagtaccatcgatagtaatgccatacaaagatttcaagttttcatccaatgacaaagcaatatctgaaacaccctccaacttagtaaggaatgcttgagcagcggcattgggatttgcagaaggatctgcagcataacctttaccaaacaagctgtaagtttcacctaatttcacataagtattatccttagccttataattatctgttgtcttaccttgagtaatatcagcagcattttccaaaccggctttatattcaaaagctgtagcagccttaccacaaacaacagcaagtgcgtcatcttggctgataatactacctttcttaatatcggcaactgtcacaccttctttaagagcaaagtgcaaagtataaacaccgtccatagcagctctctgcaaagcacccttaggagtagaaactacagcctcttcaaagatggtagcaccttcagaatttaccaagttgaacttcaaatcagccggatcaatattagtcggtgtaaccacaacatttacagccacacctcttgtaccatcttcatttaatgcagaaataattgcatccttcggatacttaacttctgaaacattaatcaattctttgctgccataatacacaacatttttttcattaagcaatgaagcttcatcttctacaacaggcacagcaatagcaatagaagttaccaatgaagaagcagaaggaactttcacttcctgtttgttaccgtctttatcaaagatagtcagtgtaaatccatcagcttcgctacctgcaacgctaacgccggaaacgggaacacctgtagatttgtaggttccgtcttcctgcaatacagcccatacaccatcctgcataatgatagatggttttgtttcgcttgtggcaaccttcagttcttgaggttcatcgttgatatacaaaataccatctacaaccttcacaacatctccactacctgtttcatcatccaaagtgatagttacaggatcaccctgattgaatgtaaaggtaatgccatgtccgtcagctgtttttgcaactgaagtaacatacttaccgctaccaacgagatcctgcaaagccttgattgcatcagcatttgcagtgatttgtccctgcaagttctcgatgtcatcgtcgtaatccttacaagacacaaatgttcctgttgacgaaaccattaaggctccgaacaggattgcacttaaaaactttttgttcataatagaaaaactttaaatttataaatttaaaaaactaaaattggttatacatattagttattgattgggcacataaatccctctgttcatgcaaaaaataacgtttgggagattcgcctgctatcttactaaaagctgaatagaaagcacttcgggaagtaaacccactcttttccgggactttatccaacgagcatttattactgcgaagcaattccttggcatactctacacggtaagtattcagaagttctttcaagttacacccaaaatacttgttcactacattggagagataagtctgattcgtatcgaccagctcgctcaatttcttcaaagaaagagtggcatccaaaaacacctgacgaatttccaattgataaaggatacatttatatatatagcaatccactttcctgcccactattccctgtccggcaaactgttcgtcccaatgacgctcggctgccttgaaaagcaggtctttctgcctttcggaacgtagggtgctctttttgcgttttagaaacaggtattccatatcttatcctttacttttgtcttagtttgcgggctctcgaaacgcggatttacaagcatttttatatagattcgcgaaacgaaaatcggtgtatctcttagtaagagatacaccgacctaagtaaagtatcagattatcaatatattaagaactgttttttaacttttaaaatgctaaagaatgaaaaaataaaatcttttttcgagctcacacccattttttttgcgtaaaagtgtactaattctcaaaactttgcttatttttgcagcggaatggtagatctcttactaagagatacacttttagttaaaatttccaatcatcgtaaacatcctcatttccaattatttatattatcacttttctatcaaagaaggtattcattaaatttcattcacatttcaaccgactctaattttgttttaataagttgaaagagagagaaaaaaaggatatgcaagatttttgaaaagaagaacttatatgaaagtcctatgcggacagcatttggaaaagcatatacatagaaagtcttttgtctcaaataaaaccgcattataacaatcgacaactaaaaacaaaacacgtattagcgcatcatttgaatatacgctaatacgtgtttggattacaaacccgaacgaaacgttcttttattgtctataacgatttaatacgttcgataagtgaatcaatatcttcgtccgttgtgtcccaagaagtgactaaacgcatctcattcattgcatcattccaaaaataaaaatgataaaactcctgcaacttatcctctttctcacgaggcataataaagaataactggttactttccaccggctgggtaaacgttacatccggcatggcttgcaaggcatcagaaagttttgcagccatttcattggcgtgtcgggcacaccgtaaccataagttatcagtcaggaaagcagtgaattggcaagatatatacctcatcttacttgccaactgacaagcctgcttacgggcataacgggcttctttcatcaggtccggattaaaaaccaccacacactcagctcccatcagaccattctttgttccccccaaagtcagggtgtctactccgcaagctcccgatatctcatccaaactgactcccaatgctgcggcagcattggagatgcgtgcaccgtccatgtgcagtaacaaaccatgttcgtgtgcaaacgttgtcaaagcgcgtacttcggcaggagtataaacagtgccgagttctgtacattggctgatatagactgctcccggttgagaatggtgttccacaccaaaattaatcatataaggtttcaggagttcaggtgtcagttttccatcgggagtggagatagtgcgcatgaagcatccggtcgccttgcttggcgctccacattcgtctactgcaatatgtgcagtgtcggcacaaaatataacatgataagggcgagtcatcagttgcaatgccatcgtattgctacctgttccattaaagacgaacaacggttcacacggatgtgtaaactgttcttttacttttcgggttgcctcttctgtccaagggtcatcaccataaccgaaggcatggtttgtgtttgccgccatcagtgcttccattacttgaggatgtacactggaattgttgtcggatgcaaaacttctcataatagtagaatattgaattataattttcgtgcaaagttaacttctttctcttcaatagacaatgaaacagtattaaaatacatttgaaaagaaagtattacgcagctgtatcattcatgtaataccgacaaccgacctttgcactgaattaaaaaaacaagctaaagaatgatgaatacaaagaagagagagtttggccttataatcattttcttattcctggccatatctattcaagcggctgtattacgaggaagcgtgaccgataaagtgacaaatgaaccactaatcggtgcagtaatacaaataagcggcactactacaggagcaatcactgatttggacggtaacttcgaactggccggattaagaaacggaacatataaactgatggtatcgtatgtttcttataaaacattgactttagaggtatctgtcaatggcatgtcagaaataaatataacattagcacctgataaccagcaactgggagaagttgtggtagtggcagaagccaagaagaatacagaaaatgccctgattacccggcaacgcaccagtctggtgatgcaaaccggtgtctccgcacaacaaattaccaagacacaagacaaggatgcttccgaagtgattcgccgtgtgccgggcatcagtatcattgaagaaaagttcgtaatggtacgcggcctttcgcaacgttacaacaatgtgtggataaacaatagtgccgtgcccagttcggaagccgacgcacgcgccttctccttcgatattattccttcctcacaactggacaatatgctggttgtaaaatctccggctcccgaatatcctgccgatttcagtggcggctttattttagttaataccaaggatgttccgaacagtaacctgtttaacatctcagtaggaggaagcatgaatgatcagactcatcttaaaaactttcaatacaataaaggaagcggtacggactttttgggattcgacaacggattgcgtagcttgaatggcggtatcaacgcgacactgagaccgatgaataatggttacgacttgctcaacaacggactgaataatgattggagcataaagaaccgcaagcctattgccgacctcagcctgagcatgaacatcgcccaccgctgggtgagtgaaagcggtcgcactttagctatgctgggagccgtaaattatagcaatacctacaaaacatatctgaatatggataataatctgtatggtgcctatgacatcactcatgaccgttccaactatttgcgcaagggagtggatgaccaatataatcacaatgtacgtgtgggagccatgttgaacctcacttatgtgccggcaagcggaaataaccgttatgaattcaagaatatcttcaaccaattgggaaaagaccgctatacttatcgcaagggaacggatgcacagagcgattatgaagagagtgcagagtattactaccagagccgtaccacctacagcggacagtttacgggaaaacatacatggagtgacacggataaactggattggagtgccggatattcttatgccaaccggaatatgcccgaccgccgccggtacaacacggtactgaacacagataccaatcaattggaagtagagaatctgaatgaaatcaatcgtgagttctcgcgtctgaatgaacacatcctgtcggccaacatcaattatcagcatgatttcgcattcggtgatttcactcccacactcaagatgggaggatatacggagtaccgtacacgtgaatacaatacgcgcctcttcatttacagttggaagaacggtttacctagtaattaccgtgtgatgaatgtgcctgacgaattgatgcaggacaaaaattacggagaagataaattatacctgctggagcaagtggactggcgaaataattatgaaggaaacaatatgttgggagcaggctatgccggtgtaaatcttcctttcggaaagtggaacatatacgcaggcgtccgtttcgaacacagccgaatggaattaatcagcaatacacaaaagaacgaaaagagtccgaccagtgtctattacacttacgatgatttctttccatcgcttaatgccgcctatcgtctgaatgagcaacaccagttcagattatcgtatgggcgtactgtaaaccgtcccgaattccgggaagtctcttcttcggtgtattacgactttgatttggctagtaatgtacaaggcaattatgacctgaaagcagcttatattgataatattgacttgggatatgaatactatcccagtaacggtgagctgatttccgtatcattattttataagaaattcaagaatccgatagaatgaacttacaccgtagccggaggtactgacttgatttattcttatatcaatgccaaaggagccgataattatggcgtagaagtggatatacgcaaaaacttagatttcatcggcatgaaaaacttcagcctcagcctgaatggtgcactgataaaaagtaacgtaaattttgaacccggttctaaagaagaagaccgtcctatgcaagggcaatcgccctatctggtcaacgcgggactcttctatcaacagcccaaaaacggatggaatgccgccatactctacaaccgcatcggtaaacgcattatcggtgtagggcgcagcctgggcagcgcaggcaacgaagtacgtgtgcccgactcatatgaaatgccacgtaatgccattgacctgagtgcctctaagaaattcggcaaactggaagtaaaagccgctatccgcgatgtactggccgaaaaggtgtctttcaaacaatttgaaaatacaggaaatggtgaagtgcagcaaataacccgtcagtttaaaccgggacgcagcttcaacgtaaacataagctataatttttaaaacaagaaatatttcattcagtaactaaccaataaatgaaaatgaaaacaaacaagtttatgacttatgctctctcggccatgatgctgggaagcctggctgcttgcagcagtgatgattccgaacccgacaatggtggaaacagtggtggtgagacaacggacacaccttatgtatggggaactgaaggctcaatcaagacgtgtgatcatttgttgttcaatgaggataagtctgaaaacaaaaagggaacagtaataggaaatggtgaccaggaatttgtattcaaaggaactcagacccttgccaaaggtacatacctgttgaaaggatgggtttatgtgggagcaggttctacattgaccattgaaccgggaactgtcatcaaaggtgataaagacacacaagctgccctgattatagaaccgggcggaaaactgatagccgaaggaaagcaggatgctcctatcgtatttacctctgaaatgccgaaaggacaacgcaaacccggtgattggggcggtttgattatctgtggtaaggcaaagaacaatcaaggcgtgctgaatcagcagattgaaggggggccccgtaccaaacacggaggggatgatgactccgacaattccggtatcatccgctatgtacgtgtggagtttgccggttatccctttatgaaagataaggaaatcaacggcattacgttcggctcggtcggtagcggtactaccattgaccacttgcaggtttcttattccaacgatgactcttatgaatggttcggcggttctgtaaactgtaaatatctggttgcctataatggttgggatgacgaattcgacacagacaacggattctccggtaaaatacaatatggcttgtctatccgcgatccgagaattgccgatacatcacaatcaaacggatttgaatcggacaactgtgccgatggttctctggtttctccctatacaacggcagtattcagtaacattacttttatcggcccgctcggacgtgatgccggatttaccaatgatgaaagctatatcaatgccggcagcttcaaccccaataacggttcagctctcgggaagttccagtcagcgatgcaaatccgccgttccagccgtttgaattgcttcaattctgtagcagtgggatatcctgtcggtttgattattgacggcgagaaaggaaacacggtagaacaagcacaagagggcattatcaatttgcaaaatatttggtttgccggtatgacagtcaccggttcggatgccaacaaagtgtatgatgacgtgctttatgatgcagtaaacaaaactattatcgatgccggtcaggagtcctattcttccagcttcttcaaagcacaaaaaggaaataaagtacttgccgacatgaatgaactgaactttaaagacggacgcggcatcggtgtaaattatatgccgaatgcaaatagcccggtactgactgccgcttcattcgacaatgctctattagacaatggatttgataaggtagactacatcggggcattcggtataaatgacaactggctggacggttggactaacttcgaccctaacaatacagactactaatacacttttttgaaaacacacaaatagctagtgatttttacggagattctatgggtaaagtcgtagaatctccgtatttttgtatccaaacctaaaaacatttaatatatatacctatgtatccattaaaatttaaccccattctaaaatccaccatctggggtggtgaaaagattatcccgttcaaacatcttgcaaccgaacaggcacaagtaggcgaaagctgggaaatctcgaatgttccgggcgacgaatcagtagttgccaatggtacagacgcaggcaaaaacctgagtgacatggtaaaagaatacaaaggagcattagtaggtgaaagcaactatcaacgtttcggagataatttccctttgcttatcaaattcattgatgcatgcgatgatctttccatacaagttcaccccgatgacgaacttgccaggaaacgccacaactcaatgggaaagacagaaatgtggtatgtaatcgataatgcaggtggcaaagctcatcttcgttccggtttgaaaaagaaaatcactcctgacgaatatgcagcaatgattgcagacaatacaatttgtgatgctttggcagactatactgttcagccgggagacgtattcttcctgcctgccggacgaatccatagcattggtgccggatgctttattgcagaaatccaacaaacatccaatgtaacctaccgtatctatgattttaaccgcaaagacaagaatggcaatacacgcgaattgcataccgagctgtcgaaagatgccatcgattatacagtggaagaagactatcgcaccagctatacgccggaacaaaacaaaccgatagaattggtaacctgcccctacttcaccacttctgtatacgacctgacggaaaatatgactatggattacagcgaactggattcttttgtaatctatatctgtatggaaggttcatgcacggtaactgataatgaaggtcattcgttggaaattcaggcaggagagtctatacttttccccgctaccactaaagaagtaaatgtaacggtaaacgaacatgtgaaatttctggagacttatgtataatccaatttcaccgatgcaactatgactaaaaaagaacttatgcggaaagccatcgagctttccattgagaatgtcgcaaacggaggaggacctttcggagccgtcatcgccaaaaacggagaaataatagcaacaggtgtcaaccgggtaaccgcttcgtgtgaccccaccgcccacgctgaagtaagcgccatacgcgctgccgctgccaagctgggaacattcgacttaagcggatatgaaatctatacctcctgtgaaccctgtcctatgtgtttgggcgctatctattgggcacgattggataagatgtattatgccaacaataaaacggatgcaaaaaatataggtttcgacgattcatttatctatgatgaactggaactgaaaccggaaaacagaaaacttccttctgaagttatgttacgcgaagaagctattaaagcattcgaagcatggagttctaaaacagacaagatagaatattaaagaaatgggggtgtgtcaaacattgataataccatattttgctaggtttcagttttgacacattcccattttctatacaaataatattaattacactctttatcaaatcctatttctttcatcaacttattatattcttcttcctcacggcacaacggcttataccaagtatatttcagtataacagttgtcgcaatcagtatcagaacagatacaataaagcccagatttccgcgcacaaccaagtacatcggtacaatagtcagacaacactgccacacaataccaatggtaacattaaatgcgtcacgcttaaaattcttattacgagtcacttgcggatagcgcgctattgccttgtcgacaattggtttccaccatccccacggacgaacgcgaatatagaaattaatcagagtgtcttcatctgtcggaggagcagaataagttccgacaatacaccctatcagcgaaataccaaataaaacagggaagaaatagagcaccaatccatcagggactgtaaatttcatcacaatagcggcaaccacacctgctgtcataccccaaaaataaccttctccattgaaacgccaccaatgccatttcaatacattggcagcaatgtagccaccaaacagggcacccacaatccactggaatatctcattgatatcttttaagaaaaagcccataaccgtgctgataatcacaactagaacagaaatcaaataactggcacgaatctgtgtcttgacagtagctttggggttgatatacttcaaatagatatcatttaccacgtatgccggagctgcattgacggtagatgcaaaagtagacatgaacgctgacagcagacccgccaataaaagtcctgccaatcccaccggtacatattttgttatcaaatgaggcaatatggtctcaaaatccgtgtttgttgctgtcatttgagacaaaccaccgtccactttaaagaagtaaatcgccaacagagcaaaccccataatcatcagataacgcggaatcagcaaaataaccggtacggaaccactcatcatagctgcctctttcggagacttacatgaaagaatcttctgcatatcatagttaggtgcaggacctgccatactcataaatatacctttcaacaatgccatcatcacaaagatacccatcaaactataaggctcattagccattcgttccgtcaacagactcattcgctcactccagtcaatatcaagtgcccagccgaagaacggtgaatcccatcctttgggaacaaactcttgaatcatttcgggagctaccatattcataccgataacagcaatgataatacctgccactgtcataatcataaactgaaccacatctgtccatacaatactgagcataccgcccaacatcacgtaaaaggtagcaattgccgtaaagaatatgccataaaaatgaggaacatattgcaacggaatatcaaaaggcacatattgtgaaaccacctcccacgggaagaatatctccataaacttaccaatgccgataaaaccgtaactcagaaaacccaatacactcagcagagcgaaaacaatcacaatagtatgcgacaaagtagctccttttccatgtccgaagcgggttttaatccattcggcacctgtcagcacattacttcggcgcaaccatacggaaagatacaccatcaggaatatctgattgaacaccggccacagccaaggaatccacaaactcttgaaaccatatgcaaaggcccaataaaccatcaacatggttccggtaatatcaaacatacccgaagcatttgaaagtccgagcatataaaacggaagggacttgccccccaaaaaatacgaatccatattttttgccgctttcttcttcaggaatagcccgataagaactatgacaatcagataagcgcaaataatcaggatgtcaacaacatgtaatttcatatattatttactttaagatttttcttgttcaagcaattctgtatgtcaaccgatctgtacttctaccttcttccgtatatcatccgacttgacagacaccactatgccacctatcgtcttatcaaaaacggcttttaccgatttaccgtttacttttacttttgttcctgcctggattcccggcaattcaatacgataagctcttttttgaggttgccccttgtacgagccttttgccggatggatagtaacaaaggtctgttctccttccttacgatagttcattaatgtaaaagcagattcaccttgctgataggctgttgtaatcccgtcatcttcatatagggtataagagtgattacatccttcgttgcccggataacaacggacaatcaactcggtaagcggagtcgaacacatacgttctgtataaggttgcataggtaatgggtagccccccttcacaaataaaggaaattcgtccaacggactttctaccgtcactgtccggcccccttgatatgctttccccgtgaagaaatggtaccagttttccccacccggcaaccatacctcttgcgagaccagcttctgttctccttctcccggcatggtaaccggcgctcccaacaataaatcgccgaataagaattcacccggacattgatatgctttctcgtccgaggggtattccaaatataatcctctattaagtggaatcatatcttcataacactgatggacagaagaataaatataaggcatcaactgcgaacgaaggtgatagatgcgtttcatggcttcttcttccttatccccccacaaccaaggacggcgatcgagtttctcatcatatactgaatggatgcggagagatgaattcaataaaccgaattgtgtccaacgagtataaagctctgcatcatctcctccataaaatccgcccaagtcatgcgcccagaaaaagcaaccggcattaccgctcgttgtagtcaaatcaatttcaaaacgcagcaactcccaattggcaacggcatcacctgaaaactggatgggatggcggtgatctccccaacctgcccaacgactgaaaccggcaccacgaagattattacgggcagaataatcataatagattttattcaaccacggcaaatgcctcatcgatgtacctctgacgtatggataaagataatcctgctgccaatccaaccaccaaaaagcaacgcccatttgatcgctctcttggtgggcatgtttcataaatgctttcatatattccggattccctgcatcaaacaaaggaactccgtttttcagcgtatcggctcccaagtcacggataaacataggataagcatcatcatgcggacgtaacccatcgtgcggatgctcattcagtaccacatatacatggtcatctttcaaatcctgtatcagtttggcggggtcttttatcagtttcctgttccaactataacctgtccaccctctggttcctgcatggcccgtaccaacggtagcattctgagtatgccatcccatatcaaaaaccatgatgtccaacgggaaatcatgctctttatattcacgcaccaactgacggtaatcatcatccgtataattccaccaccgacaataccatgaaccatgtacatatttacgtggcataggtgccggaccactgacaacacgaagagaacgtaaagccgacttataatcgtttccataaacaaacaaatacaaatcctgtacatggtctttatcacgcgcactcacccaaccgtcacgcaacacttctttgcccgtatcatttatcagataccaaccgtcacggcttaacaaaccttcctgacgatctaccggaccatccacttcatccaaggtcgtaagagctcccagtagattcttactttgcctgctggctatataccaatgtttctctttggcctcttcaccattcttaaaataaacatgcaaattggtttgtccaaacggaaatccgtccgcgtaatattcaatccgcatcaccggagtagacaatacataatgatcttttgacttttcctctactttcacgtctttacactccgtcgaacgatcaatggcaaacaaagtaggatcatccaaaaaatgaccattctgtgcatattccatacgcaccaattgatcggtaatgaaagtaaaacggctattgccgataataaccggattagcccaaagcacccggccggataataaaaagacaagtaaaaatagtaacttattaaaatgcttcataatagtacatttatggttttatctgtatcgttgtcaatacattcaccccatatttcccatcctttgaaacccaccagtctacatcaccattggcacatcggacagcataacgaggattatacttcaatcgctccgacacatcaggcaaccataaccccaaacgataatttcccggagaaacaggtaccttccctgcaaatgagattgagtgaaccaaaggagtataagtaacatctccaggttgatatggctggcagtcggaagaactgaacaatgccggcaattccattattccttccttttcgtcaatcaatacaaaataagcagggcgttcactactgaaaccggcaaatccacgattaataaactccaaatttaaagtcaatgcttctccattccttatcgtttgcggcattcccaatctctgcaattcgatgcgatatcccaaatggtcacgaatataatcaaaaatactacgtgaaaccaatgttccatcctttttttgaaaataatggtctgataccggcatgtgatattttcttaaggagtctgcatttatcatactttttttccacacaatcatcgaatattcaggagcattcgcctcatcaaacatccgattggagtgctgttccttataattatgaataacactcaatgaggtataatgctggagaaaaaaacgacgtgccgctcccataccatcaataatccatccggcagacgggctgtcggggtcacatccggcactccaaaagccccacggcaattcaccgtctacaaccaaataaggtgattcttttacaatttgttcaaaattgggtgtaccttcatgcatatctccatcccaacgatcaggcttgataacaataaagtcatcatgaaaagaaacacgtttatacaactccggtttacctttcagaagattcttgaattcgggaagtcttacttgtacgttcttctcggcaggtaccacttccaacaacttttccaatatagcaatctttgccgtatcggaatgctccaaaccatgaatagaactatgccattctccccatgcaccgataacacccgcctgaacgaccagaatcaaatctctattcttatgcagaaatggtttcaactgatcaagatgtgccaatgcttctttcaatgtaggtcctaccggttcctgacgcacaaaatctttttcataagcaaaacgcaagactgttttctttcccaattgtcgcaacctgtcaaaatatacctgcatggtctgaaattcagtatcagacaactttttatctgtcaggtaagtcaaataaaaatagctttgcgaaagcgatacactatccgaagcatacttcaacgacaaagtatccaattgcaaggtagggcactctttttgagtaacaagatcgacagccgtttccaaacgaaacccgcgttcgggattatacagtccctcactaccattcgcatcatccacagcaataccccggtaatgaactattttctcactatcagtacaactgcacacacttgccaagccaagcataaacaacaaacaatgtccccaatatttcatattcatgtttctattttctttcaaccgagtctttatttctctaaaatcacactgaccggataatggtctgaaatcccctcattctctcttccattatgtacagcagcactcttacatttctccatcaatgagggagaaagcaatatataatccaaccgttcacgacgttgcggcaaacgcttgtcatcccactgccaatcataaaggaatgcagccggaaaactcatgcgtgcacttgccggatgtaccatccgtccgatcgcatcttccattcctgccgcaagaaaagtagaaataacagaaaagtcatatcgtccttctctcaaattacgatattttttttgtgataaatcccaacgttgcatatttgccaacaatgtatcatgtttagcaatctcatcggcatccaatggggaatgagcattcaaatcacccgccacataatagtctttcaaatgatttgcctgaatataatccacaatttgttgcgcttcattcaagcggtatttccactcaaaaggactaagatgagtagcaatgacatcgacaccgactgtcttaacatgcatcatgccatgccaaaatccttctacttgtttcttaatcacttctatcggttgcttggaaagcactccgacaggatacccctcttccttcacaatggcagcatacggatacccacacacctgccccaatgttttcaaatccttttccttaaagccgactaattctgtcaacacaaagatatcagcagcctgttttcgagtccattcgataaaacgcgcacgcctcaacgagtctccttcaaaaccattccaaatattataagaaataagtttcatttgttgtccggtctgtccccacatggaaagagcagagcaaggaagcagcatcaagaggattaatcctaaaaactttttcatttattcaaatatgtttcgtttttatcaatcagattattaatcgcatctacggatgttgccgaacgtaatccgtctgccggtgtatgcatacagtaatctaccagtttatcaatagtagaagtcaccacatgcatacgagtatcactggatgcataatagatatatacagtaccgtcctcatctgcaatccaaccattagagaataacacattggatacatctcccactctttcgctgcccagtggagccaagaaataacctgccggttctgctgtcagcttccaaggttcatccaatgccgtcatataaagataaagtacatagcgcaatccggcagcacaggcacgcaccccatgtgccaaatgcaaccatccggcagatgttttgatgggatgtggtccctccccattctttacctcttttattgtatgataataacgatgatttataatgatttcctctttcacttctgcctgtgttatatcatctataagtgcccaaccgatacctcctccgttgccggcattgataaaatcatcttgcggacgggtatagagtgcatattttccattaacaaactcaggatgaagcactacgttccgctgctgactgtaagacttcaggtccggcaaacgttcccattccaccaaatccttggtacggacaatacctgcctttgccactgctgacgaaaggtcgccggccggtgcactgtcgtcatggcattcactgcaaaatattccatatatccaaccgtcttcatgggcagtgagacgcatatcatatacatttgtttctgcaggattaatatcaggcaatgttatgggacgcttccaaaagcgaaaattatcaatgccgttcggactctctgctacagcaaaaaaagatttccggtctgcaccttccacacggacaaccaatacgtatttaccattccattttatggctccgctattcatggttgcgttaaaaccgatacgctccatacaatatggattggtagccggattaaaatcatagcgccactccaacggtatatgttcccgcgtaactatcggatacgtataacgacaaacaataccattcgtttcttccaccggaagatttgaccgctgcaacaatgcttcatgttgctgctgcaacaaagctattttctgttcaaaatctacattcatatgcctgtatttatcatgtattaacgattatttcatctcttcttttaccattgctgcaaatttctcaattaatagagtacaaacctaatagaatccaagcattaaatgatgaaatcttatcaatccggcaaaagcagctttcatatatacgctgtgaatggttacggtgattcatccaagaatcccccacaatacgttgtgccccttttgcattctcaatataatcagacaacaattcaataagaaaacttcagacacaccggtctagaggtttctatcttttctcccgtatcggtcagcaaacctgtttccttattaatctcaaatatctgaatcaggttactatccctgcaagctaccaataaataacggccattgggcgtaatgacaaaattacgcggatgaatacctgtcaattcataaccaatttttgtcaatgtccctttatcactgtccacagcaaaaatagcaatgccatctgctttcagacgattggaagcatacagaaacttcccatcgggagtgatatgaatatcagcacttcctttggcgccgaccgtatcggcagctatatactggatagcatccagttttccttcatgataagaaaaagccgttactttacctgatagttcattaataagataagcaaatttctgattgggatggaaacagatgtgacggggacccgaaccgggttccacctttatgtcggtcgactctccttcattcagcaaggaatgggaaactccatcagagaccgattcgctcaccgggaagacatgtatttggtctgttcccaaatcatttgccaacagatatttgtggtcaggagtaaattccgcacaatgcaaatggggttgtgactgcctttctttgtcgggaccatcgccaacaaaggaaatcaaacggctgtccgactccaatctgccttccttattcagtgggaagacagtgatgcttccgcccatgtaattagccgtcaacacaaacttaccggaagggctcaacgcaatgtaacaaggcgctccgccgttggtgggctgagagttcagcaatgtcaacttgccgtcctccttattaaatataatggcattcgccgtagaagtctgtccgtcatcctcgcctacggcatacagtctttcaccatccacagacggagtgagataagaaggattcgagattcctttcaaaccactgatataagttgccttcccggtatcttcgctaaaccgataaaccttgatgccttcttcgtccggtgtggcataactgcctacaaacaagaacattttatcactattttcatctactgtaactatattcttctgtggctttgaagtgcaagcacccaacaacaaaccacttatacacaacgctaatatttttttattcataatatatttatataaaatttgggagcacataatgcgctcccaaatatactcacttcttggcaaaacacatgctataacgacctaaattctttattattctttttttaattgattgattctcacctcagccactcccaatccatccgaattcaaaagaatacgcaagtcacttgcggtagtgcctttgaatgtgtaagacatccattcattaaacttcgacacgctgcccgaatagaccgtcaggaactgtcctccaccgcccgaaagctggatttcaaaatccgcctcgccggtattctctttcttccaagcaatcgacagaccatctatttttgcaccgttctccaaagcaaaagtaatatagtcccccttgttcccttgccagcaagtcttcaaatcattatcgagtgtcatgcccacatcttgcatttcggtactggcggaaatagcatctcccttactgtttcctgtttcagaccacacgccattcatgccatattccaccaccgcaaacttatcactcaggcgaatatcctccgaagaagcgccggccatcactctgaactcgcccggttccaccacccagtcattctttgcgttcagcagttccatatctttacgatcaagcataaaacggacttccttggtttcacccggcttcagatgaagacgttcaaaacccaccaaattcttttcgtaagtagtcagagaactgacaacatcccttaaataaagctgtacgacttcatctcctgcccgtttgccggtgttagtaaccttacaggtgacggttactttctgatttggtgtaattactttcggactcacctgcaaatcggaatattcaaaagtagtataactcaatccgtaaccaaacggatacaaaggaccgtttacacgagacatatttccgggcatccccggattcttcccgccatcaatttgcgaagaaggtttagccgggaaatttaacggaatctgtccgacactcttcgggaaagtaaccgtcagttttccacccggattataatctccaaacaaggcatcggcaacggctatgcctcccatcgagcccggataccacgactccagaatggcagggacaaatttatccgcccaatttatggaaagcggacggccattgattaataccagcacgaccggtttcccggtggcgtataccgctttcaataaatcaagctggcgtcccggcaagtcaagactgcttctcgacttattctcaccacaagtacgttgtccgcctccaagcaccacgacagctacatccgcctgcttaacatcggctaccgctttatctatttcatccttttccgtctccgtcaacggataatcaattaattcggactcaggccaattgtcatcaaccaattcacaacctttggcatatagtacctccgctttacctttcactttatccttaatcccctgcaacacagtaaccacatctacagccaaaggaccatagtgagtcaaagcataaccgctctcatccgcattaggaccacatacagctattttctttattgatgaaatatctaacggcaatgtattccgttcatttttcagtaacaccagcgactctttggaagactgaagagctacttccaagttctctttcttctccacttccttatcggcaccttccaagtctgtttgataaggctcgtcgaacaaccctaccaagaacttgacacggagaatatcccgcacacggtcgtttatcagttcttcacttaatcccccttcttcaacaagttcgcgcaacggcaacacatacgagtccggagaacggaaggtgcaacggacattcagtccggcttccacactctgcctcacagcctccttcatatcctttgccgttccatgcttggtatacagatattccaccgcatcactatccgaaacgacatatcccctgaacccccattcaccgcgtaaacgggtagtaagccaataagaactgctttgaataggaaagccgtcataatcattataagaactcatcactcccaacaaacctgcctcctttatcactctcctaaacggataaacatgaaccatctccacctcacgaggagacatttgcgggtcgacacgcgccatgccctcacgcgcacctttattattactataagctataaaatgtttaccggtggcagctacctgatgattatattgcattcctttcaccatctcaatacctaattcggctaccagataggggctctcaccatacacctcctcataacgcccccagcgctggtcacgccccacatcgagaataggagcatacacattagtatagcccaacatacgtccctcacgtccggttatcctccccactttataaattaaatcacggttccaagtatgtcccaatccgagttgcgtcgggaaattcgtagcacgataactctctaccccccgaatgccttcgttggtaaaatcgaccggaattccaagacgggtatcctcaacaaaaaaccgctgtacttcattcaatgcccatgcatgccgggaagccggccacacattctcattatccgaaggaggaagcccccattgctgaaaaccattcaagtgttcatcaatggctcctattccatctttccacaacatattcttccattcggaagtaggaagtgcatccttcagcacccttttataaccgtagagcgtcaccatttggcaagtcttctcttcgatattcatttgtccgagaaggtcttcaatacggtcttcaatttttgcattcggattttcataaacatccatcacaccattcttattaaagtcaatccatcctttatggtacatagatttcttgacaggctgatagactttcggtattttaattgttgcctgtgccgagagcatcgcagaacttcccaacagagcaaaagtaagaaacaggttcttcatcatattctgattattggatttaattatcactatttgtcggggtaaagataaagaaaacacctcagacaacagaacaaaattgtccataaggttatccatttttgtacaagaatgctcacaaacatagctttaagtcatattggcaaaagattgattcacacagaatattactaataattgcaaagggatggcatataattgagaaaaaattattatgtttgcagcatctatcatagataccagttcgggcttgactggatttgacagcgagttggagtggtatgtaagcatgcagtgcgtcggtgattggcactataatctcagttatcaaaattttatctggcaacgaaaattacgctctcgctgcttaatcgaagtatagtagattaactttatttctgccatagtggtagaaacgagatgtcactcaaaagctcttgttccgaagcgtttggtaaagtggcacagcaaattcgggaatagtttgagactttcctcgcatctctcacgaaattttagaggataaggtatagattggtggcttcggtcttgtctatacacgaaaattcaggcgaagataagcatgtagaaagcgtatggcttcctcgtttggacgagggttcgactccctccagctccacaaataatattgataatcaggtgtttatattgtttacaccccaaaatgcaccctgaaataaaaatgatagtctgattatcattctttatatcaaaagctatctgcctttcttaaataaattaactattgtgatgatttgtgatattctattttaatttttatcattttgtttgttcttatcaaggcgatttcctatctttgaaacatcattagggcttgactggaattgacagcgagttggaatggtatgta

SEQ ID NO: 6662 - DNA, 20655 bp, Unknown
  gut microbiota DNA sequence
atcgctgtaaaaggggaattcccgggtaataactaataaacttcaattataatgggtaaactgacaaaaaatcaaaagttggctgcagaaaaaattgaagcagggaaagcatactcactgaaagaagctgcacaattagttaaagatatcactttttctaaatttgatgcttcattagatattgacgtacgtttaggtgtagaccctcgtaaagctaatcagatggttcgtggtgtagtttcactgcctcatggaaccggtaagcaagtacgtgttttggttttgtgtacacctgatgctgaagctgctgcaaaagaagctggtgctgactatgttggtcttgatgaatatattgaaaagatcaaaggtggatggacagatattgatgtaatcatcacaatgccgtctatcatgggtaagatcggtgctctcggtcgtgttctcggtcctcgcggattgatgccgaatccaaagagtggtactgtaactatggatgtagctaaggctgttaaggaagttaagcaaggtaagattgactttaaggttgataagagtggtatcgttcatacttcaattggtaaggtttcttttactgctgaccaaatccgtgataatgcgaaagaatttatcgctaccattatcaaattgaaaccttcttcagctaaaggtacctatataaagagtatttatctttcaagtactatgagtaagggtatcaagattgatcccaaaactgtagaagaaatctaataataaggaggaatcatgagaaaggaagataaaggcgttattattggtcagttggctgacaccgtaaaagaatatggacatttctacttggttgatacaactgctatggatgcagctgctacaagcgagttgagaagaaaatgtttcaaagccggtgttaagctggtagttgtgaagaactctttgcttcacaaagctttgatgagtatcgaagaagttgatttctctccgttatttgattctttgaaaggtacaacttcagtaatgttctgcgaaactgcaaacgttcctgctaagttgctgaaagaatacaaagatggagttcctacactgaaagctgcttatgcagaagaaggaatatatgtaggtgctgatcaacttgaagctcttgctaatattaagagtaaaaatgaagttattgctgaaattgttgctttgctgcaatcaccggccaagaacgttatttctgctcttcaatcaggtggtaacaccattcatggagttcttaaaactctgggcgaacgtgccgaataatcaattttataatcaattagtaacaaacaattaaaatcatacaaaaatggcagatttgaaagcttttgcagaacaattagttaacttgacagtaaaagaagttaatgaacttgcaactatccttaaagaagaatacggtattgaacctgctgctgcagctgtagctgttgctgctggtcctgctgcaggtggtgcagctgctgctgaagaaaagacatcttttgatgtagttttgaagagcgctggtgctgctaaattgcaggttgttaaagccgttaaagaagcatgtggtcttggcttgaaagaagctaaagacttggtagacggtgctcctagcacagtaaaagaaggcttggctaaagacgaagctgaatcactgaagaaaactttggaagaagctggagctgaagttgagcttaaataatattaagcctgattatcaggtaattcggttaggaatcctctagacgaggattcttaacctttttgtgtctatattattattaagttctacaaataaattatcagatgtcttcaaatacagaaaacaaaagagtaaattttgcttccatcaagaatccgatgaagtatccggatttcctggaagtgcaattgaagtcattccaagactttttacaactggataccccacccgaaaaacgaaagaacgacgggctgtataaagtatttgctgaaaacttccctatcgctgatacacgtaacaactttgtccttgagtttttggactactacattgatccccctcactatacaatagatgattgtctagagcgtgggctcacttatagtgtacctttgaaagctaaattgaagctttattgtacagatcccgatcatgaggattttgatactgttattcaagatgtttatttgggtcctattccttatatgacgccgaagggaaccttcgtgattaacggtgctgaacgtgttgttgtttctcagctgcatcgttctccgggtgtattctttggacagagtgtacatgctaacggtacaaaactatattccgcacgtattatcccattcaagggctcatggattgaattcgctacagacattaacaatgtgatgtatgcttatatcgaccgtaagaaaaaattgcctgttactactctgttgagagctgtcggctttgaaaatgataaagatattctcgaaatatttaatttggctgaagaagttaaagtcaataaggccaatttaaagaaggttgtaggaagaaaacttgctgcgcgtgtcttgaagacatggacagaggattttgtagatgaagacaccggtgaagttgtttctattgaacgtaatgaggttatcattgaccgtgaaactgtgcttgaagcagagcatgtagatgaaattatcgactcaggcgttcagaatatccttgttcataaggaagaagctaattcatcagattattctattatatttaatacgcttcagaaagacccgagtaactcagaaaaagaggctgtgctttatatctatcgtcagttgcgtaatgcagatcctgctgatgatgccagtgctcgtgaggttatcaataacctgttcttctctgaaaaaagatatgaccttggcgaagtaggccgttacagaatcaacaagaagttggggctgactacggatatggatgtgaaggtattgacaaaacaagatattatcgagatcatcaagtatctgattgagttgattaactctaaggctgatgttgatgatattgaccacttgagtaatcgtcgtgtgcgtacagtgggagaacagttgtccaatcagtttgctattggattggctcgtatgtctcgtactattcgtgaacgtatgaatgtacgtgacaatgaagtatttactccgattgatttgattaatgcgaagactatttcttctgttatcaattcattcttcggtacaaatgcattgtcacaattcatggaccagaccaatccgttggctgaaattactcacaaacgtcgtttgtctgcgttaggtcccggtggtttgtcgcgtgaacgtgccggtttcgaggtgcgtgacgtacactatactcactatggtcgtttgtgtccgattgaaacccctgaaggtcctaatatcggtttgatttcttctttgtgcgtttatgcaaaaattaatgaacttggtttcatttctactccttatcgtaaggtagctgatagtaaggtggatatttctgatgaaggaattgaatacttgactgcagaagaagaagaagataagattattgctcagggtaatgcacctttggatgatgaaggtaagtttgttcgtgacaaggttaaggctcgtcgcgatgccgattatccggttgttactcctgatcaggtagagttgatggatgtatctcctcaacagattgcttctattgcggcatctttgattccgttcttggaacatgatgatgctaaccgtgcattgatgggttctaacatgatgcgccaggcagttcctttgttgcgtacagaggctcctattgtaggtacaggtatcgaaaagcaattggttgaagattctcgtactcagattgctgctgaaggtgacggtgtgattgaatatgtagatgcaaccactatccggattttgtatgacagaacggaagatgaggagtttgtcagcttcgaacctgctttgaaagaatatagaattcctaaattccgtaagactaaccaaagcatgactattgaccttcgtcctatttgtgataagggtcagcgtgtaaagaaaggtgatattctgacggaaggttattcaacacaaggtggtgagttggcattgggtaagaacctgttggttgcttatatgccttggaagggatataactatgaggatgctattgtattgaatgaacgcgttgtacgtgaagacttattgacttctgtacacgtggatgaatatatattggaagtgcgcgaaacgaagcgcggtatggaagaattgacttctgatattcctaacgtgagtgaagaagcaactaaggatttggatgagaacggtattgtacgtgtcggtgctcgtattgaaccgggtgatattttgattggtaagattactccgaaaggtgaatcagatccttctcctgaagaaaaattgcttcgcgctatctttggtgacaaagccggtgatgtaaaggatgcttcattgaaagcttctccttcattgcgtggtgtcgttattgacaagaagttgttctctcgcgttgtgaaaaccagaagtgaaaagaatgccgacaaagctattttgccgaaactgaatgatgaatttgaagaaaaggcagctaagctgaaggatatcttaattgataaattgttggtattaactaatggtaaagtctctcagggtgtaaaagattacttgggaaccgaagttatcgctaagggcgctaagtttacaaaacgcgaccttgagtcattggattatacagtgattcagttgagcaagtggacagcggatgctcacaagaacgatatgattcgtgacttggtaatgaactacctgaagaagtataaagaactggacgccgaactgaaacgtaagaagtttgcaatcacaataggtgatgaattgccttcaggtattattcagatggctaaagtttatattgctaagaaacgtaagattggtgtgggtgataagatggcaggtcgtcacggtaataagggtattgtatctcgtgttgtccgtcaggaggatatgccgttcttggctgatggtactccggtagatatcgtattgaatccgttgggtgtgccttctcgtatgaacatcggtcagatttttgaagctgtattaggtcgtgccggaaaagaattgggcgtgaaatttgctactcctattttcgatggtgcatctatggatgacttaaatgaatggacggataaagccggattgcctcgttactgtaagacgtatctttgtgatggtggtaccggtgaacgctttgaccaaccggcaacggtaggtgtgacctatatgttgaagttaggccacatggttgaagacaagatgcacgcacgttctatcggtccgtactctcttattactcagcaaccgcttggtggtaaggctcagttcggtggtcagcgtttcggagaaatggaagtttgggcgctcgaagcattcggcgcagcgcatatcttgcaggaaatcctgactattaagtctgatgacgttgttggacgttctaaggcttacgaggctattgtaaaaggtgaaccgatgcctactccgggcattcctgaatctctgaatgtattgttacatgaattgagaggattgggattgagtatcaaccttgaataataaaaatataactctttacaatataaacaagaaagtatggcttttagaaaagaaacgaagataaagagtaatttctcgaaaatctcaattggtttggcttcacctgaagaaatccttgagaattcgagtggtgaggtgttgaagcccgaaactatcaactaccgtacctacaaacccgaacgtgacggtttgttctgcgaacgcatcttcggtccggtaaaagactatgaatgtcattgcggtaagtacaaacgtattcgttataaaggaatcgtttgtgaccgttgcggtgttgaagtgacagaaaagaaagttcgtcgtgaacgtatggggcatatccagctggtagtgcctgtggcacacatttggtatttccgttcattgccgaacaaaatcggttacttgttgggattgcctaccaagaaacttgattctattatttactatgaacgttatgtcgtaattcagccgggtgctgccgctgaagaaggcgtaaatgaatatgatttgctttcggaagaggaatatctggatttgctggaaaaacttccgagagaaaatcagtatctggaagatacagaccctaacaagtttattgctaagatgggagctgaagccatctatgatttgttggctaaacttgacttggatgcactttcttatgaattgcgtcacaaggcaagcaacgactcttcacaacaacgcaagaatgaagcattgaaacgcttgcaggtcgttgaatcgttccgtgcatctcgcggacgcaataaacctgaatggatgattgtacgtattgttccggtgattccgcccgaacttcgtccgttggttccgttggatggtggtcgttttgcaacttctgacttgaatgatttgtatcgtcgtgtgattattcgtaacaaccgtctgaagagactgattgaaatcaaggctcctgaagtaatcttacgcaacgaaaaacgtatgttgcaggaagctgtcgattcattgttcgataactcacgtaagtcaagtgctgtaaaaacagatgcaaaccgtccgttgaaatcactgtctgatagtttgaaaggtaagcaaggacgtttccgtcagaacctgttgggtaagcgtgttgactactcagcccgttcggtaattgtcgttggtcctgaattgaaaatgggagaatgcggtattcctaaattgatggctgccgaactttacaagccgtttattatccgtaaattgatagaacgcggtatcgtgaagactgttaagtctgccaagaagatagtagaccgcaaagaacctgttatttgggatatcttggagcatgtcatgaaaggacatccggtattactcaaccgtgcgccgacattgcaccgtttgggtattcaggcattccaaccccatatgattgaaggtaaggctatccaattacacccattggcatgtactgcgttcaatgccgactttgacggtgaccaaatggctgttcacttgcctttgagtaatgaggctatattggaagctcagatgttgatgcttcaggcacataatattttgaatccggctaacggcgcacctattactgtacccgcacaggatatggtacttggtttgtattatattacaaaactgagaaaaggtgcgaagggtgagggactgacattctatggaccggaagaagctttgattgcttataatgaaggaaaggtagatattcatgctatcatcaatgttgttgtaaaagacctggataaggatggcaacattgtagatgtgatgatgaaagaaacttctgtaggtcgtgtgattgtaaatgaaatcgttccggctgaagtaggttatctgaataccattatttctaaaaagtctttgcgcgacatcattagtgatgttattaaggctgtgggtgttgctcgtgcttgtgaattcttggacggtattaagaacttaggttaccacatggcgttcaagggtggtttgtcattcaacttgggtgatattattattccgaaggaaaaagaagaactggtaaaacgcggtaacgaagaagttgagcaaatcatgatgaactataatatgggtttcatcactgataatgaacgttacaaccaggttattgatacatggactcatgtcaacagcgatttgtctgacatcctttataagactattaaaaatgatgaccaaggtttcaactcagtatttatgatgcttgattccggtgctcgtggttctaaggaacagattcgtcagttgtcaggtatgcgtggtttgatggctaagccgcaaaaggccggtgctgaaggtgctcagattattgaaaacccgattctttcaaactttaaggaaggtttgtcggtattggagtactttatctctacccacggtgctcgtaaaggtttggcggatacagctttgaagactgccgatgccggatacttgactcgtcgtcttgtagacgtatcgcatgatgtgattattaatgaagaagactgtggaacactgcgcggtttggtttgtactgctttgaaaaataacgatgaagttattgccactctgtatgaacgtatcctcggacgtgtttcagtacatgatattattcatcctaccaccggtaagttgattgttgccggaggtgaagaaattactgaggatatcgcacaggaaattgaagattctccgattgaaagtgtagaaatccgttctgtattgacttgcgaatcgaagaaaggcgtatgtgccaagtgttacggacgtaaccttgcttccagccgtatggttcaaaagggagaagctgtcggtgtcattgctgcacagtctatcggtgagccgggtactcagttgacgttgcgtactttccatgccggtggtattgccggtaacatggctgccaatgcaagtattgttgccaaaaacaatgctcgtctggaatttgaggaacttcgtactgttgatacagtagatgaaactaccggtgaagctgtgaaagtggtagtaggtcgtttggccgaggttcgctttattgatgtaaataccggtattattttatcaactcataatgttccttacggttctaaattgtatgctgctgacggtgatgtggttgagaagggtaaactgattgctaaatgggacccgttcaacgctgttattattactgaagcaaccggtaagattgagttcgagagtatggttgagaacgtaacttataaggtagaatcggatgaagctaccggtttgcgtgaaatcatcattatcgaatctaaggataagacaaaagttccttctgctcatattacgacagaagatggtaacttgatacgtacttataacttccctgtgggtggacacgttgttattgaaaacaatcaatcggtaaaggccggtgacatccttgtgaagattccgcgcgctgttggtaaagctggtgatatcaccggtggtttgcctcgtgttacagaattgtttgaggcacgtaacccgtccaaccctgctgtggtttctgaaatcgatggtgaagttaccatgggtaagattaaacgtggtaaccgtgagatcattgtaacatctaagactggtgaagtgaagaagtacttggttaatctttctaagcagattcttgttcaggagaacgactatgtacgcgccggaactccgctgtctgatggtgcgattactcctgccgacatcttggccattaaaggtcctacggctgtacaggaatatatcgtaaacgaggtacaggatgtttaccgtctgcaaggtgtgaagattaatgataagcactttgagattattgttcgtcaaatgatgcgtaaagttgaaattgatgaaccgggtgatacccgcttcttggaacagcaagtggtagataagcaagacttcatggaagaaaatgaccgtatttggggtaagaaggtggttgttgatgccggagattctcagaacttgcaaccgggtcagattgtaacagcccgtaagttgcgtgatgagaacagtatgttgaagcgtcgtgacttgaaacccgttgaagtgcgtgatgctattcctgcaacatctactcagattctgcaaggtattactcgcgctgctttgggaacttcaagcttcatgtctgctgcatcattccaggaaacaaccaaggttctgaatgaagctgctattaatggtaaagtagatagattggaaggtatgaaggaaaatgtgatttgcggtcacttgatccctgccggtaccggacagcgtgaatttgaaaagattgttgttggttcgaaagaagaatacgatcgcatcttggcaaatcgcaaaaatgtacttgactatagtgaagtagaataatacgattcattaagactttaaatagaaggtcggttttcctaatgggagaccgacctttttattgttcacccggcatgggtataccctcctgacttcatcacttttccctaccattacatagcggaaaaatggagtgacgcaagtatgctcttgtctcaatcaggatgaaaggaaccagtattcacactcgctacctcggtcagcacattgagccggaagcggcagcgggaggtgagaaaagcggttacttcctgtatcagggagcatggcgtcgtcttcttgacagcatctttcgaggattctgattctactgtctcttcaatgtttttcgaagatatcttcccggctttctttcaatatgcttccggggaagattgttttgagagtgatgaatacattcatgaggcactttttgagattgggcgaattacaaatatacaacataaaaaagcgtttgtctagaagaggaggcaaacaaatcaaattccggtacaggatatgacggaatctgacacaatgacatatatatgtgtaggcttatgcgtacgttcgtgtagcccgatgcatatatacgtgtgggcttacacatatataggtacaggcttgtgccactgtatgtgtcaaaaagaccttgatgtcttttaaaaagatcgggaagtttcttacaaacttcaccaccttttaaaaaaaacccggtatgttttttatgtaagggcagatgagattacctttcatcaaattggtcattcctttttttccgttcatccttacattttaatcaaaacgtgcggacaaccgccggctaataatgaaagggtatcccttcactcccatttcagtcacacttcccaagccgttttcaaatctgccttcagcatttttttcaccgaaagatgttttaaaatgaaaggaggctgaaaagacaacacggcatgttcattcaccaccggaactcccattaacaggacgttttggcggttaatgaaaggaggaaacatatttccgcttgtggatgaaaaatacagttggttttgtggatttgtcattgtatgacaaaccacgtataggaaaagtcgagagccggcattgctccgatactagccacggacttttgtagctgatttcttttccacatttatatgtttgcgtaattttccttaatggtaagttaacaccaacaagccttctatgcgatagtagcaataagtcaactgcacaaaggaagtcaagcgaaatcatacggcattggcaagccggtcttcactaaatagaaatgacattccgaatcattcgtaaatcatattttgtgataaaaagatttcagccatttctcaacaggctatcattgtttttctaaaagtttgataataatagtccctttttcagaataatatatctatatttgtagtcattcaaagcgacaaagagagttcgtgtttgatatattaatgtaaatagagcgtttttgatattactttgtgttagaaaatccccaattttcgaagcggaacaaagtggatacaacagaacgctcacgtcgtgtgtttatacttccttctaaaaggaaatatgcataacggcgtgggactgttgtttttatttgttccgtgggtatggggatacctctaacacagataagacattaaaacagttcccacgcttttttatatatttatgccatcctcagggagcagggaaggggtacattgggctgctatgaaaacaatagaagaattggaagaactcaaccatcaattgcaagtcgagttgaggaaagctagagccgctcaggctcaagccgaagctgctaatcaaaataaatcagtgtttctagccaatatgagccacgagatacgaacgccgcttaatgttattatggggttttcgaatttgattgttactgctgctaccgaagaagaaaagcgaatgtatgcagaagttctggaaaataattgttctttgctgcttcagcttattaatgatattttagatctgtcaaaaatagagtcgggaacattgacttttgcagaggaagaaatggagctgaatatattattggaagaattggcaagcgcaatgcgtacacgaattgttgccgaggaggttgttttgaattgtgtaacactttctgctccttgttttgtcgtggcggaaaaaaaacggctttctcaagtacttattaatctattgacaaatgctattaagtttactaccaaaggcagtattcgtttaggttatgaaattcatggaaaaatgctttatttttatgtggctgataccggatgtggttttcctgaatcccaaaagcagaaagtgtttgaacgatttgtgagacttgattcagctaaaccgggaacagggctggggcttgcaatttgtcgtactattgtggaaaaaatggggggatgtatcggggtagaatcagaagaaggaaaaggatcttgcttttggtttaccattccttatattcctctctgtatagaaaaaaatgatatttagtgcgtctattgttgcttgattggttccttttccttatttttgttcgcctgctaataataagcagataatatttacctttaattatagaagaaaataatcatggaaaacgaaaaaaacaacaatcagcttcaaatagagttgaaagaagaagtagcacaaggcacatatgccaatcttgccataattacccattctagttcagaattcatagtagattttgtacgtgtaatgcctgggttgccgaaagcaggagttcaatctcgtattgtattgactcctgaacacgctaagcgtctgatgtatgctttacaagaaaatgtggcaaagtatgagcgcaactttggaccgattcgtatgcctgaagaaatgaatggtgccaatggcggtcctgatggcaagacttttattcctcctatgagtggctttaaaggagaggcataagttatagctttgtcgtggaaatggcatattagcctgtttttcaaaagattttttttggagacaggctatttttattgcttaaaagtattgtttattaaaatgttattcgtaactttgcagcccaaaatgtatagttttggattaaaatagtaaattaataaacaatatataacaattaaaaatcaaacaaaatgcctactattcaacagctagtaagaaaaggaagagaggttttggttgagaaaagtaagtctccggcactggattcatgtcctcaaagacgtggtgtttgtgttcgtgtgtatactactactccgaaaaaaccgaattcagcaatgcgtaaggttgctcgtgtacgtctgacaaactctaaggaagtgaactcttatattccgggagaaggacacaacttgcaggaacactcaatcgtattggttcgtggtggtcgtgtgaaagaccttccgggtgtacgttatcacattgttcgtggtactttggatacagcgggtgtggctggtcgtacacaaagacgttctaaatacggtgctaaacgcccgaaagccggacaagcagcagctcctgcaaaaggtaaaggtaaaaagtaatttgaagcctagctgaaattccgaaaagaaaaaaagtattttaatttaagtttttggtttgttggaataagctataaaggttgagtaaatgcttcggtggaagcgttgaagtaaacaagagtcgcagccccaaacaaaaaacattattttttttaagaaaaatgagaaaagcaaaaccaaaaaaacgtgtgatccttccggatccggtatttaatgaccagaaggtttctaaattcgtaaaccatctgatgtatgatggaaagaagaatacctcttacgaaatcttctatgctgcattggaaacagtaaaaacaaaacttcctaacgaagaaaagtcagctttggaaatttggaagaaggctttggataacgtaactcctcagctggaagttaagtctcgccgtgtgggtggtgctacattccaggttcctactgaaatccgtcctgaacgcaaggaatcaatctcaatgaaaaacttgatccttttcgctcgtaaacgtggtggtaagtcaatggcagataaattggctgctgaaatcatcgacgcattcaacgaacagggtggtgccttcaagcgtaaagaagatatgcatcgtatggcagaagctaaccgtgcattcgctcacttcagattctaatcaagtaataattaaataagtaaaggacgaaaatggctaaaaatgatttgcatttgacccgcaatatcggtattatggctcatatcgatgccggtaagacaaccacttcggaacgcattttgttctacaccggtctgacccacaaaattggtgaggttcatgatggtgcagctacaatggactggatggctcaggagcaggaacgtggtattactattacctctgcagcgacaacaactcgttggaaatatgcaggcaatacttataagattaacttgattgatactccgggacacgttgactttactgctgaagtagaacgttcattacgcgttttggatggagctgttgctgcttattgtgctgtcggtggtgtagaacctcagtcggaaacagtgtggcgtcaggctgataaatacaatgtgcctcgtatcggttatgttaacaaaatggaccgttctggtgctgacttttttgaagttgttcgtcagatgaaaactgtgctcggtgcaaatccttgtcctgttgtaattcctatcggtgcggaagaaagcttcaaaggtgttgttgacctgattaagatgaaagccatcttatggcatgatgagactatgggagcagactacagtgtagaagaaatcccggcaaacttggttgacgaagctaatgaatggagagaaaaactgcttgaaaaagtagcagatttcgatgatactttgatggagaaattctttgatgatccttctactatcactgaagaagaaatcttgcgtgcattgcgtgcaggtactttgaagatggacatcgttcctatgttctgcggttcttcgttcaagaataaaggtgttcagacattgcttgattatgtttgtgcattcttgccttctccgttggatactcctgctatcgtgggtactaacccgagcacaggtgcggaagaagatcgtaaacccagtgaagatgaaaaaacttcagctttggcatttaagattgcaactgacccctatgtaggtcgtttgactttcttccgtgtttactcaggtaaagtagaagccggctcttatatttataacactcgctccggtaaaaaagaacgtgtgtcacgtctgttccagatgcactcaaataaacagaatcctgttgaactaattagtgctggtgatattggtgcaggtgttggtttcaaggatattcgtactggtgatactttgtgtgacgaagaagcacccattgtattggaatctatggaattccctgatccggttattggtattgcagttgagcccaaaacacagaaagacttggataagctgtctaacggtttggctaagttggctgaagaagacccgacatttacagttaaaactgatgagcagtcaggtcagactatcatctctggtatgggtgagctccacttggatattattatcgaccgcttgaaacgtgaatttaaagtagaatgtaatcagggtaaacctcaggttaactacaaggaagctattacaaaaactgttgaattgcgtgaagtttataagaaacagtccggtggtcgcggtaaattcgctgatattatcgtagcaattggtccggttgatgaagactttactcaaggtggattgcaatttatcgatgaagtgaagggtggtaatattcctaaggaatttatcccgtcagttcagaaaggtttccaaactgcaatgaagaatggtgtattggcaggttatccgcttgattcactgaaggtagtcttgaaagatggttcattccacccggttgactctgaccagttgtcatttgaaatctgtgctattcaggcttacaaaaacgcttgtgctaaagcgggtcctgtattgactgagcctatcatgaaattggaagttgtaactcccgaagaaaacatgggtgatgttatcggtgacttgaacaaacgtcgcggtcaggtagaaggtatggaatcaagccgttcaggtgctcgtattgttaaagcaaaagtgcctttggctgaaatgtttggttatgtaacggctttgcgtactattacttctggtcgtgcaacttcatctatgacttatgaccatcatgctcaggtgtctagctcaattgctaaggcagtacttgaagaagtgaagggtcgtgtagacttagtataataaagaataatttggggcaacgggttagcgaatgactcttaatccggccccactttatatgtttttttaatcattttataaataacaatctaatgagtcaaaaaattagaattaaactgaaatcatacgatcacaacttggtggataagtctgctgaaaagatcgtgaaaacagtgaaggctacaggcgctattgttagcggtcctattccattgcctactcacaaacgtattttcactgtaaaccgttcgactttcgttaacaagaagtcacgtgaacagtttgaactttcttcttataagagattaatcgatatctatagctcaacagctaagacagtagatgctctgatgaagttggagttaccgagtggtgtagaagtagaaattaaagtttaatccattaaaaattaactgaaatgccaggattattaggaaagaaaatcggaatgacatccgttttcagtgctgatggtaaaaatgtaccatgcactgttatcgaagctggtccttgtgtagttactcagattaagagtgtcgaaaaagatggctatgcagctgttcaggtaggtttccaggacaaaaaggaaaaacatactaccaaacctttgatgggacactttaaaaaagctggtgtaactccaaagagacacttggccgagttcaaagattttgaaacagaattgaatttaggagacgcaattactgtagaattgttcaatgacactgcttatgttgatgttgttggtacttctaagggtaaaggtttccaaggtgttgtaaaaagacatggatttggtggtgtaggtcagactactcacggtcagcacaatcgcgctcgtaaaccgggttctatcggtgcttgttcataccctgcaaaagtattcaaaggaatgcgtatgggtggccagatgggtggtgaccgcgtgactacacacaacttacaggtattaaaggtgattccggaacataacttgctgttgattaagggttctgtaccgggttgcaaaggttcaatcgtaataattgaaaaataatggaagttaacgtattaaatattaaaggtgaagacaccggaagaaaggttacgttaagcgaatcaatcttcggaattgaacccaatgatcacgctatctatctggatgttaaacagtttatggctaatcaacgtcagggaactcacaaatctaaggaaagaagcgaaatcagcggttctactcgtaaattaggtcgtcaaaaaggtggtggcggtgcacgtcgcggtgatatcaactctccggtgttggtaggtggtgctcgtgtatttggtcctaaacctcgtgactactggtttaaattgaataaaaaagttaagacattggctcgtaagtcagctttgtcttataaagcacaagcaaatgcaatcgttattgttgaagacttcacttttgaagctcctaagacaaaagatttcgttgcaatggtaaataatcttaaaattgctgacaagaagttgcttttggttttgccggaagctaataaaaacgtatatttgtcagctcgtaacatcgaacgtgctaacgtagcaatagcttctgcattaaatacttacaaagtattggatgctgaaacacttgttgttacagaaagttcgctcaaagctatcgagaatatcttatcttaatttaaaaaggaggcttagataatgggaattattattaaaccgttggttacagagaaaatgactgcgattaccgaaaagttaaatcgtttcggctttattgtacgtcctgaggctaacaagttggaaattaagagtgagattgaggctttgtataatgttacagtagtagatgtgaatacggtaagatattctggtaagaataagagccgctatactaaaactggacttatcagtggacgtacaaatgcttataaaaaagcaattgttacattgaaggaaggtgatactattgatttttatagcaatatttaataaagatggcagtacgtaaatttaagcccacaacaccggggcaaagacataagattattggtacttttgaagaaattactgcgtcagtaccagaaaagtctcttgtaagcggaaaacgcgtatcaggaggtcgtaataatgtcggtaaaatgacggttcgctatatcggcggtggtcataagcaaaaataccgttttattgatttcaagagaaataaagacggcgttccagcagtggttaaaactattgaatacgatccgaatcgttcggctcgtattgctttgttgttttatgctgatggtgaaaaaagatatattattgctcctaatggattgcaagttggtagcactttgatgtctggagttgatgcagcgcctgagattggtaacgcacttccactcgaaaacatccctgtcggtactgtaattcataatattgaattgcgtccgggacaaggtgcagctttggtaagatcggctggtaattttgctcagttgacttcaagagaaggtaagtattgtgtaatcaaattgccttcaggtgaagtaagacaaatacttagtgcttgtaaagctactattggtagcgtaggtaactctgatcatggattggaaagctctggtaaggcaggtcgttctcgttggcagggacgtcgtcctcgtaaccgtggtgttgttatgaacccggttgatcacccgatgggtggtggtgaaggacgtgcttcaggaggtcatccaagatcacgtacaggcttgtatgctaagggcttgaagacaagagctcctaagaaacagtcttctaagtatattatcgagagaagaaagtaataactgattaattgagtaaattatgagtcgttcattaaaaaaaggtccatatattaacgtaaaactggaaagcaaagtgcttgctatgaatgagagcggcaaaaagagtgtcgttaaaacttgggctagagcttcaatgatttcgcctgattttgtagggcatacaattgcagttcataacggaaataaatttattcctgtttacgttacagaaaacatggtaggacacaagttgggcgaatttgcaccaacacgtacattccgtggccatgccggtaacaagaaaaaataagcaggataatctgaagaaataataaagtaataaataatgggagcaagaaaaaaaatatcggctgaaaagagaaaagaagcccttaagaccatgtattttgcaaagttgcaaaatgttcctacatctccacgcaaaatgcgtctcgtggctgacatgattcgtggtatggaagtgaaccgtgcactgggtgtcttgaagttttcttctaaagaagcttctgcaagagtggaaaagctattgcgctctgctattgctaactgggaacagaaaaacgaacgtaaagcagaagacggtgaattatttgtaacaaagatttatgttgatggtggtgcaatgctgaaaagaatgcgtccggctccacagggaagaggttacagaattcgcaaacgttcaaatcacgtgactttgttcgttgattctaagaatactaatgataatcaaaattaaaactagatgggacagaaagttaatccgataagcaaccgtttaggaattatcagaggatgggattctaactggtacggtggcaacgattatggtgatgctttgttggaagacagcaaaatccgtaaatatttgaatgccagacttgcaaaagccagcgtttcaagaattgttattgaacgtacactgaaattggtgacaatcacagtttgtacagctcgtccgggtattatcattggtaaaggcggtcaggaagttgacaagctgaaagaagagttgaagaaaatcacagacaaagatattcagatcaatatctttgaagtgaagagacctgaattagatgctgttatcgtagctaacaacatcgctcgtcaggtagaaggtaagattgcctatcgccgtgccattaaaatggctatcgcaaatactatgcgtatgggtgctgaaggtattaaagtgttgatttcaggacgtttgaatggcgcggaaatggctcgttctgaaatgtataaagaaggaagaactccgttgcatactttccgtgcagatatcgactactgtcatgctgaagctttgactaaggttggtttgctgggtatcaaagtatggatttgccgtggtgaagtgtatggcaagaaggaattagcaccgaactttactcagactaaagagaacggtcgcggtggaaatggcaacaacaacggtggtaagaacttcaaaagaaagaaaaacaatcgctaacggatttgaattttaggaattatgttacaaccgaaaaagacaaaattcagaagacagcagaagggcagtcagaaaggaaatgctcaaagagga

SEQ ID NO: 6663 - DNA, 41458 bp, Unknown
  gut microbiota DNA sequence
aatatctgccaattatggtatgataatggaatattatttgtatctttgtcgcccgatttatatagtattgctttgggaaagtttgataaatataagatagaattgaagaatatgaaggcggactctgttaaatatgagtttacgctggataatcaattctttgtagatctggatggaccagaagtgcaaaaaggaaaactaacagtggagctgaatgtgaaaaaaacatccggtgttttcttgttagagttccagacagaaggctttgtcattgtaccatgtgaccgttgtctggatgaaatggagttacccattttgacatcagataagttgaaagtcaaattaggctcttcatttgccgaagaaggtgatattgtcgtggttcctgaggaagacggttacataaatattgcatggttcttatatgagttcatagcattgaatattcctatgaaacatgtgcatgctccgggtaaatgtaataagggtatggtaggtaagctgagtaagcatttgcgcacttcaggtgatgatgatgacgatgatattgtagttgaattacccgaagaggaaattggcaatgaagagccacaagaaatagatccgagatggaatgaattaaagaaaatattagataataattaaagtttagaaaaatggcacatcctaaaagaagacaatcaaaaacgagaactgcaaagagaagaactcatgacaaggcagttgctcctactttagctatctgccctaactgcggcgaatggcatgtttaccacactgtatgtggagcttgcggttattatagaggtaagttagcaatcgaaaaagaagctgctgtttaatcagtagctttaaacacgtttgtacgttttataaaataaagccggcgagcttcggctctgtcggctgtttttttataaagagtacaaactaataatttggaatgatggaaaaaattaatgcagtaataacaggagtcggaggttatgtacctgattatgtcttgacgaatgaagaaatctcaagaatggtagataccaatgatgaatggattatgactcgaattggagttaaagagagacgtatccttaatgaggaaggattgggaacatcgtatatggcgcgtaaagcagccaaacaactgatgcagaaaaccggttcaaatcctgacgacattgacgcggtaatcgtagcaacaactactcctgactatcatttcccttcaaccgcttctattctgtgcgataagttgggattgaagaatgcatttgcattcgatttgcaggctgcatgttgcgggttcttatacttaatggaaacagctgcttcactcatcgcatctggtagacataaaaagattattattgttggtgctgataagatgtcgtctatggtaaactaccaagaccgtgccacttgccctatctttggtgatggtgctgcggcatgtatggtagaagctactacagaagattacgggataatggattctattctgcgtacggatggtaaaggtcttcctttccttcatatgaaagcaggtggttctgtgtgtcctccttcttatttcacagtagatcataaaatgcattatctctatcaggaaggtagaacagtattcaaatatgctgtttcaaatatgtcggatattactgcaactattgctgcaaacaatgggttgaataaagataatatcgactgggtaattcctcatcaggcaaatttgcgtatcattgatgctgttgcatctcgcttggaagtgcctttggataaggtaatgataaatattcagcgttatggaaataccagtggagcgacgcttccgttgtgcctttgggattatgaaaaacagctgaagaaaggagataacctgatatttacagcattcggcgcaggtttcacctatggagccgtttatgtgaaatggggttacgatggtagtaagagataataatcattaaactacaaatacaaatgaacgcatccatattcagatgcgtttttttgtctgtaaccaataaattataaaaattatgcataaggcagggtttgtaaatatagtaggaaatcctaatgtgggtaagtctacattgatgaatttgctggtaggtgaacgtatctcaatcgctacgttcaaggcacagacaacgcgtcatcgtatcatgggtattttgaatacagatgatatgcagattgtattctcggatactccgggagtattgaaaccgaattataagttgcaggaaagtatgcttaatttttcggagtcggcgctggcggatgctgatgtgttattgtatgtaacggatgtgatagagaaacctgacaagaatctggagtttatcgaaaaggttcgtaaactgcaagttcctatcttattgctgattaataaaatagatttgactaatcaggaagaattggtaaagctggtggaagaatggcatgaattgattccacaagcagagattattcctatttcggctacttcgaagtttaatatagatgtagtgatgaaacgcatcaaggaattgttgcccgattcacctccctattttggtaaggaccaatggacggataaaccggcccggttctttgtaacggagataattcgtgaaaagattctgctttattatgacaaggagattccttactcggtcgaagtagttgtagaacaatttaaagaagatgcaaagagcatccatatcaatgcggtgatttatgtggagcgtgattcacagaaaggtattatcattggtaagcaaggcaaggcattgaagaaagtggcaacagaagcacgtaagactttagagcatttctttcagaagtctgtttatcttgaaacttttgtgaaggtggataaagactggagaagctcggacaaagaattgaaaaactttgggtatcaattggattaaaatcgactgtgatagccgtaaacaagaaagaacatgggaaatttagtagcaatcgtaggacgtcccaatgtgggaaaatctacactttttaatcgtctgactaagactcgtcaggctattgtaaatgagcaggcaggaacaacccgcgaccgtcaatatggtaagtcggaatggttgggacgtgagttttctgtcgttgataccggcggatgggtggtaaactcggatgatgtttttgaagaggaaatccgtaaacaagtattgttggctgttgatgaagcagatgtaatcttgtttgtagtagatgtggtgaatggagtaacagaccttgatatggaggttgctgccattttgcgtcgtaccaagaagcctgttattatggtggcaaacaagactgataataatgatttgcaatataatgcagcagaattttactcattgggacttgatgacccgtattgcatttctgctttgagcggattcggtacaggagacttgatggacttgattgtaagtaagtttaataaagaaggagaagaactgttggatgaggatattccccgttttgcagttgtgggccgtccgaatgcaggaaagtcatctatcgtgaatgcctttatcggtgaagaccgtaatattgtgacagagatcgccggtactacgcgtgactctatctatactcgttacgagaagttcggttttgatttctatttggtggatactgccggtattcgcaagaagaataaagtgacggaagacttggagtattattccgttatccgttctatccgctccattgagaactcggatgtatgtattctgatgattgatgctacccgtggtatagaagggcaggacttgaatatattttcgcttatccagcgtaaccaaaaggggctggtggtagtggtcaataagtgggatttggtagagaataaagacgccaaggtaatgaagtcatacgaggaggctatccgctcacgttttgctccatttgtggattttcccatcatatttgcttctgccatgactaaacaacgcatttttaaggtgttggaaatggctaaggaggtttatcatgcccgcacaacccgtattccgacagctcgtctgaatgaagagatgttgccgttgattgaagcgtatccgcctccctcaacaaaaggaaaatacattaagattaaatattgtacccagttgcctaacacgcaagttccttctttcgtgttctttgccaacttacctcaatatgtaaaggagccatataagcgtttccttgagaataagatgcgtgagaagtggaagctgtcaggtactccgataaatatttatatcagacagaaataaagtatttaatattaaaatcaaatgagactgtttcagaataagagtatgagacagtctcattgcttttattactacatggacggaatgtttctatccgaatgcataagcaaatcttttttggaaatcagagtgtcccaacgggaaaaatgcaaacagatttgtcatcaattcaggtgaacatgaacatacaggttcctccctatggtggataatttccttattttttcttttccatttccctaatctcttcctcttttactttgcgcaataagtcggaagcgaaaataaagttgttcaggcgttcgtttgttgctgtgaatacatcattcttagtgccttcccactctttatgtccttggtagatgtagagaatactgtcaccgatgcccattacggagttcatatcatgggtattgataatcgtggtcatattatattcggtagtgatatcatgaatcagttcatctattaccaacgatgttttagggtctaagccggagttcggttcatcacagaacaagtattgcggattcagtgcgatggcacgtgcaatggcaacacgcttttgcataccaccactgatttcgcccggatatttattttgagcttcaatcagattgacacggtcaaggcagaattgagcacgtctcagtcggtcgcgataggtgtcattagaaaacatatcgaggggaaacatcacgttttccaatactgtcagtgaatcaaacaaggcagcactttggaaaatcattcccatttcgcgacgtaatgtctttttttctttcttattcatgcttaggaagttacgcccgtcatagaggatctctcccttttcgggtatcagcagccccacgatacatttcatcaatactgtttttcccgaaccactctgaccgataatcagattggtttttccgttatcgaaaatagcattgatatctaccaatacatctttgccttcgaatgacttatataatgatttaacttctatcatcccattaaaagttgtgttaatactaagtcagagaacaaaatcagtacactgctcatgaccacagaatctgtactagccttgcccacggctatggagccgccttccaccgtatagccgaaataggccgacacgctggaaatgataaaggcaaagaacagtgatttaataaagctacaccagacaaaccattcttggaaactgtattgcaagccgtattccaaatcttccgcattcagcacgccgccgaaccaacaggtgcaaaaggcacctatgatacctgagaaaatgctaaagattaccaaaaagggaatcatagtcatcaaagctgcaattttgggcagaataagatagccggccgaattgactcccattatttcaagagcgtcgatttgctgagtcacccgcattgttcctatctccgaagcaatgttggaacctaccttaccggcaaggatgagacacatgatggaggacgaaaattccaacagcatgatttcacgagtagtgtaaccaactacaaaacgtggcatccaagggctttcgatgtttaatttgatttgaatggtaatcactgcaccgataaagaatgaaatgagcaacacaatgccgatagaatttactcccagttgcaccatttcattgaggtattgcttgaaaaacattctcatacgttccggacgtgcaaaagtacgtcccatcagtatgatgtattttcctacagttgttatgggtcttatcatcatagttttcacaatttcctgcaaaagtagccttttttgtctatataaatgcaaaagatgttctgattttctgttctgttatgcgtttcctaaacttttttagtacttttgttccaaaattcgtagatatgtcagagctggaaatagaacaacaaaatgcaatgcccgaaaatggtaaaatggtattgcgtactgaaaatctggtaaagaagtacggcaaacgtactgtagtgagccatgtttcctttgatgtgaagcagggggagattgtcggtttattggggccgaacggggcaggtaagactacttctttttatatgactaccggtttgatcgtacccaatgaaggacatatttatttgaatgacttggatatcacttcctatcctgtgtataaacgggctcaaaacggtatcggctatttggcacaagaagcgtctgtattccgcaagatgagtgtggaagataatatcgcttctgttttggaactgacaaagaccagtcccgaatatcaaaaagagaaactggaaagtttgatagcagagtttcgcttgcaaaaagtgcgtaagaatttgggagaccagttgtcgggaggagagcgccgtcgaacggagatagcccgttgtctggcaatcgaccctaagtttattatgcttgatgaaccgtttgccggtgtagaccctatcgcagtagaggatatacagcatattgtgtggaaactgaaagataagaatattggcattctgataactgaccataatgcattggaaactctgcgcttgacagaccgggcctatttattgtttgaaggaaagattctgtttcaaggtacgcccgaagaattggcagagaatccggttgttcgcgaaaagtatttgggaaccaattttgtacttcgccgtaaagacttccaattggaagaagccaaccgaaaacagcagatgcaaggctaaaagatatattagttacgtataggcttaataaataccaaataaaaaaggctgcaaatagttaattcgcagccttttttagtctgtatcaatcagtaattacattcgtttcggtaatgcttctttgataaccaattgacggcccataaattcagaaccgttcagttcgttgatggctttagcagcatcctgatcatcttccatttcaacaaaagcaaatccttttgacttacctgtttcacggtctttgataacctttacagaagttactactccgtaagcagacattgcctgttccaaatctccttccttaacacggtagttaaggtttccaacatacatattcatagtgaaaaaataaaaataaataaaataaaaaatactctctgaatggtgattatgaatgagatagggggattagaacgacagagagtttacgtaagtgctatgcgtacagaagtaaaaccttgtaataaaaatcactagctatattatctatcaccagttcgaccacaaaggaacgcataaaatttgaataagcaagaaaaaaagcgacttttttttcttttttttatttgtgccattttatttatcttttatcaggctactttctgttgtcaattagttttttttagcctgtgtatttggtaattgaaagattaaacactaattttgcaacctctttaatgagaaaatctgaaagaagtaacaattaaataaaataagtcagaatgaatatttcattgcaaaacgttgacaaggtaagtgcattgcttactgttaatatcgaaaaggccgattatcaggaaaaagtagaaaaagtgttgaagacttaccgtcagaaagccaacataccgggtttccgtaaaggcatggtacctatgagtcttatcaaaaagcaatttggtaaagctgtgcttgctgaagaagttgataagctgatgcaggaaaaagtaaacgaatatatccatgaaaacaaagtgaatatgctgggtatgccgttgccgaatgctgaaaagatgcaaccggtggattttgatactcaggaaaactttgagtttgtgttcgatatcgctttggctcctgaattcaatgctgaaatcacaaatcaggatacagtagattattatacgattgaagtggctgacgaattggtggaacagcaagtgaagatgtacactcagcgtgcaggcaaatatgataaggtagaagcctatgaagacaaagacatgattaaaggtctgttggctgaattggatgaaaacggtaatactaaagaagggggaattcaggtagaaggtgctgtaatgatgccgacttacatgaagaacgatgaccaaaaagcaattttcaacggagctaaggttaatgacgttttggtattcaaccctgctactgcatttgataacaacgaagcagaactgtcttcattgttgaaaatcaagaaagaagaagttgcggacgttaaaggtaacttcagcttccaagtggaagaaatcacccgcatggttcctgcagaattgaaccaggaattgtttgatcaggtgtttggcaaagacacagtgaagagtgaagaagaattccgtgcaaaaatcaaagaaggaattgccgttcagtttgaagcagacagcaactacaagttcttgatggatgttcgtgattacctgactaagagagtaggcaaacttgagttcccggatgctttgttgaagcgcatcatgttgctgaataatgaagaaaagggagaagcgttcgttgctgaaaattacgaaaagagcatcgaagaactgacttggcatttgattaaagaacagctgattgctgcaaatgaaatcaaggtagagcaagcagatgtcttgaatatggctaaagaagctacccgtcttcagttcgctcagtatggcatgttgaacattcctgaagaaatgctcgaaaactatgcaaaagaaatgctgaagaaaaaagaatcagtagaatctttagtgaaccgcgccgtagaaagcaaactggctgctgctttgaaagaaaaagcaacattgaaccacaagtcggttacaatggaagaattcaacaagatgtttgaataatattttggtgagataagcattgattgctaaatcttactaaaaaagggggcttttgaccaaaaattttcgttataagcaaaagtttcgatacgtcgaccgtatttttttgtacttttgtttgtttgaaaaaatggggttgaaagcctctttttgtgaataataactaaaccattaaattatggatgattttagaaaatttgctactaagcatttaggaatgagcagcatggtgctggatgatgtcattaagtctcaaggcggatatctgaacccttatattttggaagaacgtcagttgaatgtgacacagctcgatgtattctcgcgtttgatgatggacagaattatctttttgggtacagaaatcaatgactatacggccaatactcttcaggctcagctcctttatctggattctgtagattcaggaaaagatatatctatttatattaattcgccgggtggttctgtttatgccggattgggcatttatgacaccatgcaatttatcaatagtgatgtggctactatttgtaccggtatggctgcttcgatggctgctgttttgctggttgcgggaacagaaggaaaacgttcggcgctgacacactctcgtgttatgattcatcagccgatgggaggcactcaaggtcaggcttcggacattgaaattacagcacgtgaaataatgaagctgaagaaagagctttatacaatcatagcagagcattcgcatactgattttgataaggtgtgggctgattcagatcgcgattactggatgacggctcaggaagcaaaagagtatggtatgattgacgaagtgctgtctcgtaaaccggctctataatatataaggtataattacattaatattaagagaaaattggaagatagtaaaacaccaagaaacaagagaaaatgcagtttttgcggacgctctgaaaatgaggtaggttttcttattaccggcatgaatggctgtatttgtgacagttgttccgagcaggcatacgaaattaccaaagaagcccttcgtcagtcgcaaggaaaggctgaagaactcaacttgaaagagttgcctaaacctcaacagattaaagaattcctggacgagtatgttatcggtcaggatgatgcgaaaagatatctttcggtagctgtttacaatcactataaacgtttgcttcagaatgcagacgaggatgatgtagaaattgaaaaatccaacatcatcatggtgggtagcacaggaaccggaaaaacactgcttgcacgtacgatagcaaaactattgcatgttccttttaccattgttgatgctactgttttgaccgaagccgggtatgtgggggaagatattgaaagccttctgactcgtttgctccaagtggcggactacaatgtggccgaagccgaaaaaggtattgtattcatagatgaaatcgacaagatagcccgtaagggagacaatccttccattacccgtgatgtaagcggtgagggagtacagcaaggtttgttgaaattgttggaaggttcggttgtcaatgttccgcctcagggaggacgcaagcacccggatcagaaaatgattcaggtcaataccaaaaatattctgtttatttgtggcggagcgtttgatggtattgaacgaaagattgcccagcgtctcaacactaatgttgtaggctacagtgcagccaaagaaacggtaaaaatagaccgtggtaatatgatgcagtatattgcaccccaggatttgaagtcattcggactgatacccgaaataatcggtcgtctgcctattcttacttatttgaatccgttggatagaaatgcattgcgcagcattcttacggagccaaaaaattctattatcaagcagtatgtcaaactgtttaaaatggataaaatagaattggtatttcagcccgaagtattcgaatacatagttgacaaagctatcgaatacaaacttggagcccgtggattacgttccattgtagagacaattatgatggatatgatgtttgaattaccatcaaagaaggtgaaaagcttcgaagtgacgttggattacgcccaaaaacagatggataaagcaaatatctcacggttgcaaaatgcttagtatcaatatagtaaagggagagagaaagaaaaatgcaattcttctgaaaaatattactcgaaatattcgtgtaatttgagaacttgtttataactttgttagacaacaaaagatgtaaaaacaagaacggggaaccgcgaaaaactatttgagacaatggaggagaatataaatttgactaacgcactgaaaaagtattttggatttgatactttcaagggaaaccaagaagcaattatccgtaatttgctggcgggaaacgatacatttgtattaatgcctacaggtggcggaaaatcattatgttatcagttgccttcactcatcatggaaggaacggcaattgttatatctcctttaattgcattaatgaaaaatcaggtggatgccatgcgtaacttcagcgaagaagacggagtggctcatttcatcaattcttcattaaacaagtcggctatcgaccaggtaaaatcagatattttgagcgggaagaccaaactgctctatgtggctcccgagtcattgacgaaggaagaaaacgtagagtttctgagaggcgtgaagatttctttttatgcagtagacgaggcacactgtatttcggaatggggacacgatttccgtcccgagtaccgtaggatccgtcctattataaatgaaataggaaaggcacctgtcatcgcgcttacagctacagctactccgaaagttcgtatggacattcagaagaacttgggaatgctggatgcggcagaatttaaatcttcattcaatcgtccgaatctttattatgaagtacgccccaaaacgaataatatcgaccgtgacattattaagtttatcaaggcaaattcaggcaagtcaggcattatttactgcctgagccgtaagaaagtagaagaactggcagaaatattgcaagccaacggcatcaatgcccgtgcttatcatgccggtatggattcggcaacacgcaccgccaatcaggatggtttcctgaaagaagacatcgacgtaattgtagctactatcgcttttggaatgggcattgacaagcctgatgtgcgttttgtgatacactatgatattcctaaaagtctggaaggctattatcaggaaactggtagagccggacgtgatgggggagaaggtatgtgtattacattttattccaataaagatttgcagaaactggaaaagtttatgcagggaaaaccggtggcggaacaggaaataggcaaacagctgttgcttgaaacagcagcatacgccgaatcgtcggtatgtcgtcgcaaatcgttattacattattttggtgaagagtttacagaagataattgtggaaattgtgataactgtttaaatcctaaaaagcaagtggaggctcaggattcattgtgtgccgtgattgaaacaatcatagcggtaaaagaaaactttaaagcagattatataatagacattcttctgggtaaggaaactacggaagtacttgctcataaacatgaagagcttgaagtattcggctcgggcatgggggaagaagataaaacgtggaatgctgtcattcgccaagcgttgatagccggttatttaagcaaagatgtcgagaactacggattactgaaggtgacttcggcagggcataagttcctgaagaatccgaaatcgttcaagatagtggaagataatgattttgaagaggaagaagaagaaactccggttcggggaggtgcttcatgcgcagtagaccctgtgctttattccatgctgaaagatttgcgcaagaagctgtcgaagaagctggatgttcctccttatgttatattccaagatccttctctggaggcaatggcaaccatctatcccgttacgctggaagaacttcagaatattccgggagtgggtgcaggcaaagctaaacgttacggtcaggagttctgtgtattaataaagaagcactgcgaagaaaatgagattgaacgtccggaagatttgcgtgtccgtactgttgctaacaaatctaagttgaaggtatctatcattcaggctatcgaccgcaaggttgctcttgatgatattgccgtatccaaaggactggaattcagtgaactgttggatgaggtagaagctatcgtttattcgggtactaagttgaatattgactatttcctcgaagaaattatggatgaagaccacttggatgatatctatgattatttcaaagagtctacaaccgataaaatagacgatgcaatggaagaattgggtgacgactatactgaggacgaaatccgtttggttcgtatcaagttcatttctgaaatggcaaactaagcaaaggattaatatacaaagaaagccgggtttctaagcagaatccggctttctttatattgtatcgttaattactattaaatataatacttctactaatttatttagtagattgtattaaactttgcttatatttgtagcgtatctaactgataaacaatgaaaacaatgaaaaaactgacagcaaaggaagaagagattatgaatatcttttggcaacacggaccaatgtttattcgtgagatgctggccttttataaggaacctaagcctcattataataccgtggctacattggtaaaactgttggttgagaaaggatttgtaacttttcgtgtgtggggtaatagttatcgctatgatgcgatagtctcggagaaagaatacaaaggggcggcattgagtgatgttatttcgcaatattatgacaactcttatactcgggtagtgtcacagttcattgaggaggagaaaatgggactggatgaactgaaggcgttgatagcaaaaattgaaaaaggataggaataaaagaaatcgttatgactgcttttattatttatatattgaaaagcaccctctgtctgtctgcgttttatttgttgtaccgactgctgttcaggggaaccactcattttcggtttaatcgccgggtcttgttgttgggcttgttggtgtgttcattacttcctttggtacatttcactttagaggaagaattacctgtgcatcgttcgttgcgtatgttggatgaggcattgactaaagttactttgccccaaacaagacaggctgaggtgggagcggttgtttctgccgatgccggagaaagtacatttctttattcccggtttttcttttttctttatgtcggggggtgttcttttgttttgctcctgtttttggcggcatacatccgtatgtggcatctgataaaaagcgcttctgtatatcgcgaaagtggtgtatgttggatagtgacggacaggcaggtaagcccctttagttggggaaattatattgtgatgaaccgtaaggattatgaagcttatccgttgatacgcttgcacgaacagatgcatgtattttatggccactcgtgggatagcctttggatgcagttattacaggttttccactggttcaatccggtggtatggctgtggcagaaagagttgcgtgacctgcatgagtatcaggcagaccatggagtaatcagttgtggtattgatgtaaaaacatatcaattattattggtggaaaaagctgtgggcacaaggctctactctatggcctgcggtttcgaccattgttcacttaaaaaacgtataactatgatgatggaaagaaaaacacccagatggaagcgcttgtatatcttgatagcgtttccgttggctgcgggagccgtgttcgttttcgcccagcctaaagtagatgcggctttacaaacagtagtagtgagacaggcggccatgtgcgacagcagttcgctgaatatgtcggtttcggcggctgattatgctggactggcgccggatgccgttgcatttgatgtgtatgttaaccagcgcaaccagttgatgattggcgtttttgacaagatggatgtggtaaagttggaaggattggcagatgctgtatcgaagagattggtagccgacttctcttcccgatatgccaagaacaaggaggtgccgcagatagtggcttgcatcacagccgaccggaatgcgaagatgggttgcgtttacgagactaagcagcagataagtcgcggatatgagttggctttgcgtgagttgagtgcggagtattctgccgaactgttgcagcatagtctttccaaccggattgtttataatcctccccggtcttatggaaatccggttgcaaaagtggcggataaaaacaagcgcttggaaggatttggcatcacgattttcatggaaggagaagagaaaagaagtttgagagattttactttacaggaattggaatctgaaatagcttccttgcttgaaagggtggacatatcgaaaaacgtgatatccatcggtctgaatgtgccgaaggatgtgcaagaaggtatggtgtatgatgtcaagcaggtgttgcgtaagttgtatcttttgaaggtcgatgtagctcattaaatcttgagaattgacttctgccggtgatagtaatgaagtttagaaaaaaactgctttcacacaaaacgaggcgtaacttgttgatatatagtgtagagaggtgaaatgtactatacgctatgtgtgaaggcagatttcacaaactttatttggatgtgcaatcagggatgtcttatttgctgttgtgcccattgccactccgaaaagaccttggagtttttaaaaaagttcaaggtctttttttaaaacttcttgttctttttacaaaacttcttgttctttttacaaaacttcttgttctttttaagggactgtatactgatttattaaattgggtttgtttgtctgtatctccaatcatcttccccactttttttgaatatagagaatttgtactatttttgtttttggaaatggcaataggtactttgtcccattcagatatttgctgaaatgagcactctaggactaaattaaatctattaaaatacgaatgaaaacgaatctgatttgtgtattgcttttatcctttttcttagtaaaaatggatgcttttgctcaaaaagcagttattaaagtagcttgcgttggaaatagtattacttatggagctaacattcccaatcgcaataaaaatagttatccggctcagttgcaagcttatttgggaagtgattacgaggtcaggaattatggaatttcgggttgcactcttttgtcaaaaggggattatccttatgtaaagacccgtgcatttgcagactcacatacatttcagccggatattgtgctcataaaattaggaaccaatgataccaaacctcaaaactggcaatataaagatgattttataggagattatcagcgacttattgatagttataaatcattaccttcacatccgcgtatcattttgctgactcctgtccgttgctttctgacggatgattcctccatcagtgcagagcggatagctgcttcggttcgtcctatgatagaagagattgcatggaaaaacaagttagaaatactcaacctgtttaatttgttgggtgaccaatgggaatcacatcttttaccggatcgcttgcatccgtcttctatcggtgccggaaaaatggctcgtcaaataggttcttatttgattcttactgcagggtgtacagaacaagataaagctgattggttgcaaggtaaagaagaatttaattttcatggtttctgtggatatcagtttgattgtgacggggctgcttgcaagattgtgaaaccctataaggaggcgaaaggaaagccgtgggtgatgcgtgctcgattttggggacatcaacctcaaacggatattgcgttgttggaacagggatttcatattgcctattgtgatgtggctgatatgtatggggcggacaaagctgtcaaacgttggaataaattgtatgcaaagatggtaaaagaaggcttccataagaaagttgttttggaaggtatgagccggggaggattgattgtctacaactgggctgcacaaaatactgataaagttgcctgtatctatgcggatgcgccggtgatggatattaaaagctggccgatggggagaggtgcttcggaggggtcggatgatgatgttcggcaattgctttcagcatatggattttcaaatgaagaagcagctttaaagtggcggaaaaatccggtgaatcatgccgggaaaatagcaaaagccggtattccttgcttgcacgttgtgggcgatgcggacaaggttgttccggttagtgaaaatacagctgtatttgaagaagaaatggaacgtttgggagttcctgttactgtgatacataaaccgggagtagggcatcatcctcattcgttgaataaccccgaacctatcgtacattttattttatcggctttacatcgtctccccaatgaatgtatccatgctgttcccgggaatgagttccgttccggggccggatgggtaaaaggcgttgaatggcatgaggtggatgctgatattaaagcaactttggcaaacaggaagctgaaattattgctgttgggtaattccattactcagggatggggaggcacccgaaaagctgtagcctataagcccggcaaagaggcaatggatagagtacttggtgagaagacgtgggaaagtgcgggaatatcgggtgaccgtactcagaatcttctttggcgtatccgctatgatgattataattgttgtaaaccggaggttgttgtgatagctatcggcattaataatttaatatcaggtgaaaatacaccggaagaagtggcggaaggtattgtcgctgttacaaaggaagcggttattgctttccccgattctcgtatccttcttttaggtcttctccccgcaggtaaggagaaaggaagtgcaattcgcatgagttgtgataaaattcatgccatattgaaaaaaaagaaattggctggcgctgaatatgtgaatcctaccgaatggttcttggatgcagatggaagaatacgtgacgaactttatagcggtgattatacacacttgacggaggaaggatataaattaatggctgataaaataatgaaggctttgttagagcagggttgattattttttttgctaaattttctttcaccctaacaaaaaaatattctatcattttccggtattgaataaaactcgtatatttgcacgcaataaattcaaaacgcattaagccctatgtcatttattgcagataaaattgtaatggacggattgacttacgatgatgtattgttaatcccagcctattctgaagttttacccaaaacagtcgaactctcgactaagttctcacgcaacatcgagttaaaagtaccttttgtgactgccgccatggatacagtcactgaggctaaaatggctattgccatcgctcgtgaaggcggtatcggtgttattcataaaaacatgtctatagaagagcaggcacgtcaggtagctatcgtgaaacgtgctgagaatggtatgatttatgatcccgtaactattaagagaggttctaccgtgagagatgctttggcgctgatggctgagtatagaatcggtggtattcctgtagtggacgatgaaagatatttggtcggtattgtcaccaatcgtgaccttcgttttgagaaagatatggataagcgtatcgatgaagtaatgacgaaagataatattgttactaccaaccagactaccgatatggaagctgcttcacaaattttgcaggaacataagattgagaagttgcccgtagtggacaaagatggtaaactggtaggcttgattacttataaggatattacaaaggcaaaagataaaccaatggcttgtaaagatgccaaaggaagactgcgtgtggctgccggtgtcggtgtgacggtggatacactcgaccgtatgcaggctttggtggatgccggtgccgatgctattgttatcgatacagctcatggacattccaagtatgttattgagaaattgaaagaagcaaagaaacgcttcccgaacattgatattgtagtaggtaatatcgcaaccggagaagctgcaaaagcattggttgaagccggtgcagatgcagtgaaagttggtatcggtccgggttccatctgtacaacccgtgtagttgccggtgtgggcgttcctcagttgtctgctgtgtatgacgtggctaaggccttgaagggtacaggtgttcctttgattgccgatggtggcttacgttattcgggagatgtcgtaaaggctctggctgccggtggatatagtgtaatgattggttcattggttgccggaacagaagaatctccgggtgatactatcatcttcaatggtcgtaagtttaagtcatatcgcggtatgggttctttggaagcgatggagaatggttctaaagaccgttacttccaaagtggaacttccgatgtgaagaaattggtgccggaaggtattgctgcacgtgttccttacaaaggtactttgtacgaagtaatctatcagttggtaggtggtttgcgtgcaggtatgggatattgtggcgcagctaatattgagaaattgcatgatgccaaatttactcgtattactaacgccggtgtattggaaagccatccgcatgatgtagctatcactagtgaggctcctaattacagccgtcctcaataaaatgaaaaaataatgccgcgttatttgctcggtgttctcttgcttctccttgtgtctgtgtccgaaatgcaggcgcaaggagatgtcgtgttgtatattgagggtaagcctgtctatcgttccgaattcgagtattattatcgaaaagctcccaagcagactcccgaggcttatttacctgcttttatcaattataaactgaaggtaagatacgctatggatagtggtttggacactgtctctgcttttcgcaggcaactttcgttttatgaaggtcgtttggtgaaatcgtatgtggtggatgccggtatggaggaacaggaagcccgttttatttatgaacggaacaaacagcgacttcaaacgaatgattgggtgaggatcgctcatatcagtaaatatttgcctcaaaatgcgactccggccgcagaacaggcggcgcaagctgtaatggattctatttattcagcgttgcggagtggggctgatttttcgttgttggcacgccgttattcagacgatgcagacagccggcaagtcggaggcttgttgccttggatgcctgtcaataagaacatgcaggaatgggtgaataaattgacagtgctggaaaagaataaaatctcggttcctttttattctcctttaggtcttcatatcgtcaagtgggtagagcgtaagccttttgcctcatatcacgacaaaaaggaggaaatacaagcatatatggagcatggaggagtttgctcttcttcggtcagaaaagatgttttagccctttaccggtcaggggctttggccgggaaatatcccgattgggcgttacgtttgcaagaggtacatgatggtttattggtttcttatctcacgcggaagtatcaggagacagaatatgcttgttccgaagccgacttggaacactatttcaagcagcataaatcggattatgcttgggatttgcctcgatataaaggagctgttattcattgcaggaataagaaaatggcttctgtcattaagaaatatttaaagaaaaagccgatggaggagtggaaatccgctttggaaaagttgatgatgcacacggcggttccgcaagcaagcatagaagtgggcgtatttattatagggaagaatcaatatgtcgataaattagtttttaagtgtggaagttttgaacaagttcccggtttttcttatacctttgtgatgggtaagaaattgaaaaagggaccggagagctatttggatgtaaaagaatcggtaatccgtgattatcaggctatacatgaggactcttggatgaaagaattgaaacgaaaatataaggttgaaattaaccaagaggttttaaaaacagttaataataacggaagtaattaattattgcagtatcttcgttcactattttaatgctttatgagtatcgtgaaaaactggggagtaatacttgtgattgccgctgccatgactggatgcggtcaggagcataaccataaaggaaaaactcctttggtggaagtgtccggcgaatttctgtataaggaagatttgcaggcggctcttcctctcaatatatcgaaggatgatagtgtattgtttgccgaacactatatcaggaactggatagaggatgcgctgctgtttgataaggcggaggggaatattcccgataatgataaaatctccaaactggtggaaaattatcgccgtgcattgattatgcacacttatcaagaggagttggtgaatcagaaattggcaaacgatatcagtgaagaggaaataaatgcttattatgaaaagaacaaagaactgttccggttggacaatccattggtcaaagggctttttataaaggttcctctcagttctcctgatttgggaaatgtgcgggtgtggtatcggaagaataatcaggacgttattgaaaaattggagaagtatagtttgcgtaatgcagtgagttatgattatttttatgaccgttggacatctgtgcccgatgtggctgccaagatacctttgaaggtgcttgatacggatgcaaactatttggataaaaatagaaatgtagaagtcaaggacacggccttttgctatttcttacatatagaagatttcttgggcaaggataaacaaaagccgttggactttgccagagatgaaataaaagagattttaattaatctgaagcgtgtggaatttattaacaaggtgaaagaggacttgtatcaacgggcttcggatagaaacaagattatttattattatttgaattcagatgaataaattgatgtgtactaaagtttatgcactgttactgatgctgttcgctgctgtttctgtatatggacaagacaacgttatagacgaagttgtgtgggtggtaggcgatgaggctatccttaaatctgacgtagaaagtgagcggttgaatgctcagtatgaaggacgcaagtttgacggagatccgtattgtattattcctgaacagcttgctgttcagaagttgttccttcaccaggcagctatcgatagtattgaagtttctgaacaggaagtgattggtcaagtggaaagacgtaccaattggctaatcgaacaagtaggaggttctaaggagaaattggaagagtattataataagacttctacccagatacgcgaaatgcttcgtgagaatatccgcgatggcttgactgtgcagaaaatgcaacagcatattgtgggggagattaagataactcctgccgaagtgcgccgttattttaaggatttgccgcaagacagtattccttttgttcccactcaggtggaggtgcagattgtgacattggaacctaaaattccgttggaagaagtagagcgtgtgaagaaaactttgcgtgactatacagatggtattaattccggtaaaatgtcatttgccacatatgcccgtttttattctgaagatcccggaacggcgcgtcgtggcggtgagcttggctttatgggcaaaggagaattggtgcccgaatatgccaatgtcgcttttaacttgcaggatcctaataaggtttcaaagattgtagaaactgagtttggttttcacattatccaattgattgaaaaacgcggtgaccgtattaatacccgccatattttgttgaagccgaaagtggaggaaaaagacttggaggcagctttagttcgtttggattctattgctgatgacatccgcaaccagaaatttacttttgatgatgctgctacttatatttctcaggataaggatacaaagaataaccatggtttgatggccaacaagaataccggtacggcgcgttttgaaatgcaggacttggcacaagtttctcaggaagtggccaagatggtggaaaatatgaacgtaggtgagatatcaagagcattcactatgataaacgataaaggaaaagaggtgtgcgccattgtaaagctgaaaagtcgtattaacggacataaggcgaccatttcggaagactatcagcggctgaaggctatcgtcatggaaaaacgtagtgaagataagcttgaaaagtggatcaaagaaaagcaaaaacatacctatgtgcgtattaatgagaagtggcagaaatgtgattttaaatatccgggttggataaaagaataaatgtagtatattgaaccgtatgcttgaaaaaagaaaaaaaaataactcttcgagcaggcataggatacttttgtttagtgtcctgtgcctgtttgtcttttgcttgttggctcaggttaatcccactaaaaaggctgaaccgaagcctgccaagagtaaagtgtatctgttgcattccgatgtattgaaaaaaagtcctttaaatcctgaccctgatgcacagatattggttggaaatgtgacttttcgccatgatagtgtttatatgtattgtgacagtgcctgcttttatgaaaagaccaattcgctggaggcttttgataatgtaaaaatggtgcagggagatacgctgtttttgtatggggattatcttttttatgatggaaacacacagatagcccaagtgcgcaataatgtgcgcatggagaacaagaatactacattgctgaccgatagtctgaactatgaccgtatttataaccttggttattatttcgatggcggtacgctgatggatgaagaaaacgtgttgacttcggaatggggagagtatagtcctgctactaaacagtcggtttttaattatgatgtgaaacttgtaaatcctaagtttacattgacttcggatactttgcgttataatacagccagtaagattgccaatattgtaggtccgtcggatatcgacagtgataataaccatatttattcggaattgggtttctataatacccagattggtcaggcagagttactcaatcgttctgtattaaccaatgaaggcaagcagttgacgggcgacagtttgttttatgaccgtgtgaaaggatatggagaagcttttgacaatgtattgtttaacgataccattaataaaaacatgcttaccggtgactattgttattacaatgaactgactaaatatgccattgcgacccaaaaggcggtggcggtagattattcacagggcgatagtttatttatgcatgccgatacgttgcagatgtatactttcaatctgaatacagattccaccttccgtgaaacaagagcatatcataaagtgcgcatgtaccgcacggatgtgcagggagtatgtgattcactagtcttttcgtctaaagacagttgtctgactatgtattatgatccgattctttggaataataatcagcagttgttgggtgaggaaattatgatttacatgaatgacagtactattgattgggcccatattcacaatcagactctatctgtcgaaaaattggattctgttaattataatcaggtaacaggaaaagatatcaaggcatatttcaagaatggagagatgcatcaggtagatgttatcggttcggttcgtgttgtttattatccgatggagagcgacagcacattgattggcatgaatgtatcggagacaagccttttgaatatatatttggaaaaccggaaaatgaaaaagatggtcatgagtccgaaatcaaatggtactctttatccgatgcttcaacttccacccgataaaatgaaactggaaaattttaattggtttgactatattcgtccgctcaacaaagaggatatctttaactggcgcggaaagaaagccgggcaggagttaaagaagagtaatcgaggtgccgcgcctctgccaaatcaggacttgtttaataaaaagaagaaataactatgggaatgtttaaaatggaaaaacctcgtcgtttcaaccaccaatacatatatgtggatgaacgcaaagagaaattgcagaagatggaagagaatgccaagcgtgacttgggtatgcttcctccgaaagagttttctcccgaagacattcgtggaaagtttattgaaggaaccaagcacttgaagcgcagaaaagagagtggacgcaagccattgacttatggggctttgtttatagctattggtattttactttttatcctgcactatctggtgaccggagaattaagtttttaatgaatcattcgtagttgtattatgagcgatatcatacgtttgctgccggactctgttgctaatcaaatagcggcaggagaggtgatacagcgtcccgcgtctgttataaaagaattggtggagaatgccattgatgccggagcgcaacatatagatgtactggtaacggatgccggaaagagttctattcaagtgatagacgatggtaaagggatgtccgaaactgatgcacgtctgtcttttgaacgccatgcaacttctaagatacgggaagcagctgatttatttgctttgcggacaatgggattccgtggagaggctttggcttctattgcggcggtggcacaagtagagttgcgcacgtgtgtagaaggagaagagttgggcaccaaactggttattgccggttctaaggtggaaagccaggaagccatatcatgtcctaagggtagcaatttttgtgtgaaaaatctgttttttaatgtaccggcacggcgtaaattcctaaaatccaatcagacggagttgagtaatatattgactgagtttgaacgcattgcgttggtcaatcccaatgtgtcttttactttgtatcataatgatgccgagttgtttaatcttcctgccattcagttgcgtcaacgtataatgggtgtgtttgggaagaaaataaaccaggatcttttgtcacttgatgtggatactaccatggtacgtatctcgggatttgttgcccggccggaaagtgcccgtaagaaaggagctcgtcaatacttctttgtaaacggacgctatatgcgccatccttatttccataaagctattatggatgcatacgagcatctgataccggtgggtgagcaagtatcttattttatttactttgatgtggatcccggcaatattgacgtaaatattcatcctaccaagacagaaatcaaatttgaaaatgaacaggccatttggcagatattggcagcagctgtcaaagaaacattaggtaaattcaatgctgtcccttctattgattttgatacggaaggtatgccggatatccctgcattcgagagttctccttatgccggaatacagccgccgaaaacaacttataatccggattacaatccttttaatacgtctgctgtgcctccttcttcttactcctcaaaacccagtcgtgattgggaacaattatatgagggcttggagcatcattcgtcggcgcaacatatacagaagtcttacccggatgatggggattattttacggcagcttcaatggagcaaccggttactcctaccttgtatgatcattcggaagaggcggcaatgggagagaaatcatctcaacattatcagtttaagggacgctttattcttacttccgttaaatctggtttgatgattatcgatcagcaacgggcacatattcgcattctttatgatcaatacctggaacagataacacgtcgacagggagcatcgcagggcatgttatttcctgatattgtgcaattcccggtttcggaagtacctgtattgcaggaaatcatggaagatttgtcatacttgggctttgaactgactgatttgggaggtggcagttatgccattaacggcataccttcgggcattgaaggtttaaatccggtggaactgattcagagtatggttcatactgctatggagaagggaggtaaagtgaaagaagaagtacagagtaatctggctttgacattggccaaagctgcggctattgtgccgggacaggttttgacgaatgaagagatgaatggcctggtggatgggttgtttgctgtagctactcctaattatactcctgacggtaaaaccgtattgtccgtacttcaggaggatgaactggaaaagctttttaaatagatgtgataaaagataagaggggtgccaaaagtaaaatggtctgtcaaattgttaacagtaggggcagggtttgcctgcccgaaccaacggtcactaccttgggagtaatacacaaggcaagttgttttcgggcgagcgaacctcgcccctactagtaaaatgacagtatcatccacgttttggcacaccctctttggcttaccttttttaaggcagagtattattgggcttcgataattacacgacggttgaatgccggaggagtcaatgtattaacaccgcccataccgctaataatcatgttactcttgtttacaccaagtttaaccaattcgtttgcaactgtatttgcacggtcttcactcaattgtttattccatgatgcactacctgtgtcgctgtcggcataaccggttactttcagtttgatgcccggattgtcttttactaagttggcaatctgttgcaagttgactgtgctgttttgaggcagagtagcagaaccaatttggaagaatacagactgcggaaccggagtcagctggttgacggtaacttgttctgtaacaacttcgttaggagtatttgcaagttgagccttcaactgacggttttgttcgatttgttgagccaaagctgcattgatagcatccatttgggatgctgtaagagccatcattgcatccacgtcaggagcaggtttgaaacctctttgcggaaacttataggtcacaccgactgatgcccccaacataacgtccaatcctttgttcagagttttgccatcaaacttgttttcagctcccataccataaagctccaagtttaaatcccatgcatctgctacatggaaggtattaatcaaaccgaagttgaatgccaatgaattaaggtgaggtttgtcataagaatgagcgaaaccgaaacctacgaatgggacggcatcatatatacggtcaggattataaccggcaagcatattgctgatgttgaacaagatatcaccatgtaagttcatatagttgaacttatcctgatagtatccttcgctcagcatatgaggcttggagtatgcagaaggttcgcttgaaaaactctttgactgcaaaccgctatactgcagacgcaatcctagtccgggagtgaaccatttgccaatagacacattcagagcgggagcgatacgtttgccgaatttgcccaggtcggattggtcaccgaataatacttgtgcaccgcctcctacagagaagaaccaattatcaaaaaaacgattggtttccactttgtacttatctaccggaacctccataacatctacgctttcgctgacgatagcattttgtgatttgttgctctgctgcgcgaacgttgcagaactgatactggcaattgccagtgcaaacattaattttttcatactcatttctattagttaaattattgtttaggtatatcttcccaatttcaactaaataacatgagcgttgaaaaaaagtttgtgcagcttgaatatttaatatttttttatgaaagaaggctaaaaaggtactgcgattcagtgctgtgttctgcatcaaagcagaatccttcccagttgaagctttttagctcttcaggcttttcaatgcggtttttgatgatatagcgtgtcatttctcctctacacattttagtataaataacgacagtcgttaatttcccttttttccaaacctgaaattcgggtgtaattacgcgtacctgttgttctatacgtttccagtcgaaaaggtctttcatttcgttgctggcaaggttgaccaatgtgcctccttgtgctttgatggatttgatgaactcatccgtcaatattggtttccaataatcaaacatagatattccttcatgttctggcagtctgacatctccttccaatctataattctttatcaggtcaagcggacgaagtaatccatataaaaaggaagtgatacgcagatgatcttgtacgtattgaaaatcttctgctgtaaagtcttgaggacagatacgtttgaatactatgcctgtataggctaacaaggcaggaagagctttgtttgtttccgaacagaaatcttgaaaccggagataattttcggctgctattttactgtttacccgtaacaggcgttctagttcttcggcagagaacctggacataccaagtgcgtgctgaatggcttcagcttgaaattgtggtgtgccggtggtagggacttctactttagaatgatccgtcattgtcttggcacacgaaataaaagtcatcataggctaaaaaatgatatttcagtcggcaaatataggaaaaacagatatatttgtcttcattatatcgtaaattaaatattcagaattatgaaaatgaaaaagttaggattattattgatgttgttatgcgccagctttgcaatgcatgcacaggaattgaagaagggagataagttaccggattttcagttgaaatcatcagtctatggagatgtttcatctgccgatttaaagggtaaggtggtattggtcagtttatttgccacttggtgcggcccatgccagttggaacttgcagaagtacaaaagatgctttggcctaaatataaagataataaagactttgtattgttggtgattggtcgcgaacatacggatgaacaactgaaggcttataatgagcgtaagaaatttactttcccgttgtatcctgaccctaaacgggaagttttttcactttttgcagaaaaatctatccctcgtacgtatttgtttaataaggagggagaagcaatctatacttctattggatatgaaaaagaggagtttaatcatttgatgaataccattgaagaagcgttgaagtagtcaaaagctattattgaaactaattttaattctaatacttatgaaactcaaatcacttattgtcgttttgttgtgcattgttgtgtgtagctcctgtgaacagccgccgatagaagcgtatgccgtgcttcctcagccgcaagagattaattatgttcagggctttgtgaagttgaaggataagccgatggttgtttattctaatgaattgtctaatgaggctttgttgctggcttcctatttgaagaatgattttgcagtggaagtcactttggaggaagggaaagacaaaggagatgttattcttttattggattcgaccgttttacctgataaaaaaggtggatatgtattggaagctgccggaagccggattacaattaaggcttctactcccgaaggagtgtttaacggtgtgcagactttgcgccagattattaaagaaagagaaggacgcctgacagttcaaaaagctttggtgacggattatccggctttttcctggcgtgctttcatgttggatgaaggtcggtatttcaaaggtaaagaagtcgtcctcaatctgttggatagaatggcagaactgaagatgaacgtatttcattggcatttgacggatgatcagggatggcgtattgaaatcaagaaatatccgaaattgacagaggtcggtgctttccgtgactcttcagagattaaccatttccacagcaatgtgtttgatggcaagcctcatggtggtttttatactcaggatgatatcaaagaggtagtggattatgctgccaaacgccatattatgattgttcctgaaatagagatgccgggacatgccagtgctgctattgcttcttatccatggttgggaactaccggaaagcagattaaggtgccttgtaactttggggtacattacaatgcttataatgtggctgatcctcgtgttatccaatttcaggaagatgtattggaggaagtaattgcattattcccttctccggttattcatatcggtggagatgaattacgatataatgcttggaaggaatcaccgatggtacgcaattatatgaagcagaacaagataacttcaccgggtggcttgcaggtcttttttacaaataacatttctaatttcttggcttctaaaaaccgtcacatgatgggatggaatgaaattacgggagctcaggtaaatgattatcaaagagacggaagtggtgcttcacaacagcaattggctcctggcacaattgttcatttctggaaaggggagcctgaattgattaaagaaactattgagaaaggatatgatatcgttaactcttatcatatatatacttatctggactatgattatgaatctattcctttgcaaaaatcgtatgaattcaatccgattcctgagggactgacagaggctcagcaaagtaaagtgttgggtatcggttgccaaatgtggggtgaatttattcctacggttgaaagtatgaataaaaagatttatccgcgtcttgctgcatatgccgaagtgggttggacaaatccatccaataaggattttgatcgtttccgtaactcgttgaattcatttatcgggcattgggaaaagctgggtattcaattgggtgagtggaagtaataaaaaagtggggttgtgtctaaacgttgatgatgctgtcatttggctagtaggagcgaggttcgttcgtccgaaaacagtttgcttggtgtattacttccaaggttgtgaccgttggttcgggcaggtaaaccttgcccctacagttgaggtttgatagaccggtttagttttgacacacccccgtttcttgtgagagtgcccgatagggctagagtgaattaatctatttataagaaatccatttaatcatctcttttagtgtcggctttttgccatacatcaggatacctacacgatatatttttcctgaaatccagatgagtgcaagtgctgaggcatagagcaggcaaagcgaaagaataatttgccaggtcggtgcatccagcggaacacgtaccatcatgacgataggcgaggtaaatgggatgagagaacaccagaaagccagcggaccgtccgggttatcgccactgtagataccggcgtaaagggagaatatcatcagtatcataatgggagtcataaactgttgcgaatcttccatggcattgatagaggctccgatagcagcaaagatggaggcataaatcaggaatccgccgatgaaattcagggtaaagagggttccgagtttcagcagattcaggttttgtaaggcactaatcatgccttcggtaccttttagaatggctgcatctccaccgaaagtattgtcggcgatacccaaaagtacaacaagcagaataccccatatcagcagttgggtaatgcctaccagaccgataccgataatcttgccaagcatcagttgaagcggcttgaccgatgataccattaactcgacaatgcggcttgtcttttcttccatgacactctgcatcaccatacctccataagacataacgaacatatagataaggaaggtaagtatcataccaacggctaccgcaatgccggcatttgattcgtttgcactgccgtcttcactccatttgatggtacgtgcactgtatctcttatcaaaatcctgcatgatattttgtaattcggggatattgtaacttgtcagtttatcgtgtctgatttgttcattcagcgtattgtttaccaatgacaacaaacccttagtcacttctttgcgcgaatagatggcggctgctgtgggattttgaatcaggtcttcggtaatttccactacggcgtctatgcgggtagtatcacttcggtattcgggcaacatttcttgtccggcgatgaaatgataagattcatcatccttgaattgtccgatgtacttttgtgtgtggtcaatgattactacttgtttaacttcatcgcttttcaccgtcgacagcagtgcaggaacaaaaatgagagctgcaaagatgaacggcatcaggatggtaagaagaataaatgatttcttacttactcggttcagaaattcacgttgtataatgattaatatcttgttcatggctttgggcatttagtgtttatccaaaccttctaccgtacggatgaatatttcattcatggagggcaggcattcggtaaaggagattatttcggtttgttgggctatttgggtcagtaatgccgagttggacatatcctgttgcttttgtagggtatatcggatttcctcttcggtgggctgactgtctacaatctcaaacagaggggattctttcaagggttgtcctttcggagtgcttaagatataggtattggctttgaaacgagaacgcacctctttcacattcccttgcaacaccacttcagaatggttgatgagtgcaatattgtcacatatctcttccaccgaagccatgttgtgcgtggagaagatgatggtatgtccttctttcttcagctccagtatttcacgcttcagcagttcggcgttcacagggtcgaagccggagaaaggttcgtcgaatatcagtaattgaggtttatgcagtatagtgatgataaattgtactttttgctgcatccctttggacagctcttccaatttcttgttccaccacggagtgatttcaaacttttcaaaccatagcttcagtcgtgaagtggcttctgctttgctgagacctttcaattgagccaggtagatagcctgttcgcccactttcattttcttgtataaaccgcgttcttcgggcagataaccgatatggtagatgtcttcggcctgtgacagatgtccgttgaagcgtacttctcccgaatcgggggccgtgatgcggttgatgatgcggatgagtgtggttttgccggcaccgttcggccccagcaatccaaagatttgtccttcggggacctgaatgctgacaccattcagcgcagtgtggttggcaaagcgtttgaccacttgatgcgtttctaagaaaaagttattcatagcttttgatgtttgttgttttgttgaatcaaaatgtcaacgttatgtttgttttggttaactcgtggcaaagttatggattttttcttataactgtgagtgaaaaagggaaaataattaggttgattcggatttatctcaagaagaaatagctgtctttacttttgcagaatcctaaaggtaatcagtatagagcagagtatttattccatcggtatacagaatttcgagagccttcgccaagacggttatcatttcaacttcaagactcccggcatctacaatcggggtgaatgggcggcgaggcatgcgaaggggaaaccattcatctcgaaatgccgatgaataggacaaaaacggatgggggaagggggaaattcctgttttgaagagaggggcacggcttcaaagtgtacgttgttggagctgttgatgtaagataaaataggttaacttttttttgttgcgaagaacagcgtgacggtttattttttagctttgttcatatattaactttaaatataatgatgtatgaaaaagattgtagttttatttgctttatttctaattcttggtgcaaatatttattgggattgtattgattcaacaggaaacttgtcagaacttcaactagcaaatattgaagctttagcaagtggcgaaagtggagcttccaatacgggacctagagaagaaaaaaaatgttatggcggcggacataaaatggtgtgtcgttccattaactccgaatcatgtactgactctgattgttattaacttctttttttacgcctttgtattaatactgagcagaatttggacaagacaattaaagccttatctaaattattcattaatgattgtgcttgttaaaaatgaaaaatagaattatacagatatttctactaggattattatcagcttgttctgggaataaagattctgttgaaacagttcctttaaattgtgatgtatataaaataacaatacctcttgatgaagcttattatgattccgtcactagtcacattgcagacacttcattcgttgttctgaacgaaggaaacaacatcatgttctcttgtgccgacaaaataatagaatacaataacaaatattatattctagaccaaagcgcattacgaactgttgtatcctttaaaaaggatggtactccaatattagtcccatagtagtatcttatcaaaaaaagagggtgtgtcagattgaagacacaccctctttttatttattgggaaggattatttataatcctgccagctcttgatctgaatgtccttttcgctcatttcgcagaatgcttcgatgaaggcacttgccagacgagcattggtaatcaaaggaatattgtggtcgattgctccgcgacgaatcttataaccgttagtcaactcacgtttagaatggttcttcggaatattgacaatcaggtcgaacttgtgttcggcaatcatcttcattacattattctctgcatcgggacgttcatcaggccagtaaacaggaatagtgtttactccgtgtgcattcaggaaagtagcagttccggcagttgcataaatctcgtatcccttatttgccaacatacggctggcttccagcaaatctactttagacttggtagcacccgacgagaacataactgattttgtaggaattttaaatcctacggcgatcagtgaattcagcaaggcttcatggaagtcatcaccgatacaacctacttcaccggttgaagacatatctacacccaataccgggtctgccttgtgcaggcgtgagaatgagaactgagaagcttttacaccaatccagtcaatgtcgaatgccgacttgtccggtttgctgtatggagcatccagcatgatgcgggtggctgtttcaataaagttacgtttcaataccttggaaacgaacgggaatgaacgtgaggcacgcaggttacattcaatcacttttacttcattgttcttagccaggaactgcatattgaacggaccggaaatattcaattctttggctatgcggcgaccgattttcttaatgcggcgggctgtctcgaaataaatcttctgagccgggaataccaaggttgcatcacccgagtgtacacctgcgtattcaatatgttctgatatggcatattccactacctcaccgttttgggctacagcgtcaaattctatttctttggtgtcttgcatgaactgtgatacgactaccggatattctttagaaacttccttggccatctgcaagaattcttttaattcgtcttcgttatagcatacattcatggcagcgcccgagagcacgtatgaaggacgaaccaacaccggataacctactttgttgacgaactcttccatctcttccaggctggtcaattccttccaagccggttggtcaatgcccagttggtcgagcatagccgagaatttatgacggttttccgcacggtcgatagaaagaggtgaagttcccaatacaggtactgactgacgatgtaatttcatagccaggttgttaggaatctgtccgcctaccgatacaatgacaccacccggttgttccaggtcaatcacgtcaagtacacgttcgaatgaaagttcgtcgaagtacagacggtcacacatgtcatagtcggtagaaaccgtttcagggttatagttaatcatgattgatttgtaacccaatttacgtgctgtctgtacagcgtttacagaacaccagtcaaattctacagatgaaccgatgcggtaagcacccgagcctaatacaaccactgatttttcgttcttataataattgacatcataacctgtggtagcgtatgtcatatacaggtaattggtcagttcgggatgttctgatgccactgtattgatacgtttcacagccggaagaatacctaatgctttacgatgagctcgtacggccagattctctttttccatgttgccattggatttcagtacgaaacgtgcaatctggaagtcggagaaccctaacactttagcttggcgaagtacatcttcgggcagatcctcaatcttattataagtggaaagtttgattttgtagtcaacgatatttttcagtttgcccaagaaccacgggtcaatcttggtcagttcatggatacgttcaatgctgtatccttcttccaatgcagaagcgatggagaagatgcggaggtctgtcgggttagccagttcctcatccagattctcgaatttagtatggtcgttacccacgaaaccgtgcatgccctgaccgatcatacgaagacctttctgaatgatttcctcgaaagaacgtccgatagacatgatttcacctaccgacttcatgctggaaccgatctgacgtgatacaccggcaaattttgttaaatcccaacggggaattttacaaatcaggtaatccaattggggagcttcgtatgctgagttaggagtacccatctcgccaatctggtctaatgtgtagcccaaagcgattttagcggcaacgaatgccaaggggaaaccggtggccttggaagccagtgcggaagaacggctcagacgcgcgtttacttcgatgacacggtagtcgttggtatctgcattgaaagcatattggatgttacattcacccacaatacccaagtgacggatacattttgtagacaattcttgcagcatggtgacttgttcttctgtcagagagcaagtaggagctaccacgatagactcaccggtgtggatacccagcgggtcgaagttttccatgcttgctactgtgaaacaatgatcattagcatcgcggattacttcgaattcaatttctttccaacctttcaatgactcttcaaccaggatctgtttagagaatgcgaatgagctttctgctaatttgatgaaagcttcttcgtccggacagataccgctacccaaaccgcccaatgcgtaagcagagcgtaccataacaggataaccgatttcgcgggcagccttcagagcctcttccatgctttccacagcgtggctcttcggggttttcatcggaatttcatccagcttttttacgaataaatcacggtcttcagtgtacatgatggcttctacggaagtacccagtacttctacaccatatttctttaatgtaccgttcagataaagctcagtaccgcagttcagtgcagtctgaccaccgaaagccaataagataccgtccggttgttctttcttaataatttcttcaacaaagaagggagtaacaggaaggaagtacactttgtcggcaataccttccgaagtttgaatagttgcgatgttaggatttaccaacaccgagtgaatgccttcttcgcgcaatgctttcagcgcttgtgaacctgagtaatcaaactctcctgcctggccgattttgagggcacccgaacccaataccaggactttctttaaatcctttttcattgaaagtttctttttataatagttgttttaatgtcgctaaaatataaaaaaaatgcgtccatcctcgtgagaggactaacgcatttgctttatgtctatattatctttgttcctgtaggatacatagcatctttaaattttgtgcaaagtaactacttatttctaagataacaaaataaatcaggctctttgtcaatgcagattgagataaaaaatgagaaatcatctttcttttgtatatttattcgatattatcagagtcggcgtaacgcaataagaaagaataaccggttttattcgtatctatcagagtaatgtctttcagcctgccgtcttgcaagaaactatagtcgtatgtatagtaagtgtcttctatgatattttcacttcgtttgcctaaaatgcctgccatttgtcccaatgtgtttaccacgtttatataattgggtcgttcgtcaatccattgtgccagcgtgttcaggtcaaggctgtagtcattagcaatggtggatattttgtaatcactgttgtaagttcctcttggtgtggaagtaatagaggtcaggttctttttgttccattggtattcaagcactattccgttattgttactgcttttcagatatccttcattattatatgaataggtgatgggactgtcctgattggaaaatttgcacacatagctgcggccattctctaaagtggtggttatttctactaatggagagttttccgaagagtaattatagcttatgtgtgaattatctccataggaatagtttatagtggttaatggagcattgccacgcacaccggttaggcgtttgtctttgtcataagtaaagtcaaggtcgccttcatagcttatgacatcggtgattttatatactcttattccggtaatgatttttgatggagcagaaggctttttgtcatcgtcatcggaacatgcagcgagaaatgcgcctgcaacagagataaatagagctagtttaatggttggtcttagtttattcataacaattattatatgtgaaatacagattcaaagttaagttattgtgctagaatattcctatctttgcgtaatttttaatataagataatatttaagaggtatgggaaaagaaaaaatcatattgacaggtgaccgtcctaccggaaggttgcatatcggtcattacgtaggttcattgaaacgccgggtggaacttcagaactccggattgtatgataagacttttatttttatagcagacgcacaggctttgactgataatattgataatcctgaaaaggttcgccagaatgttattgaagtggcacttgactatatggctgtcggcttggacccgactaagtctactatattcattcagtcccagattcctgaactttgtgagctgactttctattatatggatttggttaccgtatctcgtctgcaacgtaaccctacggtgaaaacagaaatacagatgcgtaatttcgagactagtattcctgtaggttttttcacttatcctattagtcaggcagccgatatcacggcattcagggctacaaccgtgccggtgggtgaagatcaggaaccaatgattgagcagacgcgtgaaatcgtccgtcggttcaatcatatttatggtgatacgctggtagaaccggaaatcctgttgcctgacaatgctgcttgtctgcggttgccgggtacggacggaaaggcaaaaatgagtaaatcgttgggcaactgcatttatctctccgatactgccgatgaagtggaaaagaaagtgaagggtatgtacactgacccgacccatatcaaagtatccgacccgggtaaacttgagggtaatactgtctttacttatttggatgctttctgtaaacctgagcattttgaacgttatttatctgattatcctaacctggatgaattgaaagcacattatacgcgtggcggtttgggggatatgaaggtgaagaaattcctggcagctatcatgcaggaggaactgactcccattcgtgaacgccgcaaagagtttgaaaaggatattcctgctatttatgagatgttgcgtagaggatgtgaaacagctcgtgcaactgcggcagaaacattggatgatgtacgcaaagcgatgaagataaattatttcgatgatgcggaactgattgctgaacaagctaagcgtttcggacaagaataaaaaagtgtcttttatatatatatggagtaaagcccgcaattcttatcttgaaaaggttgtgggctttactttttttatttcttgttaatcagtttgttagctgctttattgaaaaataaatgaaaaaataataggagaaaagtttgcagttatcaaaaaaaaccatacctttgcaacgcttttgaaaacaagaggcaacgggcgtttagctcagctggttcagagcatctgccttacaagcagagggtcggcggttcgaatccgtcaacgcccactccatcttcacctcttgtttttatataaaagcaaccttcgggcgtttagctcagctggttcagagcatctgccttacaagcagagggtcggcggttcgaatccgtcaacgcccaccgaagaaa
